(19) United States
(12) Patent Application Publication
(10) Pub. No.: US 2008/0113342 A1
(43) Pub. Date: May 15, 2008

(54) Plant Genome Sequence and Uses Thereof

(75) Inventors: Yongwei CAO, Chesterfield, MO (US); William TIMBERLAKE, Ocate, NM (US)

Correspondence Address: ARNOLD & PORTER, LLP, 555 TWELFTH STREET, N.W., ATTN: IP DOCKETING, WASHINGTON, DC, 20004, UNITED STATES, 202-942-5000, IP_DOCKETING@APORTER.COM

(73) Assignee: Monsanto Technology LLC, St. Louis, MO (US)

(21) Appl. No.: 09/819,091

(22) Filed: Feb. 16, 2000

Related U.S. Application Data
Application No. 09/819,091 is a continuation-in-part of application No. 09/443,025, filed on Nov. 12, 1999, now abandoned.
(60) Provisional application No. 60/108,420, filed on Nov. 16, 1998.
(60) Provisional application No. 60/120,645, filed on Feb. 18, 1999.

(51) Int. Cl. C07K 14/415; C12Q 1/68

(52) U.S. Cl. 435/6; 530/370

(57) ABSTRACT

The present invention is in the field of plant biochemistry and genetics. More specifically the invention relates to nucleic acid sequences from plant cells, in particular, genomic DNA sequences from Arabidopsis thaliana plants. The invention encompasses nucleic acid molecules present in non-coding regions as well as nucleic acid molecules that encode proteins and fragments of proteins. In addition, the invention also encompasses proteins and fragments of proteins so encoded and antibodies capable of binding these proteins or fragments. The invention also relates to methods of using the nucleic acid molecules, proteins and fragments of proteins, and antibodies, for example for genome mapping, gene identification and analysis, plant breeding, preparation of constructs for use in plant gene expression, and transgenic plants.

[0001] This application claims priority under 35 U.S.C. §119(e) of U.S. Provisional Applications Nos. 60/108,420, filed Nov. 16, 1998; and 60/120,645, filed Feb. 18, 1999; and under 35 U.S.C. §120 of U.S. application Ser. No. 09/443,025 filed Nov. 12, 1999, the disclosures of which applications are incorporated herein by reference in their entirety.

### FIELD OF THE INVENTION

[0002] The present invention is in the field of plant biochemistry and genetics. More specifically the invention relates to nucleic acid sequences from plant cells, in particular, genomic DNA sequences from Arabidopsis thaliana plants. The invention encompasses nucleic acid molecules present in non-coding regions as well as nucleic acid molecules that encode proteins and fragments of proteins. In addition, the invention also encompasses proteins and fragments of proteins so encoded and antibodies capable of binding these proteins or fragments. The invention also relates to methods of using the nucleic acid molecules, proteins and fragments of proteins, and antibodies, for example for genome mapping, gene identification and analysis, plant breeding, preparation of constructs for use in plant gene expression, and transgenic plants.

### BACKGROUND OF THE INVENTION

I. Arabidopsis thaliana

[0003] Arabidopsis thaliana (Arabidopsis) belongs to the Brassicaceae plant family—a commercially important plant family. The identification in Arabidopsis of biological agents such as plant promoters, open reading frames, plant gene intron regions, plant gene intron/exon junctions, regulatory elements, genetic and physical markers, and proteins is important in the development of nutritionally enhanced or agriculturally enhanced crops. Such agents are useful in, for example, marker development, genetic mapping or linkage analysis, marker assisted breeding, physical genome mapping, transgenic crop production, crop monitoring diagnostics, antibody production and gene modification. Such agents can also have pharmaceutical or nutriceutical applications.

[0004] Arabidopsis is a small plant in the mustard family and is widely used as a model organism for basic and applied research in the biology of flowering plants. Arabidopsis is a model system for plant genomic research in part due to its small and well characterized genome, which has been estimated to be comprised of approximately 20,000 to 25,000 genes. The genome is estimated to have a haploid content of around 100 Mb which is present on five chromosomes. Reported partial sequence analysis has provided information on genome features such as gene density and gene structure (Settles and Byrne, Genome Research 8:83-85 (1998), the entirety of which is herein incorporated by reference). Based on reports from the European Union Sequencing Consortium, the average gene density is one gene every approximately 4.8 kb.

[0005] Other important characteristics that make Arabidopsis a useful test system include its rapid life-cycle, small size, which allows for controlled growth in restricted space, its prolific seed production, the availability of characterized mutants and the existence of a reliable transformation system.

[0006] The value derived from the genome sequence information of Arabidopsis is not limited to Arabidopsis genetics and biochemistry. Arabidopsis belongs to the same plant family, Brassicaceae, as oilseed Brassica varieties which are a source of edible and industrial vegetable oils. A number of important food crop species, are also members of this plant family, including species from Brassica (cabbage, cauliflower, broccoli, kohlrabi, turnips, Brussels sprouts), Raphanus (radish) and Rorippa (watercress). Other commercially relevant Brassicaceae products include condiments from Brassica (mustard) and Armoracia (horse-radish), and ornamentals from about 50 genera, including Arabis, Erysimum (Cheiranthus), Hesperis, Iberis, Lobularia, Lunaria and Matthiola. Agents and genome sequences of Arabidopsis will find particular applications in these closely related plant species by the discovery of syntenic relationships that can be used to identify regions of interest for genetic modification of valuable crop species. Moreover, Arabidopsis exhibits some degree of conserved gene order with the genomes of maize and rice.

II. Sequence Comparisons

[0007] Genome sequence information from Arabidopsis allow comparisons of Arabidopsis sequences with other Arabidopsis sequences as well as with those of other flowering plant genome sequences, particularly crop plant species and also with genome sequences and gene sequences from other organisms, including bacteria, humans and yeast. Such information provides valuable insights into the translation of plant genetic information into a flowering plant and also reveals genetic differences involved in the differentiation of the plant kingdom. In addition, genome sequencing and mapping provides increased opportunities for identification and isolation of agents associated with plant traits, as well as insight into mechanisms of genome interactions.

[0008] A characteristic feature of a DNA sequence is that it can be compared with other DNA sequences. Sequence comparisons can be undertaken by determining the similarity of the test or query sequence with sequences in publicly available or propriety databases (“similarity analysis”) or by searching for certain motifs (“intrinsic sequence analysis”) (e.g., cis elements) (Coulson, Trends in Biotechnology 12:76-80 (1994), the entirety of which is herein incorporated by reference; Birren et al., Genome Analysis 1:543-559 (1997), the entirety of which is herein incorporated by reference).

[0009] Similarity analysis includes database search and alignment. Examples of public databases include the DNA Database of Japan (DDBJ) (http://www.ddbj.nig.ac.jp/); Genebank (http://www.ncbi.nlm.nih.gov/web/Genbank/Index.htlm); and the European Molecular Biology Laboratory Nucleic Acid Sequence Database (EMBL) (http://www.ebi.ac.uk/ebi_docs/embl_db.html). A number of different search algorithms have been developed, one example of which are the suite of programs referred to as BLAST programs. There are five implementations of BLAST, three designed for nucleotide sequences queries (BLASTN, BLASTX, and TBLASTX) and two designed for protein sequence queries (BLASTP and TBLASTN) (Coulson, Trends in Biotechnology 12:76-80 (1994); Birren et al., Genome Analysis 1:543-559 (1997)).

[0010] BLASTN takes a nucleotide sequence (the query sequence) and its reverse complement and searches them against a nucleotide sequence database. BLASTN was designed for speed, not maximum sensitivity, and may not find distantly related coding sequences. BLASTX takes a nucleotide sequence, translates it in three forward reading frames and three reverse complement reading frames, and then compares the six translations against a protein sequence database. BLASTX is useful for sensitive analysis of preliminary (single-pass) sequence data and is tolerant of sequencing errors (Gish and States, Nature Genetics 3:266-272 (1993), the entirety of which is herein incorporated by reference). BLASTN and BLASTX may be used in concert for analyzing sequence data (Coulson, Trends in Biotechnology 12:76-80 (1994); Birren et al., Genome Analysis 1:543-559 (1997).

[0011] Given a coding nucleotide sequence and the protein it encodes, it is often preferable to use the protein as the query sequence to search a database because of the greatly increased sensitivity to detect more subtle relationships. This is due to the larger alphabet of proteins (20 amino acids) compared with the alphabet of nucleic acid sequences (4 bases), where it is far easier to obtain a match by chance. In addition, with nucleotide alignments, only a match (positive score) or a mismatch (negative score) is obtained, but with proteins, the presence of conservative amino acid substitutions can be taken into account. Here, a mismatch may yield a positive score if the non-identical residue has physical/chemical properties similar to the one it replaced. Various scoring matrices are used to supply the substitution scores of all possible amino acid pairs. A general purpose scoring system is the BLOSUM62 matrix (Henikoff and Henikoff, Proteins 17:49-61 (1993), the entirety of which is herein incorporated by reference), which is currently the default choice for BLAST programs. BLOSUM62 is tailored for alignments of moderately diverged sequences and thus may not yield the best results under all conditions. Altschul, J. Mol. Biol. 36:290-300 (1993), the entirety of which is herein incorporated by reference, uses a combination of three matrices to cover all contingencies. This may improve sensitivity, but at the expense of slower searches. In practice, a single BLOSUM62 matrix is often used but others (PAM40 and PAM250) may be attempted when additional analysis is necessary. Low PAM matrices are directed at detecting very strong but localized sequence similarities, whereas high PAM matrices are directed at detecting long but weak alignments between very distantly related sequences.

[0012] Homologues in other organisms are available that can be used for comparative sequence analysis. Multiple alignments are performed to study similarities and differences in a group of related sequences. CLUSTAL W is a multiple sequence alignment package available that performs progressive multiple sequence alignments based on the method of Feng and Doolittle, J. Mol. Evol. 25:351-360 (1987), the entirety of which is herein incorporated by reference. Each pair of sequences is aligned and the distance between each pair is calculated; from this distance matrix, a guide tree is calculated, and all of the sequences are progressively aligned based on this tree. A feature of the program is its sensitivity to the effect of gaps on the alignment; gap penalties are varied to encourage the insertion of gaps in probable loop regions instead of in the middle of structured regions. Users can specify gap penalties, choose between a number of scoring matrices, or supply their own scoring matrix for both the pairwise alignments and the multiple alignments. CLUSTAL W for UNIX and VMS systems is available at: ftp.ebi.ac.uk. Another program is MACAW (Schuler et al., Proteins, Struct. Func. Genet, 9:180-190 (1991), the entirety of which is herein incorporated by reference, for which both Macintosh and Microsoft Windows versions are available. MACAW uses a graphical interface, provides a choice of several alignment algorithms, and is available by anonymous ftp at: ncbi.nlm.nih.gov (directory/pub/macaw).

[0013] Sequence motifs are derived from multiple alignments and can be used to examine individual sequences or an entire database for subtle patterns. With motifs, it is sometimes possible to detect distant relationships that may not be demonstrable based on comparisons of primary sequences alone. Currently, the largest collection of sequence motifs in the world is PROSITE (Bairoch and Bucher, Nucleic Acid Research 22:3583-3589 (1994), the entirety of which is herein incorporated by reference). PROSITE may be accessed via either the ExPASy server on the World Wide Web or anonymous ftp site. Many commercial sequence analysis packages also provide search programs that use PROSITE data.

[0014] A resource for searching protein motifs is the BLOCKS E-mail server developed by S. Henikoff, Trends Biochem Sci. 18:267-268 (1993), the entirety of which is herein incorporated by reference; Henikoff and Henikoff, Nucleic Acid Research 19:6565-6572 (1991), the entirety of which is herein incorporated by reference; Henikoff and Henikoff, Proteins 17:49-61 (1993). BLOCKS searches a protein or nucleotide sequence against a database of protein motifs or “blocks.” Blocks are defined as short, ungapped multiple alignments that represent highly conserved protein patterns. The blocks themselves are derived from entries in PROSITE as well as other sources. Either a protein or nucleotide query can be submitted to the BLOCKS server; if a nucleotide sequence is submitted, the sequence is translated in all six reading frames and motifs are sought in these conceptual translations. Once the search is completed, the server will return a ranked list of significant matches, along with an alignment of the query sequence to the matched BLOCKS entries.

[0015] Conserved protein domains can be represented by two-dimensional matrices, which measure either the frequency or probability of the occurrences of each amino acid residue and deletions or insertions in each position of the domain. This type of model, when used to search against protein databases, is sensitive and usually yields more accurate results than simple motif searches. Two popular implementations of this approach are profile searches (such as GCG program ProfileSearch) and Hidden Markov Models (HMMs) (Krough et al., J. Mol. Biol. 235:1501-1531 (1994); Eddy, Current Opinion in Structural Biology 6:361-365 (1996), both of which are herein incorporated by reference in their entirety). In both cases, a large number of common protein domains have been converted into profiles, as present in the PROSITE library, or HHM models, as in the Pfam protein domain library (Sonnhammer et al., Proteins 28:405-420 (1997), the entirety of which is herein incorporated by reference). Pfam contains more than 500 HMM models for enzymes, transcription factors, signal transduction molecules, and structural proteins. Protein databases can be queried with these profiles or HMM models, which will identify proteins containing the domain of interest. For example, HMMSW or HMMFS, two programs in a public domain package called HMMBR (Sonnhammer et al., Proteins 28:405-420 (1997)) can be used.

[0016] PROSITE and BLOCKS represent collected families of protein motifs. Thus, searching these databases entails submitting a single sequence to determine whether or not that sequence is similar to the members of an established family. Programs working in the opposite direction compare a collection of sequences with individual entries in the protein databases. An example of such a program is the Motif Search Tool, or MoST (Tatusov et al., Proc. Natl. Acad. Sci. (U.S.A.) 91:12091-12095 (1994), the entirety of which is herein incorporated by reference). On the basis of an aligned set of input sequences, a weight matrix is calculated by using one of four methods (selected by the user); a weight matrix is simply a representation, position by position in an alignment, of how likely a particular amino acid will appear. The calculated weight matrix is then used to search the databases. To increase sensitivity, newly found sequences are added to the original data set, the weight matrix is recalculated, and the search is performed again. This procedure continues until no new sequences are found.

III. Contig Assembly

[0017] A characteristic feature of a large scale shotgun sequencing project is that the sequence data can be processed and assembled into contiguous sequences (contigs), which represent a reconstruction of the original genome sequence from the cloned fragments. Programs are available in the public domain that can analyze the sequence output and assemble the sequences into larger sequence regions representing contiguous sequences of the target genome. Examples of such programs can be found at, for example, http://genome.wustl.edu/gsc, http://www.sanger.ac.uk, and http://www.mbt.washington.edu. An example of sequence reading program is Phred (http://www.mbt.washington.edu). Phred reads DNA sequencer trace data, calls bases, assigns quality values to the bases, and writes the base calls and quality values to output files.

[0018] The process of assembling DNA sequence fragments generally involves three phases; the overlap phase, the layout phase and the multi-alignment, or consensus, phase. In the overlap phase, each fragment is compared against every other fragment to determine if they share a common subsequence, an indication that they were potentially sampled from overlapping stretches of the original DNA strand. Pairs of fragments are compared in two ways; 1) with both fragments in the same relative orientation, and 2) with one of the fragments having been reverse complemented. In the layout phase, a series of alternate assemblies or layouts of the fragments based on the pairwise overlaps is generated. A layout specifies the relative locations and orientations of the fragments with respect to each other and is typically visualized as an arrangement of overlapping directed lines, one for each fragment. The general criterion for the layout phase is to produce plausible assemblies of maximum likelihood. In this manner, it can be determined if there is more than one way to put the pieces together and if different solutions appear equally plausible. In such a case, one would return to the lab and obtain additional information to resolve the ambiguity. The multi-alignment, or consensus, phase uses more information than just the pairwise alignments in the layout. The sequences of all the fragments in a layout are simultaneously aligned, giving a final set of contigs representing regions of the target genome. An example of an assembly program is PHRAP, which can be found at http://chimera.biotech.washington.edu/UWGC/tools/phrap.htm.

IV. Gene Mapping and Marker Assisted Introgression of Plant Traits

[0019] Genome sequence information from Arabidopsis provides markers that will assist in the development of improved plants. Marker assisted introgression of traits into plants have been reported. An initial step in that process is the localization of the trait by gene mapping. Gene mapping is the process of determining a gene's position relative to other genes and genetic markers through linkage analysis. The basic principle for linkage mapping is that the closer together two genes are on the chromosome, the more likely they are to be inherited together (Rothwell, Understanding Genetics. 4^{th} Ed. Oxford University Press, New York, p. 703 (1988), the entirety of which is herein incorporated by reference). Briefly, a cross is made between two genetically compatible but divergent parents relative to traits under study. Genetic markers are then used to follow the segregation of traits under study in the progeny from the cross (often a backcross, F₂, or recombinant inbred population).

[0020] Linkage analysis is based on the level at which markers and genes are co-inherited (Rothwell, Understanding Genetics. 4^{th} Ed. Oxford University Press, New York, p. 703 (1988)). Statistical tests like chi-square analysis can be used to test the randomness of segregation or linkage (Kochert, The Rockefeller Foundation International Program on Rice Biotechnology, University of Georgia Athens, Ga., pp. 1-14 (1989), the entirety of which is herein incorporated by reference). In linkage mapping, the proportion of recombinant individuals out of the total mapping population provides the information for determining the genetic distance between the loci (Young, Encyclopedia of Agricultural Science, Vol. 3, pp. 275-282 (1994), the entirety of which is herein incorporated by reference).

[0021] Classical mapping studies utilize easily observable, visible traits instead of molecular markers. These visible traits are also known as naked eye polymorphisms. These traits can be morphological like plant height, fruit size, shape and color or physiological like disease response, photoperiod sensitivity or crop maturity. Visible traits are useful and are still in use because they represent actual phenotypes and are easy to score without any specialized lab equipment. By contrast, the other types of genetic markers are arbitrary loci for use in linkage mapping and often not associated to specific plant phenotypes (Young, Encyclopedia of Agricultural Science, Vol. 3, pp. 275-282 (1994). Many morphological markers cause such large effects on phenotype that they are undesirable in breeding programs. Many other visible traits have the disadvantage of being developmentally regulated (i.e., expressed only certain stages; or at specific tissue and organs). Oftentimes, visible traits mask the effects of linked minor genes making it nearly impossible to identify desirable linkages for selection (Tanksely et al., Biotech. 7:257-264 (1989), the entirety of which is herein incorporated by reference).

[0022] Although a number of important agronomic characters are controlled by loci having major effects on phenotype, many economically important traits, such as yield and some forms of disease resistance, are quantitative in nature. This type of phenotypic variation in a trait is typically characterized by continuous, normal distribution of phenotypic values in a particular population (polygenic traits) (Beckmann and Soller, Oxford Surveys of Plant Molecular Biology, Miffen. (ed.), Vol. 3, Oxford University Press, UK., pp. 196-250 (1986), the entirety of which is herein incorporated by reference). Loci contributing to such genetic variation are often termed, minor genes, as opposed to major genes with large effects that follow a Mendelian pattern of inheritance. Polygenic traits are also predicted to follow a Mendelian type of inheritance, however the contribution of each locus is expressed as an increase or decrease in the final trait value.

[0023] The advent of DNA markers, such as restriction fragment length polymorphic markers (RFLPs), microsatellite markers, single nucleotide polymorphic markers (SNPs), and random amplified polymorphic markers (RAPDs), allow the resolution of complex, multigenic traits into their individual Mendelian components (Paterson et al., Nature 335:721-726 (1988), the entirety of which is herein incorporated by reference). A number of applications of RFLPs and other markers have been suggested for plant breeding. Among the potential applications for RFLPs and other markers in plant breeding include: varietal identification (Soller and Beckmann, Theor. Appl. Genet. 67:25-33 (1983), the entirety of which is herein incorporated by reference; Tanksley et al., Biotech. 7:257-264 (1989), QTL mapping (Edwards et al., Genetics 116:113-115 (1987), the entirety of which is herein incorporated by reference); Nienhuis et al., Crop Sci. 27:797-803 (1987); Osborn et al., Theor. Appl. Genet. 73:350-356 (1987); Romero-Severson et al., Use of RFLPs In Analysis Of Quantitative Trait Loci In Maize, In Helentjaris and Burr (eds.), pp. 97-102 (1989), the entirety of which is herein incorporated by reference; Young et al., Genetics 120:579-585 (1988), the entirety of which is herein incorporated by reference; Martin et al., Science 243:1725-1728 (1989), the entirety of which is herein incorporated by reference; Sarfatti et al., Theor. Appl. Genet. 78:22-26 (1989), the entirety of which is herein incorporated by reference; Tanksley et al., Biotech. 7:257-264 (1989); Barone et al., Mol. Gen. Genet. 224:177-182 (1990), the entirety of which is herein incorporated by reference; Jung et al., Theor. Appl. Genet. 79:663-672 (1990), the entirety of which is herein incorporated by reference; Keim et al., Genetics 126:735-742 (1990), the entirety of which is herein incorporated by reference; Keim et al., Theor. Appl. Genet. 79:465-369 (1990), the entirety of which is herein incorporated by reference; Paterson et al., Genetics 124:735-742 (1990), the entirety of which is herein incorporated by reference; Martin et al., Proc. Natl. Acad. Sci. (U.S.A.) 88:2336-2340 (1991), the entirety of which is herein incorporated by reference; Messeguer et al., Theor. Appl. Genet. 82:529-536 (1991), the entirety of which is herein incorporated by reference; Michelmore et al., Proc. Natl. Acad. Sci. (U.S.A.) 88:9828-9832 (1991), the entirety of which is herein incorporated by reference; Ottaviano et al., Theor. Appl. Genet. 81:713-719 (1991), the entirety of which is herein incorporated by reference; Yu et al., Theor. Appl. Genet. 81:471-476 (1991), the entirety of which is herein incorporated by reference; Diers et al., Crop Sci. 32:377-383 (1992), the entirety of which is herein incorporated by reference; Theor. Appl. Genet. 83:608-612 (1992), the entirety of which is herein incorporated by reference; J. Plant Nut. 15:2127-2136 (1992), the entirety of which is herein incorporated by reference; Doebley et al., Proc. Natl. Acad. Sci. (U.S.A.) 87:9888-9892 (1990), the entirety of which is herein incorporated by reference, screening genetic resource strains for useful quantitative trait alleles and introgression of these alleles into commercial varieties (Beckmann and Soller, Theor. Appl. Genet. 67:35-43 (1983), the entirety of which is herein incorporated by reference; marker-assisted selection (Tanksley et al., Biotech. 7:257-264 (1989) and map-based cloning (Tanksley et al., Biotech. 7:257-264 (1989). In addition, DNA markers can be used to obtain information about: (1) the number, effect, and chromosomal location of each gene affecting a trait; (2) effects of multiple copies of individual genes (gene dosage); (3) interaction between/among genes controlling a trait (epistasis); (4) whether individual genes affect more than one trait (pleiotropy); and (5) stability of gene function across environments (G×E interactions).

### SUMMARY OF THE INVENTION

[0024] The present invention provides a substantially purified nucleic acid molecule, the nucleic acid molecule capable of specifically hybridizing to a second nucleic acid molecule having a nucleic acid sequence selected from the group consisting of SEQ ID NO: 1 through SEQ ID NO: 51,470 or complements thereof or fragments of either.

[0025] The present invention also provides a substantially purified nucleic acid molecule encoding an Arabidopsis protein or fragment thereof, wherein the Arabidopsis protein or fragment thereof is encoded by a nucleic acid sequence selected from the group consisting of SEQ ID NO: 1 through ID NO: 27,741 or complements thereof or fragments of either.

[0026] The present invention also provides a substantially purified protein or fragment thereof encoded by a first nucleic acid molecule which specifically hybridizes to a second nucleic acid molecule, the second nucleic acid molecule having a nucleic acid sequence selected from the group consisting of SEQ ID NO: 1 through SEQ ID NO: 27,741 or complements thereof.

[0027] The present invention also provides a substantially purified protein or fragment thereof encoded by a nucleic acid sequence selected from the group consisting of SEQ ID NO: 1 through SEQ ID NO: 27,741 or complements thereof or fragments of either.

[0028] The present invention also provides a substantially purified antibody or fragment thereof, the antibody or fragment thereof capable of specifically binding to the protein or fragment thereof encoded by a first nucleic acid molecule which specifically hybridizes to a second nucleic acid molecule, the second nucleic acid molecule having a nucleic acid sequence selected from the group consisting of SEQ ID NO: 1 through SEQ ID NO: 27,741 or complements thereof or fragments of either.

[0029] The present invention also provides a transformed plant having a nucleic acid molecule which comprises: (A) an exogenous promoter region which functions in a plant cell to cause the production of an mRNA molecule; which is linked to (B) a structural nucleic acid molecule, wherein the structural nucleic acid molecule is selected from the group consisting of a protein or fragment thereof encoding sequence located within SEQ ID NO: 1 through SEQ ID NO: 27,741 or complements thereof; which is linked to (C) a 3′ non-translated sequence that functions in a plant cell to cause termination of transcription and addition of polyadenylated ribonucleotides to a 3′ end of the mRNA molecule.

[0030] The present invention also provides a transformed plant having a nucleic acid molecule which comprises: (A) an exogenous promoter region which functions in a plant cell to cause the production of an mRNA molecule wherein the promoter nucleic acid molecule is selected from the group consisting of SEQ ID NO: 1 through SEQ ID NO: 51,470 or complements thereof or fragments of either; which is linked to (B) a structural nucleic acid molecule encoding a protein or fragment thereof; which is linked to (C) a 3′ non-translated sequence that functions in a plant cell to cause termination of transcription and addition of polyadenylated ribonucleotides to a 3′ end of the mRNA molecule.

[0031] The present invention also provides a transformed plant having a nucleic acid molecule which comprises: (A) an exogenous promoter region which functions in a plant cell to cause the production of an mRNA molecule; which is linked to (B) a transcribed nucleic acid molecule with a transcribed strand and a non-transcribed strand, wherein the transcribed strand is complementary to a nucleic acid molecule having a nucleic acid sequence selected from the group consisting of SEQ ID NO: 1 through SEQ ID NO: 51,470 or complements thereof and the transcribed strand is complementary to an endogenous mRNA molecule; which is linked to (C) a 3′ non-translated sequence that functions in plant cells to cause termination of transcription and addition of polyadenylated ribonucleotides to a 3′ end of the mRNA molecule.

[0032] The present invention also provides a transformed plant having a nucleic acid molecule which comprises: (A) an exogenous promoter region which functions in a plant cell to cause the production of an mRNA molecule wherein the promoter nucleic acid molecule is selected from the group consisting of SEQ ID NO: 1 through SEQ ID NO: 51,470 or complements thereof; which is linked to (B) a transcribed nucleic acid molecule with a transcribed strand and a non-transcribed strand, wherein the transcribed strand is complementary to an endogenous mRNA molecule; which is linked to (C) a 3′ non-translated sequence that functions in plant cells to cause termination of transcription and addition of polyadenylated ribonucleotides to a 3′ end of the mRNA molecule.

[0033] The present invention also provides a computer readable medium having recorded thereon one or more of the nucleotide sequences depicted in SEQ ID NO: 1 through SEQ ID NO: 51,470 or complements thereof.

[0034] The present invention also provides a computer readable medium having recorded thereon one or more nucleic acid molecules encoding an Arabidopsis protein or fragment thereof, wherein the Arabidopsis protein or fragment thereof is encoded by a nucleic acid sequence selected from the group consisting of SEQ ID NO: 1 through SEQ ID NO: 51,470 or complements thereof or fragments of either.

[0035] The present invention also provides a method of introgressing a trait into a plant comprising using a nucleic acid marker for marker assisted selection of the plant, the nucleic acid marker complementary to a nucleic acid sequence selected from the group consisting of SEQ ID NO: 1 through SEQ ID NO: 51,470 or complements thereof, and introgressing the trait into a plant.

[0036] The present invention also provides a method for screening for a trait comprising interrogating genomic DNA for the presence or absence of a marker molecule that is genetically linked to a nucleic acid sequence complementary to a nucleic acid sequence selected from the group consisting of SEQ ID NO: 1 through SEQ ID NO: 51,470 or complements thereof; and detecting the presence or absence of the marker.

[0037] The present invention also provides a method for determining the likelihood of the presence or absence of a trait in a plant comprising the steps of: (A) obtaining genomic DNA from the plant; (B) detecting a marker nucleic acid molecule; wherein the marker nucleic acid molecule specifically hybridizes with a nucleic acid sequence that is genetically linked to a nucleic acid sequence complementary to a nucleic acid sequence selected from the group consisting of SEQ ID NO: 1 through SEQ ID NO: 51,470 or complements thereof; (C) determining the level, presence or absence of the marker nucleic acid molecule, wherein the level, presence or absence of the marker nucleic acid molecule is indicative of the likely presence in the plant of the trait.

[0038] The present invention also provides a method for determining a genomic polymorphism in a plant that is predictive of a trait comprising the steps: (A) incubating a marker nucleic acid molecule, under conditions permitting nucleic acid hybridization, and a complementary nucleic acid molecule obtained from the plant, the marker nucleic acid molecule having a nucleic acid sequence selected from the group consisting of SEQ ID NO: 1 through SEQ ID NO: 51,470 or complements thereof or fragments of either; (B) permitting hybridization between the marker nucleic acid molecule and the complementary nucleic acid molecule obtained from the plant; and (C) detecting the presence of the polymorphism.

[0039] The present invention also provides a method of determining an association between a polymorphism and a plant trait comprising: (A) hybridizing a nucleic acid molecule specific for the polymorphism to genetic material of a plant, wherein the nucleic acid molecule comprises a nucleic acid sequence selected from the group consisting of SEQ ID NO: 1 through SEQ ID NO: 51,470 or complements thereof or fragments of either; and (B) calculating the degree of association between the polymorphism and the plant trait.

### DETAILED DESCRIPTION OF THE INVENTION

[0040] Agents of the Invention:

[0041] (a) Nucleic Acid Molecules

[0042] Agents of the present invention include plant nucleic acid molecules and more specifically include Arabidopsis nucleic acid molecules, and more specifically include Arabidopsis thaliana, Columbia nucleic acid molecules. A subset of the nucleic acid molecules of the present invention includes nucleic acid molecules that are marker molecules. Another subset of the nucleic molecules of the present invention includes nucleic acid molecules that are promoters and/or regulatory elements. Another subset of the nucleic acid molecules of the present invention includes nucleic acid molecules that encode a gene or fragment thereof. Another subset of the nucleic acid molecules of the present invention encodes proteins or fragments of proteins. In a preferred embodiment the nucleic acid molecules of the present invention are derived from Arabidopsis and in an even more preferred embodiment the nucleic acid molecules of the present invention are derived from Arabidopsis thaliana, Columbia.

[0043] Fragment nucleic acid molecules may encode significant portion(s) of, or indeed most of, these nucleic acid molecules. For example, a fragment nucleic acid molecule can encode an Arabidopsis protein or fragment thereof. Alternatively, the fragments may comprise smaller oligonucleotides (having from about 15 to about 250 nucleotide residues, and more preferably, about 15 to about 30 nucleotide residues).

[0044] As used herein, an agent, be it a naturally occurring molecule or otherwise may be “substantially purified,” if desired, referring to a molecule separated from substantially all other molecules normally associated with it in its native state. More preferably a substantially purified molecule is the predominant species present in a preparation. A substantially purified molecule may be greater than 60% free, preferably 75% free, more preferably 90% free, and most preferably 95% free from the other molecules (exclusive of solvent) present in the natural mixture. The term “substantially purified” is not intended to encompass molecules present in their native state.

[0045] The agents of the present invention will preferably be “biologically active” with respect to either a structural attribute, such as the capacity of a nucleic acid to hybridize to another nucleic acid molecule, or the ability of a protein to be bound by an antibody (or to compete with another molecule for such binding). Alternatively, such an attribute may be catalytic, and thus involve the capacity of the agent to mediate a chemical reaction or response.

[0046] The agents of the present invention may also be recombinant. As used herein, the term recombinant means any agent (e.g., DNA, peptide etc.), that is, or results, however indirect, from human manipulation of a nucleic acid molecule.

[0047] It is understood that the agents of the present invention may be labeled with reagents that facilitate detection of the agent (e.g., fluorescent labels, Prober et al., Science 238:336-340 (1987); Albarella et al., EP 144914, chemical labels, Sheldon et al., U.S. Pat. No. 4,582,789; Albarella et al., U.S. Pat. No. 4,563,417, modified bases, Miyoshi et al., EP 119448, all of which are hereby incorporated by reference in their entirety).

[0048] It is further understood, that the present invention provides recombinant bacterial, viral, microbial, insect, fungal and plant cells comprising the agents of the present invention.

[0049] Nucleic acid molecules or fragments thereof of the present invention are capable of specifically hybridizing to other nucleic acid molecules under certain circumstances. As used herein, two nucleic acid molecules are said to be capable of specifically hybridizing to one another if the two molecules are capable of forming an anti-parallel, double-stranded nucleic acid structure. A nucleic acid molecule is said to be the “complement” of another nucleic acid molecule if they exhibit complete complementarity. As used herein, molecules are said to exhibit “complete complementarity” when every nucleotide of one of the molecules is complementary to a nucleotide of the other. Two molecules are said to be “minimally complementary” if they can hybridize to one another with sufficient stability to permit them to remain annealed to one another under at least conventional “low-stringency” conditions. Similarly, the molecules are said to be “complementary” if they can hybridize to one another with sufficient stability to permit them to remain annealed to one another under conventional “high-stringency” conditions. Conventional stringency conditions are described by Sambrook et al., Molecular Cloning, A Laboratory Manual, 2nd Ed., Cold Spring Harbor Press, Cold Spring Harbor, N.Y. (1989), and by Haymes et al. Nucleic Acid Hybridization, A Practical Approach, IRL Press, Washington, D.C. (1985), the entirety of which is herein incorporated by reference. Departures from complete complementarity are therefore permissible, as long as such departures do not completely preclude the capacity of the molecules to form a double-stranded structure. Thus, in order for a nucleic acid molecule to serve as a primer or probe it need only be sufficiently complementary in sequence to be able to form a stable double-stranded structure under the particular solvent and salt concentrations employed.

[0050] Appropriate stringency conditions which promote DNA hybridization, for example, 6.0× sodium chloride/sodium citrate (SSC) at about 45° C., followed by a wash of 2.0×SSC at 50° C., are known to those skilled in the art or can be found in Current Protocols in Molecular Biology, John Wiley & Sons, N.Y. (1989), 6.3.1-6.3.6. For example, the salt concentration in the wash step can be selected from a low stringency of about 2.0×SSC at 50° C. to a high stringency of about 0.2×SSC at 50° C. In addition, the temperature in the wash step can be increased from low stringency conditions at room temperature, about 22° C., to high stringency conditions at about 65° C. Both temperature and salt may be varied, or either the temperature or the salt concentration may be held constant while the other variable is changed.

[0051] In a preferred embodiment, a nucleic acid of the present invention will specifically hybridize to one or more of the nucleic acid molecules set forth in SEQ ID NO: 1 through SEQ ID NO: 51,470 or complements thereof under moderately stringent conditions, for example at about 2.0×SSC and about 65° C.

[0052] In a particularly preferred embodiment, a nucleic acid of the present invention will include those nucleic acid molecules that specifically hybridize to one or more of the nucleic acid molecules set forth in SEQ ID NO: 1 through SEQ ID NO: 51,470 or complements thereof under high stringency conditions.

[0053] In one aspect of the present invention, the nucleic acid molecules of the present invention have one or more of the nucleic acid sequences set forth in SEQ ID NO: 1 through to SEQ ID NO: 51,470 or complements thereof. In another aspect of the present invention, one or more of the nucleic acid molecules of the present invention share between 100% and 90% sequence identity with one or more of the nucleic acid sequences set forth in SEQ ID NO: 1 through to SEQ ID NO: 51,470 or complements thereof. In a further aspect of the present invention, one or more of the nucleic acid molecules of the present invention share between 100% and 95% sequence identity with one or more of the nucleic acid sequences set forth in SEQ ID NO: 1 through to SEQ ID NO: 51,470 or complements thereof. In a more preferred aspect of the present invention, one or more of the nucleic acid molecules of the present invention share between 100% and 98% sequence identity with one or more of the nucleic acid sequences set forth in SEQ ID NO: 1 through to SEQ ID NO: 51,470 or complements thereof. In an even more preferred aspect of the present invention, one or more of the nucleic acid molecules of the present invention share between 100% and 99% sequence identity with one or more of the sequences set forth in SEQ ID NO: 1 through to SEQ ID NO: 51,470 or complements thereof.

[0054] (i) Nucleic Acid Molecule Markers

[0055] One aspect of the present invention concerns nucleic acid molecules SEQ ID NO: 1 through SEQ ID NO: 51,470 or complements thereof or fragments of either, that contain microsatellites or other markers. Microsatellites, also known as SSRs, typically include 1-6 nucleotide core element within SEQ ID NO: 1 through SEQ ID NO: 51,470 that are tandemly repeated from one to many thousands of times. A different “allele” occurs at an SSR locus as a result of changes in the number of times a core element is repeated, altering the length of the repeat region, (Brown et al., Methods of Genome Analysis in Plants, (ed.) Jauhar, CRC Press, Inc, Boca Raton, Fla., USA; London, England, UK, pp. 147-159, (1996), the entirety of which is herein incorporated by reference).

[0056] SSR loci occur throughout plant genomes, and specific repeat motifs occur at different levels of abundance than those found in animals. The relative frequencies of all SSRs with repeat units of 1-6 nucleotides have been surveyed. The most abundant SSR is AAAAAT followed by Aₙ, AGₙ AAT, AAC, AGC, AAG, AATT, AAAT and AC. On average, 1 SSR is found every 21 and 65 kb in dicots and monocots. Fewer CG nucleotides are found in dicots than in monocots. There is no reported correlation between abundance of SSRs and nuclear DNA content. The abundance of all tri and tetranucleotide SSR combinations jointly have been reported to be equivalent to that of the total di-nucleotide combinations. Mono- di- and tetra-nucleotide repeats are all located in noncoding regions of DNA while 57% of those trinucleotide SSRs containing CG were located within gene coding regions. All repeated trinucleotide SSRs composed entirely of AT are found in noncoding regions, (Brown et al., Methods of Genome Analysis in Plants, ed. Jauhar, CRC Press, Inc, Boca Raton, Fla., USA; London, England, UK, pp. 147-159, (1996).

[0057] Microsatellites can be observed in SEQ NO: 1 to SEQ NO: 51,470 or complements thereof by using the BLASTN program to examine sequences for the presence/absence of microsatellites. In this system, raw sequence data is searched through SSR databases, SSRDB1 and SSRDB2 using the BLAST program. SSRDB1 stores SSR markers collected from publications while the public database contains 692 classes of di-, tri and tetranucleotide repeat markers generated by computer.

[0058] Microsatellites can also be observed by screening the nucleic acid molecules of the present invention by colony or plaque hybridization with a labeled probe containing microsatellite markers; isolating positive clones and sequencing the inserts of the positive clones; suitable primers flanking the microsatellite markers.

[0059] Genetic markers of the present invention include “dominant” or “codominant” markers. “Codominant markers” reveal the presence of two or more alleles (two per diploid individual) at a locus. “Dominant markers” reveal the presence of only a single allele per locus. The presence of the dominant marker phenotype (e.g., a band of DNA) is an indication that one allele is present in either the homozygous or heterozygous condition. The absence of the dominant marker phenotype (e.g., absence of a DNA band) is merely evidence that “some other” undefined allele is present. In the case of populations where individuals are predominantly homozygous and loci are predominately dimorphic, dominant and codominant markers can be equally valuable. As populations become more heterozygous and muti-allelic, codominant markers often become more informative of the genotype than dominant markers.

[0060] Additional markers, such as AFLP markers, RFLP markers, RAPD markers, SNPs, phenotypic markers, isozyme markers can be utilized (Walton, Seed World 22-29 (July, 1993), the entirety of which is herein incorporated by reference; Burow and Blake, Molecular Dissection of Complex Traits, 13-29, Eds. Paterson, CRC Press, New York (1988), the entirety of which is herein incorporated by reference). DNA markers can be developed from nucleic acid molecules using restriction endonucleases, the PCR and/or DNA sequence information. RFLP markers result from single base changes or insertions/deletions. These codominant markers are highly abundant in plant genomes, have a medium level of polymorphism and are developed by a combination of restriction endonuclease digestion and Southern blotting hybridization. CAPS are similarly developed from restriction nuclease digestion but only of specific PCR products. These markers are also codominant, have a medium level of polymorphism and are highly abundant in the genome. The CAPS result from single base changes and insertions/deletions. Another marker type, RAPDs, are developed from DNA amplification with random primers and result from single base changes and insertions/deletions in plant genomes. They are dominant markers with a medium level of polymorphisms and are highly abundant. AFLP markers require using the PCR on a subset of restriction fragments from extended adapter primers. These markers are both dominant and codominant are highly abundant in genomes and exhibit a medium level of polymorphism. SSRs require DNA sequence information. These codominant markers result from repeat length changes, are highly polymorphic, and do not exhibit as high a degree of abundance in the genome as CAPS, AFLPs and RAPDs. SNPs also require DNA sequence information. These codominant markers result from single base substitutions. They are highly abundant and exhibit a medium of polymorphism (Rafalski et al., In: Nonmammalian Genomic Analysis, ed. Birren and Lai, Academic Press, San Diego, Calif., pp. 75-134 (1996), the entirety of which is herein incorporated by reference). Methods to isolate such markers are known in the art.

[0061] (ii) Nucleic Acid Molecules Comprising Regulatory Elements

[0062] Another class of agents of the present invention are nucleic acid molecules having promoter regions or partial promoter regions or regulatory elements, particularly those promoter regions or partial promoter regions or regulatory elements located within SEQ ID NO: 1 through SEQ ID NO: 51,470 or complements thereof. Such promoter regions are typically found upstream of the trinucleotide ATG sequence at the start site of a protein coding region.

[0063] As used herein, a promoter region is a region of a nucleic acid molecule that is capable, when located in cis to a nucleic acid sequence that encodes for a protein or peptide to function in a way that directs expression of one or more mRNAs molecules that encodes for the protein or peptide.

[0064] Promoters of the present invention can include between about 300 bp upstream and about 10 kb upstream of the trinucleotide ATG sequence at the start site of a protein coding region. Promoters of the present invention can preferably include between about 300 bp upstream and about 5 kb upstream of the trinucleotide ATG sequence at the start site of a protein coding region. Promoters of the present invention can more preferably include between about 300 bp upstream and about 2 kb upstream of the trinucleotide ATG sequence at the start site of a protein coding region. Promoters of the present invention can include between about 300 bp upstream and about 1 kb upstream of the trinucleotide ATG sequence at the start site of a protein coding region. While in many circumstances a 300 bp promoter may be sufficient for expression, additional sequences may act to further regulate expression, for example, in response to biochemical, developmental or environmental signals.

[0065] It is also preferred that the promoters of the present invention contain a CAAT and a TATA cis element. Moreover, the promoters of the present invention can contain one or more cis elements in addition to a CAAT and a TATA box.

[0066] By “regulatory element” it is intended a series of nucleotides that determines if, when, and at what level a particular gene is expressed. The regulatory DNA sequences specifically interact with regulatory or other proteins. Many regulatory elements act in cis (“cis elements”) and are believed to affect DNA topology, producing local conformations that selectively allow or restrict access of RNA polymerase to the DNA template or that facilitate selective opening of the double helix at the site of transcriptional initiation. Cis elements occur within, but are not limited to promoters, and promoter modulating sequences (inducible elements). Cis elements can be identified using known cis elements as a target sequence or target motif in the BLAST programs of the present invention.

[0067] Promoters of the present invention include homologues of cis elements known to effect gene regulation that show homology with the nucleic acid molecules of the present invention. These cis elements include, but are not limited to, oxygen responsive cis elements (Cowen et al., J. Biol. Chem. 268:26904-26910 (1993) the entirety of which is herein incorporated by reference), light regulatory elements (Bruce and Quaill, Plant Cell 2:1081-1089 (1990) the entirety of which is herein incorporated by reference; Bruce et al., EMBO J. 10:3015-3024 (1991), the entirety of which is herein incorporated by reference; Rocholl et al., Plant Sci. 97:189-198 (1994), the entirety of which is herein incorporated by reference; Block et al., Proc. Natl. Acad. Sci. (U.S.A.) 87:5387-5391 (1990), the entirety of which is herein incorporated by reference; Giuliano et al., Proc. Natl. Acad. Sci. (U.S.A.) 85:7089-7093 (1988), the entirety of which is herein incorporated by reference; Staiger et al., Proc. Natl. Acad. Sci. (U.S.A.) 86:6930-6934 (1989), the entirety of which is herein incorporated by reference; Izawa et al., Plant Cell 6:1277-1287 (1994), the entirety of which is herein incorporated by reference; Menkens et al., Trends in Biochemistry 20:506-510 (1995), the entirety of which is herein incorporated by reference; Foster et al., FASEB J. 8:192-200 (1994), the entirety of which is herein incorporated by reference; Plesse et al., Mol Gen Gene 254:258-266 (1997), the entirety of which is herein incorporated by reference; Green et al., EMBO J. 6:2543-2549 (1987), the entirety of which is herein incorporated by reference; Kuhlemeier et al., Ann. Rev Plant Physiol. 38:221-257 (1987), the entirety of which is herein incorporated by reference; Villain et al., J. Biol. Chem. 271:32593-32598 (1996), the entirety of which is herein incorporated by reference; Lam et al., Plant Cell 2:857-866 (1990), the entirety of which is herein incorporated by reference; Gilmartin et al., Plant Cell 2:369-378 (1990), the entirety of which is herein incorporated by reference; Datta et al., Plant Cell 1: 1069-1077 (1989) the entirety of which is herein incorporated by reference; Gilmartin et al., Plant Cell 2:369-378 (1990), the entirety of which is herein incorporated by reference; Castresana et al., EMBO J. 7:1929-1936 (1988), the entirety of which is herein incorporated by reference; Ueda et al., Plant Cell 1:217-227 (1989), the entirety of which is herein incorporated by reference; Terzaghi et al., Annu. Rev. Plant Physiol. Plant Mol. Biol. 46:445-474 (1995), the entirety of which is herein incorporated by reference; Green et al., EMBO J. 6:2543-2549 (1987), the entirety of which is herein incorporated by reference; Villain et al., J. Biol. Chem. 271:32593-32598 (1996), the entirety of which is herein incorporated by reference; Tjaden et al., Plant Cell 6: 107-118 (1994), the entirety of which is herein incorporated by reference; Tjaden et al., Plant Physiol. 108:1109-1117 (1995), the entirety of which is herein incorporated by reference; Ngai et al., Plant J. 12:1021-1234 (1997), the entirety of which is herein incorporated by reference; Bruce et al., EMBO J. 10:3015-3024 (1991), the entirety of which is herein incorporated by reference; Ngai et al., Plant J. 12:1021-1034 (1997), the entirety of which is herein incorporated by reference), elements responsive to gibberellin, (Muller et al., J. Plant Physiol. 145:606-613 (1995), the entirety of which is herein incorporated by reference; Croissant et al., Plant Science 116:27-35 (1996), the entirety of which is herein incorporated by reference; Lohmer et al., EMBO J. 10:617-624 (1991), the entirety of which is herein incorporated by reference; Rogers et al., Plant Cell 4:1443-1451 (1992), the entirety of which is herein incorporated by reference; Lanahan et al., Plant Cell 4:203-211 (1992) the entirety of which is herein incorporated by reference; Skriver et al., Proc. Natl. Acad. Sci. (U.S.A.) 88:7266-7270 (1991) the entirety of which is herein incorporated by reference; Gilmartin et al., Plant Cell 2:369-378 (1990), the entirety of which is herein incorporated by reference; Huang et al., Plant Mol. Biol. 14:655-668 (1990), the entirety of which is herein incorporated by reference, Gubler et al., Plant Cell 7:1879-1891 (1995), the entirety of which is herein incorporated by reference), elements responsive to abscisic acid, (Busk et al., Plant Cell 9:2261-2270 (1997), the entirety of which is herein incorporated by reference; Guiltinan et al., Science 250:267-270 (1990), the entirety of which is herein incorporated by reference; Shen et al., Plant Cell 7:295-307 (1995) the entirety of which is herein incorporated by reference; Shen et al., Plant Cell 8:1107-1119 (1996), the entirety of which is herein incorporated by reference; Seo et al., Plant Mol. Biol. 27:1119-1131 (1995), the entirety of which is herein incorporated by reference; Marcotte et al., Plant Cell 1:969-976 (1989) the entirety of which is herein incorporated by reference; Shen et al., Plant Cell 7:295-307 (1995), the entirety of which is herein incorporated by reference; Iwasaki et al., Mol Gen Genet. 247:391-398 (1995), the entirety of which is herein incorporated by reference; Hattori et al., Genes Dev. 6:609-618 (1992), the entirety of which is herein incorporated by reference; Thomas et al., Plant Cell 5:1401-1410 (1993), the entirety of which is herein incorporated by reference), elements similar to abscisic acid responsive elements, (Ellerstrom et al., Plant Mol. Biol. 32:1019-1027 (1996), the entirety of which is herein incorporated by reference), auxin responsive elements (Liu et al., Plant Cell 6:645-657 (1994) the entirety of which is herein incorporated by reference; Liu et al., Plant Physiol. 115:397-407 (1997), the entirety of which is herein incorporated by reference; Kosugi et al., Plant J. 7:877-886 (1995), the entirety of which is herein incorporated by reference; Kosugi et al., Plant Cell 9:1607-1619 (1997), the entirety of which is herein incorporated by reference; Ballas et al., J. Mol. Biol. 233:580-596 (1993), the entirety of which is herein incorporated by reference), a cis element responsive to methyl jasmonate treatment (Beaudoin and Rothstein, Plant Mol. Biol. 33:835-846 (1997), the entirety of which is herein incorporated by reference), a cis element responsive to abscisic acid and stress response (Straub et al., Plant Mol. Biol. 26:617-630 (1994), the entirety of which is herein incorporated by reference), ethylene responsive cis elements (Itzhaki et al., Proc. Natl. Acad. Sci. (U.S.A.) 91:8925-8929 (1994), the entirety of which is herein incorporated by reference; Montgomery et al., Proc. Natl. Acad. Sci. (U.S.A.) 90:5939-5943 (1993), the entirety of which is herein incorporated by reference; Sessa et al., Plant Mol. Biol. 28:145-153 (1995), the entirety of which is herein incorporated by reference; Shinshi et al., Plant Mol. Biol. 27:923-932 (1995), the entirety of which is herein incorporated by reference), salicylic acid cis responsive elements, (Strange et al., Plant J. 11:1315-1324 (1997), the entirety of which is herein incorporated by reference; Qin et al., Plant Cell 6:863-874 (1994), the entirety of which is herein incorporated by reference), a cis element that responds to water stress and abscisic acid (Lam et al., J. Biol. Chem. 266:17131-17135 (1991), the entirety of which is herein incorporated by reference; Thomas et al., Plant Cell 5:1401-1410 (1993), the entirety of which is herein incorporated by reference; Pla et al., Plant Mol Biol 21:259-266 (1993), the entirety of which is herein incorporated by reference), a cis element essential for M phase-specific expression (Ito et al., Plant Cell 10:331-341 (1998), the entirety of which is herein incorporated by reference), sucrose responsive elements (Huang et al., Plant Mol. Biol. 14:655-668 (1990), the entirety of which is herein incorporated by reference; Hwang et al., Plant Mol. Biol. 36:331-341 (1998), the entirety of which is herein incorporated by reference; Grierson et al., Plant J. 5:815-826 (1994), the entirety of which is herein incorporated by reference), heat shock response elements (Pelham et al., Trends Genet. 1:31-35 (1985), the entirety of which is herein incorporated by reference), elements responsive to auxin and/or salicylic acid and also reported for light regulation (Lam et al., Proc. Natl. Acad. Sci. (U.S.A.) 86:7890-7897 (1989), the entirety of which is herein incorporated by reference; Benfey et al., Science 250:959-966 (1990), the entirety of which is herein incorporated by reference), elements responsive to ethylene and salicylic acid (Ohme-Takagi et al., Plant Mol. Biol. 15:941-946 (1990), the entirety of which is herein incorporated by reference), elements responsive to wounding and abiotic stress (Loake et al., Proc. Natl. Acad. Sci. (U.S.A.) 89:9230-9234 (1992), the entirety of which is herein incorporated by reference; Mhiri et al., Plant Mol. Biol. 33:257-266 (1997), the entirety of which is herein incorporated by reference), antioxidant response elements (Rushmore et al., J. Biol. Chem. 266:11632-11639, the entirety of which is herein incorporated by reference; Dalton et al., Nucleic Acids Res. 22:5016-5023 (1994), the entirety of which is herein incorporated by reference), Sph elements (Suzuki et al., Plant Cell 9:799-807 (1997), the entirety of which is herein incorporated reference), Elicitor responsive elements, (Fukuda et al., Plant Mol. Biol. 34:81-87 (1997), the entirety of which is herein incorporated by reference; Rushton et al., EMBO J. 15:5690-5700 (1996), the entirety of which is herein incorporated by reference), metal responsive elements (Stuart et al., Nature 317:828-831 (1985), the entirety of which is herein incorporated by reference; Westin et al., EMBO J. 7:3763-3770 (1988), the entirety of which is herein incorporated by reference; Thiele et al., Nucleic Acids Res. 20:1183-1191 (1992), the entirety of which is herein incorporated by reference; Faisst et al., Nucleic Acids Res. 20:3-26 (1992), the entirety of which is herein incorporated by reference), low temperature responsive elements, (Baker et al., Plant Mol. Biol. 24:701-713 (1994), the entirety of which is herein incorporated by reference; Jiang et al., Plant Mol. Biol. 30:679-684 (1996), the entirety of which is herein incorporated by reference; Nordin et al., Plant Mol. Biol. 21:641-653 (1993), the entirety of which is herein incorporated by reference; Zhou et al., J. Biol. Chem. 267:23515-23519 (1992), the entirety of which is herein incorporated by reference), drought responsive elements, (Yamaguchi et al., Plant Cell 6:251-264 (1994), the entirety of which is herein incorporated by reference; Wang et al., Plant Mol. Biol. 28:605-617 (1995), the entirety of which is herein incorporated by reference; Bray, Trends in Plant Science 2:48-54 (1997), the entirety of which is herein incorporated by reference), enhancer elements for glutenin, (Colot et al., EMBO J. 6:3559-3564 (1987), the entirety of which is herein incorporated by reference; Thomas et al., Plant Cell 2:1171-1180 (1990), the entirety of which is incorporated by reference; Kreis et al., Philos. Trans. R. Soc. Lond., B314:355-365 (1986), the entirety of which is herein incorporated by reference), light-independent regulatory elements, (Lagrange et al., Plant Cell 9:1469-1479 (1997), the entirety of which is herein incorporated by reference; Villain et al., J. Biol. Chem. 271:32593-32598 (1996), the entirety of which is herein incorporated by reference), OCS enhancer elements, (Bouchez et al., EMBO J. 8:4197-4204 (1989), the entirety of which is herein incorporated by reference; Foley et al., Plant J. 3:669-679 (1993), the entirety of which is herein incorporated by reference), ACGT elements, (Foster et al., FASEB J. 8:192-200 (1994), the entirety of which is herein incorporated by reference; Izawa et al., Plant Cell 6:1277-1287 (1994), the entirety of which is herein incorporated by reference; Izawa et al., J. Mol. Biol. 230:1131-1144 (1993) the entirety of which is herein incorporated by reference), negative cis elements in plastid related genes, (Zhou et al., J. Biol. Chem. 267:23515-23519 (1992), the entirety of which is herein incorporated by reference; Lagrange et al., Mol. Cell. Biol. 13:2614-2622 (1993), the entirety of which is herein incorporated by reference; Lagrange et al., Plant Cell 9:1469-1479 (1997), the entirety of which is herein incorporated by reference; Zhou et al. J. Biol. Chem. 267:23515-23519 (1992), the entirety of which is herein incorporated by reference), prolamin box elements, (Forde et al., Nucleic Acids Res. 13:7327-7339 (1985), the entirety of which is herein incorporated by reference; Colot et al., EMBO J. 6:3559-3564 (1987), the entirety of which is herein incorporated by reference; Thomas et al., Plant Cell 2:1171-1180 (1990), the entirety of which is herein incorporated by reference; Thompson et al., Plant Mol. Biol. 15:755-764 (1990), the entirety of which is herein incorporated by reference; Vicente et al., Proc. Natl. Acad. Sci. U.S.A. 94:7685-7690 (1997), the entirety of which is herein incorporated by reference), elements in enhancers from the IgM heavy chain gene (Gillies et al., Cell 33:717-728 (1983), the entirety of which is herein incorporated by reference; Whittier et al., Nucleic Acids Res. 15:2515-2535 (1987), the entirety of which is herein incorporated by reference. Additional promoters and regulatory elements are set forth under the section titled “Uses of the Agents of the Invention.”

[0068] (iii) Nucleic Acid Molecules Comprising Genes or Fragments Thereof

[0069] Nucleic acid molecules of the present invention can comprise one or more genes or fragments thereof. Such genes or fragments thereof include homologues of known genes in other organisms or genes or fragments thereof that elicit only limited or no matches with known genes. Such genes include Arabidopsis molecules that encode homologues of known proteins.

[0070] Genomic sequences can be screened for the presence of protein homologues or protein coding regions utilizing one or a number of different search algorithms have that been developed, one example of which are the suite of programs referred to as BLAST programs. Other examples of suitable programs that can be utilized are known in the art, several of which are described above in the Background and under the section titled “Uses of the Agents of the Invention.”

[0071] In a preferred embodiment of the present invention, the nucleic acid molecule encodes an Arabidopsis protein or fragment thereof that is a homologue of another plant protein. In another preferred embodiment of the present invention, the nucleic acid molecule encodes an Arabidopsis protein or fragment thereof that is a homologue of a fungal protein. In another preferred embodiment of the invention, the nucleic acid molecule encodes an Arabidopsis protein or fragment thereof that is a homologue of mammalian protein. In another preferred embodiment of the present invention, the nucleic acid molecule encodes an Arabidopsis protein or fragment thereof that is a homologue of a bacterial protein.

[0072] In a preferred embodiment of the present invention, the nucleic acid molecule of the present invention encodes an Arabidopsis protein or fragment thereof where the Arabidopsis protein exhibits a BLAST probability score of greater than 1E-12, preferably a BLAST probability score of between about 1E-30 and about 1E-12, even more preferably a BLAST probability score of greater than 1E-30 with its homologue. In another preferred embodiment of the present invention, the nucleic acid molecule encoding the Arabidopsis protein or fragment thereof or fragment thereof exhibits a % identity with its homologue of between about 25% and about 40%, more preferably of between about 40 and about 70%, even more preferably of between about 70% and about 90%, and even more preferably between about 90% and 99%. In another preferred embodiment, of the present invention, the Arabidopsis protein homologue or fragments thereof exhibits a % identity with its homologue of 100%.

[0073] Nucleic acid molecules of the present invention also include non-Arabidopsis homologues. Preferred non-Arabidopsis homologues are selected from the group consisting of alfalfa, barley, Brassica, broccoli, cabbage, citrus, cotton, garlic, oat, oilseed rape, onion, canola, flax, an ornamental plant, maize, pea, peanut, pepper, potato, rice, rye, sorghum, soybean, strawberry, sugarcane, sugarbeet, tomato, wheat, poplar, pine, fir, eucalyptus, apple, lettuce, lentils, grape, banana, tea, turf grasses, sunflower, oil palm, Phaseolus. Even more preferred non-Arabidopsis homologues are selected from the group consisting of Brassicaceae.

[0074] In a preferred embodiment, nucleic acid molecules having SEQ ID NO: 1 through SEQ ID NO: 51,470 or complements and fragments of either can be utilized to obtain such homologues.

[0075] The degeneracy of the genetic code, which allows different nucleic acid sequences to code for the same protein or peptide, is known in the literature. (U.S. Pat. No. 4,757,006, the entirety of which is herein incorporated by reference). As used herein a nucleic acid molecule is degenerate of another nucleic acid molecule when the nucleic acid molecules encode for the same amino acid sequences but comprise different nucleotide sequences. An aspect of the present invention is that the nucleic acid molecules of the present invention include nucleic acid molecules that are degenerate of those set forth in SEQ ID NO: 1 through to SEQ ID NO: 51,470 or complements thereof.

[0076] In a further aspect of the present invention, one or more of the nucleic acid molecules of the present invention differ in nucleic acid sequence from those encoding an Arabidopsis homologue of fragment thereof in SEQ ID NO: 1 through SEQ ID NO: 27,741 or complements thereof due to the degeneracy in the genetic code in that they encode the same protein but differ in nucleic acid sequence. In another further aspect of the present invention, one or more of the nucleic acid molecules of the present invention differ in nucleic acid sequence from those encoding an Arabidopsis homologue of fragment thereof in SEQ ID NO: 1 through SEQ ID NO: 27,741 or complements thereof due to fact that the different nucleic acid sequence encodes a protein having one or more conservative amino acid residue. Examples of conservative substitutions are set forth in Table 1. It is understood that codons capable of coding for such conservative substitutions are known in the art.

TABLE 1

| Original Residue | Conservative Substitutions |
|---|---|
| Ala | ser |
| Arg | lys |
| Asn | gln; his |
| Asp | glu |
| Cys | ser; ala |
| Gln | asn |
| Glu | asp |
| Gly | pro |
| His | asn; gln |
| Ile | leu; val |
| Leu | ile; val |
| Lys | arg; gln; glu |
| Met | leu; ile |
| Phe | met; leu; tyr |
| Ser | thr |
| Thr | ser |
| Trp | tyr |
| Tyr | trp; phe |
| Val | ile; leu |

[0077] (iv) Nucleic Acid Molecules Comprising Introns and/or Intron/Exon Junctions

[0078] Nucleic acid molecules of the present invention can comprise an intron and/or one or more intron/exon junctions. Sequences of the present invention can be screened for introns and intron/exon junctions utilizing one or a number of different search algorithms have that been developed, one example of which are the suite of programs referred to as BLAST programs. Other examples of suitable programs that can be utilized are known in the art, several of which are described above in the Background and in the section entitled “Uses of the Agents of the Present Invention.”

[0079] (b) Protein and Peptide Molecules

[0080] A class of agents comprises one or more of the protein or peptide molecules encoded by an gene or fragment thereof located within SEQ ID NO: 1 through SEQ ID NO: 27,741, fragments thereof or complements of either or one or more of the protein encoded by a nucleic acid molecule or fragment thereof or peptide molecules encoded by other nucleic acid agents of the present invention. Protein and peptide molecules can be identified using known protein or fragment molecules as a target sequence or target motif in the BLAST programs of the present invention. In a preferred embodiment the protein or peptide molecules of the present invention are derived from Arabidopsis and more preferably Arabidopsis thaliana, Columbia.

[0081] As used herein, the term “protein molecule” or “peptide molecule” includes any molecule that comprises five or more amino acids. It is well known in the art that proteins or peptides may undergo modification, including post-translational modifications, such as, but not limited to, disulfide bond formation, glycosylation, phosphorylation, or oligomerization. Thus, as used herein, the term “protein molecule” or “peptide molecule” includes any protein molecule that is modified by any biological or non-biological process. The terms “amino acid” and “amino acids” refer to all naturally occurring L-amino acids. This definition is meant to include norleucine, ornithine, homocysteine, and homoserine.

[0082] One or more of the protein or fragment of peptide molecules may be produced via chemical synthesis, or more preferably, by expression in a suitable bacterial or eukaryotic host. Suitable methods for expression are described by Sambrook et al., Molecular Cloning, A Laboratory Manual, 2nd Edition, Cold Spring Harbor Press, Cold Spring Harbor, N.Y. (1989), or similar texts.

[0083] A “protein fragment” is a peptide or polypeptide molecule whose amino acid sequence comprises a subset of the amino acid sequence of that protein. A protein or fragment thereof that comprises one or more additional peptide regions not derived from that protein is a “fusion” protein. Such molecules may be derivatized to contain carbohydrate or other moieties (such as keyhole limpet hemocyanin, etc.). Fusion protein or peptide molecule of the present invention are preferably produced via recombinant means.

[0084] Another class of agents comprise protein or peptide molecules encoded by SEQ ID NO: 1 through SEQ ID NO: 27,741 or complements thereof or, fragments or fusions thereof in which conservative, non-essential, or not relevant, amino acid residues have been added, replaced, or deleted. An example of such a homologue is the homologue protein of all non-Arabidopsis plant species, including but not limited to alfalfa, barley, Brassica, broccoli, cabbage, citrus, cotton, garlic, oat, oilseed rape, onion, canola, flax, maize, an ornamental plant, pea, peanut, pepper, potato, rice, rye, sorghum, soybean, strawberry, sugarcane, sugarbeet, tomato, wheat, poplar, pine, fir, eucalyptus, apple, lettuce, lentils, grape, banana, tea, turf grasses, sunflower, oil palm, Phaseolus etc. Particularly preferred non-Arabidopsis plants to utilize for the isolation of homologues would include Brassicaceae. Such a homologue can be obtained by any of a variety of methods. For example, as indicated above, one or more of the disclosed sequences (SEQ ID NO: 1 through SEQ ID NO: 27,741 or complements thereof or fragments of either) will be used to define a pair of primers that may be used to isolate the homologue-encoding nucleic acid molecules from any desired species. Such molecules can be expressed to yield homologues by recombinant means.

[0085] (c) Antibodies

[0086] One aspect of the present invention concerns antibodies, single-chain antigen binding molecules, or other proteins that specifically bind to one or more of the protein or peptide molecules of the present invention and their homologues, fusions or fragments. Such antibodies may be used to quantitatively or qualitatively detect the protein or peptide molecules of the present invention. As used herein, an antibody or peptide is said to “specifically bind” to a protein or peptide molecule of the present invention if such binding is not competitively inhibited by the presence of non-related molecules. In a preferred embodiment the antibodies of the present invention bind to proteins of the present invention, in a more preferred embodiment of the antibodies of the present invention bind to a protein derived from Arabidopsis and more preferably bind to a protein or fragments thereof of Arabidopsis thaliana, Columbia.

[0087] Nucleic acid molecules that encode all or part of the protein of the present invention can be expressed, via recombinant means, to yield protein or peptides that can in turn be used to elicit antibodies that are capable of binding the expressed protein or peptide. Such antibodies may be used in immunoassays for that protein. Such protein-encoding molecules, or their fragments may be a “fusion” molecule (i.e., a part of a larger nucleic acid molecule) such that, upon expression, a fusion protein is produced. It is understood that any of the nucleic acid molecules of the present invention may be expressed, via recombinant means, to yield proteins or peptides encoded by these nucleic acid molecules.

[0088] The antibodies that specifically bind proteins and protein fragments of the present invention may be polyclonal or monoclonal, and may comprise intact immunoglobulins, or antigen binding portions of immunoglobulins (such as (F(ab′), F(ab′)₂ fragments), or single-chain immunoglobulins producible, for example, via recombinant means. It is understood that practitioners are familiar with the standard resource materials which describe specific conditions and procedures for the construction, manipulation and isolation of antibodies (see, for example, Harlow and Lane, Antibodies: A Laboratory Manual, Cold Spring Harbor Press, Cold Spring Harbor, N.Y. (1988), the entirety of which is herein incorporated by reference).

[0089] Murine monoclonal antibodies are particularly preferred. BALB/c mice are preferred for this purpose, however, equivalent strains may also be used. The animals are preferably immunized with approximately 25 μg of purified protein (or fragment thereof) that has been emulsified a suitable adjuvant (such as TiterMax adjuvant (Vaxcel, Norcross, Ga.)). Immunization is preferably conducted at two intramuscular sites, one intraperitoneal site, and one subcutaneous site at the base of the tail. An additional i.v. injection of approximately 25 μg of antigen is preferably given in normal saline three weeks later. After approximately 11 days following the second injection, the mice may be bled and the blood screened for the presence of anti-protein or peptide antibodies. Preferably, a direct binding Enzyme-Linked Immunoassay (ELISA) is employed for this purpose.

[0090] More preferably, the mouse having the highest antibody titer is given a third i.v. injection of approximately 25 μg of the same protein or fragment. The splenic leukocytes from this animal may be recovered 3 days later, and are then permitted to fuse, most preferably, using polyethylene glycol, with cells of a suitable myeloma cell line (such as, for example, the P3X63Ag8.653 myeloma cell line). Hybridoma cells are selected by culturing the cells under “HAT” (hypoxanthine-aminopterin-thymine) selection for about one week. The resulting clones may then be screened for their capacity to produce monoclonal antibodies (“mAbs”), preferably by direct ELISA.

[0091] In one embodiment, anti-protein or peptide monoclonal antibodies are isolated using a fusion of a protein, protein fragment, or peptide of the present invention, or conjugate of a protein, protein fragment, or peptide of the present invention, as immunogens. Thus, for example, a group of mice can be immunized using a fusion protein emulsified in Freund's complete adjuvant (e.g., approximately 50 μg of antigen per immunization). At three week intervals, an identical amount of antigen is emulsified in Freund's incomplete adjuvant and used to immunize the animals. Ten days following the third immunization, serum samples are taken and evaluated for the presence of antibody. If antibody titers are too low, a fourth booster can be employed. Polysera capable of binding the protein or peptide can also be obtained using this method.

[0092] In a preferred procedure for obtaining monoclonal antibodies, the spleens of the above-described immunized mice are removed, disrupted, and immune splenocytes are isolated over a ficoll gradient. The isolated splenocytes are fused, using polyethylene glycol with BALB/c-derived HGPRT (hypoxanthine guanine phosphoribosyl transferase) deficient P3x63xAg8.653 plasmacytoma cells. The fused cells are plated into 96-well microtiter plates and screened for hybridoma fusion cells by their capacity to grow in culture medium supplemented with hypothanthine, aminopterin and thymidine for approximately 2-3 weeks.

[0093] Hybridoma cells that arise from such incubation are preferably screened for their capacity to produce an immunoglobulin that binds to a protein of interest. An indirect ELISA may be used for this purpose. In brief, the supernatants of hybridomas are incubated in microtiter wells that contain immobilized protein. After washing, the titer of bound immunoglobulin can be determined using, for example, a goat anti-mouse antibody conjugated to horseradish peroxidase. After additional washing, the amount of immobilized enzyme is determined (for example through the use of a chromogenic substrate). Such screening is performed as quickly as possible after the identification of the hybridoma in order to ensure that a desired clone is not overgrown by non-secreting neighbors. Desirably, the fusion plates are screened several times since the rates of hybridoma growth vary. In a preferred sub-embodiment, a different antigenic form of immunogen may be used to screen the hybridoma. Thus, for example, the splenocytes may be immunized with one immunogen, but the resulting hybridomas can be screened using a different immunogen. It is understood that any of the protein or peptide molecules of the present invention may be used to raise antibodies.

[0094] As discussed below, such antibody molecules or their fragments may be used for diagnostic purposes. Where the antibodies are intended for diagnostic purposes, it may be desirable to derivatize them, for example with a ligand group (such as biotin) or a detectable marker group (such as a fluorescent group, a radioisotope or an enzyme).

[0095] The ability to produce antibodies that bind the protein or peptide molecules of the present invention permits the identification of mimetic compounds of those molecules. A “mimetic compound” is a compound that is not that compound, or a fragment of that compound, but which nonetheless exhibits an ability to specifically bind to antibodies directed against that compound.

[0096] It is understood that any of the agents of the present invention can be substantially purified and/or be biologically active and/or recombinant

[0097] Uses of the Agents of the Invention

[0098] Nucleic acid molecules and fragments thereof of the present invention may be employed to obtain other nucleic acid molecules from the same species. Such nucleic acid molecules include the nucleic acid molecules that have the complete coding sequence of a protein and promoters and flanking sequences of such molecules. In addition, such nucleic acid molecules include nucleic acid molecules that encode for other isozymes or gene family members. Such molecules can be readily obtained by using the above-described nucleic acid molecules or fragments thereof to screen cDNA or genomic libraries obtained from Arabidopsis. Methods for forming such libraries are well known in the art.

[0099] Nucleic acid molecules and fragments thereof of the present invention may also be employed to obtain nucleic acid homologues. Such homologues include the nucleic acid molecules of other plants or other organisms (e.g., alfalfa, barley, Brassica, broccoli, cabbage, citrus, cotton, garlic, oat, oilseed rape, onion, canola, flax, an ornamental plant, maize, pea, peanut, pepper, potato, rice, rye, sorghum, soybean, strawberry, sugarcane, sugarbeet, tomato, wheat, poplar, pine, fir, eucalyptus, apple, lettuce, lentils, grape, banana, tea, turf grasses, sunflower, oil palm, Phaseolus, etc.) including the nucleic acid molecules that encode, in whole or in part, protein homologues of other plant species or other organisms, sequences of genetic elements such as promoters and transcriptional regulatory elements. Such molecules can be readily obtained by using the above-described nucleic acid molecules or fragments thereof to screen cDNA or genomic libraries obtained from such plant species. Methods for forming such libraries are well known in the art. Such homologue molecules may differ in their nucleotide sequences from those found in one or more of SEQ ID NO: 1 through SEQ ID NO: 51,470 or complements thereof because complete complementarity is not needed for stable hybridization. The nucleic acid molecules of the present invention therefore also include molecules that, although capable of specifically hybridizing with the nucleic acid molecules may lack “complete complementarity.” In a particular embodiment, methods or 3′ or 5′ RACE may be used (Frohman, M. A. et al., Proc. Natl. Acad. Sci. (U.S.A.) 85:8998-9002 (1988); Ohara, O. et al., Proc. Natl. Acad. Sci. (U.S.A.) 86:5673-5677 (1989)) to obtain such sequences.

[0100] Any of a variety of methods may be used to obtain one or more of the above-described nucleic acid molecules (Zamechik et al., Proc. Natl. Acad. Sci. (U.S.A.) 83:4143-4146 (1986), the entirety of which is herein incorporated by reference; Goodchild et al., Proc. Natl. Acad. Sci. (U.S.A.) 85:5507-5511 (1988), the entirety of which is herein incorporated by reference; Wickstrom et al., Proc. Natl. Acad. Sci. (U.S.A.) 85:1028-1032 (1988), the entirety of which is herein incorporated by reference; Holt et al., Molec. Cell. Biol. 8:963-973 (1988), the entirety of which is herein incorporated by reference; Gerwirtz et al., Science 242:1303-1306 (1988), the entirety of which is herein incorporated by reference; Anfossi et al., Proc. Natl. Acad. Sci. (U.S.A.) 86:3379-3383 (1989), the entirety of which is herein incorporated by reference; Becker et al., EMBO J. 8:3685-3691 (1989); the entirety of which is herein incorporated by reference). Automated nucleic acid synthesizers may be employed for this purpose. In lieu of such synthesis, the disclosed nucleic acid molecules may be used to define a pair of primers that can be used with the polymerase chain reaction (Mullis et al., Cold Spring Harbor Symp. Quant. Biol. 51:263-273 (1986); Erlich et al., European Patent 50,424; European Patent 84,796, European Patent 258,017, European Patent 237,362; Mullis, European Patent 201,184; Mullis et al., U.S. Pat. No. 4,683,202; Erlich, U.S. Pat. No. 4,582,788; and Saiki, R. et al., U.S. Pat. No. 4,683,194, all of which are herein incorporated by reference in their entirety) to amplify and obtain any desired nucleic acid molecule or fragment.

[0101] Nucleic acid molecules and fragments thereof of the present invention may be employed for genetic mapping studies using linkage analysis (genetic markers). A genetic linkage map shows the relative locations of specific DNA markers along a chromosome. Maps are used for the identification of genes associated with genetic diseases or phenotypic traits, comparative genomics, and as a guide for physical mapping. Through genetic mapping, a fine scale linkage map can be developed using DNA markers, and, then, a genomic DNA library of large-sized fragments can be screened with molecular markers linked to the desired trait. In a preferred embodiment of the present invention, the genomic library screen with the nucleic acid molecules of the present invention is a genomic library of Arabidopsis.

[0102] Mapping marker locations is based on the observation that two markers located near each other on the same chromosome will tend to be passed together from parent to offspring. During gamete production, DNA strands occasionally break and rejoin in different places on the same chromosome or on the homologous chromosome. The closer the markers are to each other, the more tightly linked and the less likely a recombination event will fall between and separate them. Recombination frequency thus provides an estimate of the distance between two markers.

[0103] In segregating populations, target genes have been reported to have been placed within an interval of 5-10 cM with a high degree of certainty (Tanksley et al., Trends in Genetics 11(2):63-68 (1995), the entirety of which is herein incorporated by reference). The markers defining this interval are used to screen a larger segregating population to identify individuals derived from one or more gametes containing a crossover in the given interval. Such individuals are useful in orienting other markers closer to the target gene. Once identified, these individuals can be analyzed in relation to all molecular markers within the region to identify those closest to the target.

[0104] Markers of the present invention can be employed to construct linkage maps and to locate genes with qualitative and quantitative effects. The genetic linkage of additional marker molecules can be established by a genetic mapping model such as, without limitation, the flanking marker model reported by Lander and Botstein, Genetics 121:185-199 (1989), and the interval mapping, based on maximum likelihood methods described by Lander and Botstein, Genetics 121:185-199 (1989), the entirety of which is herein incorporated by reference and implemented in the software package MAPMAKER/QTL (Lincoln and Lander, Mapping Genes Controlling Quantitative Traits Using MAPMAKER/QTL, Whitehead Institute for Biomedical Research, Massachusetts, (1990)). Additional software includes Qgene, Version 2.23 (1996), Department of Plant Breeding and Biometry, 266 Emerson Hall, Cornell University, Ithaca, N.Y., the manual of which is herein incorporated by reference in its entirety). Use of the Qgene software is a particularly preferred approach.

[0105] A maximum likelihood estimate (MLE) for the presence of a marker is calculated, together with an MLE assuming no QTL effect, to avoid false positives. A log₁₀ of an odds ratio (LOD) is then calculated as: LOD=log₁₀ (MLE for the presence of a QTL/MLE given no linked QTL).

[0106] The LOD score essentially indicates how much more likely the data are to have arisen assuming the presence of a QTL than in its absence. The LOD threshold value for avoiding a false positive with a given confidence, say 95%, depends on the number of markers and the length of the genome. Graphs indicating LOD thresholds are set forth in Lander and Botstein, Genetics 121:185-199 (1989), the entirety of which is herein incorporated by reference and further described by Arus and Moreno-González, Plant Breeding, Hayward, Bosemark, Romagosa (eds.) Chapman & Hall, London, pp. 314-331 (1993).

[0107] Additional models can be used. Many modifications and alternative approaches to interval mapping have been reported, including the use of non-parametric methods (Kruglyak and Lander, Genetics, 139:1421-1428 (1995), the entirety of which is herein incorporated by reference). Multiple regression methods or models can be also used, in which the trait is regressed on a large number of markers (Jansen, Biometrics in Plant Breed, van Oijen, Jansen (eds.) Proceedings of the Ninth Meeting of the Eucarpia Section Biometrics in Plant Breeding, The Netherlands, pp. 116-124 (1994); Weber and Wricke, Advances in Plant Breeding, Blackwell, Berlin, 16 (1994). Procedures combining interval mapping with regression analysis, where the phenotype is regressed onto a single putative QTL at a given marker interval, and at the same time onto a number of markers that serve as ‘cofactors,’ have been reported by Jansen and Stam, Genetics, 136:1447-1455 (1994) and Zeng, Genetics, 136:1457-1468 (1994). Generally, the use of cofactors reduces the bias and sampling error of the estimated QTL positions (Utz and Melchinger, Biometrics in Plant Breeding, van Oijen, Jansen (eds.) Proceedings of the Ninth Meeting of the Eucarpia Section Biometrics in Plant Breeding, The Netherlands, pp. 195-204 (1994), thereby improving the precision and efficiency of QTL mapping (Zeng, Genetics, 136:1457-1468 (1994). These models can be extended to multi-environment experiments to analyze genotype-environment interactions (Jansen et al., Theo. Appl. Genet. 91:33-37 (1995).

[0108] Selection of an appropriate mapping populations is important to map construction. The choice of appropriate mapping population depends on the type of marker systems employed (Tanksley et al., J.P. Gustafson and R. Appels (eds.). Plenum Press, New York, pp. 157-173 (1988), the entirety of which is herein incorporated by reference). Consideration must be given to the source of parents (adapted vs. exotic) used in the mapping population. Chromosome pairing and recombination rates can be severely disturbed (suppressed) in wide crosses (adapted×exotic) and generally yield greatly reduced linkage distances. Wide crosses will usually provide segregating populations with a relatively large array of polymorphisms when compared to progeny in a narrow cross (adapted×adapted).

[0109] An F₂ population is the first generation of selfing after the hybrid seed is produced. Usually a single F₁ plant is selfed to generate a population segregating for all the genes in Mendelian (1:2:1) fashion. Maximum genetic information is obtained from a completely classified F₂ population using a codominant marker system (Mather, Measurement of Linkage in Heredity: Methuen and Co., (1938), the entirety of which is herein incorporated by reference). In the case of dominant markers, progeny tests (e.g., F₃, BCF₂) are required to identify the heterozygotes, thus making it equivalent to a completely classified F₂ population. However, this procedure is often prohibitive because of the cost and time involved in progeny testing. Progeny testing of F₂ individuals is often used in map construction where phenotypes do not consistently reflect genotype (e.g., disease resistance) or where trait expression is controlled by a QTL. Segregation data from progeny test populations e.g., F₃ or BCF₂) can be used in map construction. Marker-assisted selection can then be applied to cross progeny based on marker-trait map associations (F₂, F₃), where linkage groups have not been completely disassociated by recombination events (i.e., maximum disequilibrium).

[0110] Recombinant inbred lines (RIL) (genetically related lines; usually >F₅, developed from continuously selfing F₂ lines towards homozygosity) can be used as a mapping population. Information obtained from dominant markers can be maximized by using RIL because all loci are homozygous or nearly so. Under conditions of tight linkage (i.e., about <10% recombination), dominant and co-dominant markers evaluated in RIL populations provide more information per individual than either marker type in backcross populations (Reiter. Proc. Natl. Acad. Sci. (U.S.A.) 89:1477-1481 (1992), the entirety of which is herein incorporated by reference). However, as the distance between markers becomes larger (i.e., loci become more independent), the information in RIL populations decreases dramatically when compared to codominant markers.

[0111] Backcross populations (e.g., generated from a cross between a successful variety (recurrent parent) and another variety (donor parent) carrying a trait not present in the former) can be utilized as a mapping population. A series of backcrosses to the recurrent parent can be made to recover most of its desirable traits. Thus a population is created consisting of individuals nearly like the recurrent parent but each individual carries varying amounts or mosaic of genomic regions from the donor parent. Backcross populations can be useful for mapping dominant markers if all loci in the recurrent parent are homozygous and the donor and recurrent parent have contrasting polymorphic marker alleles (Reiter et al., Proc. Natl. Acad. Sci. (U.S.A. 89:1477-1481 (1992)). Information obtained from backcross populations using either codominant or dominant makers is less than that obtained from F₂ populations because one, rather than two, recombinant gametes are sampled per plant. Backcross populations, however, are more informative (at low marker saturation) when compared to RILs as the distance between linked loci increases in RIL populations (i.e., about 0.15% recombination). Increased recombination can be beneficial for resolution of tight linkages, but may be undesirable in the construction of maps with low marker saturation.

[0112] Near-isogenic lines (NIL) (created by many backcrosses to produce an array of individuals that are nearly identical in genetic composition except for the trait or genomic region under interrogation) can be used as a mapping population. In mapping with NILs, only a portion of the polymorphic loci are expected to map to a selected region.

[0113] Bulk segregant analysis (BSA) is a method developed for the rapid identification of linkage between markers and traits of interest (Michelmore et al., Proc. Natl. Acad. Sci. U.S.A. 88:9828-9832 (1991). In BSA, two bulked DNA samples are drawn from a segregating population originating from a single cross. These bulks contain individuals that are identical for a particular trait (resistant or susceptible to particular disease) or genomic region but arbitrary at unlinked regions (i.e., heterozygous). Regions unlinked to the target region will not differ between the bulked samples of many individuals in BSA.

[0114] Applications for markers in plant breeding include: Quantitative Trait Loci (QTL) mapping (Edwards et al., Genetics 116:113-115 (1987), the entirety of which is herein incorporated by reference); Nienhuis et al., Crop Sci. 27:797-803 (1987); Osborn et al., Theor. Appl. Genet. 73:350-356 (1987); Romero-Severson et al., Use of RFLPs In Analysis of Quantitative Trait Loci In Maize, In Helentjaris and Burr (eds.) pp. 97-102 (1989), the entirety of which is herein incorporated by reference; Young et al., Genetics 120:570-585 (1988), the entirety of which is herein incorporated by reference; Martin et al., Science 243:1725-1728 (1989), the entirety of which is herein incorporated by reference): Sarfatti et al. Theor. Appl Genet. 78:22-26 (1989), the entirety of which is herein incorporated by reference; Tanksley et al., Biotech. 7:257-264 (1989); Barone et al., Mol. Gen. Genet. 224:177-182 (1990), the entirety of which is herein incorporated by reference); Jung et al., Theor, Appl. Genet. 79:663-672 (1990), the entirety of which is herein incorporated by reference; Keim et al., Genetics 126:735-742 (1990), the entirety of which is herein incorporated by reference, Theor. Appl. Genet. 79:465-369 (1990), the entirety of which is herein incorporated by reference; Paterson et al., Genetics 124:735-742 (1990), the entirety of which is herein incorporated by reference; Martin et al., Proc. Natl. Acad. Sci. (U.S.A.) 88:2336-2340 (1991), the entirety of which is herein incorporated by reference; Messeguer et al., Theor. Appl. Genet. 82:529-536 (1991), the entirety of which is herein incorporated by reference; Michelmore et al., Proc Natl. Acad. Sci. (U.S.A.) 88:9828-9832 (1991), the entirety of which is herein incorporated by reference; Ottaviano et al., Theor. Appl. Genet. 81:713-719 (1991), the entirety of which is herein incorporated by reference; Yu et al., Theor. Appl. Genet. 81:471-476 (1991), the entirety of which is herein incorporated by reference; Diers et al., Crop Sci. 32:77-383 (1992), the entirety of which is herein incorporated by reference, Theor. Appl. Genet. 83:608-612 (1992), the entirety of which is herein incorporated by reference, J. Plant Nut. 15:2127-2136 (1992), the entirety of which is herein incorporated by reference; Doebley et al., Proc. Natl. Acad. Sci. (U.S.A.) 87:9888-9892 (1990), the entirety of which is herein incorporated by reference), screening genetic resource strains for useful quantitative trait alleles and introgression of these alleles into commercial varieties (Beckmann and Soller, Theor. Appl. Genet. 67:35-43 (1983), the entirety of which is herein incorporated by reference; Tanksley et al., (1989) the entirety of which is incorporated by reference), or the mapping of mutations (Rafalski et al., In: Nonmammalian Genomic Analysis, ed. Birren and Lai, Academic Press, San Diego, Calif., pp. 75-134 (1996). Additionally, markers can be used to characterize transformants or germplasm, as a genetic diagnostic test for plant breeding or to identify individuals or varieties (Soller and Beckmann, Theor. Appl. Genet. (67):25-33 (1983), the entirety of which is herein incorporated by reference; Tanksley et al., (1989). Markers also can be used to obtain information about: (1) the number, effect, and chromosomal location of each gene affecting a trait; (2) effects of multiple copies of individual genes (gene dosage); (3) interaction between/among genes controlling a trait (epistasis); (4) whether individual genes affect more than one trait (pleiotropy); and (5) stability of gene function across environments (G×E interactions).

[0115] It is understood that one or more of the nucleic acid molecules of the present invention may in one embodiment be used as markers in genetic mapping. In a preferred embodiment, nucleic acid molecules of the present invention may in one embodiment be used as markers with non-Arabidopsis plant species, including but not limited to alfalfa, barley, Brassica, broccoli, cabbage, citrus, cotton, garlic, oat, oilseed rape, onion, canola, flax, an ornamental plant, maize, pea, peanut, pepper, potato, rice, rye, sorghum, soybean, strawberry, sugarcane, sugarbeet, tomato, wheat, poplar, pine, fir, eucalyptus, apple, lettuce, lentils, grape, banana, tea, turf grasses, sunflower, oil palm, Phaseolus etc. Particularly preferred non-Arabidopsis plants are Brassicaceae.

[0116] The nucleic acid molecules of the present invention may be used for physical mapping. Physical mapping, in conjunction with linkage analysis, can enable the isolation of genes. Physical mapping has been reported to identify the markers closest in terms of genetic recombination to a gene target for cloning. Once a DNA marker is linked to a gene of interest, the chromosome walking technique can be used to find the genes via overlapping clones. For chromosome walking, random molecular markers or established molecular linkage maps are used to conduct a search to localize the gene adjacent to one or more markers. A chromosome walk is then initiated from the closest linked marker (Bukanov and Berg, Mo. Microbiol. 11:509-523 (1994), the entirety of which is herein incorporated by reference; Birkenbihl and Vielmetter, Nucleic Acids Res. 17:5057-5069 (1989), the entirety of which is herein incorporated by reference; Wenzel and Herrmann, Nucleic Acids Res. 16:8323-8336, (1988), the entirety of which is herein incorporated by reference). Starting from the selected clones, labeled probes specific for the ends of the insert DNA are synthesized and used as probes in hybridizations against a representative library. Clones hybridizing with one of the probes are picked and serve as templates for the synthesis of new probes; by subsequent analysis, contigs are produced.

[0117] The degree of overlap of the hybridizing clones used to produce a contig can be determined by comparative restriction analysis. Comparative restriction analysis can be carried out in different ways all of which exploit the same principle; two clones of a library are very likely to overlap if they contain a limited number of restriction sites for one or more restriction endonucleases located at the same distance from each other. The most frequently used procedures are, fingerprinting (Coulson et al., Proc. Natl. Acad. Sci. (U.S.A.) 83:7821-7821, (1986), the entirety of which is herein incorporated by reference; Knott et al., Nucleic Acids Res. 16:2601-2612 (1988), the entirety of which is herein incorporated by reference; Eiglmeier et al. Mol. Microbiol. 7:197-206 (1993), the entirety of which is herein incorporated by reference, (1993), restriction fragment mapping (Smith and Bimstiel, Nucleic Acids Res. 3:2387-2398 (1976), the entirety of which is herein incorporated by reference, or the “landmarking” technique (Charlebois et al. J. Mol. Biol. 222:509-524 (1991), the entirety of which is herein incorporated by reference

[0118] It is understood that the nucleic acid molecules of the present invention may in one embodiment be used in physical mapping. In a preferred embodiment, nucleic acid molecules of the present invention may in one embodiment be used in the physical mapping of Brassicaceae, particularly Arabidopsis.

[0119] Nucleic acid molecules of the present invention can be used in comparative mapping. Comparative mapping within families provides a method to assess the degree of sequence conservation, gene order, ploidy of species, ancestral relationships and the rates at which individual genomes are evolving. Comparative mapping has been carried out by cross-hybridizing molecular markers across species within a given family. As in genetic mapping, molecular markers are needed but instead of direct hybridization to mapping filters, the markers are used to select large insert clones from a total genomic DNA library of a related species. The selected clones, each a representative of a single marker, can then be used to physically map the region in the target species. The advantage of this method for comparative mapping is that no mapping population or linkage map of the target species is needed and the clones may also be used in other closely related species. By comparing the results obtained by genetic mapping in model plants, with those from other species, similarities of genomic structure among plants species can be established. Cross-hybridization of RFLP markers have been reported and conserved gene order has been established in many studies. Such macroscopic synteny is utilized for the estimation of correspondence of loci among these crops. These loci include not only Mendelian genes but also Quantitative Trait Loci (QTLs) (Mohan et al., Molecular Breeding 3:87-103 (1997), the entirety of which is herein incorporated by reference. It is understood that markers of the present invention may in another embodiment be used in comparative mapping. In a preferred embodiment the markers of present invention may be used in the comparative mapping of non-Arabidopsis plant species, including but not limited to alfalfa, barley, Brassica, broccoli, cabbage, citrus, cotton, garlic, oat, oilseed rape, onion, canola, flax, an ornamental plant, maize, pea, peanut, pepper, potato, rice, rye, sorghum, soybean, strawberry, sugarcane, sugarbeet, tomato, wheat, poplar, pine, fir, eucalyptus, apple, lettuce, lentils, grape, banana, tea, turf grasses, sunflower, oil palm, Phaseolus etc. Particularly preferred non-Arabidopsis plants to utilize for comparative mapping are the Brassicaceae.

[0120] The nucleic acid molecules of the present invention can be used to identify polymorphisms. In one embodiment of the present invention, a nucleic acid molecule of the present invention (or a sub-fragment of either) may be employed as a marker nucleic acid molecule to identify such polymorphism(s). Alternatively, such polymorphisms can be detected through the use of a marker nucleic acid molecule or a marker protein that is genetically linked to (i.e., a polynucleotide that co-segregates with) such polymorphism(s).

[0121] In an alternative embodiment, such polymorphisms can be detected through the use of a marker nucleic acid molecule that is physically linked to such polymorphism(s). For this purpose, marker nucleic acid molecules comprising a nucleotide sequence of a polynucleotide located within 1 mb of the polymorphism(s), and more preferably within 100 kb of the polymorphism(s), and most preferably within 10 kb of the polymorphism(s) can be employed.

[0122] The genomes of animals and plants naturally undergo spontaneous mutation in the course of their continuing evolution (Gusella, Ann. Rev. Biochem. 55:831-854 (1986)). A “polymorphism” is a variation or difference in the sequence of the gene or its flanking regions that arises in some of the members of a species. The variant sequence and the “original” sequence co-exist in the species' population. In some instances, such co-existence is in stable or quasi-stable equilibrium.

[0123] A polymorphism is thus said to be “allelic,” in that, due to the existence of the polymorphism, some members of a species may have the original sequence (i.e., the original “allele”) whereas other members may have the variant sequence (i.e., the variant “allele”). In the simplest case, only one variant sequence may exist, and the polymorphism is thus said to be di-allelic. In other cases, the species' population may contain multiple alleles, and the polymorphism is termed tri-allelic, etc. A single gene may have multiple different unrelated polymorphisms. For example, it may have a di-allelic polymorphism at one site, and a multi-allelic polymorphism at another site.

[0124] The variation that defines the polymorphism may range from a single nucleotide variation to the insertion or deletion of extended regions within a gene. In some cases, the DNA sequence variations are in regions of the genome that are characterized by short tandem repeats (STRs) that include tandem di- or tri-nucleotide repeated motifs of nucleotides. Polymorphisms characterized by such tandem repeats are referred to as “variable number tandem repeat” (“VNTR”) polymorphisms. VNTRs have been used in identity analysis (Weber, U.S. Pat. No. 5,075,217; Armour et al., FEBS Lett. 307:113-115 (1992); Jones et al., Eur. J. Haematol. 39:144-147 (1987); Horn et al., PCT Application WO91/14003; Jeffreys, European Patent Application 370,719; Jeffreys, U.S. Pat. No. 5,175,082; Jeffreys et al., Amer. J. Hum. Genet. 39:11-24 (1986); Jeffreys et al., Nature 316:76-79 (1985); Gray et al., Proc. R. Acad. Soc. Lond. 243:241-253 (1991); Moore et al., Genomics 10:654-660 (1991); Jeffreys et al., Anim. Genet. 18:1-15 (1987); Hillel et al., Anim. Genet. 20:145-155 (1989); Hillel et al., Genet. 124:783-789 (1990), all of which are herein incorporated by reference in their entirety).

[0125] The detection of polymorphic sites in a sample of DNA may be facilitated through the use of nucleic acid amplification methods. Such methods specifically increase the concentration of polynucleotides that span the polymorphic site, or include that site and sequences located either distal or proximal to it. Such amplified molecules can be readily detected by gel electrophoresis or other means.

[0126] The most preferred method of achieving such amplification employs the polymerase chain reaction (“PCR”) (Mullis et al., Cold Spring Harbor Symp. Quant. Biol. 51:263-273 (1986); Erlich et al., European Patent Appln. 50,424; European Patent Appln. 84,796, European Patent Application 258,017, European Patent Appln. 237,362; Mullis, European Patent Appln. 201,184; Mullis et al., U.S. Pat. No. 4,683,202; Erlich., U.S. Pat. No. 4,582,788; and Saiki et al., U.S. Pat. No. 4,683,194, all of which are herein incorporated by reference), using primer pairs that are capable of hybridizing to the proximal sequences that define a polymorphism in its double-stranded form.

[0127] In lieu of PCR, alternative methods, such as the “Ligase Chain Reaction” (“LCR”) may be used (Barany, Proc. Natl. Acad. Sci. (U.S.A.) 88:189-193 (1991), the entirety of which is herein incorporated by reference. LCR uses two pairs of oligonucleotide probes to exponentially amplify a specific target. The sequences of each pair of oligonucleotides is selected to permit the pair to hybridize to abutting sequences of the same strand of the target. Such hybridization forms a substrate for a template-dependent ligase. As with PCR, the resulting products thus serve as a template in subsequent cycles and an exponential amplification of the desired sequence is obtained.

[0128] LCR can be performed with oligonucleotides having the proximal and distal sequences of the same strand of a polymorphic site. In one embodiment, either oligonucleotide will be designed to include the actual polymorphic site of the polymorphism. In such an embodiment, the reaction conditions are selected such that the oligonucleotides can be ligated together only if the target molecule either contains or lacks the specific nucleotide that is complementary to the polymorphic site present on the oligonucleotide. Alternatively, the oligonucleotides may be selected such that they do not include the polymorphic site (see, Segev, PCT Application WO 90/01069, the entirety of which is herein incorporated by reference).

[0129] The “Oligonucleotide Ligation Assay” (“OLA”) may alternatively be employed (Landegren et al., Science 241:1077-1080 (1988), the entirety of which is herein incorporated by reference). The OLA protocol uses two oligonucleotides which are designed to be capable of hybridizing to abutting sequences of a single strand of a target. OLA, like LCR, is particularly suited for the detection of point mutations. Unlike LCR, however, OLA results in “linear” rather than exponential amplification of the target sequence.

[0130] Nickerson et al. have described a nucleic acid detection assay that combines attributes of PCR and OLA (Nickerson et al., Proc. Natl. Acad. Sci. (U.S.A.) 87:8923-8927 (1990), the entirety of which is herein incorporated by reference). In this method, PCR is used to achieve the exponential amplification of target DNA, which is then detected using OLA. In addition to requiring multiple, and separate, processing steps, one problem associated with such combinations is that they inherit all of the problems associated with PCR and OLA.

[0131] Schemes based on ligation of two (or more) oligonucleotides in the presence of nucleic acid having the sequence of the resulting “di-oligonucleotide,” thereby amplifying the di-oligonucleotide, are also known (Wu et al., Genomics 4:560 (1989), the entirety of which is herein incorporated by reference), and may be readily adapted to the purposes of the present invention.

[0132] Other known nucleic acid amplification procedures, such as allele-specific oligomers, branched DNA technology, transcription-based amplification systems, or isothermal amplification methods may also be used to amplify and analyze such polymorphisms (Malek et al., U.S. Pat. No. 5,130,238; Davey et al., European Patent Application 329,822; Schuster et al., U.S. Pat. No. 5,169,766; Miller et al., PCT Application WO 89/06700; Kwoh et al., Proc. Natl. Acad. Sci. (U.S.A.) 86:1173-1177 (1989); Gingeras et al., PCT Application WO 88/10315; Walker et al., Proc. Natl. Acad. Sci. (U.S.A.) 89:392-396 (1992), all of which are herein incorporated by reference in their entirety).

[0133] The identification of a polymorphism can be determined in a variety of ways. By correlating the presence or absence of it in an plant with the presence or absence of a phenotype, it is possible to predict the phenotype of that plant. If a polymorphism creates or destroys a restriction endonuclease cleavage site, or if it results in the loss or insertion of DNA (e.g., a VNTR polymorphism), it will alter the size or profile of the DNA fragments that are generated by digestion with that restriction endonuclease. As such, individuals that possess a variant sequence can be distinguished from those having the original sequence by restriction fragment analysis. Polymorphisms that can be identified in this manner are termed “restriction fragment length polymorphisms” (“RFLPs”). RFLPs have been widely used in human and plant genetic analyses (Glassberg, UK Patent Application 2135774; Skolnick et al., Cytogen. Cell Genet. 32:58-67 (1982); Botstein et al., Ann. J. Hum. Genet. 32:314-331 (1980); Fischer et al., (PCT Application WO90/13668); Uhlen, PCT Application WO90/11369).

[0134] Polymorphisms can also be identified by Single Strand Conformation Polymorphism (SSCP) analysis. The SSCP technique is a method capable of identifying most sequence variations in a single strand of DNA, typically between 150 and 250 nucleotides in length (Elles, Methods in Molecular Medicine: Molecular Diagnosis of Genetic Diseases, Humana Press (1996), the entirety of which is herein incorporated by reference); Orita et al., Genomics 5:874-879 (1989), the entirety of which is herein incorporated by reference). Under denaturing conditions a single strand of DNA will adopt a conformation that is uniquely dependent on its sequence conformation. This conformation usually will be different, even if only a single base is changed. Most conformations have been reported to alter the physical configuration or size sufficiently to be detectable by electrophoresis. A number of protocols have been described for SSCP including, but not limited to Lee et al., Anal. Biochem. 205:289-293 (1992), the entirety of which is herein incorporated by reference; Suzuki et al., Anal. Biochem. 192:82-84 (1991), the entirety of which is herein incorporated by reference; Lo et al., Nucleic Acids Research 20:1005-1009 (1992), the entirety of which is herein incorporated by reference; Sarkar et al., Genomics 13:441-443 (1992), the entirety of which is herein incorporated by reference). It is understood that one or more of the nucleic acids of the present invention, may be utilized as markers or probes to detect polymorphisms by SSCP analysis.

[0135] Polymorphisms may also be found using a DNA fingerprinting technique called amplified fragment length polymorphism (AFLP), which is based on the selective PCR amplification of restriction fragments from a total digest of genomic DNA to profile that DNA. Vos et al., Nucleic Acids Res. 23:4407-4414 (1995), the entirety of which is herein incorporated by reference. This method allows for the specific co-amplification of high numbers of restriction fragments, which can be visualized by PCR without knowledge of the nucleic acid sequence.

[0136] AFLP employs basically three steps. Initially, a sample of genomic DNA is cut with restriction enzymes and oligonucleotide adapters are ligated to the restriction fragments of the DNA. The restriction fragments are then amplified using PCR by using the adapter and restriction sequence as target sites for primer annealing. The selective amplification is achieved by the use of primers that extend into the restriction fragments, amplifying only those fragments in which the primer extensions match the nucleotide flanking the restriction sites. These amplified fragments are then visualized on a denaturing polyacrylamide gel.

[0137] AFLP analysis has been performed on Salix (Beismann et al., Mol. Ecol. 6:989-993 (1997), the entirety of which is herein incorporated by reference); Acinetobacter (Janssen et al., Int. J. Syst. Bacteriol 47:1179-1187 (1997), the entirety of which is herein incorporated by reference), Aeromonas popoffi (Huys et al., Int. J. Syst. Bacteriol. 47:1165-1171 (1997), the entirety of which is herein incorporated by reference), rice (McCouch et al., Plant Mol. Biol. 35:89-99 (1997), the entirety of which is herein incorporated by reference); Nandi et al., Mol. Gen. Genet. 255:1-8 (1997); Cho et al., Genome 39:373-378 (1996), herein incorporated by reference), barley (Hordeum vulgare) (Simons et al., Genomics 44:61-70 (1997), the entirety of which is herein incorporated by reference; Waugh et al., Mol. Gen. Genet. 255:311-321 (1997), the entirety of which is herein incorporated by reference; Qi et al., Mol. Gen. Genet. 254:330-336 (1997), the entirety of which is herein incorporated by reference; Becker et al., Mol. Gen. Genet. 249:65-73 (1995), the entirety of which is herein incorporated by reference), potato (Van der Voort et al., Mol. Gen. Genet. 255:438-447 (1997), the entirety of which is herein incorporated by reference; Meksem et al., Mol. Gen. Genet. 249:74-81 (1995), the entirety of which is herein incorporated by reference), Phytophthora infestans (Van der Lee et al., Fungal Genet. Biol. 21:278-291 (1997), the entirety of which is herein incorporated by reference), Bacillus anthracis (Keim et al., J. Bacteriol. 179:818-824 (1997)), Astragalus cremnophylax (Travis et al., Mol. Ecol. 5:735-745 (1996), the entirety of which is herein incorporated by reference), Arabidopsis (Cnops et al., Mol. Gen. Genet. 253:32-41 (1996), the entirety of which is herein incorporated by reference), Escherichia coli (Lin et al., Nucleic Acids Res. 24:3649-3650 (1996), the entirety of which is herein incorporated by reference), Aeromonas (Huys et al., Int. J. Syst. Bacteriol. 46:572-580 (1996), the entirety of which is herein incorporated by reference), nematode (Folkertsma et al., Mol. Plant. Microbe Interact. 9:47-54 (1996), the entirety of which is herein incorporated by reference), tomato (Thomas et al., Plant J. 8:785-794 (1995), the entirety of which is herein incorporated by reference), and human (Latorra et al., PCR Methods Appl. 3:351-358 (1994) the entirety of which is herein incorporated by reference). AFLP analysis has also been used for fingerprinting mRNA (Money et al., Nucleic Acids Res. 24:2616-2617 (1996), the entirety of which is herein incorporated by reference; Bachem et al., Plant J. 9:745-753 (1996), the entirety of which is herein incorporated by reference). It is understood that one or more of the nucleic acid molecules of the present invention, may be utilized as markers or probes to detect polymorphisms by AFLP analysis for fingerprinting mRNA.

[0138] Polymorphisms may also be found using random amplified polymorphic DNA (RAPD) (Williams et al., Nucl. Acids Res. 18:6531-6535 (1990), the entirety of which is herein incorporated by reference) and cleaveable amplified polymorphic sequences (CAPS) (Lyamichev et al., Science 260:778-783 (1993), the entirety of which is herein incorporated by reference). It is understood that one or more of the nucleic acid molecules of the present invention, may be utilized as markers or probes to detect polymorphisms by RAPD or CAPS analysis.

[0139] Nucleic acid molecules of the present invention can be used to monitor expression. In an aspect of the present invention, one or more of the nucleic molecules of the present invention are used to determine whether a plant has a mutation affecting the level (i.e., the concentration of mRNA in a sample, etc.) or pattern (i.e., the kinetics of expression, rate of decomposition, stability profile, etc.) of the expression encoded in part or whole by one or more of the nucleic acid molecule of the present invention (collectively, the “Expression Response” of a cell or tissue). As used herein, the Expression Response manifested by a cell or tissue is said to be “altered” if it differs from the Expression Response of cells or tissues of plants not exhibiting the phenotype. To determine whether a Expression Response is altered, the Expression Response manifested by the cell or tissue of the plant exhibiting the phenotype is compared with that of a similar cell or tissue sample of a plant not exhibiting the phenotype. As will be appreciated, it is not necessary to re-determine the Expression Response of the cell or tissue sample of plants not exhibiting the phenotype each time such a comparison is made; rather, the Expression Response of a particular plant may be compared with previously obtained values of normal plants. As used herein, the phenotype of the organism is any of one or more characteristics of an organism (e.g., disease resistance, pest tolerance, environmental tolerance such as tolerance to abiotic stress, male sterility, quality improvement or yield etc.). A change in genotype or phenotype may be transient or permanent. Also as used herein, a tissue sample is any sample that comprises more than one cell. In a preferred aspect, a tissue sample comprises cells that share a common characteristic (e.g., derived from root, seed, flower, leaf, stem or pollen etc.).

[0140] In one sub-aspect, such an analysis is conducted by determining the presence and/or identity of polymorphism(s) by one or more of the nucleic acid molecules of the present invention which are associated with a phenotype, or a predisposition to that phenotype.

[0141] A microarray-based method for high-throughput monitoring of plant gene expression may be utilized to measure gene-specific hybridization targets. This ‘chip’-based approach involves using microarrays of nucleic acid molecules as gene-specific hybridization targets to quantitatively measure expression of the corresponding plant genes (Schena et al., Science 270:467-470 (1995), the entirety of which is herein incorporated by reference; Shalon, Ph.D. Thesis, Stanford University (1996), the entirety of which is herein incorporated by reference). Every nucleotide in a large sequence can be queried at the same time. Hybridization can be used to efficiently analyze nucleotide sequences.

[0142] Several microarray methods have been described. One method compares the sequences to be analyzed by hybridization to a set of oligonucleotides or cDNA molecules representing all possible subsequences (Bains and Smith, J. Theor. Biol. 135:303 (1989), the entirety of which is herein incorporated by reference). A second method hybridizes the sample to an array of oligonucleotide or cDNA probes. An array consisting of oligonucleotides or cDNA molecules complementary to subsequences of a target sequence can be used to determine the identity of a target sequence, measure its amount, and detect differences between the target and a reference sequence. Nucleic acid molecules microarrays may also be screened with protein molecules or fragments thereof to determine nucleic acid molecules that specifically bind protein molecules or fragments thereof.

[0143] The microarray approach may also be used with polypeptide targets (U.S. Pat. No. 5,445,934; U.S. Pat. No. 5,143,854; U.S. Pat. No. 5,079,600; U.S. Pat. No. 4,923,901, all of which are herein incorporated by reference in their entirety). Essentially, polypeptides are synthesized on a substrate (microarray) and these polypeptides can be screened with either protein molecules or fragments thereof or nucleic acid molecules in order to screen for either protein molecules or fragments thereof or nucleic acid molecules that specifically bind the target polypeptides (Fodor et al., Science 251:767-773 (1991), the entirety of which is herein incorporated by reference).

[0144] It is understood that one or more of the molecules of the present invention, preferably one or more of the nucleic acid molecules or protein molecules or fragments thereof of the present invention may be utilized in a microarray based method. In a preferred embodiment of the present invention, one or more of the Arabidopsis Columbia nucleic acid molecules or protein molecules or fragments thereof of the present invention may be utilized in a microarray based method. A particular preferred microarray embodiment of the present invention is a microarray comprising nucleic acid molecules encoding genes or fragments thereof that are homologues of known genes or nucleic acid molecules that comprise genes or fragments thereof that elicit only limited or no matches to known genes. A further preferred microarray embodiment of the present invention is a microarray comprising nucleic acid molecules encoding genes or fragments thereof that are homologues of known genes and nucleic acid molecules that comprise genes or fragments thereof that elicit only limited or no matches to known genes.

[0145] Nucleic acid molecules of the present invention may be used in site directed mutagenesis. Site-directed mutagenesis may be utilized to modify nucleic acid sequences, particularly as it is a technique that allows one or more of the amino acids encoded by a nucleic acid molecule to be altered (e.g., a threonine to be replaced by a methionine). Three basic methods for site-directed mutagenesis are often employed. These are cassette mutagenesis (Wells et al., Gene 34:315-23 (1985), the entirety of which is herein incorporated by reference), primer extension (Gilliam et al., Gene 12:129-137 (1980), the entirety of which is herein incorporated by reference; Zoller and Smith, Methods Enzymol. 100:468-500 (1983), the entirety of which is herein incorporated by reference; Dalbadie-McFarland et al., Proc. Natl. Acad. Sci. (U.S.A.) 79:6409-6413 (1982), the entirety of which is herein incorporated by reference) and methods based upon PCR (Scharf et al., Science 233:1076-1078 (1986), the entirety of which is herein incorporated by reference; Higuchi et al., Nucleic Acids Res. 16:7351-7367 (1988), the entirety of which is herein incorporated by reference). Site-directed mutagenesis approaches are also described in European Patent 0 385 962, the entirety of which is herein incorporated by reference, European Patent 0 359 472, the entirety of which is herein incorporated by reference, and U.S. Pat. No. 5,625,136, the entirety of which is herein incorporated by reference.

[0146] Site-directed mutagenesis strategies have been applied to plants for both in vitro as well as in vivo site-directed mutagenesis (Lanz et al., J. Biol. Chem. 266:9971-9976 (1991), the entirety of which is herein incorporated by reference; Kovgan and Zhdanov, Biotekhnologiya 5:148-154, No. 207160n, Chemical Abstracts 110:225 (1989), the entirety of which is herein incorporated by reference; Ge et al., Proc. Natl. Acad. Sci. (U.S.A.) 86:4037-4041 (1989), the entirety of which is herein incorporated by reference; Zhu et al., J. Biol. Chem. 271:18494-18498 (1996), Chu et al., Biochemistry 33:6150-6157 (1994), the entirety of which is herein incorporated by reference; Small et al., EMBO J. 11: 1291-1296 (1992), the entirety of which is herein incorporated by reference; Cho et al., Mol. Biotechnol. 8:13-16 (1997), Kita et al., J. Biol. Chem. 271:26529-26535 (1996), the entirety of which is herein incorporated by reference, Jin et al., Mol. Microbiol. 7:555-562 (1993), the entirety of which is herein incorporated by reference, Hatfield and Vierstra, J. Biol. Chem. 267:14799-14803 (1992), the entirety of which is herein incorporated by reference, Zhao et al., Biochemistry 31:5093-5099 (1992), the entirety of which is herein incorporated by reference).

[0147] Any of the nucleic acid molecules of the present invention may either be modified by site-directed mutagenesis or used as, for example, nucleic acid molecules that are used to target other nucleic acid molecules for modification. It is understood that mutants with more than one altered nucleotide can be constructed using techniques that practitioners skilled in the art are familiar with such as isolating restriction fragments and ligating such fragments into an expression vector (see, for example, Sambrook et al., Molecular Cloning: A Laboratory Manual, Cold Spring Harbor Press, New York (1989)). In a preferred embodiment of the present invention, one or more of the Arabidopsis nucleic acid molecules or fragments thereof of the present invention may be modified by site-directed mutagenesis.

[0148] Nucleic acid molecules of the present invention may be used in transformation. Exogenous genetic material may be transferred into a plant cell and the plant cell regenerated into a whole, fertile or sterile plant. Exogenous genetic material is any genetic material, whether naturally occurring or otherwise, from any source that is capable of being inserted into any organism. In a preferred embodiment of the present invention the exogenous genetic material can include Arabidopsis genetic material. Such genetic material may be transferred into either monocotyledons and dicotyledons including, but not limited to maize (pp. 63-69), soybean (pp. 50-60), Arabidopsis (p 45), phaseolus (pp. 47-49), peanut (pp. 49-50), alfalfa (p 60), wheat (pp. 69-71), rice (pp. 72-79), oat (pp. 80-81), sorghum (p 83), rye (p 84), tritordeum (p 84), millet (p85), fescue (p 85), perennial ryegrass (p 86), sugarcane (p87), cranberry (p110), papaya (pp. 101-102), banana (p 103), banana (p 103), muskmelon (p 104), apple (p 104), cucumber (p 105), dendrobium (p 109), gladiolus (p 110), chrysanthemum (p 110), liliacea (p 111), cotton (pp113-114), eucalyptus (p 115), sunflower (p 118), canola (p 118), turfgrass (p121), sugarbeet (p 122), coffee (p 122), and dioscorea (p 122), (Christou, In: Particle Bombardment for Genetic Engineering of Plants, Biotechnology Intelligence Unit. Academic Press, San Diego, Calif. (1996), the entirety of which is herein incorporated by reference). Transfer of a nucleic acid that encodes for a protein can result in overexpression of that protein in a transformed cell or transgenic plant. One or more of the proteins or fragments thereof encoded by nucleic acid molecules of the present invention may be overexpressed in a transformed cell or transformed plant. Such overexpression may be the result of transient or stable transfer of the exogenous material.

[0149] Exogenous genetic material may be transferred into a plant cell by the use of a DNA vector or construct designed for such a purpose. Vectors have been engineered for transformation of large DNA inserts into plant genomes. BACs (binary bacterial artificial chromosomes) have been designed to replicate in both E. coli and A. tumefaciens and have all of the features required for transferring large inserts of DNA into plant chromosomes Choi and Wing, http://genome.clemson.edu/protocols2-nj.html July, 1998. ApBACwich system has been developed to achieve site-directed integration of DNA into the genome. A 150 kb cotton BAC DNA is reported to have been transferred into a specific lox site in tobacco by biolistic bombardment and Cre-lox site specific recombination.

[0150] A construct or vector may include a plant promoter to express the protein or protein fragment of choice. A number of promoters which are active in plant cells have been described in the literature. These include the nopaline synthase (NOS) promoter (Ebert et al., Proc. Natl. Acad. Sci. (U.S.A.) 84:5745-5749 (1987), the entirety of which is herein incorporated by reference), the octopine synthase (OCS) promoter (which are carried on tumor-inducing plasmids of Agrobacterium tumefaciens), the caulimovirus promoters such as the cauliflower mosaic virus (CaMV) 19S promoter (Lawton et al., Plant Mol. Biol. 9:315-324 (1987), the entirety of which is herein incorporated by reference) and the CAMV 35S promoter (Odell et al., Nature 313:810-812 (1985) the entirety of which is herein incorporated by reference), the figwort mosaic virus 35S-promoter, the light-inducible promoter from the small subunit of ribulose-1,5-bis-phosphate carboxylase (ssRUBISCO), the Adh promoter (Walker et al., Proc. Natl. Acad. Sci. (U.S.A.) 84:6624-6628 (1987), the entirety of which is herein incorporated by reference), the sucrose synthase promoter (Yang et al., Proc. Natl. Acad. Sci. (U.S.A.) 87:4144-4148 (1990), the entirety of which is herein incorporated by reference), the R gene complex promoter (Chandler et al., The Plant Cell 1:1175-1183 (1989), the entirety of which is herein incorporated by reference), and the chlorophyll a/b binding protein gene promoter, etc. These promoters have been used to create DNA constructs which have been expressed in plants; see, e.g., PCT publication WO 84/02913, herein incorporated by reference in its entirety.

[0151] Promoters which are known or are found to cause transcription of DNA in plant cells can be used in the present invention. Such promoters may be obtained from a variety of sources such as plants and plant viruses. It is preferred that the particular promoter selected should be capable of causing sufficient expression to result in the production of an effective amount of protein to cause the desired phenotype. In addition to promoters which are known to cause transcription of DNA in plant cells, other promoters may be identified for use in the current invention by screening a plant cDNA library for genes which are selectively or preferably expressed in the target tissues or cells.

[0152] For the purpose of expression in source tissues of the plant, such as the leaf, seed, root or stem, it is preferred that the promoters utilized in the present invention have relatively high expression in these specific tissues. For this purpose, one may choose from a number of promoters for genes with tissue- or cell-specific or -enhanced expression. Examples of such promoters reported in the literature include the chloroplast glutamine synthetase GS2 promoter from pea (Edwards et al., Proc. Natl. Acad. Sci. (U.S.A.) 87:3459-3463 (1990), herein incorporated by reference in its entirety), the chloroplast fructose-1,6-biphosphatase (FBPase) promoter from wheat (Lloyd et al., Mol. Gen. Genet. 225:209-216 (1991), herein incorporated by reference in its entirety), the nuclear photosynthetic ST-LS1 promoter from potato (Stockhaus et al., EMBO J. 8:2445-2451 (1989), herein incorporated by reference in its entirety), the phenylalanine ammonia-lyase (PAL) promoter and the chalcone synthase (CHS) promoter from Arabidopsis thaliana. Also reported to be active in photosynthetically active tissues are the ribulose-1,5-bisphosphate carboxylase (RbcS) promoter from eastern larch (Larix laricina), the promoter for the cab gene, cab6, from pine (Yamamoto et al., Plant Cell Physiol. 35:773-778 (1994), herein incorporated by reference in its entirety), the promoter for the Cab-1 gene from wheat (Fejes et al., Plant Mol. Biol. 15:921-932 (1990), herein incorporated by reference in its entirety), the promoter for the CAB-1 gene from spinach (Lubberstedt et al., Plant Physiol. 104:997-1006 (1994), herein incorporated by reference in its entirety), the promoter for the cab1R gene from rice (Luan et al., Plant Cell. 4:971-981 (1992), the entirety of which is herein incorporated by reference), the pyruvate, orthophosphate dikinase (PPDK) promoter from maize (Matsuoka et al., Proc. Natl. Acad. Sci. (U.S.A.) 90:9586-9590 (1993), herein incorporated by reference in its entirety), the promoter for the tobacco Lhcb1*2 gene (Cerdan et al., Plant Mol. Biol. 33:245-255. (1997), herein incorporated by reference in its entirety), the Arabidopsis thaliana SUC2 sucrose-H+ symporter promoter (Truernit et al., Planta. 196:564-570 (1995), herein incorporated by reference in its entirety), and the promoter for the thylacoid membrane proteins from spinach (psaD, psaF, psaE, PC, FNR, atpC, atpD, cab, rbcS). Other promoters for the chlorophyll a/b-binding proteins may also be utilized in the present invention, such as the promoters for LhcB gene and PsbP gene from white mustard (Sinapis alba; Kretsch et al., Plant Mol. Biol. 28:219-229 (1995), the entirety of which is herein incorporated by reference).

[0153] For the purpose of expression in sink tissues of the plant, such as the tuber of the potato plant, the fruit of tomato, or the seed of maize, wheat, rice, and barley, it is preferred that the promoters utilized in the present invention have relatively high expression in these specific tissues. A number of promoters for genes with tuber-specific or -enhanced expression are known, including the class I patatin promoter (Bevan et al., EMBO J. 8:1899-1906 (1986); Jefferson et al., Plant Mol. Biol. 14995-1006 (1990), both of which are herein incorporated by reference in its entirety), the promoter for the potato tuber ADPGPP genes, both the large and small subunits, the sucrose synthase promoter (Salanoubat and Belliard, Gene. 60:47-56 (1987), Salanoubat and Belliard, Gene. 84:181-185 (1989), both of which are incorporated by reference in their entirety), the promoter for the major tuber proteins including the 22 kd protein complexes and proteinase inhibitors (Hannapel, Plant Physiol. 101:703-704 (1993), herein incorporated by reference in its entirety), the promoter for the granule bound starch synthase gene (GBSS) (Visser et al., Plant Mol. Biol. 17:691-699 (1991), herein incorporated by reference in its entirety), and other class I and II patatins promoters (Koster-Topfer et al., Mol. Gen. Genet. 219:390-396 (1989); Mignery et al., Gene. 62:27-44 (1988), both of which are herein incorporated by reference in their entirety).

[0154] Other promoters can also be used to express a fructose 1,6 bisphosphate aldolase gene in specific tissues, such as seeds or fruits. The promoter for β-conglycinin (Chen et al., Dev. Genet. 10:112-122 (1989), herein incorporated by reference in its entirety) or other seed-specific promoters such as the napin and phaseolin promoters, can be used. The zeins are a group of storage proteins found in maize endosperm. Genomic clones for zein genes have been isolated (Pedersen et al., Cell 29:1015-1026 (1982), herein incorporated by reference in its entirety), and the promoters from these clones, including the 15 kD, 16 kD, 19 kD, 22 kD, 27 kD, and gamma genes, could also be used. Other promoters known to function, for example, in maize, include the promoters for the following genes: waxy, Brittle, Shrunken 2, Branching enzymes I and II, starch synthases, debranching enzymes, oleosins, glutelins, and sucrose synthases. A particularly preferred promoter for maize endosperm expression is the promoter for the glutelin gene from rice, more particularly the Osgt-1 promoter (Zheng et al., Mol. Cell. Biol. 13:5829-5842 (1993), herein incorporated by reference in its entirety). Examples of promoters suitable for expression in wheat include those promoters for the ADPglucose pyrophosphorylase (ADPGPP) subunits, the granule bound and other starch synthases, the branching and debranching enzymes, the embryogenesis-abundant proteins, the gliadins, and the glutenins. Examples of such promoters in rice include those promoters for the ADPGPP subunits, the granule bound and other starch synthases, the branching enzymes, the debranching enzymes, sucrose synthases, and the glutelins. A particularly preferred promoter is the promoter for rice glutelin, Osgt-1. Examples of such promoters for barley include those for the ADPGPP subunits, the granule bound and other starch synthases, the branching enzymes, the debranching enzymes, sucrose synthases, the hordeins, the embryo globulins, and the aleurone specific proteins.

[0155] Root specific promoters may also be used. An example of such a promoter is the promoter for the acid chitinase gene (Samac et al., Plant Mol. Biol. 25:587-596 (1994), the entirety of which is herein incorporated by reference). Expression in root tissue could also be accomplished by utilizing the root specific subdomains of the CaMV35S promoter that have been identified (Lam et al., Proc. Natl. Acad. Sci. (U.S.A.) 86:7890-7894 (1989), herein incorporated by reference in its entirety). Other root cell specific promoters include those reported by Conkling et al. (Conkling et al., Plant Physiol. 93:1203-1211 (1990), the entirety of which is herein incorporated by reference).

[0156] Additional promoters that may be utilized are described, for example, in U.S. Pat. Nos. 5,378,619, 5,391,725, 5,428,147, 5,447,858, 5,608,144, 5,608,144, 5,614,399, 5,633,441, 5,633,435, and 4,633,436, all of which are herein incorporated in their entirety. In addition, a tissue specific enhancer may be used (Fromm et al., The Plant Cell 1:977-984 (1989), the entirety of which is herein incorporated by reference). Further promoters are described in Agents of the Invention Section (a)(i). It is further understood that one or more of the promoters of the present invention may be used.

[0157] Constructs or vectors may also include, with the coding region of interest, a nucleic acid sequence that acts, in whole or in part, to terminate transcription of that region. For example, such sequences have been isolated including the Tr7 3′ sequence and the nos 3′ sequence (Ingelbrecht et al., The Plant Cell 1:671-680 (1989), the entirety of which is herein incorporated by reference; Bevan et al., Nucleic Acids Res. 11:369-385 (983), the entirety of which is herein incorporated by reference), or the like. It is understood that one or more sequences of the present invention that act, to terminate transcription may be used.

[0158] A vector or construct may also include other regulatory elements. Examples of such include the Adh intron 1 (Callis et al., Genes and Develop. 1: 1183-1200 (1987), the entirety of which is herein incorporated by reference), the sucrose synthase intron (Vasil et al., Plant Physiol. 91:1575-1579 (1989), the entirety of which is herein incorporated by reference) and the TMV omega element (Gallie et al., The Plant Cell 1:301-311 (1989), the entirety of which is herein incorporated by reference). These and other regulatory elements may be included when appropriate. It is also understood that one or more of the regulatory regions of the present invention may be used.

[0159] A vector or construct may also include a selectable marker. Selectable markers may also be used to select for plants or plant cells that contain the exogenous genetic material. Examples of such include, but are not limited to, a neo gene (Potrykus et al., Mol. Gen. Genet. 199:183-188 (1985), the entirety of which is herein incorporated by reference) which codes for kanamycin resistance and can be selected for using kanamycin, G418, etc.; a bar gene which codes for bialaphos resistance; a mutant EPSP synthase gene (Hinchee et al., Bio/Technology 6:915-922 (1988), the entirety of which is herein incorporated by reference) which encodes glyphosate resistance; a nitrilase gene which confers resistance to bromoxynil (Stalker et al., J. Biol. Chem. 263:6310-6314 (1988), the entirety of which is herein incorporated by reference); a mutant acetolactate synthase gene (ALS) which confers imidazolinone or sulphonylurea resistance (European Patent Application 154,204 (Sep. 11, 1985), the entirety of which is herein incorporated by reference); and a methotrexate resistant DHFR gene (Thillet et al., J. Biol. Chem. 263:12500-12508 (1988), the entirety of which is herein incorporated by reference).

[0160] A vector or construct may also include a transit peptide. Incorporation of a suitable chloroplast transit peptide may also be employed (European Patent Application Publication Number 0218571, the entirety of which is herein incorporated by reference). Translational enhancers may also be incorporated as part of the vector DNA. DNA constructs could contain one or more 5′ non-translated leader sequences which may serve to enhance expression of the gene products from the resulting mRNA transcripts. Such sequences may be derived from the promoter selected to express the gene or can be specifically modified to increase translation of the mRNA. Such regions may also be obtained from viral RNAs, from suitable eukaryotic genes, or from a synthetic gene sequence. For a review of optimizing expression of transgenes, see Koziel et al., Plant Mol. Biol. 32:393-405 (1996), the entirety of which is herein incorporated by reference.

[0161] A vector or construct may also include a screenable marker. Screenable markers may be used to monitor expression. Exemplary screenable markers include a β-glucuronidase or uidA gene (GUS) which encodes an enzyme for which various chromogenic substrates are known (Jefferson, Plant Mol. Biol, Rep. 5:387-405 (1987), the entirety of which is herein incorporated by reference; Jefferson et al., EMBO J. 6:3901-3907 (1987), the entirety of which is herein incorporated by reference); an R-locus gene, which encodes a product that regulates the production of anthocyanin pigments (red color) in plant tissues ((Dellaporta et al., Stadler Symposium 11:263-282 (1988), the entirety of which is herein incorporated by reference); a β-lactamase gene (Sutcliffe et al., Proc. Natl. Acad. Sci. (U.S.A.) 75:3737-3741 (1978), the entirety of which is herein incorporated by reference), a gene which encodes an enzyme for which various chromogenic substrates are known (e.g., PADAC, a chromogenic cephalosporin); a luciferase gene (Ow et al., Science 234:856-859 (1986), the entirety of which is herein incorporated by reference) a xylE gene (Zukowsky et al., Proc. Natl. Acad. Sci. U.S.A. 80:1101-1105 (1983), the entirety of which is herein incorporated by reference) which encodes a catechol dioxygenase that can convert chromogenic catechols; an α-amylase gene (Ikatu et al., Bio/Technol. 8:241-242 (1990), the entirety of which is herein incorporated by reference); a tyrosinase gene (Katz et al., J. Gen. Microbiol. 129:2703-2714 (1983), the entirety of which is herein incorporated by reference) which encodes an enzyme capable of oxidizing tyrosine to DOPA and dopaquinone which in turn condenses to melanin; an α-galactosidase, which will turn a chromogenic α-galactose substrate.

[0162] Included within the terms “selectable or screenable marker genes” are also genes which encode a secretable marker whose secretion can be detected as a means of identifying or selecting for transformed cells. Examples include markers which encode a secretable antigen that can be identified by antibody interaction, or even secretable enzymes which can be detected catalytically. Secretable proteins fall into a number of classes, including small, diffusible proteins detectable, e.g., by ELISA, small active enzymes detectable in extracellular solution (e.g., α-amylase, β-lactamase, phosphinothricin transferase), or proteins which are inserted or trapped in the cell wall (such as proteins which include a leader sequence such as that found in the expression unit of extension or tobacco PR-S). Other possible selectable and/or screenable marker genes will be apparent to those of skill in the art.

[0163] Methods and compositions for transforming a bacteria and other microorganisms are known in the art (see for example Sambrook et al., Molecular Cloning: A Laboratory Manual, Second Edition, Cold Spring Harbor Laboratory Press, Cold Spring Harbor, N.Y., (1989), the entirety of which is herein incorporated by reference).

[0164] There are many methods for introducing transforming nucleic acid molecules into plant cells. Suitable methods are believed to include virtually any method by which nucleic acid molecules may be introduced into a cell, such as by Agrobacterium infection or direct delivery of nucleic acid molecules such as, for example, by PEG-mediated transformation, by electroporation or by acceleration of DNA coated particles, etc. (Potrykus, Ann. Rev. Plant Physiol. Plant Mol. Biol. 42:205-225 (1991), the entirety of which is herein incorporated by reference; Vasil, Plant Mol. Biol. 25:925-937 (1994), the entirety of which is herein incorporated by reference. For example, electroporation has been used to transform maize protoplasts (Fromm et al., Nature 312:791-793 (1986), the entirety of which is herein incorporated by reference).

[0165] Technology for introduction of DNA into cells is well known to those of skill in the art. Four general methods for delivering a gene into cells have been described: (1) chemical methods (Graham and van der Eb, Virology, 54:536-539 (1973), the entirety of which is herein incorporated by reference); (2) physical methods such as microinjection (Capecchi, Cell 22:479-488 (1980), electroporation (Wong and Neumann, Biochem. Biophys. Res. Commun., 107:584-587 (1982); Fromm et al., Proc. Natl. Acad. Sci. U.S.A., 82:5824-5828 (1985); U.S. Pat. No. 5,384,253; and the gene gun (Johnston and Tang, Methods Cell Biol. 43:353-365 (1994), all of which the entirety is herein incorporated by reference; (3) viral vectors (Clapp, Clin. Perinatol., 20:155-168 (1993); Lu et al., J. Exp. Med., 178:2089-2096 (1993); Eglitis and Anderson, Biotechniques, 6:608-614 (1988), all of which the entirety is herein incorporated by reference); and (4) receptor-mediated mechanisms (Curiel et al., Hum. Gen. Ther., 3:147-154 (1992); Wagner et al., Proc. Natl. Acad. Sci. (U.S.A.) 89:6099-6103 (1992), all of which the entirety is herein incorporated by reference).

[0166] Acceleration methods that may be used include, for example, microprojectile bombardment and the like. One example of a method for delivering transforming nucleic acid molecules to plant cells is microprojectile bombardment. This method has been reviewed by Yang and Christou, eds., Particle Bombardment Technology for Gene Transfer, Oxford Press, Oxford, England (1994), the entirety of which is herein incorporated by reference). Non-biological particles (microprojectiles) that may be coated with nucleic acids and delivered into cells by a propelling force. Exemplary particles include those comprised of tungsten, gold, platinum, and the like.

[0167] A particular advantage of microprojectile bombardment, in addition to it being an effective means of reproducibly, and stably transforming monocotyledons, is that neither the isolation of protoplasts (Cristou et al., Plant Physiol. 87:671-674 (1988), the entirety of which is herein incorporated by reference) nor the susceptibility of Agrobacterium infection is required. An illustrative embodiment of a method for delivering DNA into maize cells by acceleration is a biolistics γ-particle delivery system, which can be used to propel particles coated with DNA through a screen, such as a stainless steel or Nytex screen, onto a filter surface covered with corn cells cultured in suspension. Gordon-Kamm et al., describes the basic procedure for coating tungsten particles with DNA (Gordon-Kamm et al., Plant Cell 2:603-618 (1990), the entirety of which is herein incorporated by reference). The screen disperses the tungsten nucleic acid particles so that they are not delivered to the recipient cells in large aggregates. A particle delivery system suitable for use with the present invention is the helium acceleration PDS-1000/He gun which is available from Bio-Rad Laboratories (Bio-Rad, Hercules, Calif.) (Sanford et al., Technique 3:3-16 (1991), the entirety of which is herein incorporated by reference).

[0168] For the bombardment, cells in suspension may be concentrated on filters. Filters containing the cells to be bombarded are positioned at an appropriate distance below the microprojectile stopping plate. If desired, one or more screens are also positioned between the gun and the cells to be bombarded.

[0169] Alternatively, immature embryos or other target cells may be arranged on solid culture medium. The cells to be bombarded are positioned at an appropriate distance below the macroprojectile stopping plate. If desired, one or more screens are also positioned between the acceleration device and the cells to be bombarded. Through the use of techniques set forth herein one may obtain up to 1000 or more foci of cells transiently expressing a marker gene. The number of cells in a focus which express the exogenous gene product 48 hours post-bombardment often range from one to ten and average one to three.

[0170] In bombardment transformation, one may optimize the prebombardment culturing conditions and the bombardment parameters to yield the maximum numbers of stable transformants. Both the physical and biological parameters for bombardment are important in this technology. Physical factors are those that involve manipulating the DNA/microprojectile precipitate or those that affect the flight and velocity of either the macro- or microprojectiles. Biological factors include all steps involved in manipulation of cells before and immediately after bombardment, the osmotic adjustment of target cells to help alleviate the trauma associated with bombardment, and also the nature of the transforming DNA, such as linearized DNA or intact supercoiled plasmids. It is believed that pre-bombardment manipulations are especially important for successful transformation of immature embryos.

[0171] In another alternative embodiment, plastids can be stably transformed. Methods disclosed for plastid transformation in higher plants include the particle gun delivery of DNA containing a selectable marker and targeting of the DNA to the plastid genome through homologous recombination (Svab et al. Proc. Natl. Acad. Sci. (U.S.A.) 87:8526-8530 (1990): Svab and Maliga Proc. Natl. Acad. Sci. (U.S.A.) 90:913-917 (1993)); (Staub, J. M. and Maliga, P. EMBO J. 12:601-606 (1993), U.S. Pat. Nos. 5,451,513 and 5,545,818, all of which are herein incorporated by reference in their entirety).

[0172] Accordingly, it is contemplated that one may wish to adjust various aspects of the bombardment parameters in small scale studies to fully optimize the conditions. One may particularly wish to adjust physical parameters such as gap distance, flight distance, tissue distance, and helium pressure. One may also minimize the trauma reduction factors by modifying conditions which influence the physiological state of the recipient cells and which may therefore influence transformation and integration efficiencies. For example, the osmotic state, tissue hydration and the subculture stage or cell cycle of the recipient cells may be adjusted for optimum transformation. The execution of other routine adjustments will be known to those of skill in the art in light of the present disclosure.

[0173] Agrobacterium-mediated transfer is a widely applicable system for introducing genes into plant cells because the DNA can be introduced into whole plant tissues, thereby bypassing the need for regeneration of an intact plant from a protoplast. The use of Agrobacterium-mediated plant integrating vectors to introduce DNA into plant cells is well known in the art. See, for example the methods described (Fraley et al., Biotechnology 3:629-635 (1985); Rogers et al., Meth. Enzymol. 153:253-277 (1987), both of which are herein incorporated by reference in their entirety. Further, the integration of the Ti-DNA is a relatively precise process resulting in few rearrangements. The region of DNA to be transferred is defined by the border sequences, and intervening DNA is usually inserted into the plant genome as described (Spielmann et al., Mol. Gen. Genet., 205:34 (1986), the entirety of which is herein incorporated by reference).

[0174] Modern Agrobacterium transformation vectors are capable of replication in E. coli as well as Agrobacterium, allowing for convenient manipulations as described (Klee et al., In: Plant DNA Infectious Agents, T. Hohn and J. Schell, eds., Springer-Verlag, New York, pp. 179-203 (1985), the entirety of which is herein incorporated by reference). Moreover, recent technological advances in vectors for Agrobacterium-mediated gene transfer have improved the arrangement of genes and restriction sites in the vectors to facilitate construction of vectors capable of expressing various polypeptide coding genes. The vectors described have convenient multi-linker regions flanked by a promoter and a polyadenylation site for direct expression of inserted polypeptide coding genes and are suitable for present purposes (Rogers et al., Meth. Enzymo. 153:253-277 (1987), the entirety of which is herein incorporated by reference). In addition, Agrobacterium containing both armed and disarmed Ti genes can be used for the transformations. In those plant strains where Agrobacterium-mediated transformation is efficient, it is the method of choice because of the facile and defined nature of the gene transfer.

[0175] A transgenic plant formed using Agrobacterium transformation methods typically contains a single gene on one chromosome. Such transgenic plants can be referred to as being heterozygous for the added gene. More preferred is a transgenic plant that is homozygous for the added structural gene; i.e., a transgenic plant that contains two added genes, one gene at the same locus on each chromosome of a chromosome pair. A homozygous transgenic plant can be obtained by sexually mating (selfing) an independent segregant transgenic plant that contains a single added gene, germinating some of the seed produced and analyzing the resulting plants produced for the gene of interest.

[0176] It is also to be understood that two different transgenic plants can also be mated to produce offspring that contain two independently segregating added, exogenous genes. Selfing of appropriate progeny can produce plants that are homozygous for both added, exogenous genes that encode a polypeptide of interest. Back-crossing to a parental plant and out-crossing with a non-transgenic plant are also contemplated, as is vegetative propagation.

[0177] Transformation of plant protoplasts can be achieved using methods based on calcium phosphate precipitation, polyethylene glycol treatment, electroporation, and combinations of these treatments. See for example, Potrykus et al. Mol. Gen. Genet. 205:193-200 (1986); Lorz et al., Mol. Gen. Genet. 199:178 (1985); Fromm et al., Nature 319:791 (1986); Uchimiya et al., Mol. Gen. Genet. 204:204 (1986); Callis et al., Genes and Development 1183: (1987); and Marcotte et al., Nature 335:454 (1988), all of which the entirety is herein incorporated by reference.

[0178] Application of these systems to different plant strains depends upon the ability to regenerate that particular plant strain from protoplasts. Illustrative methods for the regeneration of cereals from protoplasts are described (Fujimura et al., Plant Tissue Culture Letters 2:74 (1985); Toriyama et al., Theor Appl. Genet. 205:34 (1986); Yamada et al., Plant Cell Rep. 4:85 (1986); Abdullah et al., Biotechnology 4:1087 (1986), all of which the entirety is herein incorporated by reference).

[0179] To transform plant strains that cannot be successfully regenerated from protoplasts, other ways to introduce DNA into intact cells or tissues can be utilized. For example, regeneration of cereals from immature embryos or explants can be effected as described (Vasil, Biotechnology 6:397 (1988), the entirety of which is herein incorporated by reference). In addition, “particle gun” or high-velocity microprojectile technology can be utilized (Vasil et al., Bio/Technology 10:667 (1992), the entirety of which is herein incorporated by reference).

[0180] Using the latter technology, DNA is carried through the cell wall and into the cytoplasm on the surface of small metal particles as described (Klein et al., Nature, 328:70, (1987); Klein et al., Proc. Natl. Acad. Sci. (U.S.A.) 85:8502-8505 (1988); McCabe et al., Biotechnolog, 6:923 (1988), all of which the entirety is herein incorporated by reference). The metal particles penetrate through several layers of cells and thus allow the transformation of cells within tissue explants.

[0181] Other methods of cell transformation can also be used and include but are not limited to introduction of DNA into plants by direct DNA transfer into pollen (Hess et al., Intern Rev. Cytol, 107:367 (1987); Luo et al., Plant Mol. Biol. Reporter 6:165 (1988), all of which the entirety is herein incorporated by reference), by direct injection of DNA into reproductive organs of a plant (Pena et al., Nature 325:274 (1987), the entirety of which is herein incorporated by reference), or by direct injection of DNA into the cells of immature embryos followed by the rehydration of dessicated embryos (Neuhaus et al., Theor. Appl. Genet. 75:30 (1987), the entirety of which is herein incorporated by reference).

[0182] The regeneration, development, and cultivation of plants from single plant protoplast transformants or from various transformed explants is well known in the art (Weissbach and Weissbach, In: Methods for Plant Molecular Biology, (Eds.), Academic Press, Inc. San Diego, Calif., (1988), the entirety of which is herein incorporated by reference). This regeneration and growth process typically includes the steps of selection of transformed cells, culturing those individualized cells through the usual stages of embryonic development through the rooted plantlet stage. Transgenic embryos and seeds are similarly regenerated. The resulting transgenic rooted shoots are thereafter planted in an appropriate plant growth medium such as soil.

[0183] The development or regeneration of plants containing the foreign, exogenous gene that encodes a protein of interest is well known in the art. Preferably, the regenerated plants are self-pollinated to provide homozygous transgenic plants, as discussed before. Otherwise, pollen obtained from the regenerated plants is crossed to seed-grown plants of agronomically important lines. Conversely, pollen from plants of these important lines is used to pollinate regenerated plants. A transgenic plant of the present invention containing a desired polypeptide is cultivated using methods well known to one skilled in the art.

[0184] There are a variety of methods for the regeneration of plants from plant tissue. The particular method of regeneration will depend on the starting plant tissue and the particular plant species to be regenerated.

[0185] Methods for transforming dicots, primarily by use of Agrobacterium tumefaciens, and obtaining transgenic plants have been published for cotton (U.S. Pat. No. 5,004,863, U.S. Pat. No. 5,159,135, U.S. Pat. No. 5,518,908, all of which the entirety is herein incorporated by reference); soybean (U.S. Pat. No. 5,569,834, U.S. Pat. No. 5,416,011, McCabe et al., Biotechnology 6:923 (1988), Christou et al., Plant Physiol. 87:671-674 (1988), all of which the entirety is herein incorporated by reference); Brassica (U.S. Pat. No. 5,463,174, the entirety of which is herein incorporated by reference); peanut (Cheng et al., Plant Cell Rep. 15:653-657 (1996), McKently et al., Plant Cell Rep. 14:699-703 (1995), all of which the entirety is herein incorporated by reference); papaya (Yang et al., (1996), the entirety of which is herein incorporated by reference); pea (Grant et al., Plant Cell Rep. 15:254-258, (1995), the entirety of which is herein incorporated by reference).

[0186] Transformation of monocotyledons using electroporation, particle bombardment, and Agrobacterium have also been reported. Transformation and plant regeneration have been achieved in asparagus (Bytebier et al., Proc. Natl. Acad. Sci. (U.S.A.) 84:5345 (1987), the entirety of which is herein incorporated by reference); barley (Wan and Lemaux, Plant Physiol 104:37 (1994), the entirety of which is herein incorporated by reference); maize (Rhodes et al., Science 240:204 (1988), Gordon-Kamm et al., Plant Cell, 2:603 (1990), Fromm et al., Bio/Technology 8:833 (1990), Koziel et al., Bio/Technology 11:194 (1993), Armstrong et al., Crop Science 35:550-557 (1995), all of which the entirety is herein incorporated by reference); oat (Somers et al., Bio/Technology, 10:1589 (1992), the entirety of which is herein incorporated by reference); orchardgrass (Horn et al., Plant Cell Rep. 7:469, (1988), the entirety of which is herein incorporated by reference); rice (Toriyama et al., Theor Appl. Genet. 205:34 (1986); Park et al., Plant Mol. Biol. 32:1135-1148 (1996); Abedinia et al., Aust. J. Plant Physiol. 24:133-141 (1997); Zhang and Wu, Theor. Appl. Genet. 76:835, (1988); Zhang et al. Plant Cell Rep. 7:379, (1988); Battraw and Hall, Plant Sci. 86:191-202 (1992); Christou et al., Bio/Technology 9:957 (1991), all of which the entirety is herein incorporated by reference); sugarcane (Bower and Birch, Plant J. 2:409 (1992), the entirety of which is herein incorporated by reference); tall fescue (Wang et al., Bio/Technology 10:691 (1992), the entirety of which is herein incorporated by reference), and wheat (Vasil et al., Bio/Technology 10:667 (1992), the entirety of which is herein incorporated by reference; U.S. Pat. No. 5,631,152, the entirety of which is herein incorporated by reference).

[0187] Assays for gene expression based on the transient expression of cloned nucleic acid constructs have been developed by introducing the nucleic acid molecules into plant cells by polyethylene glycol treatment, electroporation, or particle bombardment (Marcotte et al., Nature 335:454-457 (1988), the entirety of which is herein incorporated by reference; Marcotte et al., Plant Cell 1:523-532 (1989), the entirety of which is herein incorporated by reference; McCarty et al., Cell 66:895-905 (1991), the entirety of which is herein incorporated by reference; Hattori et al., Genes Dev. 6:609-618 (1992), the entirety of which is herein incorporated by reference; Goff et al., EMBO J. 9:2517-2522 (1990), the entirety of which is herein incorporated by reference). Transient expression systems may be used to functionally dissect gene constructs (See generally, Mailga et al., Methods in Plant Molecular Biology, Cold Spring Harbor Press (1995)).

[0188] Any of the nucleic acid molecules of the present invention may be introduced into a plant cell in a permanent or transient manner in combination with other genetic elements such as vectors, promoters enhancers etc. Further any of the nucleic acid molecules of the present invention may be introduced into a plant cell in a manner that allows for over expression of the protein or fragment thereof encoded by the nucleic acid molecule.

[0189] Nucleic acid molecules of the present invention may be used in cosuppression. Cosuppression is the reduction in expression levels, usually at the level of RNA, of a particular endogenous gene or gene family by the expression of a homologous sense construct that is capable of transcribing mRNA of the same strandedness as the transcript of the endogenous gene (Napoli et al., Plant Cell 2:279-289 (1990), the entirety of which is herein incorporated by reference; van der Krol et al., Plant Cell 2:291-299 (1990), the entirety of which is herein incorporated by reference). Cosuppression may result from stable transformation with a single copy nucleic acid molecule that is homologous to a nucleic acid sequence found with the cell (Prolls and Meyer, Plant J. 2:465-475 (1992), the entirety of which is herein incorporated by reference) or with multiple copies of a nucleic acid molecule that is homologous to a nucleic acid sequence found with the cell (Mittlesten et al., Mol. Gen. Genet. 244:325-330 (1994), the entirety of which is herein incorporated by reference). Genes, even though different, linked to homologous promoters may result in the cosuppression of the linked genes (Vaucheret, C. R. Acad. Sci. III 316: 1471-1483 (1993), the entirety of which is herein incorporated by reference).

[0190] This technique has, for example been applied to generate white flowers from red petunia and tomatoes that do not ripen on the vine. Up to 50% of petunia transformants that contained a sense copy of the chalcone synthase (CHS) gene produced white flowers or floral sectors; this was as a result of the post-transcriptional loss of mRNA encoding CHS (Flavell, Proc. Natl. Acad. Sci. (U.S.A.) 91:3490-3496 (1994)), the entirety of which is herein incorporated by reference). Cosuppression may require the coordinate transcription of the transgene and the endogenous gene, and can be reset by a developmental control mechanism (Jorgensen, Trends Biotechnol. 8:340344 (1990), the entirety of which is herein incorporated by reference; Meins and Kunz, In: Gene Inactivation and Homologous Recombination in Plants (Paszkowski, J., ed.), pp. 335-348. Kluwer Academic, Netherlands (1994), the entirety of which is herein incorporated by reference).

[0191] It is understood that one or more of the nucleic acids of the present invention comprising an protein coding region or fragment thereof located within SEQ ID NO: 1 through SEQ ID NO: 51,470 or complement thereof or fragment of either, may be introduced into a plant cell and transcribed using an appropriate promoter with such transcription resulting in the co-suppression of an endogenous protein.

[0192] Nucleic acid molecules of the present invention may be used to reduce gene function. Antisense approaches are a way of preventing or reducing gene function by targeting the genetic material (Mol et al., FEBS Lett. 268:427-430 (1990), the entirety of which is herein incorporated by reference). The objective of the antisense approach is to use a sequence complementary to the target gene to block its expression and create a mutant cell line or organism in which the level of a single chosen protein is selectively reduced or abolished. Antisense techniques have several advantages over other ‘reverse genetic’ approaches. The site of inactivation and its developmental effect can be manipulated by the choice of promoter for antisense genes or by the timing of external application or microinjection. Antisense can manipulate its specificity by selecting either unique regions of the target gene or regions where it shares homology to other related genes (Hiatt et al., In Genetic Engineering, Setlow (ed.), Vol. 11, New York: Plenum 49-63 (1989), the entirety of which is herein incorporated by reference).

[0193] The principle of regulation by antisense RNA is that RNA that is complementary to the target mRNA is introduced into cells, resulting in specific RNA:RNA duplexes being formed by base pairing between the antisense substrate and the target mRNA (Green et al., Annu. Rev. Biochem. 55:569-597 (1986), the entirety of which is herein incorporated by reference). Under one embodiment, the process involves the introduction and expression of an antisense gene sequence. Such a sequence is one in which part or all of the normal gene sequences are placed under a promoter in inverted orientation so that the ‘wrong’ or complementary strand is transcribed into a noncoding antisense RNA that hybridizes with the target mRNA and interferes with its expression (Takayama and Inouye, Crit. Rev. Biochem. Mol. Biol. 25:155-184 (1990), the entirety of which is herein incorporated by reference). An antisense vector is constructed by standard procedures and introduced into cells by transformation, transfection, electroporation, microinjection, or by infection, etc. The type of transformation and choice of vector will determine whether expression is transient or stable. The promoter used for the antisense gene may influence the level, timing, tissue, specificity, or inducibility of the antisense inhibition.

[0194] It is understood that protein synthesis activity in a plant cell may be reduced or depressed by growing a transformed plant cell containing a nucleic acid molecule of the present invention.

[0195] Antibodies have been expressed in plants (Hiatt et al., Nature 342:76-78 (1989), the entirety of which is herein incorporated by reference; Conrad and Fielder, Plant Mol. Biol. 26:1023-1030 (1994), the entirety of which is herein incorporated by reference). Cytoplasmic expression of a scFv (single-chain Fv antibodies) has been reported to delay infection by artichoke mottled crinkle virus. Transgenic plants that express antibodies directed against endogenous proteins may exhibit a physiological effect (Philips et al., EMBO J. 16:4489-4496 (1997), the entirety of which is herein incorporated by reference; Marion-Poll, Trends in Plant Science 2:447-448 (1997), the entirety of which is herein incorporated by reference). For example, expressed anti-abscisic antibodies reportedly result in a general perturbation of seed development (Philips et al., EMBO J. 16:4489-4496 (1997)).

[0196] Antibodies that are catalytic may also be expressed in plants (abzymes). The principle behind abzymes is that since antibodies may be raised against many molecules, this recognition ability can be directed toward generating antibodies that bind transition states to force a chemical reaction forward (Persidas, Nature Biotechnology 15:1313-1315 (1997), the entirety of which is herein incorporated by reference; Baca et al., Ann. Rev. Biophys. Biomol. Struct. 26:461-493 (1997), the entirety of which is herein incorporated by reference). The catalytic abilities of abzymes may be enhanced by site directed mutagenesis. Examples of abzymes are, for example, set forth in U.S. Pat. No. 5,658,753; U.S. Pat. No. 5,632,990; U.S. Pat. No. 5,631,137; U.S. Pat. No. 5,602,015; U.S. Pat. No. 5,559,538; U.S. Pat. No. 5,576,174; U.S. Pat. No. 5,500,358; U.S. Pat. No. 5,318,897; U.S. Pat. No. 5,298,409; U.S. Pat. No. 5,258,289 and U.S. Pat. No. 5,194,585, all of which are herein incorporated in their entirety.

[0197] It is understood that any of the antibodies of the present invention may be expressed in plants and that such expression can result in a physiological effect. It is also understood that any of the expressed antibodies may be catalytic.

[0198] In addition to the above discussed procedures, practitioners are familiar with the standard resource materials which describe specific conditions and procedures for the construction, manipulation and isolation of macromolecules (e.g., DNA molecules, plasmids, etc.), generation of recombinant organisms and the screening and isolating of clones, (see for example, Sambrook et al., Molecular Cloning: A Laboratory Manual, Cold Spring Harbor Press (1989); Mailga et al., Methods in Plant Molecular Biology, Cold Spring Harbor Press (1995), the entirety of which is herein incorporated by reference; Birren et al., Genome Analysis: Analyzing DNA, 1, Cold Spring Harbor, N.Y., the entirety of which is herein incorporated by reference).

[0199] The nucleotide sequence provided in SEQ ID NO: 1, through SEQ ID NO: 51,470 or fragment thereof, or complement thereof, or a nucleotide sequence at least 90% identical, preferably 95%, identical even more preferably 99% or 100% identical to the sequence provided in SEQ ID NO: 1 through SEQ ID NO: 51,470 or fragment thereof, or complement thereof, can be “provided” in a variety of mediums to facilitate use. Such a medium can also provide a subset thereof in a form that allows a skilled artisan to examine the sequences.

[0200] In one application of this embodiment, a nucleotide sequence of the present invention can be recorded on computer readable media. As used herein, “computer readable media” refers to any medium that can be read and accessed directly by a computer. Such media include, but are not limited to: magnetic storage media, such as floppy discs, hard disc, storage medium, and magnetic tape: optical storage media such as CD-ROM; electrical storage media such as RAM and ROM; and hybrids of these categories such as magnetic/optical storage media. A skilled artisan can readily appreciate how any of the presently known computer readable mediums can be used to create a manufacture comprising computer readable medium having recorded thereon a nucleotide sequence of the present invention.

[0201] As used herein, “recorded” refers to a process for storing information on computer readable medium. A skilled artisan can readily adopt any of the presently known methods for recording information on computer readable medium to generate media comprising the nucleotide sequence information of the present invention. A variety of data storage structures are available to a skilled artisan for creating a computer readable medium having recorded thereon a nucleotide sequence of the present invention. The choice of the data storage structure will generally be based on the means chosen to access the stored information. In addition, a variety of data processor programs and formats can be used to store the nucleotide sequence information of the present invention on computer readable medium. The sequence information can be represented in a word processing text file, formatted in commercially-available software such as WordPerfect and Microsoft Word, or represented in the form of an ASCII file, stored in a database application, such as DB2, Sybase, Oracle, or the like. A skilled artisan can readily adapt any number of data processor structuring formats (e.g., text file or database) in order to obtain computer readable medium having recorded thereon the nucleotide sequence information of the present invention.

[0202] By providing one or more of nucleotide sequences of the present invention, a skilled artisan can routinely access the sequence information for a variety of purposes. Computer software is publicly available which allows a skilled artisan to access sequence information provided in a computer readable medium. The examples which follow demonstrate how software which implements the BLAST (Altschul et al., J. Mol. Biol. 215:403-410 (1990)) and BLAZE (Brutlag et al., Comp. Chem. 17:203-207 (1993), the entirety of which is herein incorporated by reference) search algorithms on a Sybase system can be used to identify open reading frames (ORFs) within the genome that contain homology to ORFs or proteins from other organisms. Such ORFs are protein-encoding fragments within the sequences of the present invention and are useful in producing commercially important proteins such as enzymes used in amino acid biosynthesis, metabolism, transcription, translation, RNA processing, nucleic acid and a protein degradation, protein modification, and DNA replication, restriction, modification, recombination, and repair.

[0203] The present invention further provides systems, particularly computer-based systems, which contain the sequence information described herein. Such systems are designed to identify commercially important fragments of the nucleic acid molecule of the present invention. As used herein, “a computer-based system” refers to the hardware means, software means, and data storage means used to analyze the nucleotide sequence information of the present invention. The minimum hardware means of the computer-based systems of the present invention comprises a central processing unit (CPU), input means, output means, and data storage means. A skilled artisan can readily appreciate that any one of the currently available computer-based system are suitable for use in the present invention.

[0204] As indicated above, the computer-based systems of the present invention comprise a data storage means having stored therein a nucleotide sequence of the present invention and the necessary hardware means and software means for supporting and implementing a search means. As used herein, “data storage means” refers to memory that can store nucleotide sequence information of the present invention, or a memory access means which can access manufactures having recorded thereon the nucleotide sequence information of the present invention. As used herein, “search means” refers to one or more programs which are implemented on the computer-based system to compare a target sequence or target structural motif with the sequence information stored within the data storage means. Search means are used to identify fragments or regions of the sequence of the present invention that match a particular target sequence or target motif. A variety of known algorithms are disclosed publicly and a variety of commercially available software for conducting search means are available can be used in the computer-based systems of the present invention. Examples of such software include, but are not limited to, MacPattern (EMBL), BLASTIN and BLASTIX (NCBIA). One of the available algorithms or implementing software packages for conducting homology searches can be adapted for use in the present computer-based systems.

[0205] The most preferred sequence length of a target sequence is from about 10 to 100 amino acids or from about 30 to 300 nucleotide residues. However, it is well recognized that during searches for commercially important fragments of the nucleic acid molecules of the present invention, such as sequence fragments involved in gene expression and protein processing, may be of shorter length.

[0206] As used herein, “a target structural motif,” or “target motif,” refers to any rationally selected sequence or combination of sequences in which the sequences the sequence(s) are chosen based on a three-dimensional configuration which is formed upon the folding of the target motif. There are a variety of target motifs known in the art. Protein target motifs include, but are not limited to, enzymatic active sites and signal sequences. Nucleic acid target motifs include, but are not limited to, promoter sequences, cis elements, hairpin structures and inducible expression elements (protein binding sequences).

[0207] Thus, the present invention further provides an input means for receiving a target sequence, a data storage means for storing the target sequences of the present invention sequence identified using a search means as described above, and an output means for outputting the identified homologous sequences. A variety of structural formats for the input and output means can be used to input and output information in the computer-based systems of the present invention. A preferred format for an output means ranks fragments of the sequence of the present invention by varying degrees of homology to the target sequence or target motif. Such presentation provides a skilled artisan with a ranking of sequences which contain various amounts of the target sequence or target motif and identifies the degree of homology contained in the identified fragment.

[0208] A variety of comparing means can be used to compare a target sequence or target motif with the data storage means to identify sequence fragments sequence of the present invention. For example, implementing software which implement the BLAST and BLAZE algorithms (Altschul et al., J. Mol. Biol. 215:403-410 (1990)) can be used to identify open frames within the nucleic acid molecules of the present invention. A skilled artisan can readily recognize that any one of the publicly available homology search programs can be used as the search means for the computer-based systems of the present invention.

[0209] Having now generally described the invention, the same will be more readily understood through reference to the following examples which are provided by way of illustration, and are not intended to be limiting of the present invention, unless specified.

### EXAMPLE 1

### Genomic DNA Library

DNA Preparation

[0210] DNA from Arabidopsis thaliana, Columbia seedlings is prepared by a CTAB genomic DNA isolation protocol as described by Dean et al. Plant J 2:69-81 (1992) and modified by Dubois et al. Plant J. 13:141-151 (1998).

[0211] A solution of DNA to be sheared is prepared in a 1.5 ml microcentrifuge tube by mixing 15 ug of DNA, 6 μl of 10× mung bean (MB) buffer (10×MB buffer=300 mM NaOAc, pH 5.0, 500 mM NaCl, 10 mM ZnCl₂, 50% glycerol), and water to a final volume of 60 μl. The DNA solution is kept on ice prior to sonication. For sonication, a cup horn probe chilled with ice water for 1 hour prior to sonication is used. The sonicator (Ultrasonic Liquid Processor XL2020, Misonix Inc.) is pulsed for approximately 10 seconds on full power prior to use. DNA samples are sonicated twice for 6 seconds each at 60% power. Four sample tubes may be processed at once in a multi-tube rack which is positioned 1 to 3 mm above the opening in the probe. The DNA is returned to ice and a 1 μl sample is analyzed by electrophoresis on a 0.8% agarose gel in 0.5×TBE gel, run at 60 volts for 30 minutes. Sonication may be repeated if necessary.

[0212] A 0.26 μl aliquot of mung bean nuclease (150,000 u/ml) is added to sheared DNA and the sample is incubated at 30° C. for 10 minutes. To stop the digestion, 20 μl of 1 M NaCl, 140 ul dd H20, and 200 ml of phenol:chloroform are added to the sample which is then, vortexed and centrifuged for 20 minutes at 13,000 rpm. The resulting aqueous phase is transferred into a new 1.5 ml microcentrifuge tube, 500 μl of 95% ethanol is added, and the DNA is precipitated overnight at −80° C. The sample is centrifuged for 30 minutes at 13,000 rpm, washed with 500 μl of 95% ethanol and centrifuged again for 30 minutes at 13,000 rpm. The sample is then dried under vacuum, and resuspended in 10 μl TE.

[0213] The sheared DNA fragments are sized and purified by preparative agarose gel electrophoresis. Five microliters of 6×BP-XC-glycerol dye (0.25% BP, 0.25% XC, 30% glycerol) is added to the sample. The sample is split into two samples and loaded (12.5 μl per lane) on a 0.8% (1×TAE) low-melting agarose gel (SeaPlaque GTG) and electrophoresed at 60 V, 46 mA for 3.5 hours.

[0214] The gel is photographed under long wave UV and slices containing DNA fragments of 1.3-1.7 kb and 2-4 kb are excised and excess agarose cut away. The gel slices are placed in 1.5 ml microcentrifuge tubes. One gel slice is stored at −20° C. 15 μl of 1 M NaCl is added to the other gel slice, followed by melting of the agarose by incubation at 65° C. for 8 minutes. The resulting approximately 250 μl samples are placed into microcentrifuge tubes. An equal volume of water is added, following which the sample is vortexed and placed at room temperature for 2 minutes to bring the temperature up to 30-35° C. 0.5 ml of water-saturated phenol that has been cooled on ice is added and the sample vortexed vigorously. The sample is placed on ice for 5 minutes, and the vortexing step repeated.

[0215] The sample is centrifuged at 4° C. in a microcentrifuge for 20 minutes. The upper phase is transferred to a clean tube, and the bottom phenol layer is reextracted by addition of 200 μl of dd H2O. The sample is vortexed and placed on ice for 5 minutes, followed by centrifugation for 15 minutes. The aqueous layer is extracted and added to the aqueous layer from the previous step. Phenol extraction is repeated with 0.5 ml phenol, followed by vortexing and centrifugation for 20 minutes at 4° C. The aqueous layer is removed and repeated sec-butanol extractions are performed until the final volume is reduced to approximately 0.165 ml.

[0216] Two volumes of 95% ethanol (400 μl) are added and the sample is stored at −80° C. overnight. The sample is centrifuged for 30 minutes at room temperature to pellet the DNA, washed once with 95% ethanol and dried briefly under vacuum. The sample is resuspended in 7 μl of TE. A 1 μl sample is run on a 0.8% agarose gel with markers to estimate concentration of recovered fraction.

M13 Library

[0217] 20 ng of M13 DNA digested with SmaI is mixed with 1 μl of 10× ligation buffer (10× ligation buffer=0.5M tris pH 7.4, 0.1M MgCl₂, 0.1M DDT), 1 μl of 1 mM ATP and 100-200 ng of sheared genomic DNA fragments (1-3 μl volume), and 0.3 μl of high concentration NEB ligase (5 unit/μl) is added. Water is added to a final volume of 10 μl and the sample is incubated overnight at 14° C.

Plasmid Library

[0218] 200 ng (4 μl) of pSTBlue vector (Novegene) is mixed with approximately 600 ng (12 μl) of sheared genomic DNA fragments from the 2-4 kb size range gel slices and 1.2 μl of Gibco T4 ligase (5 units per μl) is added. Water is added to a final volume of 30 μl and the sample is incubated overnight at 14° C.

Transformation

[0219] The ligation reaction is titered and diluted for optimal transformation efficiency. When the ligation contains approximately 20 ng of M13 vector, the dilution will typically be from 1:25 to 1:100. A 1:25 dilution is used for plasmid ligation containing approximately 200 ng of vector DNA. To increase transformation efficiency, the ligase is denatured by heating at 65° C. for 7 minutes, and placed at room temperature for 5 minutes following the heating step.

[0220] A sterile electroporation cuvette is chilled for each transformation. Electro-competent cells are removed from the −80° C. freezer and thawed on ice. For each M13 transformation, a sterile tube containing 25 ul of IPTG (25 mg/ml in water), 25 μl of X-Gal (25 mg/ml in dimethylformamide) and 3 ml of YT top agar is prepared, capped and placed in a 45° C. water bath. YT plates are pre-warmed at 37° C. for several hours to avoid cross-contamination problems that may result if water remains on plates. For plasmid transformations, a sterile tube containing 0.5 ml of SOC medium is prepared for each transformation, and L+amp plates are pre-spread with 25 μl of IPTG and 25 μl of X-Gal.

[0221] 25 μl of electro-competent cells are mixed with DNA in diluted ligation mix in the cuvette, and the sample pulsed in an E. coli pulser (BioRad) set to the appropriate voltage (1.80 kV for 0.1 cm cuvettes; 2.50 kV for 0.2 cm cuvettes). The cuvette is removed from the pulser, and the sample immediately transferred to the tube containing SOC or YT top agar. For M13 transfections, the sample is plated immediately on YT plates. For plasmid transformations, the tube is placed in a 37° C. shaker for 15-30 minutes and 30 ul aliquots are plated on L+Amp plates. Plates are incubated at 37° C. overnight.

### EXAMPLE 2

[0222] Two basic methods can be used for DNA sequencing, the chain termination method of Sanger et al., Proc. Natl. Acad. Sci. (U.S.A.) 74:5463-5467 (1977), the entirety of which is herein incorporated by reference and the chemical degradation method of Maxam and Gilbert, Proc. Natl. Acad. Sci. (U.S.A.) 74:560-564 (1977), the entirety of which is herein incorporated by reference. Automation and advances in technology such as the replacement of radioisotopes with fluorescence-based sequencing have reduced the effort required to sequence DNA (Craxton, Methods 2:20-26 (1991), the entirety of which is herein incorporated by reference; Ju et al., Proc. Natl. Acad. Sci. (U.S.A.) 92:4347-4351 (1995), the entirety of which is herein incorporated by reference; Tabor and Richardson, Proc. Natl. Acad. Sci. (U.S.A.) 92:6339-6343 (1995), the entirety of which is herein incorporated by reference). Automated sequencers are available from, for example, Pharmacia Biotech, Inc., Piscataway, N.J. (Pharmacia ALF), LI-COR, Inc., Lincoln, Nebr. (LI-COR 4,000) and Millipore, Bedford, Mass. (Millipore BaseStation).

[0223] In addition, advances in capillary gel electrophoresis have also reduced the effort required to sequence DNA and such advances provide a rapid high resolution approach for sequencing DNA samples (Swerdlow and Gesteland, Nucleic Acids Res. 18:1415-1419 (1990); Smith, Nature 349:812-813 (1991); Luckey et al., Methods Enzymol. 218:154-172 (1993); Lu et al., J. Chromatog. A. 680:497-501 (1994); Carson et al., Anal. Chem. 65:3219-3226 (1993); Huang et al., Anal. Chem. 64:2149-2154 (1992); Kheterpal et al., Electrophoresis 17:1852-1859 (1996); Quesada and Zhang, Electrophoresis 17:1841-1851 (1996); Baba, Yakugaku Zasshi 117:265-281 (1997), all of which are herein incorporated by reference in their entirety).

[0224] A number of sequencing techniques are known in the art, including fluorescence-based sequencing methodologies. These methods have the detection, automation and instrumentation capability necessary for the analysis of large volumes of sequence data. Currently, the 377 DNA Sequencer (Perkin-Elmer Corp., Applied Biosystems Div., Foster City, Calif.) allows the most rapid electrophoresis and data collection. With these types of automated systems, fluorescent dye-labeled sequence reaction products are detected and data entered directly into the computer, producing a chromatogram that is subsequently viewed, stored, and analyzed using the corresponding software programs. These methods are known to those of skill in the art and have been described and reviewed (Birren et al., Genome Analysis: Analyzing DNA, 1, Cold Spring Harbor, N.Y., the entirety of which is herein incorporated by reference).

[0225] PHRED is used to call the bases from the sequence trace files (http://www.mbt.washington.edu). Phred uses Fourier methods to examine the four base traces in the region surrounding each point in the data set in order to predict a series of evenly spaced predicted locations. That is, it determines where the peaks would be centered if there were no compressions, dropouts, or other factors shifting the peaks from their “true” locations. Next, PHRED examines each trace to find the centers of the actual, or observed peaks and the areas of these peaks relative to their neighbors. The peaks are detected independently along each of the four traces so many peaks overlap. A dynamic programming algorithm is used to match the observed peaks detected in the second step with the predicted peak locations found in the first step.

[0226] After the base calling is completed, two sequence quality steps occur 1) poor quality end sequences are cut and if the resulting sequence is 50 bp or less it is deleted 2) overall sequence quality is examined and poor sequences are deleted from the data set if they have an average quality cutoff below 12.5. Contaminating sequences (E. coli, yeast, vector, linker) are removed after sequence quality assessment.

[0227] Contigs are assembled using PHRAP (http://www.mbt.washington.edu). Contigs and singletons are interrogated using AAT-NAP and BLASTP. AAT_NAP is a program used for constructing a global alignment of a DNA sequence and a protein sequence (Huang, X. et al., Genomics 46:37-45 (1997), the entirety of which is herein incorporated by reference). The alignment model of NAP accommodates introns and frameshifts within codons. The scheme for scoring an alignment has several features that allow NAP to identify the exact locations of introns. A nucleotide insertion gap of length <k is given a linear penalty, and a nucleotide insertion gap of length >k is penalized as a gap of length k, where the value for k is the default value. The NAP program reports the starting and ending coordinates of predicted genes. The input to the NAP program includes the query sequence, the protein database and a coordinate file produced by AAT_EXT (an adapter between a database search program and a sequence alignment program) from the output of AAT_DPS (a program computing high-scoring chains of segment pairs between a query DNA sequence and the public non-redundant protein database from NCBI) The NAP program scans the protein database and finds the protein sequence for each coordinate record. Then for each coordinate record, NAP locates the query region, extends the region in both directions by a certain number of bases, and computes an alignment of the extended region and the protein sequence.

NAP Corrects Frameshifts in the Query Sequence.

[0228] BLASTP is used to validate the amino acid sequences and hits reported by the AAT_NAP program and to assign BLAST scores and p values to each sequence/hit pair. The AAT_NAP generated amino acid sequences are compared with the public non-redundant protein database (nr.aa from NCBI) using the default BLASTP parameters except that the V parameter is set to 1000000 (to report up to 1000000 hits that exceed the BLASTP default report cutoff). If the hit reported by AAT_NAP for a particular amino acid sequence is not reported by BLASTP, that particular amino acid sequence is removed.

LENGTHY TABLE REFERENCED HERE
US20080113342A1-20080515-T00001
Please refer to the end of the specification for access instructions.

LENGTHY TABLE REFERENCED HERE
US20080113342A1-20080515-T00002
Please refer to the end of the specification for access instructions.

LENGTHY TABLE
The patent application contains a lengthy table section. A copy of the table is available in electronic form from the USPTO web site (http://seqdata.uspto.gov/?pageRequest=docDetail&DocID=US20080113342A1). An electronic copy of the table will also be available from the USPTO upon request and payment of the fee set forth in 37 CFR 1.19(b)(3).

The application's sequence listing, which the Patent Office published only in electronic form, follows.

SEQUENCE LISTING (51470 sequences)

SEQ ID NO: 1 - DNA, 1093 bp, Arabidopsis thaliana columbia
acgaataaatacagtagatcagatgaatggtttaactactactgaaacctgatcagaaaatttaattatgccttattagattggcacctacttataatcagaaacggtaatacccaaacttctcatcacaagtgtagtcccctagcattcattcatgaccccattcagactagtcgaacgtttactatgtctattttgacaacaaggtactctaacgggcaatccacacaactactcttactttctgattccttatcagaaatatttaattatgccatttccttgatcttgataagcagaatatctaaatagacacacaagcactaaactgcacacatactaatccgtttatcttaaaaggtcagataaaaatagcaactgaccctactcattgctggggcattgtttccaagaagaccatcatcaccaaggtttgcagcccaagcattcaccaaatcatcatccagaccactggagtttgaggcagcgggggcaggctgagtggactcatagattaagtccgagatcccagtagcaacaacagctggatcggtggacccagtagatgcagtgatattgtgctttgtacggtatgtgtcaatgagcttcgcgcttcataagttacgaggaaacaaaataattattatcatatgaaacctaaatatagacaatagcacctaataaaataaagaaaacggggaagtaagcatgcaatttacacaacaaaggtcagcagcaagatcaccaaagatgaactgtacattctggacttcttttgattaaaatgtttcatatatagttaactatagtgtataatcgttcttgggttttgtcagaatctgggataaaatttatacttttatttgtcctaatgaataaggataattacatgcaacacaataaactctgttgacctagataagcattcacaaaaaaagcagaaagtgttttggaaactataaatcccatcttccctatacaagattagtattgtaagtaagtattatgtattagaagttaggctgtctttgactgatataataagttcagaatactaccttatcgggcccagtgctacttacggtcgttacta

SEQ ID NO: 2 - DNA, 662 bp, Arabidopsis thaliana columbia
tggacgctagctcgcatctaaatactaggctcatctaagatagttccagtaatagatacctatcggtgggcatacctattatcctaaaatcaaattctagtttgttacactaaaagtagcattaagaacaatctaagatgaagaattctaaatatattatcctaatagagtttttgatctactaattcatccaaatccctaatgagaatccctaaacccaacaagagaactactcaagcatgatcatagaagaacaaaacatgattgaataagaaatcaatgatgaaattaagaagagaaaagagtttagaagaatcttttctaaagggagtctccacagggttttgctcccaagaataaaagagataataagagttaggtctaaacaatgaccataaatatcaatatataagtcttaaaatgtctgggccgaatttggaaatctttaaaacacgaataagttgcgcaattgaattaccgtcagtattggtgtcgctcgaaccaagggttgtgtcgattgacacctacgtcaatttccgtctccgaattgctgccgcagcctaagttgtctgttttgctctagaatgctctataatctctaaatgcatcccaaacaatgtaaagacctgaaaaagagtacaaaagactctacaaataacaaa

SEQ ID NO: 3 - DNA, 521 bp, Arabidopsis thaliana columbia
tccctacgatctgacgttctatgcttgtccacaattctgctttcaacgacaagatgctccttgccaacctcgacaccgtcgaagaacaacgtgacctggctctccttcgcatctagaactaccagcaggctgcagcaaaattttacaacaagaaggtaaaatcccgctactttgtcgaatgagatctcgttctacgcaaggtgtttgaaaataccgctgaaatcaatgctggcaagcttggagctcactgggaaggcccttatctaatcttcaaagtcgttaaactcgacgtttatcaattgttgactatggacgggacttcaattcctcgctcctggaactcgtccaactttaaacgctattactattaacactgatgtgcatcgctaccgcgacacactatcaccaccacgtcttatcatttccgcgtctcatcttcaaaaaaaaaaaaaaaaaaaaaaaaacacaacgaactacggatggcttgataccttcctaagggtacgtaggcagctcttcgc

SEQ ID NO: 4 - DNA, 854 bp, Arabidopsis thaliana
atgtacgattccagattctatttatgtttatcggtatgtaaaactatataatgtgaacctacttaaactatactaagactattagtttggtttcaaattagattaattagtttaaccaaactgaacatatccctagattgtaaaagtctaatatatccactaattatttttgcttgccgacctctaatccacaactttgtgtttttccatttccactgattttcaacattccaccgggtgttaccaacagtaacatacatacagtgaattttttcaacactccaccgcatgttaccaatagtagcaaaaccctcgacaaaaatttgtaccgactataaatattcaactccaactctttcctctccacacactcaaatatctctccaacactaaaataattgtaccgactctctctctctctctctccgtaacaaaaaaatcaccaatggcaaaacaatatctctttgtactcctctcaatctcctatctcttatcactggagctcacggcggccaccgcagcctcacagaccggagcttccaaaaaagccataaacttcatccaatcttcttgcaaaaccaccacataccctgccttatgtgtccactcactctccgtctacgcaaacgacatccaaacaagccctaaacgtttagctgagaccgctatagccgtgacactaagccgagcccaatccacgaagctcttcgtctcgcgtctaacacgtatgaagggtcttaagaagcgcgaggtcgaagccatcaaagattgcgtcgaggcgctcaccgataccgttgaccgtttgaccaaatctgttcaagaactgaagttgtgtggggcatcgtccgttacta

SEQ ID NO: 5 - DNA, 533 bp, Arabidopsis thaliana
cacatatttattgtatttgtctttacagatgttatgggtcaggttgtcgatcggtctgaaatccaagatcttaacgctaacaacaagcccacagaaaaaatcgatttccatttgagagatcagcagtacaaacaatctatattcatatacattcttatttaaagtttttttttttaacctttttattaataaatttattctttccatttttagtgacaatcgcttggcatgtacactttgggggaagtatgctgagattgttgacaaagcttgccaggagtcaaccgatggtattgttgtttgcttaatccgatttgcgaagatcaatctctacaacggtaattatattttaaaaacacgatcttatatttttaaaacagatactaggagtgtttccaattcttttgatgtttcacaagtcttcttggatcccacgtcggctgagttgggtctttttaagcaaaggtaattgtatttatttgtcactaaatatatttgttaatacataatattaagcaaactatattttcttg

SEQ ID NO: 6 - DNA, 626 bp, Arabidopsis thaliana
cattgcggctatggcttgcacatttttccaacatcttttcttgaaacttattccaagcactaatcgaaccaatattcttgtgcgcaacagtcagactcttactcactcttggtggtggcttgtgttccttgaaatggaacctactcgcattgtagttctcccaattcatctcctctgcttcttcattctcatctccttcttcattctcagctccttcttcactctcaaccctttcttcattgtctggagcctctctcgtcgggggtgctcgttccatgaagaagagttcttcattaggcgggttgaaatcgatgttacctctcactgtgatggttgtgagctcttggttgggtaggagaagcctggcatccatttccgttctatgctgaaacttgagaatatgcatcccctcatgactctgatgctcaataaacaaagcccatctcaggtgaggaatgtcgatccatctaggggcaaagggagtcgactgaagtggcactccacaagccattagtatacgtgttatcaccctcctatagaaatggttctcttctgcttattcgctagtgcctatttcgtgaaacacaaagatgattaataacgcattgatggtgaagcatagtggt

SEQ ID NO: 7 - DNA, 600 bp, Arabidopsis thaliana
taataggagtgtttccaattcatttgatgtttcacaagtcttcgttgattctacattggacgagttgggtctttttaagcaaaggtaattgtatttctatttcactaaatatatccccctctttatcatactcagcacggtatattacctttatatatagcataccaatcgatgggttgactttagaaagttctggatctttccacaagaggctctatgcaccaagaactggggatgacgatggtgattatccaaggcaaataatcaaggaagtccttacagctacttatgtactattcatgaatttattttatctactaaccttttattcttctttctccccctctttttttaacttagtttgtgaaatcctctttatattcatttgaaggtgggtaaatgcaaaacaatttgtactgtttcgcgcattgatacagattggccgtggtactatttttgttgtcgtgctacaacaagaaggttgtaaagaggaagttataaactttaagatgtaagatactcaaaagcaagattttggtgtgaatatgaatggttttgcaaatctgtgttgcaagtgagtctttgtgaactttatatggg

SEQ ID NO: 8 - DNA, 739 bp, Arabidopsis thaliana
ataatgctatatctgatttcttcaatctctatggtatccattatgtagtctcttcttaactatgttttgctttttgttgcagtgctccaagaggccatcctgagtaccagcgtgcaccgatcttcataatatagttatagctttctttactttccagtttataattttgcttctttcaaagctccttttctgctggttcccggatccaatcgttctctcctcctactacaagtcctgtcgctcacacaacaaggcgagatggccttatctgcaatcggtttcgaaggttacgagaaacggctcgaggtgactttctttgagccaagcatctttcaagactccaagggactgggactccgtgctctgaccaagtcccagcttgatgaaattcttacacctgctgcatgcacgatcgtttcatctctctccaacgatcaattggactcttacgtactctctgagtccagcttctttgtctacccctacaaagtcatcatcaagacttgcggtaccactaagctcctcctctctatcccaccacttctaaagctggctggtgagctctctctgagtgtcaagtctgtgaagtacactcgcggctccttcctctgcccctggagccagccttttcctcaccgcagcttctctgaagaagtctctgttcttgatgggcactttactcagctgggcttgaacagcgtagctgacttgatgggcaatgatgatgagactaagaaat

SEQ ID NO: 9 - DNA, 891 bp, Arabidopsis thaliana columbia
cggtgcaaagtagtgagcgcacatcggtacgagagctctgatcgttttcccgcatatgtgtggtagtcattgacgattttaccaacgaggtcttcgagtttgtcatcgttgtttcgttgacacatgagtgcttctttgagatcatctatgtgtttagtttgtaaactcatccactcatggtaacatcttttttgaagtttttcaaccccataactcgaagatctttccatatctctcttattgtttttagctggttagttattaaaatgtaattcccgtatggtcttatatacattggatcggtgcatatatgtgtatcttttttttaatgtggtttagatacatgtaaatgtaaatgcatgcatacggtacgtgtaatctaatcactacgcggtgggtttttgtgaaatcgtgctttaacctttattaaattggatgttatcgctcttggtttgtagatatttgagtttatatgtaaacggacaaaacgcagatgaataatactagtgcctgacaaaattattttggacatacttcactttgaaaaatgaaataatatcttcttttctgaatcatacaagtacatctaaaattttacagaaaaacaatcaaaataaaacaaaacaaattatgttggcaagaaaaacccataaatttaagttggtaaaaaataatatctaagtcgtgcaaaaaaaaaaacccataaatttcatatgaaacgtataaactagtagtattttagtaactcgacagtgaaaaaaataactcaaataaacaaaaacaaatcatggtataagaaaaaaacttgtctgtattcatagacaaagagtaagcgtcgctagacttgttggagcttttgttatccttatgtgtataagacgcaacagcaaa

SEQ ID NO: 10 - DNA, 871 bp, Arabidopsis thaliana
tcccttatattttacgttggagaaaaccaataaggtggaatgactgttgtcaaaaatgtaaaggatgaactgatccctactagaactataacgggtcatagaattttcattgattataggaagctaaatgctgcatctgggaaagatcattttcctttaccattcattgatcaaatgcttgaacgtttagctaatcatccatactattgctttcttgatggatatagtggtttctttcaaataccaattcaccctaatgataaaaaaaaaaccactttcacatgtccttatggaacttttgcttatagagaatgccattcggtttatgtaatgctcctgcaatatttcagaggtgtatgacctctatattttcagttttaatcaaggagatggtggaggttttcatggacgatttttcggtttatggcccctctttctcctcatgtttgttgaatcttggcagggtactgaaggtgcgaagagacgaatcttgttctcaattgggaaagagttccaccaactgaacgctgttgaaggaggatctccatggtatgctgatcacgtcaattacttggcatgcggaatagagcctcccaacctgaccagttatgaaaggaagaattttttcagagacatccaccattactactgggatgagccttatctttacactctctgtaaagataagatctacaggagttacgtctcagaagatgaagtagaaggtatcctgctgcattgccatgactcagcatatggtggtcagttcgcaacgttcaaaacagtgtcagagattcttcaagcaggcttttggtggcaacaatgtttaaggacgctcaagagtttgtacaaagtgtgactctgccagaga

SEQ ID NO: 11 - DNA, 876 bp, Arabidopsis thaliana
tgagaagagagcagatcgagaagattgaaaggtgcttaaccgagggtgtttggaagatcattacaaccatcactctaaatcatacaagtggccagtatcgtatttctgacttgaaatacaaaattggttttgttttcaaaaccacggtctctccatgtgataccgttttcgatgctttgtttctctcacttgctaagtttgacgtgatcctctctggatccgctaactcaaatatcttgcatggttagcttcaagttttcattttacttttgaacatacatgcattatctcttatatagtcaatatattcatatatttattctctttgtctatacagatgtaatgggtcaggttgtcgatcggtctgaaatcaaagatcttaacgctaacaacaagtccactaaaaaaatcgatttccatttgagagatcagcagtacaaacaatctatattcatattaattcttatttaaagtttgttgtttttttactttttattaataaatttattcttttcatatttagtgacactcgcttggcatgtacactttgggggaagtatgctgagattgttgaccaagcttgccaagagtcaaccgatggtattgttgtttgtttaatccgatttgcgaagattaatctctacaacggtaattatattgttatgtgttactacatatctatactattttaaaaaacacgaccttatatttttaaaacagatagtaggagtgtttccaattcttttgatgtttcacaagtcttcgtggatcccacgttggctgagttgggtctttttaagcaaaggtaattgtatttatttgtcactaaatatatttgtttctacataatattaagcaatgtatattttcttgata

SEQ ID NO: 12 - DNA, 738 bp, Arabidopsis thaliana columbia
taaattctcaactatgtctagaaataaactgtagaatttatttctaaaatagatttttattaatactgtactttggaaaaaagctgaggatgttattaaatgcttgaagatttcttagttaaaacatacaaacacacaaaatcttaaaagtactttgcttatttgataatccactaaaatcatatgaattttttaaaatgaattgaaataaataaatagtcgatgtggatttaaaattgttttaaaatacataaaccaatataaactttccaaaatgactacactgatgaaagctaataataagtcgatacaggttatactaagcaacactatcagagagaaaatctgtgctgtcttgttgcttcttcctcctacgagcatcaacaagcttactagaatgtgttccaagcacttcggtgatggcttttggcaaccagaagccaggccgctcaagatatggtgcgcggtcaataaccaatggttctctcaaggttacatcaatcccctgataagtccacaatgctagtgttgctgcacctttgaggcccagggataaccagccaagaccagccactgaaatgtctatgcttttcacgtcccagctatttcccgacacctgaatctccttctcttcccatgttcccaattcagacgctctgttctctccaattggtggctatacataaaagtaaaatgggttctccgttacattctgatgttgcggaaaagaggagatgc

SEQ ID NO: 13 - DNA, 933 bp, Arabidopsis thaliana
ctctatcattatctaattgtgtgcctgataattctggtcagatctgttctcttggatctgatatcatctctctatgttctatgtaggactacaactcgaagcagcaccgaggaataggtttatcacattctctagtgctggttagtttttggttaaatcttctccaaacccgaattgagtttttatattttgatatcagaaccttctttacatgtttgactgtcaaactcatgggaaagaaaacataagaaactgatgaatgcgatcctggtaatatttattgtcacctgtttgtaaaaatttggatttagaagaaactttctattttctgattttagattcagtggaggatctgatggaggacactcatgatctgggaggtacaacagttgctgttgatcgggcaacaccaaaagaggatgatcatccgcctaggccaccgccagtggctagaatgtcgcgcccacccgtggctattgcaggtggatttggagctccaggtggttatggagcttatgatgcttacatttctgcagctacaagatacgcagcgcttggtgcccctactttgtatgataatcccgccacgttttatggaagtaagacgactcactatataataccaacatactagaaacaaatgaatttcagctcattaagagaattctcactttgtcttaggaggggaaccaaccacaaggggaataggaaacaagatctttgttggacggcttcctcaagaagcatccgttgatgatcttcgcgattattttgggagatttggccatattcaagatgcttatattccaaaggtgagttatataagttacattgttacactgagaacattttcagatatttttgtatatgtattgaacattcatccttttttaattaggacccagagagaagtggacatagaggttttggatt

SEQ ID NO: 14 - DNA, 668 bp, Arabidopsis thaliana
aacaaatttacaaactttgaacatcatcaagcccatcggttcgaacggttaagttggatttaagactctcgagaatatcctttggcttttgggtaatggctggtttgactctggtgtcttgtcgcttctccggcgaggctaatggtggtgttcttgtgatcgcctgcgaacaagtgtgtgttcctctgtacgtcacttcgaaaaccgtagcatccccgtctgatctctggacttgtttcgttgcccaacagttttgtgtgctacgatgtgtgcatctgtaataactccttgggaatttggcgcctaaaatgtctttttgaccatattttctccagctaaagacatcatcttgaggtccttctaagcctctctctgggcttattctcactttttctgaccactttggtaacatctttctgcaaaaattacccaaatttcaaattagtttctagaaaaaatgagatttttaaattcaatttggtgaattgtgaaaaaagatatcaacaatttgttaccttttctttgaattgaaaatgtaatcttggcgatgatgactctcgctagaacctcctccatcggcaaactcttcacttctcggacttccgtttatcgatgccggagattctggaacactgccgggatttgccacgggactacagtaacggcgt

SEQ ID NO: 15 - DNA, 707 bp, Arabidopsis thaliana
ttttattatcacttgatgctttttggtccgaacagcaattttccttttattaaggttagatcgctttttgtttaccacctgttcaaatgagtactactatgtcctgtcgcttcatacacttcttgcaacacagtcctttgttttgagtcaacgatgtcttgagatgaacaatcaacagtttcgtacatttaaatggaaattccaaagattttacatatttccaattattggatgtaaacattccatagaaatacaacactctgaatgcaatcaagtaatcatgattgtttcgttttcgatctcttccgctttcccctgttgtgctagtgtttcgtaaagcggagcgtttcgagtttctcgtagccagagactcacgatgccgctcagcactgatgcaacaccaaacacgatgaacgacatcattgcgctttcccttcctaacgcaactagcagtggtgctgcagacgctcctagcataaacgcttgacgcaaaagtgagacagcagtgttcctaacgtttgttgggaacagctctacgcagtagacatataggacgtcatacgctgtcgaggatgccatgaacccaaccgcctcaactgcaagttgtaaccattttgccacagatatcgcacggatcacgcggtggatcgagagaacgcgcagagcagcacgcgaatccggcgaggtatgatgaattcgagaatagt

SEQ ID NO: 16 - DNA, 791 bp, Arabidopsis thaliana columbia
ttctccaaatatggtgcatttacaaacagcatctcaagcgtaacaagtgtgctttattccttatccatacatgaaaaaaccaaagcgggagtggctcaatgttttaaaagtaaatccaaggggaaacatattaggagaatatgaaaataaagacccgagtttattgcaaacagaaaatgataatgctgttaaataacaacaatagaagattttgtactcgacaatttgacaatcaatcgcaaccccataaacctcgatttagatgccgatccagaaaatgaatttcgatgtaatttatcgtcttctgatgatgaagaacaagaagacgaagaacaatattagttttgtgtaatatattgatgtcaaattaagtaatattattgtataatatgattttaattatatatcccaacaacaaacatttttaaataaattttactaagtacaaaaaaaaatagatttgacaaagtatattaactataattaaatttattgtaagtataaatacaattaatattaatatcgaggtttccacttggcccaaaaaacagttaagcccaaatccaattacaagaatttaaatttagtgactatatactgacatttttatgactaatacctaatttattgggtctaaaatctcgcggcccaaacccaattacaagaatttaacattagtgactatttactaacacttttgcgactaattacaaacttattgggcccgaaaactcgaggcccaaacacatcttaaaagaattgcaatttagtgacgattcagtgacagtttt

SEQ ID NO: 17 - DNA, 859 bp, Arabidopsis thaliana
ggaagaagagaggatggctgcaagacagagccaagagttgggcccgaggattggtgagatgggctggtctgagacgtttggtttgaaatgtcgggttttgatgatattcctattgtgagttgattcttttactgatgttttctcttctcgggtgacgaaggctttgatctggatatctacaaacgaggccatgtcggtggtgagaccagaggtgggtagaattaggtcgagcatggataggtcggaagagtttttgaacgcgcagatcagggtcatcttggggattttacatttgtgcgttgaactcatgtagaataggtcgcggactatggagataaacggtgtaattccactgcctccactcaccatcaccagagattcatgtctgcacttaaagaaaaacagagcattttacttgtgttggaagaaaaacagagcatcaatgttacttgtgtcggaagaaacagaatgttgaacttctctgtttgtgatttaagtgaattaccgtaggaaatcagtggaactagggccgtagggtccctcgacggaaacagcgaggcgattgatttgatcagaagaagatgaagaaagcatatcgtaaagcttagtcgaccattttccttggctcttgatcataacacttaacgtctctggttcgagtttgctactagaaattattgtaaatggatgccactgaagcttcgaaatactcggtatgttcacgaacatagtgcttgtcgggctatacatcaacactgcaatatcattttagcatatgattataaaatcatcgatcaagtgaagaacgaaaaaacagaggggacatagttaaacttacatagggtttttggagaaattg

SEQ ID NO: 18 - DNA, 964 bp, Arabidopsis thaliana
gattttgtgctaggtttgatgatcatggagctaacctctctgcaacagcagctgtaggaaccataggttacatggctctggagttaatatcaacaggaacttccacaaaaaccgatgtgtatgcatttggtgcattcatgcttgaagtaacatgtggtaggagaccatttgatcctgagatgccagtagagaaacgacatctggtcaaatgggtttgtgaatgctggaggaaacattctctagttgacgctatagatacacggttgagagataaatttacactcggggaagtcgaaatggttctgaagctcggtttgctctgtacaagcattataccagaatcaagacctaacatggaaaaagtgatgcaatacataaacagagaccaagcattgcctgatttctctccagatactcccggaatcggagtttccactccgatggtaatgggaatacctggtttggcaatcacttccacttcagtaacctcatcagcatcagtaccattagtctctcctccctctaccaacaactcaatgttcatctctcacaccatcttaaatggtgatggaagatgaaatttaacaactttcttcacatttatttgttgtacatgattcagatcttagtaccaaaccaccttatctgtcttattgtctctaatgtttaaattttgtatcagttatgtttttatttcagttacttatatttctgtaacactcaaatgttttgtgaaacttagtacatttcatgatggtttgttattagtcaatcaatttgcgatctgattgggtattaccttgaactcaaattttgctttctgatctttgaggctcattgtcgaaaaccttatctgaaaattcaatacgaagaatcctttgttaaattcaagctatttaatcaaacgtcgcaattttctcaaattaaatatgaattacgaaccttatcaacttgtgattggaga

SEQ ID NO: 19 - DNA, 613 bp, Arabidopsis thaliana
tagtaacgtgccgccagtgtgctctaaaggaaaattcttaaccttaatctggaatacgccatgaccacacgcgtgattgctctcgacttagacggcaccttattgaccccgaaaaagaccctgcttccttcatcgatagaagccctggcccgcgctcgcgaagcaggctatcaattaatcatcgtcacaggtcgccatcacgtcgctattcatcctttttatcaggcgctggccgtggatacacctgctatttgctgtaatggcacctatttgtatgattatcatgcaaaaaccgtgctggaagcggacccaatgcccgttattaaagccctgcaactcattgagatgctgaatgaacaccacattcacggtctgatgtatgtcgatgatgcaatggtctatgagcacccgaccgggcatgtcattcgcacatctaactgggcgcaaaccctgccgccggaacagcgtccgactttcacacaagtcgcttctctggctgaaacggcgcaacaagttaacgccgtatggaagttcgcctgacgcacgatgacctgccgcaattgcagcattttggtaagcatgtcgaacatgaactgggactggagtgtgaatg

SEQ ID NO: 20 - DNA, 925 bp, Arabidopsis thaliana
tgagatttctccagtcgcggaacaatgtcaagctagtctctgctcgtgttcttccttgtgaaactgtcgagcttaatttctccaaaaaccctagtgagtttaacaatgatccctctgttttgtctttttcaattgattatctaatcaagaatcctatgctaaacatgttgatacagtgctgatgtatagcccgacgagcatattgttcgtgaacataccgagtatttcgaagcttcaatggcatccatttacgataacttcgagtagcaaactcgaaccaaagaagctaagtgttatgatcaagagccaaggcaaatggtccagtaagcttcaccatatgcttgcttcttctaatcagatcgaccaccttgctgtttccgtcgagggaccctacggccctgcttccactgattacctacggtaattaacctaaatcccaaacagagaagttcaacattagatttcgtgcaacacaagtaacattgatactctgtttttctttcaagaatagacatgactctctggttatggtgagtggaggcagtgggataacaccgttcatctccataatccgcgacctactctacgtgagctcaacgaacgcttacaaaacccccaaaataaccttaatatgcgcgttcaagaattcttccgacctctcaatgctcaacctaatcttaccgaactccaccgagatctcctcctttatagatatccagatcaaagcctttgtcacccgagagaaagtatcaacctgcaatatgaatatcatcaaaaccctcagtttcaaaccatatgtctcagaccaacccatctcaccaatcctcggaccgaactcctggctgtggctggccaccatcctctcttcttcattcatgatctttataatcatcatcgcaatcatctcaagatatcacatttaccc

SEQ ID NO: 21 - DNA, 1699 bp, Arabidopsis thaliana
gattggaagtggtttgttaactgattaggcccataggatttgtgtgacctttaaatgacttttggaggtggaaaaagttttagccttttctttctgctaataatccaatcccgagcaactccgatttgaagaagtgttgtatgacatattgacatcgaagtataaacgtgtaaaaaaaaaatcaatgtcaataatgcgtgtgaactatagaaagagaaattggaaagtatagtgaaattgaatcaaagttcctaaaactagcggtgtaacacttgaataataataatcaaaatgattcctaaattagtcaacggcgctgcttcctcgttgtctttaatggtggcgatggtgagaactcactaggcaactctggtagattcacttctcctttaagcattcccaagacctctttcattgacggtcgtgaaatcggtaatctttgcagacacaacaaagccacctttatgcacaacactgcttgttcttggtctaagttttgcaacttttgatccacaagatcaacaagttttcctcttctcgccaacttcctcgcccaagacatgaggtttgcccgttgtatctcactcgcggacccgtcatctccaacgggcgcctcccggaaatcagaactaacaacagaacaccgtagctatagacatcacatttctctgacacgttgttgtccaagttacagtactcaggagctgcatagcacacagtccctctcatgctcggcgtgctactaattccgcagctcttagctatctcaccgctcaccgagtcatggctatttccccttgctctcaaccatcgttcaccacttaacccatctaaccaccaatctatgctgctaccactaccactaccacgccgccattgactcacactactactcccatcatcactacaaaactcggcttctaaagtcatcttcttcttcttcttccttttcttagcgagttctctacgatactcatctttccaccactctctaaccatcctccgcttcttcttcttcttattctcatcctcttcctccaatgacaaccaccaatctagtctcttgctagtcttcttctcaagtttcttacttgacgaagaagacaaagctgccgcctcaatccaatcacttctgcttggtctctccttctttacctctgaaccaatccattgcattacatactctttcactctccctctttcaacattgctctcctgcttccaccaccaatctttgctctcactctctttccccttcttcatcaccacaacactaccaccatcctcatccgttttctctcccatttccggagaaacagagacaaccgtcgtcgcctcaggagaagcactcacagacccaggaaccttagcaacactctccggagactgatcaaccaacccaaagttaaaatcttcataaccagtcacagtagttaccacactctctacttcttcaaccatagatccatcaccatcacgctccggagctacactaatctccacttgctctgctttcaacctagccaaaccaaaatcagcgattttggcagagaagagactatctaatagaacattgctaggcttaatatcaccatgaatcacaggtggttcaagactatgaagatgcttaatcccatcggcaatgttaacggcaaccaaaaacctccgattccaatccataagctcagggcatctccgg

SEQ ID NO: 22 - DNA, 654 bp, Arabidopsis thaliana
tgcaaaaggttccatgctggtatcccaaaactggacacttcctgaactatctccactgcaagaactccatatctaaaataggatgtacataatcagtcataggaaaggtaaacataaactaacatatgagcacggtaatttttacctcaatgaaagaagtgaccagatgcagagctcagacccatttcccagtcctccaagtccaactgttattctatatacctcatggcatagattagcatcccagcatcttatcagcctacaaatattgttggaaaaacaaaaaaaaaaattaaaactttagccaaatcaaagaacatccaggggtcttcttgcacaccaaaaatgcatctctaaggaaagtaaataataatattgcatatcatacaaagtaaaataaattatcctcacccatcgctactgcctgaaaagatcctctgtgcgtccgcactccacgtcacacttaaagcacgacctatgaaaataatgttccataaagctctaagtaaatacaataatgaaagatcaaaacgatgcaaaggggagtaaagagttctcatcagtgaccctaggcaaagatctatagtacgttaagttgtcagattcagagatataatatatcctcacacagccgatcacacaagcagctgcaag

SEQ ID NO: 23 - DNA, 1252 bp, Arabidopsis thaliana
acggaggagagatattacaacggtggaggagtagtaggaggaaggaaaaactccggtatagaccggtccgtgattgaatctttaccggttttccggtttggtgcattaagcggtcacaaggatggtttagagtgcgccgtgtgtctcgctcggttcgaaccgacggaagttctgaggttattgccgaaatgtaaacacgccttccacgtggaatgtgttgacacgtggcttgacgctcactccacttgcccgctttgccgttaccgggtcgacccggaagatatactcttgatcggtgattgtaactcctggttcgagctccagttctctaaagatgaatcaaacagtgttaataataatcctcccggtttaacccggtttattccggttagtcgaatttccggtcgtcattcctcggctggtgaacgagcgagtcgactcaacgagattagaacatcttcgtcgtataaatcgaatccgatgtcgtttcggagatcactcgatagctctctgaaagttaacgacgccggcgaggagaaatcggaatctgtcgccgttaattgcttggatcgtctacagagaaaagacggattgttgttgattccgaatcgggagagctttgaggggagatttgagcaccggataattatctccggcgggaatcgagacgatcagaggtggagcgaagtaaggccgtcggatcttttgtatttacgatcagagatgatactcagcgattgccggaaattagctgcggcggagggtggcagagatgtaattaacgggagaagtgtgtcggagttaacgggaattgagagacggaggagatggggaggagagccgagacaacgacaagccacggcggtgatttcgaggtggctcgcttggtcccaccgtgcctccgcttccagcattgtttaaaatttatattatgatccttttagttttgttttataacagttttggccggtttagttttgttctataacatttagcccaaactaatttattagaggaatgcaacaatggcaggtagggataaattagtgttgttcttttttttttttgaaatgcgaattttttggagtatgcacgagtgcaaggaaggacaaatgatgtcgttttgtattttgatttttgaggaaatattaaggaaagtgaaaggttgagtggtggaaaattaatgtctgtcttggtgtgatgaagggcgagtattgggggtgtgaggactggggggaaatagaaaaagaaa

SEQ ID NO: 24 - DNA, 697 bp, Arabidopsis thaliana
ttcatttgacgatcaagcaactgaagatgaaacacaatggactcatataaagtacatgccaagaaatcagcagcatctcttccgttgaatccatcatagatagcgcaaaacaaccaaccattctcctcagagcaaacagcttgaactctatcttcccctgcagcaccacccgcaacttgaacttccatagcagagagaagaaacccttcattaacagaagaaggagaactcattgacgtcaagtaacaagattcaggctcaggaggactcggactagtagacgagctgcagcttagactcaccatacttccatggagagaaggagagagtatatcaagcttcgaaagcgcaggcgaagacggaactttcctgaaagatttcggagaatccagagacggcaatatctcagaaccaatgactccattgcagatattagtattggctaaagtggggtttccacttaaagcagctcctgataaacaagagaaactgctagtcttttgtagcctaaacccaccaagaacctcacgaccatcagcaattttatcttcagggattcctatcttcttattattgcattgataaccaaaacttatctcaatctcaccatacggatcagtcccttcctgcattttttttcttcactttcttgcaatgttctgaaacaacaaaaatccacaacaaaaccatagagttt

SEQ ID NO: 25 - DNA, 432 bp, Arabidopsis thaliana
cgccagtgtgctctaaagcagaaagcattagctctggaaggggaattgcgcgaaaagctggagcagatggttaagtaaacgttttgtggtgccggatgctcaagccgcatccgcgacacccggaataattacctcaacccggttatctgcttcatcgctgccatcaccgtcggtatatcggccagataatgattcaaaccgttggcgcgtaaattacatgccgcacaatgaccgcaaccgtcgcctttaaagccgttatagcaggtcaacgtttcgttacgggctaaatccagtttgccgtgataatctgccagcgcccaggtttccgctttatcaatccacatcagcggcgtttcaaaacgaatatctttcgccatgcccaacctgacggcatggtttagtgctttcacgaactcatcgcggcgcatcggg

SEQ ID NO: 26 - DNA, 587 bp, Arabidopsis thaliana columbia
tttcgtcgaaacaccatttttattaagtagtcggaaagagactatcttctagagagagccaatcaggaaccgacttgcttacatgagaaaaaaactattacgggctcgtgctttttttgcaagacaatcggcccgcacattgtaaatacgagaaaagaacttaatactaaaagaagggaaaaaacagacaaaagaaccaaaagtcgccatctcagcaacaaaagtaggccactccgaaggtttttcaagaagagaaataaggtcagcactgtcagatgcgaaggagcaatctgtgacacctatcgagatcatgctttccatcgcccataacaaggaatctacttcagcgtgtagtggtgataggctcttccgcgcactcttaagacccaaatacaggacattgtcttggtctactagaacccaaccatgtccactcaaggtgtcctcttggtgccaagatgcatcaaactgacaaacattccgattaggaggaagactagtagggaccgcctgaggaggagggtactcgaaatcgctcttagtagatatgtttgtcttgtaactttgcaaaggacaatataatgatg

SEQ ID NO: 27 - DNA, 520 bp, Arabidopsis thaliana
gcttcatgataacagctaggttcctcactgatgtccatttcttcagctgccataagagcatatgcaaattgggagtggtcagagaatcttataggtgctctaatttgtcttctaatccgatctctagctaaccgataactgctccgtctttcaccgcttgctggagcttctccttcgggttcaaaatacccttactcatcatcactagatgaaacatcaactgctccacctgcagctgaactctcaccaacctgttgttggttactcacaatctcaggacatgtcttttctgcttgagtaatcttctctactctctcctcttgttcagacttctcttttaactgtaaatccttacacaccaagttctaatgaaatatcacatttcgactgataacacatttcatttcttccaagagccatatcttgtatcccttagtgccttgcggataaccgagaaacactcctttcaatgctcttgcccaagtgagcaaatggttggtgtaggtctccagacatatgc

SEQ ID NO: 28 - DNA, 861 bp, Arabidopsis thaliana
ccttcatttggaaaaacatcatatgccgacacggtgtcccatacgagatagttacagacaacggaccacaattcatctcacacgagtttgatgctttctgtacggattggggaatcaaagttagttactccactctgcggtatccacaaggaaataatcaagccgaagcttcaatcttaaaaagcgtctaaatcatttgaaaggaggatggtacgacgagcttcaacctgttttatgggcgtatcgcacaacttctagacgttctaccggagaaaccccattctcattggtatacgggatggaggcagtcgttccagccaaactcaacgtgcctggactacgccgaacggaggctcctttaaatgaagatgaaaattcagcaatgctcgacgattcgttagataccatcaacgagaggcgagatcaagctttaatccgaattcagaattaccaacaggcagcagctcgatattacaattccaagatcaatagtagacctttcttcatgggagattatgttctaaagcgtgtttttgacaataagaaagaagaaggagcaggcaaactcggcataaattgggaaggaccttacatcgttaccgaagtggttcggaatggtgtttttggcttaaaagatctagaagacaggccagtcaaacgtccttggaatatggtgaatttaaagaagttttatgtttaagtaacatgcgttttttgttatgtacacgaactacggtgtggctttacccgaaatgggtatgtaggcagctcggaaacgagttcaactactaataaatttgttttatcatttgaaaaagggagttcgctgtatgacgaacaaggcaaagaagttcggatgtg

SEQ ID NO: 29 - DNA, 759 bp, Arabidopsis thaliana
tcgtctaggttggactgagtttgaaaacgggatccagctgaatcgtcgagtccaacaactgaaatttcaatatgagtagaagcctccccgtcctgaacaccaatgtcctcggtgattgatgtggagacatgtcaagtaggtagctctcgatcatgacagatggtgatagcgtgagtagtggcgtattccttcgggttctatatcgactttcctggaagtcctgttacttttggaacagaagttgatgctgtttgtccttccatgtaaaggaccttagaggtaagtgcctcaagtttgatattcagatcgttgaaagtgcaatcaaccttgttgtggatttctgccatctttttagcgagatccattgctcctgctgcttgtccctggagaatctgctgtaacatgttcttcaagtctgaatctggagttgttgaagctggttgttggtgctgctgtgcaaacccaggtggtggaagttgctgctgatagttgtcctggtactgctgcttaggaacatacccctgaccttggttctatggaataaagggcgtgggttgattttgctgctgtgaggggtagacttgatcctgcgggtttgcaacatttgtacttctgtaagaaagattgggatggttctgcttgaagttgttgaaacctttgttgtaacctccttggttttgcacacagctgacctcttctgactacagagtctccccatcatggacttggaacatctcataatcacctagaaaatgaacg

SEQ ID NO: 30 - DNA, 1191 bp, Arabidopsis thaliana
tttcctttaacaaatcagctccttgagtagtcactcctctacacttcttaaccttcacttttagcagattcggacatccgttcccaagagctttgatgccatcatcagtaataggacagttcttaatacaaagcttcctcaacgccaaacatttctcagcaatacaacataactcagtgtcacctaccgtatcacttccacacaatgccaatctctccaagttaagacaattcgaaacaatcgcttccaaacttaacttagtaggattcacaccaatcaaaaccaactcctgcaaattccaacagtacttagcaacaactataagcccctcatcgcctattcgattcgtcttccatccatcaatatgaagcttccttagcaatttacaacgctcagccaccaaagctaaaccaacattcgtacaatcaggagttttcacaagatgcagaacctcaacacccgaacatttcgataacgcggttaaacccaaatcactcatctgaatcctctctaaatgtatctcaacaatagcgttaaccttatcacgaaccgcctcaaaaacccgatcccaatcccctgaacacctgaaaatcttcaaaatcctaagtcctttagctccacttaacaatggagcaaaacactgaccattatgcagctcctttaagcaaataaccttcaacgaacccgcagctcccccaggtcctataagctcagcaccagcaccgattccgcgtaaccgtttaaccgacaattcctctagacctaaacaagtattcaacaaagcattcattcctttaacaccaaacccacaagatccaaatgaaaccttcttcaaactcctacaattctcagtgaaacctataatccctaaatccgaaatctccggacaaccgcgtaacttcaaccgcgttaaattccgacatctaacagaaatcataacgaatgcgttgtcacatataccaagtgatctacggtcacttctaagaacaagtttagtaacagaatcaaaccgagtaaatagagatggtatcactgaaataagatctgattgtgctttgagagagagacgatgacgacactgtccttcaattgttaaccaccgacgacacaccagtgagcaacgttttaggtcggcgcaagttagcgctatcattccggataacgcttgcatcctctgtattaccggaattg

SEQ ID NO: 31 - DNA, 728 bp, Arabidopsis thaliana
tacttgtttgggtaacgggtaatccccggaccgatccgatacccacgggtttactaaacctctatccaataaagtaatttcccaaaaccctaatccgccccaacccggtttcttcggtttctgtgctaattcactaaaaaagtttggctttctcatcaagttttgcgtctccagacttggtagggttgacatctgaaccgaaacacattccgctgcctccacttgtaaagctgcctcattctcaaacccaaattctcaccaacgtggccatgtcctcatcttctcccgaggaagacgactgtgttgtggctatcaagttcttggtacctcaactcagctttgcagacccgatgaaggccactccaagtggaccaatatcaaaattaaaaacccctgcttcttctctttttcggttctgttttccaagaatggcatgtttcgcatacctggatccggaggccacctcattggatcatgggatctccacaatgctaaaccaaatcccaagtttcagaggctgcggtaccaaaacatttccaaactgactaagaccgaacgcgagctgcaggagcgaacacttggttaagaaccaccactgaaatgttcttggttaagtggtataaaaaatcctctagaaagatcatcaagggtattgggaaattgaaaacaaaagctttaatggtgttcaagctagacgaagaagcaaatgctgtttcactcaagacatg

SEQ ID NO: 32 - DNA, 629 bp, Arabidopsis thaliana
gtaacgtgcgccagtgtgctctaaagagagagcttgttcattgcgtttagggttgtggcgttctggatgccgaaaaccgtgtcgagggccgggaccgttctcaagcagtaaaagtgcggactcaagatcgccgagcagaactttaagagatgctaagcgctgcatgctgcatagggtctctggggcgttgtgtcccagggtcctgagtcggcctgcaaaggaccgctcgtacagcgctgcggcctcggtggcgtatccgtctttctcgcagagactgccgaggtcgtgcaggacggaaaagttcttgggatggtcgcgaccgagcacacgcttgtagagacccaacgattccaggtagcacgcttctgcttcggcggggatgtcaagggcctgatatgctttgcccatggagtgcaggatagatgcccgcgtttgcttctctatgtcgaggcctggcgtgtcggctagaagcttcatcgtgtcgtggagctctatgattgctcctgcgcgttgcctgtttgagcagggttctcctctcagtcgtgttgttagagcgcgagacagacggctgttgatgatagctcatcttgatctgcaggaatagtttggcactcatcacttggaggatc

SEQ ID NO: 33 - DNA, 1311 bp, Arabidopsis thaliana
ttttgtctttgaaaaatggttttatctgaattgattacttatgagcaggtgataagcaagttggagcgacgtacagttgcatatcatgaatctggtcacgcagttgtagggtggttccttgaacatgcagagccgttactgaaagtgactattgtaccacgtggcacagcggctctcggatttgcacaatacgttccaaacgaaaaccttctcatgaccaaagagcaactctttgacatgacttgcatgactctcggaggccgtgcagctgagcaggtaaaatccctaattgctactaatgtgaattatcctcgacagaaaatataagaatgttgttgttcaagatgttttaagtttctggtcctatctcaacgtaggtattgataggtaaaatctcaacgggtgcgcagaacgatctagagaaggtgacgaagatgacttacgcgcaagtagctgtgtatggtttcagtgacaaggttgggctactctcgtttccaccaagggatgatggctacgacttctctaaaccatacagcaacaaaaccggtgctatcatagacgaagaagttagggactgggtggccaaagcttatgagcggaccgtagagctggttgaggaacacaaagtgaaagtggctgagatcgccgagcttttactagagaaagaggtgttgcatcaggatgatctcttaaaaattttaggtgaacgtccgtttaagtcagctgaggtcactaattatgaccggttcaagtctgggtttgaagagactgagaaggactcagccgccacccctacagtggagcctgtggtggatgatggagctcccccgccgtttgaaccccaggttgttccgacgtaagagaaacgtcactgttacaactgtaaatttgatcaagtatgcaataacacaattcaaaaaaagcattctcttgttcttcaatgtttttagtgacgacggaatttgttagcaatgaacattttttgttttctaaattattgcttctaataagatttttatttgcttttcagtctcattcttatagtttgcgttttgtaataaaggattgaatatgatgatgatattgttacatcttccaatatttaccaaataccatcatgtaagaatgatggcatcatgtgtctaaacatcttaagccctctgtactcgtggatgaatgagaaagctgtgtataatcaatcgacaaaagtatattccctgattgaaatttctgatttttgtcactttgtcccaaaacatattaagataggatcatatcaataacctatagttcgacacatctaagttaaag

SEQ ID NO: 34 - DNA, 628 bp, Arabidopsis thaliana
acacgtgcatcacatgctcacgacgccattcttcttccggaggtggtgtggaagcatcaacgtattcaactgtctagcatatgccacaatataaagacaaaagaggatccacgatgccggagatgagttccgctccttatggatcatcatagctttcccgttcaaaataatcaatctcataatccagaaagtttttggatgtattgtcgaggtgatcaataatgtgcacagatggatccgcagcatagtcaatacgttatcaagaaaccacccttgggctcgttgtactatttaccctcgctatatattgttcctattccacatccctaatttcatcaaatatttgtggaatgttctcattgagttctttgacatcccggatgcgcttgatctggtcgagaagacgttatttgtacacggagagcccatgacgagagaattgtggaagttcatcttcgaagagctgaaaaacaaatcaaagtatggagacagtcctgaaaatgccaaaaggatatctttggctaggggagaatggactttcagagagaacctgccggtggatgcagaacgtgacaaactggtacgctatgtcacaaaggtcgattatgatcacagtcttttgatgtgg

SEQ ID NO: 35 - DNA, 1199 bp, Arabidopsis thaliana
aaagtagtagtgaaatatgaaaaaaaaagaacatttgaaaatgcgggatagtcactctatcttcgatattaattaattctcataaaatctagtcaaagaattaaatgtcatctattccaagatggtatttactgtctaacattatatgacgtggggtatttgtatgattgtaacgataggtagtcaaattcttgtgagccgtttggggcttggtcggaatcctaaaatatgggatgagcctaacatgttcaagacagagagacacctcgatggccatgtcaagaactcactgggtttgactctgttggagccggacatgcggttcgttacattcggcaccggtcaccgtagctgcccaaccactaagattgggacatctatgaccatcatgtcgttagccaggcttctccaagggttcgaatggactctccctaatggaaaaattcaactcgaactcatctcagcggaaagtaacttgtttatcgccaagcctctactcggatccgcgaaccaattttggctccaagtttatatccgaaaattcagatcaagaatttttagaaaatgtttgggtgacaaatcatcaagtgatataatcttgttaagtactatttatgttttttaagggaattttgccaattgtgccatatttgtataaatattttgtcggcaatgctattttttatatctttaaaattgtgcaatgagtcagcttttgacaaaggagaagatgtctaaactacctttaattggttatggagggaaacaaaacatttcgcccaatgaggctgacacctctgccaaaagcagttgacgtctagataagatgatggtgtggcgtggcacattaaatgtggacagaaagaaagttatgatggttgttatacaataaaaatggttgcttttaatacaataataatttatcacttgatgatttgtcacccaaacatgtaggagtcgacgagaaacgaagaaagatggatgtagataatgtatcggagaagggatgatggacaacaatactgtagttgtagcagtcgacgagaaacgaagtaaacaaaatacagatgtccacgaagatggaaccgtggacaagtttttagtagcagttcatgttcctagtatatctaacaaatcttcaaaagtacagtagttgaagccgaggacgggaacataaatgaaaagtgaacaaagagttt

SEQ ID NO: 36 - DNA, 573 bp, Arabidopsis thaliana
  unsure (1)..(573): unsure at all n locations
agtaacgtccgccagtgtgctctaagacgttgttccagtgttttaatactatggctaatggcggacgaggataagcctaactcatcgcccgctgcacgaaagctttgattacgggccacggcaaagaaagtggcaaagtcagacatattcatccgcattagtgaaaatccttcattaactcatcctgaatcatcacgtttacaggattatgccgcctgcgtaaagtgcgctccagaacttaacgtggaggtaaaattatgcagtctgaacgtatttatttggtatgggcccatcctcgtcatgattcattgaccgcacatattgctgatgcgatccatcagcgggcaatggagcggaaaatacaggtgacggaactcgatttatatcggcgtaatttcacccagtgatgacgccggaagatgaaccagactggaagaatatggataaacgttattctccagaggttcatcagctttattcagagctgcttgaacatgacacgttagtggtggtttttgtctctggtggtacacttccggcaatgctnaaggatatattgcagagatggaatat

SEQ ID NO: 37 - DNA, 1118 bp, Arabidopsis thaliana
ctaaaaaacatcactattatttctaaagactaaatctttctaaaaggctttgtgtgtttgtttccatgggagaaaaagtaagctttttgttcataaaacaaaatcactttttgaggaaaaagcaaagttgaatccatgaatctcatcaaaaagctagattcacttttaaaatcccgatctctaattctaaatcacagatgaaattttttttaaatcagatcaaaattgtgaacctgaagagcattaagattagatttgtagaaatcttcaacgttaatgctggcataacgagtacgataagtggagcaaacgtcagagtacatcaaacaactcctgatccgttcccaattcttagcattgttgacacgtttctgcaaccaattagagtaatcggcgacatgatactctttataccctcgatccgatataacctcaccggcgccgcggtttgtgactgcgaaacggaagattgtgaaacagaagccgaggagaatgaggaggaacatagcgaagaggtaaagccagaggaggcaagagacacggcaacaagcaccgacgagtccggcgattgagacgaacatgaggaagattccgagtacgaccattggtttgtcgaggaaacgttcgcattcggttgctgcatttttgccgagccagatcccggcggagagaattgggattgagaggaggaatgtgaagaaattgaggattccgaggagattgttgctacactgaaccatcgctttttgttccggcggaaataaaaatgtgatttttttttctatctccgatttcagatcttattatgcaaaaaaaaagaattgggaactttgtccgttacgaaatctgttgggacttaaacggaactaattggttcttaagacagctagacaactaaaagttaaaatcttttgctatttattgtttacaccctttaagttgttggaagtgacaaaattgtctcgacaaataaaattctgacatgatgaatccaaagaatgtcttgttccaatttatttaattgatcatccaaggaaaaacgattaatgaaagacaagagttatagatttcatgatcatccacacgaccttttttggtctcaaacttaaaatgaaaaa

SEQ ID NO: 38 - DNA, 602 bp, Arabidopsis thaliana
tctagtaacttccgcgcagactgtcattggagatatagtgtttgtccttcagcagaaagagcacccaaagttcaagagaaagggagaagacctctttgtggagcacacactttctctaaccgaagctttgtgtggcttccaatttgttctgactcacttggatggcagaagtcttctcattaaatctaatcctggggaggtcgtgaaacctggtacgtattcagatgcatcgtcatactcagattttacagttactataactgtctctgattgaaacatgatcacttatcttatgtgtttgacagattcatacaaggcaataagcgatgaaggaatgccgatataccagaggccattcatgaagggtaagctctacatccacttcacagtggagttcccggactcgttgagcccagatcagaccaaagcactggaagctgttctacctaagccgtcaacagctcagttgagtgacatggagatagatgaatgcgaggagaccacgctccacgatgtcaacattgaggatgagatgaggaggaaggcacaagctcaaagagaggcttatgatgatgacgatgaagatgatgaccatccgggtg

SEQ ID NO: 39 - DNA, 859 bp, Arabidopsis thaliana
cggttaaattgtcgattttaatcacaaaaaaggattatggtttagattttgtaacaaataagatatatgtcggtattagtttaccaaaaactagttacagtttagattttacaactaaatgagttatgaattttgtttattagatagtaaattctgattagttaaaattaaaaattattcaaaatttaacattaaaataaaataaaaagttacaaccacaaggaaaattacacaaaatttattacggtcaaggttttaatgaagtggagagatgatataaaagcacacatgcatgaattgataaaataaaaacgtagatggtatgtactagtatttaacaagattatatcacttcatgatttatcaccccaaatacttctagagattctagatctggattttcggatataaacttggagccaacctaggtttcgcgcatgcgagtagaggcttggccataaacaagttactctccgccgaaatgagctccactgaacttttaccaatagggagagtccattcgaacccttggataagcctggctaacaacatgatggtcatagatgtcccaatcttagtgcccggacagctacgccgaccggtgccgaatgtaacgaatcgcatgtccggttccatcaaagtcacgcccaatgacttctcgacatggccatcaaggtatctttctggcttgaacgcgttaggctcgtcccatattttaggattccgaccaagccccaaacgactcacaagaatttgactgcctatcgttacaatcatacaaataccccacgtcatataatgttagacagtaaataccatcttggaatagatgacatttaattctttgactagattttat

SEQ ID NO: 40 - DNA, 574 bp, Arabidopsis thaliana
gtggcacacacgactgaccaaaaccataacaatcaaactcaaccttttcctgtgacttatcctcgttaattagattagtttttctctggcatgaggcgttggaatgaccgttcaccaaaatctttgtcattagcttgggaagtctctcgcattagattgtccctgtcaagtgtggaccgaacaggagcaggttgaaaagagaaagatagcgacgtagatatggctcgcctgagtgtttgccgtccttgagagaaaccggttctctcgttcccaacgcttccgctcctgtagccctgtctagaactcctggctcgaggtaaggctatatggcttctctttatcaggttcaggcttaccaattgtctttgcacctcctccggtaattgcagtgtgaatcggtctatattctgacatggttgaaccaatgaatgtccagtcgaatgagatcgagggaggaatagctcaggcacatgccagctcgacaataaccctgtagatcttgatcgaggtgttgtataatttgcattattattacatgtaacactactacctgtcaagcttctctcatcggggg

SEQ ID NO: 41 - DNA, 1006 bp, Arabidopsis thaliana columbia
ctgaccggaaggatagaggacgagattgagagtcctgcgcacttgacactacacctgatgaatctagaagagaaaatggggtaacagaattagatatacacaccatttctagtagagtattcacacaaatacattgatgagtcatggacctgaggtgggaccagaagaaccgcttgaagaatttgttctctcactaccatcttctcttatagtagcatttccgtctgagtctgatggtcggacgcatgacaatttaccttttgaaacaacatagactgtacaaaagtttggcatcaaagctgatatcaccgagcaaatatcagctttcctggaattttcaaaacagattcattggtacacggaatagaaagaacaaaggtcgaaagctagcagcagggtggtagtgtaccttgagaaaaaactacgggatgagcctccaatgacaattctgtctattgaatcccgagtcacttcttcagctattgcggctgccacattatctgattcgatcacaagaacttctactgcaacctttcattaaggtaattcaatgagttcatgtaaccttgaaattttcattaaagaagagcgtaagatatctcattataccaaagaaaatacctttctccgcacgaacagttttgtgtaaggtttaagcatttcttcagactgccacagtatttcctgtctatatgcagttactacatcatctcgtacctcggaaatcgggattgcatttcccacttgagaaggagcaagaaatgtacatcaggctttttatcagttacaataagtcttgattttgttttacacaacaataccaaatagaaaaaagggaaacacaggaagaagtcctgagtacaagaaagaaagaaacagaaatacaaggcatagttggaactttacttggtgtaggtacagaagtaatcattggatggatgtgaagcagcttgaagccaacatttccttcagtagcaaatttttcgatcgccgcatgtactacata

SEQ ID NO: 42 - DNA, 672 bp, Arabidopsis thaliana
cgaacctcatcattaatcaaccaagcaataatctaaagaatagagatcataattccaaacaaaattttgactcaataaaacgactcaaaaataagaaaaagaagagtaagaataagactcaaaaagaaaaacatagttagtaactgcctcccccagacttaaacgacactgtccccagtggtattcaaatccagagtaagcgaaaaaaataaaagaaaaacgaaaaataaaagaaaaagaaaaagaaaaccatatcagtgggttgcctcccactaagcgcttgtttagagtcaatagcttgactttgatggagtttggggatcaggtggatcagatggaggaaaaaaatacttcctagtagaaccccgcatcatctaaggtagcgtataggcagttggtgtgtgcgctctaccaaggaagtaaggaatgtcagcagagtaggacagaggtatgggtggtctactccactttcctgcacaatcatcaaaagaaagaacaagcactcgacgagaaactcgtggcttgcttaaccgtaaaacagtttttggagatttgaaactcttattgatgaaaccaggaggtttaggaggaggagatgagtacctttgccgtttcggagttgcagcaaagggtagaggtgcagtgggagacgtgactgtagtgcctggagta

SEQ ID NO: 43 - DNA, 539 bp, Arabidopsis thaliana
ctctagtaacgtgccgccagtgtgctctaaagaaatatataagtacgccctcgtaattatcgttggcggtaaacaaccgttggatttcagcgttaacggctgaaggacatcgggtcaatcgcccaacaccaacctcatgaaataagtgtggataccgtcttatggagcaaaacccgcagtcacagctgaaacttcttgtcacccgtggtaaggagcaaggctatctgacctatgccgaggtcaatgaccatctgccggaagatatcgtcgattcagatcagatcgaagacatcatccaaatgatcaacgacatgggcattcaggtgatggaagaagcaccggatgccgatgatctgatgctggctgaaaacaccgcggacgaagatgctgccgaagccgccgcgcaggtgctttccagcgtggaatctgaaatcgggcgcacgactgacccggtacgcatgtacatgcgtgacatgggcaccgttgaactgttgacccgcgaagcgaaattgacatcgctaagcgtattgaagacggga

SEQ ID NO: 44 - DNA, 602 bp, Arabidopsis thaliana
ttttttcctttcataaacttcttgagaacttaattgtacttttggttttcttttttggcttatgattgtatctgaagggttaattatgaatttatgaaacaaatctgttcataagtttccaataaaaatttttgtacttagccacacaatgtttatttatttacatataaaacataatagttttacattaaggtctatgaagaattttatatacaaagaatcaaaccaaacaaacaatctaaaagaaaaaccaacatttcatcaactttcatcaccagcccaattactcttgagtttaggcccagtaggcccatcttcaccataaacttcatcaggaatcttcttcacaaatttaacaaaagcctttttcaaaagcccaggcaatatcctctccacactcttaacttcatcatcaacattataatcaatcttcggcccccacttcctgaaatacttaacccacggcggctccaccactcctccgccgtcatactccgccgcaatcacctcataccctaaccccgtatcaagcaccttcttacctttccccgtatcattcctaatcccaaccccatcgtctccttgcaacaccaacggggatc

SEQ ID NO: 45 - DNA, 637 bp, Arabidopsis thaliana
aaaaatattatatattaattatcaattgggtttttgctaaacggagcctggatacttcattttattagtccgatcacgtaaaccataaaaaaattttgataatctaatatcaatctaaatactccctgcatttaattccactttattttttgcgcttccgttacaaatttttgataattcaatcaatctttttgagcgaaacagaggatatctcgatcgagggagaaaatggggaaatcccatatagcccgatatatctgacaagtcgcactatatgtcaacccaagatgtatctccttctccaggacttcgaaaaggtacttttggaacgccaataggcatgaaatgaaaaaaaaagagaatgaagttctctatttcactttgatgtggaaacgtaaaattggggtttcgttttttaatactattatccttttttcctactttattaatcatatttaaattaatgatatttaatacataagttgaataagctaaaataaaatataaaataaaagtaaagtaagagagaatgaataaaactaaaggaaattttttacgaacgggcttctgaatgatcaacaacaatagctatcttggttcatagaaaataggattacccccattgcatattggtact

SEQ ID NO: 46 - DNA, 635 bp, Arabidopsis thaliana
ctaaggtgataaattgatttgacatccaacgctgaccaacacatatatgacatttaattcaaccgtaattgccccaactaaatccatagtagtggttattaaagtgaaaaacttaatgacgatctcggagtatctcatttcaaatatggttaacccgactcttttcaatgatttactctcgcatatagctaagaacatgtctgacaaatgctggtcagaccttggttcactaatacgatcagacactcgcggaagagacattgtctaccgtccggatgtcctcaaagatgccattattctcaccttgtgtagcgatcccgatgacttccaagctggagggggccacaattcctccggagtcgcagttgaaggccgacatcgaccatttttcttaaggggttttgcacctaacaatctcacggccgtgtattacgaaggtattcgtgttctaacgcatgaatgaaacatcaatggagccatcaagctcttacagcgtcatgctccacaacgagcaaatgcaacacttgcatgcgccatcatatgtgctgattatgattatacgggcgacttgtttctacagctcttcacccgcaaccattatccattggactaggttgcactcgagttttgggtga

SEQ ID NO: 47 - DNA, 1207 bp, Arabidopsis thaliana
taaataataattgtcgaaaaagtagaatactgtatttaacttgatcgtactacagaggacaaaataaaaaagcagactttgcgaaaagcgaaaggtttcttcgtcaacatggaaagaacttagtggaaacttcttaaaacttagattgtcagattagcataactcaccttagcaagctccgatcttcgacgagatagtgagaggagtaaagagtaacttttggttcagaaacaagtgtctcttctctctctagtatctccggtgatgtcgacggcggaggcggattacgtgaaggccaaaacatcggtgtggtgggatatagagaattgcgaggtacccagaggttgggatgcgcacgtgattgccttgaatgtgagttcgtctttgttgaagatgaattattgtggacctgtctcaatttcagcttatggcgataccaatctcatccctctccatcatcaacaagcactttcttctactggtgttgcgcttaatcacatcccagcaggtgtacttctcacaaaacccattttgtgattcgtcgttgtttagatgcttttgtggtttttgttcttcttggattgggattttgttttgttgattttgtgtgtatctagtatgattttggttaggttattagttatgtattcgtcctggatctgcaattttaggtttttactttctgtatgttgaattgggtttctccattctgattttggatactgtgattataaatctcagtttttaagtagttttctaattgtggaagtatatgattgggtttgtggtgttttggtggttggaacaggagtgaaagatgcgagcgataagaagattctggtggatatgttgttgtgggcaatagacaaccctgcgccacgagatttattgctaatctctggtgacagagacttctctaacgctctccatcagctaagaatgaggaggtataacattcttttggctcaacctccacgagcctctgtgccgcttgttgctgctgccagagatgtttggctctggacagtcctagcctcgggaggtcctcctcttacaagtgttgaatcctctctactctttaacaatgggggttttcgtgtctctaataaaggtgtgtcgaaacttccagtttctgaacaagctcagcctagccaaccaactgttcaacttctaacgctggagatactaaggatcataaaaccagaga

SEQ ID NO: 48 - DNA, 901 bp, Arabidopsis thaliana
tgatggaaagggtcctaggacctttaccacctcatatggtgctcagagccgagtaagaacaataatatcatcctatttgcagcatcagataccagcagaaaataacttgaactgtcatttcttatatcaaaaccaaaacggttcttgcagccggcgctctgagaaatacttcagacgaggtgcgaagttagactggcctgaaggtgcgacatcaagagacagcttaaaagcagtatggaaacttccccggctaccggtaaataaccttacattggacttgacatccgcttatctgaaatattgaaattaaggagaccagtttttttgcattttgcagaacctgataatgcagcatgtggatcactcagccggtgatctgatagacctattacaaggtctgcttcgatatgatccaacagagaggttcaaggcaagagaagcactgaaccatcccttcttcacaagaagccgggaacagagtatcccacccttcaacccaaaccctcatccatttttatacaaccaaaagaactaaaaaagaaaagaaaaaagaaacagcagataatgtttggatacatctgcagtttctgtgtatccttcagtttcctgtgtatttgtagcattttattatatatatgattatcatgtatagaaatgaaagaaagagagaaaggtttgtgcctaattttttcttatctgttgtattggttttttgtgttcactttccgaccacaaccactgtagctccctccatggctattgtaagagttattaaaagttactttacaccacaaagtgaaatgttaaaccatttattgggttttttggataggtcaagacgcacagtgaggtgaggccatcaatgaccaaacgctgtcgtcgtatctgcagcgaggagaga

SEQ ID NO: 49 - DNA, 1234 bp, Arabidopsis thaliana
atgtgatggatgatcatcgttagcgggattcaacaatagatcataccaacgttgttcaaccacaacatagttcggtagattcccttctttacaatctttcttgaattgtagtccgtagtcgtggaaacgtgtcaaatacttgagttttctcaaattcctgaaaaaccaaacacaaaagaatactaataaagattaatatcgcaaagcagtatataatactaaaatcttttgcaactcgtaaaagattaagatacctataaaagagagtagtaggaaaacattggtaataaatcccaaaggtaaaaccagcttcatcgagtgactcgaatatcgtcttttgtggaaaaccttcgatcagtaatttcctctcgttgttcgttgttccgtgtgatgttgccgaatgtataaacaatcggtttggctgtgttgcacccggaaccgacgcaaaccacctgtccaatacatgaaatttgctataaaccgggattttgctagacaaccaatttccaattcggttttagttggatgaaccgaaccgttatacagatgtaatttatacaggtcaaacggtctcacctatcacatatagcgaaattttgaaccaattccttgtaaaccggcaaagcgtccggtttaaatccgttcataaccgcagaagacatccctttcatctttcgctcggcgttttgggcaaatccggacattgtagctggacccgggtttgggtccgggtgacccgaatcccatggtttaccgaacacttgttcgtaaatatcccgaatggagtgacctggattcgggtcaacgtactgagactggtcgccaaagacgacgttgtgggaatttaggtcagaggaaaaacccgggttgaatttctggtccgatttcatgactccgtcaatttcccggtttagctctttgaaccagccaagtgtgtggtcgaaagaacgattctcttgaaccaaaacgacgatggttttgatcggatacgattctgagccttcactcgtcgcggccattctatttgttttccaattgaattattgatgaaagtttgagaagatcgtagggtttattagtgcttgacaaattgaagagctagatatttacaagtaaaaagcaaataagaaatacgcatcatgcatgcttattgtcctttgaattggcatcacgtcacgtaaagtgccccatttaaagttagaactaaatccaaattataagcatcagggatcct

SEQ ID NO: 50 - DNA, 445 bp, Arabidopsis thaliana
aaatgtataaataattcatacaattttttcatctccttacattcactcaaaatacctaaaagtattactattagatgacatacacaacatatactttaaaaagaacatttgaattagctgattgaactaacgataactcccttttggaaccaacattctgattaactcaacgacaacttaactccgtgaagacatcgtcgctcattgacattgcaccaatttcagattgggatcgacttccagtgaaagcaggagctttaggtaaaggaatgataattgtctcactaccaagccaaattattacagagctcattgttggtctctttgttggattctctggaacacacaacaaaccaatttggatcaactttatgatctcatttcgatggtttctctattaagaacggatcaattataatctcaggctttccttcaacccatcttt

SEQ ID NO: 51 - DNA, 1112 bp, Arabidopsis thaliana
catatcgatttcttcttcttcttcctgttgcaacagatgcaactacatctgtaaatttgacatccacacctctctcaagatactcaggtaacctcttatttgatgctcgtctcacacgtgcacctgacttcatgaactgcatcgccatctgtaagtaaggatttttctcacctgtaccttcctcaacctcctcatcctcttcctcaattccctccatctccctttccaactccctcattttcttcctctcatctgcttccgccttctcaatcttcaacctgtcttcataatccttcttttgcttcctatagttgagaaccaccacacggtaaaatatataaaagaataccaatccaagagcagtagccacattaggatcctgagccaatcttgcccacatatccgccatatctcgataatttttcctcgcctcacgcagagactcctcgtatttcttcttcctaacagccttccttttcttcctctcctgttgtttcttctgcgccttcattgtcttttccatcatcactctttcctctttcatcgtctcaatctcctccttcctctgcctcttgaaatcctccctcattctcttcaactcagcagcacgtttagactccttctttggcttaacccatgttaacatataagcaggaactttccacaaaaatcctaaataaggagacggcacaggaggtctcttaaccggaggagtataagcattaacacattgtacatcaatccctaactcatcccattgttcccaaaacctcttattaccctctaaagaaggcaacacagtccttaatactctagaatcctccaaaactactaacacaggctctgccttttgccgcaaacttaaattaggaggctttatcacatgcttaagcttaccttcagcttttaagctcaaaatgtcagtataaggtatacgattcgaaactacaggtaaatctttggaccaagctttaagctgttcaagtgtcaaagcctcctgaggtttcttctgagttctctttctctccgttaccttcgcagccgcgaacgacggtttggctagagaagcggagattatagtgagtgtgattggtattgcgagaagattgact

SEQ ID NO: 52 - DNA, 614 bp, Arabidopsis thaliana columbia
gcgtcttcgtttgttacagacctcacaataacagcagccgcatgatgatctatttttatacggccaatcttgtacaatggatccattgaataatattctgcctctgcgacaaccagatccttaggtgcagaccaatcaagtagccgataccttacaccattctcttcagaattagaaccatcatcactttcatgctcacaataaaaacatgaacataagataaatttgcattcaatatagtatgttgagaagaataacatgaacaattatatgttataaacaaaactcacattttcccagttaaatcacagactactttccgcaagtcttcaatccgggtttgcatgatcagcttgggtagctttaagtgtatcaacttgtgagtcacttacctgtaggagtgccagcttagcggcagtaacacctctggcgagtcctctaattctgccaggtttgtctctccgcaatacttgactaacaacatcttctttaatactcgttgttgctgaggagcccatgtcactatcaatagtccttattttttcctaacaaaccaaatatttgaaaattattaggaatattaaagtcaccatacactagatataaatggatga

SEQ ID NO: 53 - DNA, 626 bp, Arabidopsis thaliana
tgatcttgagataaaacggttcaaagctgcaatccgaccggccaaccgttgtacttctttaaagttttttggagataacatatttagaaaggcgcgcgttgatttggttcggattggctttgattcctcttttaatcacaatataaccaagaaattctccggacgggactccgaaagtacacttcgccgggtttagcttcatttgatattgattgagaatttcaaaacactcttctaggtgcttaacgtggtcttcttttttcagtaacttgaaaaacatatcatttatgtagacttccatcgttttcccgagatgcttatggaacatcttattgaccaatcgttgataagttgctcctgcatttattaaaccaaaaggcattacctattaacaataaatacctctattcgtgatgaatgacgttttttcctgatcctcgggattcatcattatttgattataacccgagaagacatccatgaaagttaacaactcatttcttgcagtagactccacgagtcgatctttggagcgggaagcgggacggggaagctatcctttgggcatgctttattgaggtctgtgaaatcgatgcatacgacgtcctttccattcttctttttga

SEQ ID NO: 54 - DNA, 736 bp, Arabidopsis thaliana
cttcaatcatgtcctctacaagtgtctaaaaaacaacaacattagcttccacctgtttggcgacatcaatctctcgaggctctttgtggatcataatcgcataacactactttttactcttgggttatactttcccagattgagcaccagttggtcgcgtagaggcaaaaacagtctgagagacttgactctcaaggatctttgtgaggatagtgttctaaacttcccattgagatcattgtacggtttatccacctttacattgatcttagcagcattcttcttctcaccttcaagaatctgctgcaccatcaatttcatctgattatcccagatgaagacgcattagcagtacatgttggaagttggaattgtcctcggtagctacctttattctgaaaactcttatgaggctgaaattgctgaccctgtgaccctgcctgagtgggatacacttgatccggaggatacttaacattagtactcctgtaggaaagcttgggatggttcatgtagttctggttgaaccctctgtcttgatctttctcatacccattcacaaagttcaacactgcttgtagatcttcagaaccatctccgctgaacacttgatgtactggacctttaccagaattctcacaaaaattgacagttatttgatatgtcctcaggagttgcacaacattggtagttaactcaacaatttgctttgattttcctcctctaacacctttat

SEQ ID NO: 55 - DNA, 681 bp, Arabidopsis thaliana
tcggttggctcgatcataagcgttccagggacaggccaagacattgtcggtccatggaaaccataatccatcaatcgtttggccacatcctctggttcaattccagcagtgttctgaggacattgaacaagacattgatttagcatgtacaaccaaaaaacagagcatttactcaaacgagataaagaaacataccttgaatcctctcaagtcaatgatgaattcgtgagcgactgttccattgacaccacggaaaagaactgggtagtggctctgaaagacaagaaagcataagtgaggttgcacaagagaagagacgttcactctctttaaagagttgtcaagataagataaggtacctccagacgctttgccatgtagttagcgttcaaaattgcaatctttgaggcatcggtgagtcctccagatcccatcatggcaatgtaagtatacgagattggcaagataagcgcagacccccatggtgctgcagaaatggttcccagcggtgatgtctgctcgggttcagggataccaccggtaggtatctgtagcagagtaaacagaatgagtacaaaaaagcagataactcaatcattgagaaagatggattagcgatcataacatataagaattaacactaaccactgggtgagaaggtacgaatggagcaaaatgttg

SEQ ID NO: 56 - DNA, 489 bp, Arabidopsis thaliana
tacgttgtttagtgaatgtgaacaaacagtaatatctaattataaaaaacagagagaagagagaatgattacttgtgggcaatacttggcgatggcgatgctgaggttcttgacaatgccagcattgatgttgaaaagatcatcacgggtcatgccaggcttccttgggacaccagctggaataatgacgaggtcagcgccttctagaactttccccaaatcatcatcacccatgtacccagaaacctgtttgaaacatgacaatcgcacataaaagacaaggattttacagattatcgccaatacaattagcaaatcgtggacgatcatcgaatctagaccgaagatgaaaacatggaagcgatcgggtacctgagatcgggtgttgatgtgaccgacgtcagcagcaacgccgggagtgttggcgatatcatagagggagagagaagagacgagagggttaagcttcatgagaagagaaagtggctg

SEQ ID NO: 57 - DNA, 557 bp, Arabidopsis thaliana
caagttccctttcatgctgtttataaacccttgcactctttcactcacagactcactacaagtctacaccacaaacttaccaaatcatccaaaaatggcaaccaaaacttttctctactgttctctcttagccatcagcttcttctttgcttccaattcttcagctaaccgagagaacttaaccgtcgagctaatccaccgtgactctcctcattctccactctacaaccctcaccacactgtctctgaccgtctcaacgctgctttcctccgatcaatctcacgttctcgcggtttcacaaccaaaaccgatctccaatccggtttaatctcaaatggcggcgaatacttcatgtccatctcaatcggtactccaccgtcgaaagttttcgccattgctgacacgggaagtgacctaacttgggtccaatgtaagccatgtcaacaatgttacaaacaaaacagtccactcttcgacaagaagaaatcttccacctacaaaacagaatcttgcgattcaaaaacctgtcaagccttgtccgaacacgaagaaggat

SEQ ID NO: 58 - DNA, 755 bp, Arabidopsis thaliana
tagtaacgtgcgccagtgtgctctaaagcccaggtcaccatgaaacaggtcgctgacgtagcggtaaaactgtacatacagtggctggtccagtcccagttgctggcgaatattttccacgatagcatcgctggcgcggtcacccgccagtaaccgcgccggatcaccagggatcagatgcgagataataaacgtaatcacgcagacgcccgccaccacgagcaccagcccccagcagcgttggcgtaaaatactccagaaggtcacgttatttactcatggtattgatattgaagacctgttccagcatgggattgaacacaaagcctttcacctctttgttcatcgccagttggtagtttttctggaacaggtacacataagcagcgtcatcaatgacgattttctgtgcctgctggtagtcccgggtacgctgcgtctggtcggtggtcgcaagcgcattgcgcagtaacttatcgacctcactgttttcatagaacgagcggttacccggcagaccttttttgtctgactcaaaccagtaattcataaacatatacgggtcggcaaaatccggactccagttgccaatcgcaatgtcgtaatcacctttacccactctgtcgcgcatggtggttcgccagcttttccagcttcacaatgatgcccagcttgttgagactggattgtgtcgccagagcaataggctcccagttcggatcgttatcggagtagagaaacgtcagctttagagc

SEQ ID NO: 59 - DNA, 902 bp, Arabidopsis thaliana columbia
tgttttaggtataggttttagagtctatttgttatttctagagtcttttatagtctttttcaggtctttacatgtttgggattcatttggagataagggagcattctggaggaaaacagagaatttatgctgctgaagaaatccggagacaaaaatgtacgtaggtgtcaaacgacaccacccctggtgttgagcgacaccaatacctgacggcaatttcgaggcgtaacttattgatgttttgaagatttctaaattcggcccagaactttctcctatgtttaatgaaggctcatcacgtattttagacatataattaggtttttagggtcattgtttagacctaagctttgggaggctattccctttttctattctgtttttgggagcaaaaccctgtggagactccctttagagaagattcttcttaactatattcttctcttgttttattcattgatttcttattcaatcatgttttgttcttctatgatcatgtttgagtagttttttttgttatgtttagggtttctcattagggatttagatgatttagtagattgcccccttgctaggttatctgttaggattcttcatctttaattgttcttaatgctagttcttgagtagctaactagaacttgaatccagacaataggtatgcccaccataggtatctgtagttggatatattatttgatgagcctggtttataggtgtgtaataagaatcagcctatctactaaggtgaacaattgaactcgtttagaatgcatgtttaggttaaagatctctcgacttctccggttattcttagctacaagcatagggagtttcgcggagcaccactggttattcccataattagagtttgagtttaagaacggtttgataacaaccta

SEQ ID NO: 60 - DNA, 515 bp, Arabidopsis thaliana
ccaaatcatacaaaaccactcgacccccaggtcgagtagacgcttcacaacctcagcagaccactcgaccccctgattgagtagtggacatcaccacttcacctcaccactcgacctccccgaggtcgagtgtcttcatctccatcacctgaccatcactcaatcacatcactcgaccccgaggtcgagtgtcttcacctccattactagaccactagtcgatctcaccactctaccttgaagtcgagtatcaccatcaccaccacttgactacatactcgattgcgagcttcagagtcttcttcattccgcactcaagcacaaggaagaaaagaagactccagctattcactcgacctcccactcgagcacctgggtcgagtacagttcttagtccgtcccaatactgcgtcattttaagtattagggtttcggaatatttggctataagtaacatgtacttcacatttttgcaaacaagttttttttctagttttattccgcagacactgtgt

SEQ ID NO: 61 - DNA, 644 bp, Arabidopsis thaliana
ccgcaagagcacctcagcctctacttcgatctctttctctcaactctccgttctcaccgttcactcgacctcgccattcacttcgcctccgttcatctcttcactcgaccgctcctcaaaccgccaccgtcttctctccattcgacatttactcggccacacagtcaccgtttctcattctcttccactcgaccacaaaatttgaacacacaatttgactatactcgaccggttactcgaccgtgaacttgattggtttagtgtttgtgtttatttggactaacatattgatatttggttttaagttacattatttttcaggaaatcaatatgagtaactacagtggcgaatcctccatggatgcagattacaacgtcgatgaagctgaatcttggtcaactggaccagagagagagcgacaggcttatgagagcttcagagctgagacccaacgctcagtagctcgacgcaatgagaggagagctgagattgctagaggaaagagagcaatgaccatcagatatgagttgatcgacgaagatattgacgtcaagtatgagcccgagtcatggcacagagagacgaagctgttgaacaggcctgatgaagttacagtggaggagtacataagacttttcgatct

SEQ ID NO: 62 - DNA, 619 bp, Arabidopsis thaliana columbia
caagtccaccattatttattcaaataattatacatatattcacacatttatacatcttcatcttctacttcatctacgtccgaggacgataaattatatcggcattcatcttctggttcaacatcccgacatcttaatcaaggattattaggtttaagccgcctaccggattttctagtacaagatcttcaattgtagtgagaaaaacatcatcatcattttctgtttgcaaaagagttggatcattgttttcatattctccagaaatgtttcccctcggattgacttttgaaacattgagccaaatgttctttggtttcttcgtatatggatacagaatataacaaacttgatctgcttgagatgttgtatacatatatcaaacaagattattaataattaacaaagaaacgtattttggacttcagaattacgtaccaagaataaatggcttgtatttattgtatttcctcatagatagaacgtctacaacgccaccatggcttcgtcgagtgtctctcccgatctttgggtcataccacttacacttaagaagtgtgatctcaaattgacgatgcctcatacttgagttctatgatatcagttaaggtaccgtaga

SEQ ID NO: 63 - DNA, 580 bp, Arabidopsis thaliana
cagcctttttcatggaaaccgaaaagggttcttgcagcgggaagacatcctgttggaggcagagatgtcacaccgatcttccttgctccaaccgcatacacttgctgcaacagtcaatcaaaaactcaaaatgtctcatctttctttttctctattcagaacagaggataaccaaggaaaattctttaccttgataaatgtagagaagttatcgataaggaaagatccgtatgcatcaacagtgtaaactttgtaaagcagaggattcacatagtagttttgaacaaaatcactgcttcctgcacttaagagacagattgctccctttatgatcgaatcagcttttttgcttcctgcaatttttattagcttgctcttgtattccttgaaatactctacttgctgatacaacgggatcgcgtgctgccaaaaaaagaactaagatcagaaccaaaacacaaaaaagaaacagatcaaagaagaaatgtatcagaacaaagaaccgtcactacttacattgagaagagcactttgtcacatacctgaagctgcagaagcgaaattagcacgaatgagaaga

SEQ ID NO: 64 - DNA, 776 bp, Arabidopsis thaliana
cagttatactaaactgtaattacctgagggtgctcctccataaggattgttattgtagtagtgcatgtggttgacctgaggagatttcttcttcttcttcctgttgcaacagatgcaaatacacactgcaagtagaagcaaaagccctgctcctacaaggactccaataatcaatccaatgttggcttgtggatgattacccgatgatgagtctgaatctccactattctgaggagggcttatcgaccgaggtggtgaaggtgagccaccgtcaccggaagttctgttccctgacgacggtggtgatggtgtggagccgtctctgttgttgtttccgccattggttctgtttcggtcatcattggcaccaggagaaggaggagttggtctttccggtgattggttcgacggtgtttgtggtggtgcaggtggcgttacaggagttgagccttcaggtgcaggtggagaaggattctctggagtctgcggtgacggattagctacaacaggcggcgatgaggacggagatgtaggaggtgacgtttcttgcgttggtggtgcaggcggcggtgaaaaagaagcggagatatctggcggaggagcagatattgatgatggtggtggtgaagaaggtggtgttggcggcgatgactcattagacggcgatgttccgtttgacggtggtgtcccatttgaggtttcaggggcaggagatgaatccaccggtgagtccgccattttgaatgttgttattagggtttacactggtagccctg

SEQ ID NO: 65 - DNA, 613 bp, Arabidopsis thaliana columbia
caagcacacttaactgtggagttctcttaggatctttgaccaaaaagataagtgcactttggtgacatagttggccaaataaattcttttaaacctctccgcatgcaccaccatattcctaaaactgggtgttacaattcacccacactaacagatggcaacgtcctcgttgcacaaaaagatcgtaacccccgatggtgcttgccttctttattccacactcatctgggttcggctctgataccatttgtaacgccccaatcgcccctactagtgggccccacgtcctctctcttccccatgggcccactcctgtccgacagtcggggcgccatgttcgggaggctttaaagacttgttaccgaccctacaattcaccacacgatctttccccatgctttgtcctcactcgtatcgttcgacaatcacttcccggaaagtcacccatcctgagacaactccaacccaagcacgcttaactctggagttctctcaggacctttgaccgaaaagataagtgcactttggtgacatagatgaccaaatcaattattttaaatctctctgaatgcacaccatattcctgagcctggggtgttcaactggaaggaca

SEQ ID NO: 66 - DNA, 530 bp, Arabidopsis thaliana
ggtctctgatgagggtggatggggggcttggtaaactgaattaccataggttctctggaagttgctctaaggaaatgtcttctagaaagcaggctttggagtgtagtttgaggaactctagttccttgtaaacctgttgccactcaagttgccctatggctgtccaaacttcttgtagccctgagcatctatgtagaagactcccttttctaactcagtctcaggctcaatggtctcatcctcagctgcaaggtggacatgcttcttccctgtaagcaggttgtgaaccgaatacagcttagcatgtacctctgccatttgattacctgaaacagttccaacaatctttttcctctcaaagtcagcattcttggtgctcttactacaagctaggttctctatcagagcagtagcatcaactggatatctcgtgttgaagttaccattgctcgctgcatctagagccatttggtatctctaatcaactccattgaaaaaggtacaagaagttgtactcattgaaccatgat

SEQ ID NO: 67 - DNA, 1264 bp, Arabidopsis thaliana
catttaaacctttttccagattcttttgaaggattggccttgtttttgttttttttttttctgtttgtgagcgtacgtatatgtacatgttataatgtgatgttgatctaaacttcatccattctttccttataaattttgctataatatataatgacctagcttgctaatgatcattatagcaaaataatgatatgtagatgaaataaattaaacaataatgttaataacttaaaataatgatagggttgtataatgttctctaccttacattttaaaaagaaaaaaaaaaaactccaaaatatactttaatgtatagtttcagtttattaacttatcaaaaaggatgaacactatatgcataaaaaagcaattgactcctatagcatcgaataagttaccggcgatagaagacggggacgatgccttcattgccgcgacgggcaatgcggaagaaagcgggggaggacatgtcaaagtgatggcgagggagattgcaccaaccattattgttattcgttgggcaaaagtttgtagccgtcaccgtcacggcggctcctcggagacaccacttaggatccgccggaaagtcgcacctcacctggtagcacccaccgcatgactcaccgcttctgaatagctcaccgcttagcgccgccgtgtgtgctccgaatccggcgtggtacggattgtcatacccacaagctcctcctataaaattgtatctaaaaaacaaatttaccatacaaactttgaagtaacaaaaacgtatattaaacaatagtttaatggcctttttaccaagtgaagcagggctatcattgacaccataatacgttgcatgagctcttatccaaccgttagaacacatccccacacttaacgtactaaccaagagaataaccgttactaagtatgttcccttcatatccatatatatatatttttattttatttgagataagtataaatttttcgtgatgaaagaaagagaggtcgagaaaagaaagctttgagttcacaattgattgcttatttgcttgaagaagaaggaagacatttggactcgttttataaggatctataataagtattaacgcgttttgtcggtgattattacgacttattttcacttacatgcaccacaatctcatgcatgtgttcgttatctttcttagttggatctttctttttttattgctcttgaaaattctataataattgaatataggtctaaacacaggggaacataatttcctagttg

SEQ ID NO: 68 - DNA, 766 bp, Arabidopsis thaliana
cgcatcaccgccattagatcggccaggtttatcggtcttcgagtaagatttcgtagaagacgaagaagaagagtcagatataagtggacgcctctgacgcgtcgtcgttagatccatcgagcttagagaatctcagcacgaaaatggaggtcgtgaaattgcaaatggaagttttatgagttcacttcattgttcattctcttctcgacgaagcaatgaagaaaaagatttgtgacaagtatctcatcgaattagaggcttattacatagataaaaaggcctttattaagtcgtacatataatgggcttattagtactttaagcccattatgttttttgccttttctacacgttactgatcacacattaggagttttgatataagccacttttctggaatcagacactttgactaaagtcccaagctcataactaatccaacacttaaagctacttttatcgaaaaaataccccaaacatttacagtctccactacacaaaccccgacacttgctctctccaagcgcaagaccaacgttatacttagtcatgaaatgctcaacacctccaagtctataataatgaaaactcttcggatcacaactcttcaccttcttaggcttacaagccttactccagcccattaagcccactcccaacggacaagccacacattgattgtcctcacaaatcccaaacgctccacacttggacggtaaccaacactcgttgttgttgtcgtggttgaaaagctcgaacgttactt

SEQ ID NO: 69 - DNA, 1036 bp, Arabidopsis thaliana
tacatagccactaaataatctgtaaaaaaagaaaataggaacaagtatagagaatgtatcaaacgtatacatccgccgagaaccatgtgaatagatcgtaatcttccaaacatccggtaaaacggagcatttatgggaacgggggaatctggtttctcgctatcagaatccgacgacgtaagcaaatccaagccattgatctcctctggtacgatgtttcccgtcaacggctcctccaaaggcccgacgatttctagcttctcctcctccattctccgatttcctccaatgagccgatgtaacggaatcgatgaacaaagaggcaaagttgtttatataccgcgcgttccacggtccgagcctgttggttcgttcatcccgaacctagtggagattgcttttgttgttaacaacaaaatggagaaccctctttctcgctcagagagttacattactacgtcgtatcatattgatcacaatggattacaaacataaatgtcaaacatataacacttttggtgaaattcttagtctgaatttatacaagcaaattggaacatataactaaaatataactcagtttattttgacattctgttttgttttaagaatatgattacaaagataatagtaaagacagagactatgcaatgatcaatcatctaaagggtcttggaggtttctctaacacagcagagaagaaaacttctttatcatctttatctttcttaggtaccacaacccacttatgtttcctatacctcaacgctttaaacgcttccatgtaatcactcacatcttctttcagacaaaagaaaccatcgatccacaacaatccacctggccttaaaaccctgtcccaatcaaacagcacgaaatcaagaagtattagatcaatccatccatcgagaaacctcgtcgtgtgaatcatatcaagcgtgctgtcgaagaacggtaaccgttggttcacggttaagtacaacgggactaaaccgcgcagacgatcatctcgttgaatggagcgcaaggttgattg

SEQ ID NO: 70 - DNA, 1701 bp, Arabidopsis thaliana
gtaacggccgccagtgttctctactccttgttcttcctctgctcgtccaagacttccaatactgttggagagttcacacaaacaaaaaaaacaagagaacattttagaaagtgaaatatcaagaaagatggggagcaagaaatgtatgtgtgtgttacctgatgccgtggcctggaccgcatcgaatggtttgtatgaatacattagtggatcctggaccgatggagatgcaatcatcaccggttccgattcttgagttagtgatatggacggagtgagatgattcgacgtgaatcccatcggtattagggctattctcatcagcagaaaccttaacgccgtcaatgttcacgttattgctattatcgatgactatatggaatttctggctgttgatcgacgttaaaccactgattttgatgttatttgacccactagacaccaaactctacaaataagattagcaaaaacaaagattaaaaacctcatgagagttaaatttgttgtttcttgtgggtcaagcataccttggcaccggtagacaattatggccaccgttgttcttgcatttccacaaactagtgccttgagcgtcaagtattccaccgtagattgaaacatcagtaacatcctcgaaccagatccaatgttttgagcttgcgataattctaaaatcttccggagcaacgattgagcctgctatacgaatagatattggcgcttgcttacactcgttgccatgaaaaacaaggttcccgaccaagaaccgtccttttggtacgattatagttgtaggattagcggatgacaagcaacgtcccatgcggctaagaaggctttggttgagtcttttgagccgtctggtttagctccgtaggataagacgttgagtgtgcttggaatcggatgggctaatgatgagattaaggtaaaatcaagaatgatgagagccaaaggaagaataaggcatgaagtgttataaaccattttttggatttttttcagagaaggttagtgttttaaggatgaaggatattgtagaagaaggtacatgagatgggaatttataggatttacgatagtaacgtaatgattagtttatatggaactttcttgattttattaatatctaccattgtgtcaacttgtgtacctagataaccgggtaatttgttatgtaataaaatttggttggtttaatgaaataatagtaattattcgcaagataagtttccttagatgactgcattagtgtacggtaatgtacgaaattagattagtcgttttcgacagagaatagtaatatggatttgatttaattggaaaattttgattatggatcgatttggtggctctcgtttttggattaattaattatggaatgaagaaaacaagaagaagaagatttattacctcttaggattgtggtgtccttttatgtattttttttggtatcactatgatttaatattcactaacttaactactttagtgatttatataaaaaatcatagcgcatgcatgttcaagttctttaactttgccgatcgctagaacagtatccgtactttcgattttctaacattcacctatactcgtttggtaagttaacaaagaatcattagtcattcaaattgcatatcaagataataataacttattggtttttttaagtaagtgtaataagaaattattcgaatg

SEQ ID NO: 71 - DNA, 490 bp, Arabidopsis thaliana columbia
cttgtttggtgaagaaagttggagactgcgcaaacacaaccgcataaaccaagcatgttaaccatatcggagctaacctaagcactgattttgcttcttcaagttcatctatactacaagaaccattctttgcgaccagagctttgttgagaaaactgcagttgtaacaagaaccaatatgcatactataagtatttatgtgataacaaaaaaaatcagaggagacagaaagctgtcttacctaaattgctgagagctactgcaagacacaagaccaagtctctcctctgcagcagctacatctaaagctgaaacactccagttctttacagccgctacataaacatttccaatcctcacaaaaggactttgatcttctcttcgaatactgaaccgataagtgcaggttccaagcaagagaacaaccaaagcaactaccatagcaatgcatggaatccaaagcctaacgcccaacttagattatcttgga

SEQ ID NO: 72 - DNA, 732 bp, Arabidopsis thaliana
tatgatcttttctattcttattctttttgtgtctgcattgaatttttctaatgctcccgtagaagtaccaagttcggaccctgacgactacttacctctagccaaaaaacatgttgtaatccgcaatgtggtaaaaaatagagaaattttgaatgtacattgcagatcgagtgaagatgactttgggatggtccatattccttggaatggtacatgggatttcagctttcacgtcaacttttggaaaaataccaaatttcgttgtcactttacttgacataatgacggatctcattactttaatatttttaaagtatacagagatgataatccagatggacgttttccagtttgtaaaaaatgtatatgggaagtaggaaaatatggtgataacggccatatttgtcgtattgatcgtgatgggagacatttgccttactgttttaaatgggaagatggtccttaagaagaagaaaaaaagtttttgttatcactataatttatcaaataaatgtaaccatgagaatgattgaataaatataataccatttataatgttcgaatgtttgaatgcttataagctttctttatgtgaagttgttatgtatacacataagcaaactaaaaagaaaattagatgggttatctattcattatattgtagaccatataaatcctcgattactctcgcttacgttgtgaacttcatactaagtacactcatgagcatga

SEQ ID NO: 73 - DNA, 1050 bp, Arabidopsis thaliana
ttgacagaaaagaaataaatgagttggagttttgcgaacattgtgttatggggaaagtccaagaaggtcagttttaatgtggggaagcatacatcagaggatgcactgagctatgtgcatgcggatctctggggctctccaaatgtaaccccatcgatctcagggaaacaatatttcttgtccatcatcgatgataaaacaagaaaggtatggctgtatttccttaagtctaaagatgagacttttgataagttttgtgagtggaaaagcctagttgagaatcaggttaacaagaaagtgaagtgtctgagaacagacaatggtttagagttctgtaactctaggtttgattcttactgtaaagaacatggcattgagagacacaggacctgcacatacactcctcagcaaaatggagtagcagaaagaatgaataggactattatggaaaaagtaaggtgtttgttgaataagtcaggagtagaagaggtcttctgggctgaagcagctgccactgcagcatacttgataaatagatctcctgcctctgctattaaccacaatgtaccagaagagatgtggcttaataggaaacccggttacaagcacctcaggaaatttggatccattgcctatgtacatcaggatcagggaaaattgaaaccaagagctctaaaaggtttcttcctgggatatcctgcaggaaccaaaggctacaaggtttggttacttgaagaagaaaaatgtgtcatcagcagaaatgttgtgtttcaggaatcagtggtctacagagaccttaaagtaaaagaagatgacactgacaatctgaatcagaaagagactacatcgtcagaagttgagcagaataagtttgcagaggctagcgggtcaggtggagttattcaacttcagagtgacagtgagccgattacagaaggtgaacagagttctgattcagaagaagaggtggagtactctgagaaaacgcaggagactcccaaaaggacaggactgactacatataagcttgcaagggatagagtcaggaga

SEQ ID NO: 74 - DNA, 574 bp, Arabidopsis thaliana
cgcacactgatttccttctttgtaagtggtgcaaaaactgtatcttctgtcaccccagcaacaatgtaaagtcgtactctttgctgcctgaaaacaaactctatatattcttctctcttgagtagctttgagacatcaaatccagtttcctctaagacctgtaatttagcatggaagaacaatacataagaagtgtgacaaaatattcagttttttttcaacattaacccatattccaagtctatacaaacaatcagaagaagaattacagcacctgaaatgctacattcaccaggagaatagcactagagagctacaattaaacctttgaccatttccataccaatgaaatagtaaaaagatacagagagcctatatagttgaccattgacagcagcactattctcatttgcaaaagattctgtctactggtgacctaagaacattttatcttcctcaattatcacgtaggagaatctattttcagtacgtaaggtgtatgtgttatgatcatactgttaaattagtgtgaaaatgagttactctgtttcaagagcagaagatataagagacg

SEQ ID NO: 75 - DNA, 466 bp, Arabidopsis thaliana
gtaatcactgtcaacaaacccgaccagctctgcaactctcccacgtttatactgaattccgtaaccttgagttcccttcacatatctcaagattctcttcaccggaagcatgtgcagctcagttggtactagaacgaatctatgggactcagagctattgtagagaacaatgtagtggtaactagaacctatatgcctactactcgctatgagttgattacacttggaatcagaggagacagaaagctgtcttcctaggttgatgacagctactgcacgattggattcctgatcgggctgcagtagcagctacatctagagctgagacactccggagcataacagccgcggctaatgcatataccttccttcacaaagggactttgatattctcttcgaatacttgactgatacgtgtcggtcaaagcaagagaacaaccaaagcaagtaccatagcaatgcatgg

SEQ ID NO: 76 - DNA, 1095 bp, Arabidopsis thaliana
  unsure (1)..(1095): unsure at all n locations
cactctccaggatgcttcctattctgttcagacagtcggctctcaatccaaccatgactcagctcttacctactccatactcagttgaaaggtctttatgcatccagcaagtgattgaccatgttgacgctggcttgatgaccattttcctgattcatgcccatattgttggtggtatggatgactgtctggagttttcacctgattgcattgaaacccaaaccaaaaaacttgtgtctgccttcattctcgcccccttagttttcccatataactttcgttcctaatatccaccaagtactttattatcgcgatataaacttatcccttcctaatactttgtttaaatttgttttgttgtggattttttataattctaattatttcccttttaatgtgttaatttagacataatttaagttatctaataaatttattatgggcttattaaatttgactcctaaagatgttaagtgtcactgtaaaagttatctcctacattttatttttttctcatatacccctatcaagttactttctaatgccaacaatttggttatacattaattatacaattactcggtaagattttaattattcttattttgttcccttgtattgtggaaatttatttaatcatattttaagttatgtgataataatagtacggacttatcaaagatgttaattatttacttgttggatttaggttaagttcaataatttatggttcatttatacgacaatatttatgtagacaaattggttgttttgcaaaactctcggtatcttgtaatccaaatcttatcattgtaagttataccatgtaagttagttcttacctagataatattataaaatatgatgttgaataaaaaaatgtttaatgtctaatgaagttactacattgttcattagtttactactatgcaagtatatgccttaaagttggtaacagtatttaaacaaatatctaactatatggcaccgatatagttatactcactcgataagtaattagactcatctcgataagtagttagaatcatctcgataagtgagtntctgtatgtaattacttattaagagaaattg

SEQ ID NO: 77 - DNA, 967 bp, Arabidopsis thaliana
gaagatgcccaagatcctaatatattaaaccaaattttcctaagatctagctagtttatatagatgtttaaattttgtttaattacctccaactcgaattcaacacaaggaatccacttgttgcggataaggtagtcaacttccttagccaattcggaatcggtaaggtcaggaaggtaagagagagtctcaaacttctttctttccaatcggaggccacacctattttttcgatttttccaatgatattagtttatgtagattcgaagaaagaaccgaaaaaaatcatatggaataataaaaaagtgaaagaagaaatataaatgacctgcatgcagttaactcttccgccgttgcttgtgatggaagtaatgtcgttgttagccttgcgggtggctgggaaggcagcggaggacttaagtccgttgaaaggagcgaccatagtggcctgagccggagaggcaaccatagtagcggaagagagcatagaggaagccattgttcttctttactctttgtgtgactgaggtttggtctagtgctttggtcatctatatataatgataacaacaatgagaacaagctttggagtgatcggagggtctaggatacatgagattcaagtggactaggatctacaccgttggattttgagtgtggatatgtgtgaggtaattttacttggtaacggccacaaaggctaaggagaggtgttgagacccttatcggcttgaaccgctggaataatgccacgtggaagataattccatgaatcttatcgttatctatgagtgaaattgtgtgatggtggagtggtgcttgctcattttacttgcctggtggacttggccctttccttatggggaatttatattttacttactatagagctttcataccttttttttacgttggatttaggtaatatataatggtatgatccatgaataacaatgggaaatttttg

SEQ ID NO: 78 - DNA, 1324 bp, Arabidopsis thaliana
aataagtttatttgaaataatgtttatctatttatgacttagtataatatcataaataagtttccataacctttgcaatatataatgtttatttgaaatttctgaatttgattttaatattatttttaagttaattacttgtaatatcatattaaagctactatatgtgacacaacaaagattacaaaaataaattttccaaagtattgtcaaataaaatacccacacttcattgcatcccttcattttgaagttttgtattttcaataatttatctatttccaaagaataaaaatgcataaaagttcgatgggaagcttctccctgttctaggtttgcctaatttcgatcaaatttcagtccaatctggtctaaaatcttctgtttcttgatctctatcactttctctcacgcatctaaccactaatttcatctatcctgatgaaatatgaggaggaactttggagatcttttcaacaattgaagattggtgctgaccaaaaagcttgggtggttcatcaagaggcgcacaacaatttgagaaggaccatagactctgtttggtggttaaagggctcaatcacaaacaccaaaacctagacgctatgaagaacactcttccaaaggcgtggcatcttgagggtaaaattgaaggacaggtgaacgatgatggaactgttaatttctacttcgatactgaacatcatctactcactgtcttagagaatggtccttatacctttaaggggtggatggtagtcatcgatcgtgggcagcgaatggaatccccaacttatcttcgcaaaattccgttttggatcaaaatctttcagcttccgaacgtttatcgacgacatcaaattgttaagagtattggttcgaacttggggcaagtagaagaagttcagattctgcagccaactgctactcgtcctgcacatgtgtggatcaaggtgttgtttgatgtggataattgtatcactctagctcgtaaagtccaaattatgagagttggtgatccaattgagttagaatttcgataccaaggtttggaaaaatttctgcctaaattgtggaagccttaagcatggctcggaggattgtacgcattcgcaaattcaagatagtcatctatcacacataatgcaactttgtgaagatctaggctatagctctgtaccttcggctgggcctagtctcctgcaatctcattcatctacctctaccacagaaattggagaatcatctcgtacgcaacgcacttcgccatcccgtcagctaggccctatgatcacagctcctagccagccaaggatcttacaga

SEQ ID NO: 79 - DNA, 660 bp, Arabidopsis thaliana
tgcatggtctgtgtagaccttcactttggaaccaaccaaatagcttctaaatttctcaaagacgaaaacaacaactaatagctccttttctgtggttgcatatcttgtttgagcttcgtccattgttctactcgcgtagtagatgacgtgaagtttgccatcaatcttttggcctaggacggctccaactgcataatcggatgcgtcacacatgatctcaaatggttggtcccagttgggtgcttggacgataggggcatacaccaatgtttcctttatcaaatggaaagctttgagacaatcttcatcaaagttgaactcagtttccttgcacagcaatctagtgaggggtcgagcaatctttgaaaaatcttttatgaacctcctgtaaaattctgcatggcctagaaagctccttatatccttaactgtctttgggggttgcagctgaatcatgacatcgatttttgccttgtcgacttcaattcctttaccagaaatcttatgccctagcacaattccttcatgaaccatgaagtgacacttctcccagttgagtaccaaattggtttcctcacacctttctagaaccctgcacaaatttaacaaacatgaggagaaccctgaaaaatcatccatgaatacctccattatctcctc

SEQ ID NO: 80 - DNA, 841 bp, Arabidopsis thaliana columbia
gttctcaatccatgagcagcataacttcaaaagaaacaaaaaagaaactttagctatagattaaaacaataagaaaaaaaccagatgatctaaatcacatcaaaactcgatttacttggatttcaatctgatgactcgatcagagataatctcgtccttgacgcgaagagcttcttttgaaccgaagtagtagctgctaagcgggtataaatcaaccatcaagtcatgaacgacatcgtttcgtctcgtcgtgttgtcactgatctcctccatatctaacgctcgagcttcttcacccattttctgcccgtaaaattcaaagacgagagctaaaagcgatctcaatcgattaaaattaaataacagagagaccacgagagcagagaagacgcaagaagaagagtgaagaaaggtgtcgtagtcggatcactgagacgtggcggctccagagagtacttctccgcaattagctgacgacggcgggagagtgaggaagaagatattaatgggcctgttacgatattaatgggcctttagtagtaaacaagaatacggaacgatgttaaacactctattgtttccaactactaaaaacgacgcgagtttcttttttataacttaaaaacgagaatcaaagtctctgtttcaaatttgggtcttttgcttcttcttgctcacttgaggaaacacagtaaacacctaaaaagagaatgaaactcgcaggtctgaaatcgatcgagaacgctcacgaagattccgtttgggcagcgacgtgggttccggcgacggaagatcgaccgggttgcttctgactggatctcttgacgagacggtgaagtta

SEQ ID NO: 81 - DNA, 528 bp, Arabidopsis thaliana
actcaactcttatactttggcacaagctcactctcatcggcaggtcacaaatccgacagttcaacgcgcctgggcgtttatttcgttcttcacggagcactggaaaacttcttcccgaccattgggaacttacctcagacacgggttcttccaatttttgtttgctgcagaagaggatcttcaattggttctagacggcagaccctatcatacaacaggtttcatgctcattttgcaaggatgggtgccgacgatttccaggtcatttccgtcggaaattctgttttggatccaagttacccggattccagttcacctctggacggagaagcttattcgatgtattggggaagatattggttttgtggctgagttggaggtttcgggaacaatgaccagaatgcgggtccacgttaatggcctccaacctcttgttaagacctccattgttgagtttagaaatggagaagagcttcaagttgagcttgtctatcaaagattgaagaggcattgtaagttatgttacag

SEQ ID NO: 82 - DNA, 718 bp, Arabidopsis thaliana
cggtttaacacaccggtttaaaggacacaaccgtaattaaacgtgccaacacgagtttgcaaacaaatccaatcaattcgaagctatcttcttcttcgcgttgatctctgtatcgatttcttcttcagatctccggcgacaatcattgagatctgaatatcttacgttaaggagagaaagatgtacggattcgaggcgcttaccttcaacatccatggcggatatttggaggcgatcgttagaggccaccgtgctgggcttctcaccaccgccgattacaataatctatgtcagtgtgagaacctagacgatatcaagatgcatctctctgccaccaaatacggctcttatctccaaaacggtgcgttatgatgatcctgattgtctcaaattttgactcagttgttgtaatacgaattttgatgatttgactttgaattttgcttcattgcgtttaggtttctgggttttaggcatttggaaatcatgttattagaaatgttgttcatcttattaagtggatttgaaatctgatggttagacgatacattggttccttgagtcactgtatttgtatctccataaatactactgttgttgtgcttgaggtctgcacaattgctagtttgttgtatctgaatctgatgttttctaatgcagaaccgtcacctctgcataccaccaccattgtggagaagtgtactcttaagcttgttgt

SEQ ID NO: 83 - DNA, 1008 bp, Arabidopsis thaliana
atacttccatagtgatgaatccattgaatgaacggctgcagctactcctactcctctcaaaaaataaagaccattctcctgttcacctgctccaatcagggtcttggtgatgcggtcctgaatgagacatagccgatcagtaatctgaaatacacaactacgttctctagttaactgtgatactgaaataaggtgacattgcagcccatcaacaaaaaacacatcttgaatacacagcgcagaaccaaaaacaactcgaccctgtttagtagccatggtgaaacggccatctggaagtttgatgagtacaggagccatatcgcgaacatcgattaaaaattcaagagtgcctgtcatgtgattagaagctcctgtatcaataatccatgactcaagaaaagatatacctgatttttcttttgagttgagtttcctgtttgcaagtgtttgcactagtgagtcccattcgtcgttactcaaaccaattatcccgacgcgatctgcggatgtgagagaggacgttgacgcagataaggctgtgttgacaccaaaactttgcaactgattctggtttgaagtggtttcatgattaacttgaccagtcccgaagcttttgcccgtcattgagcccaccgaagaggttgttgttccacggccaacagcacccgaagttgaatttcccttatttgaattgtttccatttttatttctggaatttgacttcggattgtgctcccaccaatctagatagcctattttcttgaagcagttgtcggcaatgtgatcggtgcgtccacagatggtacatgaaacagagcttcctctgttgtcagaaaaattcctagaagaattggtttgaacagcaaaactgacgccatctgatctttcttcatgagtgcgacttagatttttggattcctcgtccagagttaaagcgttgtaagcgtcttctaggcttggtaaaggaacacgtgaaagcaaatttgatttaacggctccgtagatggt

SEQ ID NO: 84 - DNA, 1012 bp, Arabidopsis thaliana
taaaggcaggtcgttaaagagatgcaaggcgtggtaagagagtttatcgacagcagccagccaccgcttagcgaggtaaatcaggagaagtttaacaatatcaagaaagcactaagcgaaggtaataactaaaccttcatgcggcggatttttccgccgcttattgagcgagatagcgatgcacgttacagccaagccctccagttttcaatgtaatctcaaatgtgattactgtttttaccttgaaaaagagtcgcagtttactcatgaaaaatggatggatgacagcactctgaaagagttcatcaaacaatatatcgcagcgtctggcaatcaggtctattttacctggcaaggcggtgaaccactctggctggcctggattttttccgtaaagttattcactatcaacaacgctatgcaggccaaaaacgtatttttaatgcattacaaacgaatggcattttattgaataatgaatggtgtgcctttctcaaagaacatgaatttctggttggtatctcgatcgatggcccccaggagttacatgaccgttacagacgcagtaattcaggtaacggtacttttgcaaaagtgatagcagccatcgagcgtctgaaatcatatcaagtagagtttaatacgttaaccgtcattaataacgttaatgtccattaccctcttgaggtttatcattttttaaaatctatcggcagtaaacatatgcaatttatcgaattgctagaaaccgggacgccgaatattgatttcagtggtcatagtgagaacacattccgtatcattgatttttctgtgcctcccacggcttatggcaagtttatgtcaaccatttttatgcaatgggttaaaaacgatgtgggtgaaattttcatccgtcagtttgaaagctttgtcagccgttttttggggaatgggcataccagttgtattttccaggagtcctgcaaggataatctggttgttgaaagtaatggagacatttacgaatgcg

SEQ ID NO: 85 - DNA, 648 bp, Arabidopsis thaliana
gcgaacaggctcgtggtgatagtctatttcggttatccacttaagtttctagcaatgaagaagaagaataaaggatgcttagagacaaaggaaaagttcagtgtatattacctccaactcgaattcaacacaaggaatccacttgttgcggagaaggtagtcaacttccttagccaattcgacgtcactaaggtcagggaggtaagatagagtctcaaacttcttctttccgattggtggccacacctataattcccaattcccaattattcttaagtattgttcagttgcactaattgcacatgacaaaagacagttttcattaatgacattaccttcatgcagctaactcttcccccattgcttgtgatggaagtaatgtcgttgttggccttgcgggtgaccgggaaagaagcggatgacttcaaaccagtgaatggagcgaccatggtggcttgagccggggaggtaaccacagcggcagaggagagcatagaggaagccattacttcttcttcttcttcttttgcttaattgtttttctattggttttgtcatctttatatagtgagaactgtaagaggcaaaaagcgctaatgatcaaagggtccgggattcatgataactcgttcactaccacatgattaa

SEQ ID NO: 86 - DNA, 929 bp, Arabidopsis thaliana
ggcctcaagtccggccgagtctgtcccatcgagcatcgtcccgactctggttttctcgttgatcatcgtttcctcctcaaccaaagtatcctcgacaatgcccttgtccttcttactctttcccattttgctgctcttacccatctgcgaaacctccaaagttaatccacataactcctagtaaaatcgcaaaagagtaaagaacaactaccgcgagattctcaagccgacgagtggtgataccccttaacccaacacctagtcctagaaccaagcatgctctgataccaacttgaaaggccccgatcaggactgcctaagtccggacgagttctctcgacccaagccactaagtgactcagccctaaccgtttatgaggttctttcctagtctaatccgttccatatgattccgtgattcaatatatgagacgaatagagtaaacaaacaactggatactttattgattaagcaaaggattcgatacaacctatgagtttgcatataagctattacaagtcatataatcgatccctaaactatccgaactatcaccacccatcatcccggtcttgagtctctcgcgcctaagccaagtccttcccacgatcaccattcgttcctgaaagtcattgagccataagtaatctcatttacttagtcatatgcaagtccatgcaatgctctatatgccatacactactcggatccgtggagaggattcagagaggggaagatcgcgcatcagtccggccgattctcggcaggtcagttaagacccgccggtcctccgccgagtcggtccccgcctcagccgatccctacccggaccgagtcttgtgtaggatgcacatgactcggatactacccagcccactagtcaatcctttcaaggatccgactactaactcacatcctagaaccctta

SEQ ID NO: 87 - DNA, 615 bp, Arabidopsis thaliana
gctactgtatcgttggcctacccgaaacttcgaatctagattctactcttgagtcagattcaataggccgtttcatccttcctcaagatccatccttccgacttatatcccttgactctttcgctgtaaactccacacagagacctagataacattgcaactgtcgatcattagagatatacactgatgaagtatcgaacgacatatttttctgagtcttgttggagaacatgtaacttagccttaactgatgggtcgactgattaaatccgtaatcatcgaccaccagcttcaaaagcctatcgtgcgttgtttccgcttctagctgcacaactctacaccctctttcgtcgtggttaaatacgaatatctatttcttaacccaaataccggaaacaactatgaccgaaacgggatcagccatatcgagagaaagatgaaagaaattgaagatgaacgaagaaaaagatgattagatagaagtttcggtgatgtccaacgctcaggcgttaaacacagaccggaaagacgagataaagaagcaagggacgtttcgtatttcattgatgatgctgacatggaatatacagccgacgtcgttttgaattgatgagg

SEQ ID NO: 88 - DNA, 354 bp, Arabidopsis thaliana columbia
tatgcaaaagaagtctcttattttttgcaccaatggttcgagttctcttcttctctttaactcgtgtaggatcatcacctatcctgcccccgttagtctcactgttcaaattctcaggcataccattcaactctttcggtattagtgaaatacacgaggaaccatttatggagggtgggttttctgttacaccagacgatgatgtgtcctcagttgatgttccgttggtgagcccacaaccctatttataaatattgtaaccggataagaatggagctaagcagaaaataaaaaccagcacattcctacagaaaccagttcatagaaaccccaacctgcatgtctccagcatta

SEQ ID NO: 89 - DNA, 1496 bp, Arabidopsis thaliana
tcaagacgattccaaataaattaactcctaaactgatatctgggcctgattagctacaacaacacattttggtagataaaatgatgccaaaagctcgttttaaacgtaaactagattcccgaaggattataaaatttacaggaaaagaaattgcagagagtcaaacctaaacgtttgatatatatttctcttggtgaacgccgatcgattagtgttagttttcattaaaattaatttatctgtataccaaaattatatatctatgatgttaaatacatgacaacgtatatttcatacacaaggtcatgtaatatgtacatctattttatataactgatgatataataatatatttgatatatgtaattataatattccccaatatttggtgagctaaaaaaatgtttttttattcaatagtattaattctctggattcataaaaattaatagcaaaaggtcaattctccactattattaattaaaattaataaattatgaaaggatattattaatttattatgtgacaaaaacccgtcccattacggaggagaatcacgctatcggatttgattcgatttataacatgacaacgaaattataaatgtagttgtactttcacaaacgcttgttagaaaaaaatagatctcatttagtttttgcaaatatgaaatctgcagataattaattctgtattatattacaccttcaaacatttatttacacaatgttaaattttagatcggtcataaaataaaaaaataaaaaaaataaaaaataaaaatcgaaaacaaaaacataactcttcgctgatgttacataagccgcaataataagaacaacctctttgtctttttttcgaaaactgaaaaatttgagagtagtacccattcgtttttttcttacttttttttggggtagaattctctagttaggtaaaatcagacaccatttgtgacaacaacattgaatctaagcaatttttcccctaatcaaaattttaactcttgatagctccaagaatcttggaaacatgatccgaaggcttagagcaaaacagcttcttcagttcattatacctctccagatcaaactcatactcattcatcaactttctctgtttcgcctcgaacctgctttggtaaaacccttcaaaagaaggctctttcgatgtcctgaggaaaaacgcgtaaccagccataaagtacacggacgtgacatagaaacagattggctccatcacgtcccacgagagttcccaaaacgttagcctcatgaaccccgcagtctgtaggatcaagtaaccgagaccagcccaaagctctttccgcaccaaagtgtgagctttcacatcgatcactgccttttcagcttcaagctctttaaactcgattctccgagggtcatttgggttatggatctttggcaaaggaagcagtccttcaatggatttggtaacctgatcaaacacaatagcaaaagacaaaaacagaaaat

SEQ ID NO: 90 - DNA, 519 bp, Arabidopsis thaliana columbia
tggtaatataattcccaaattcatagattatggatgcggtccatccggagagtgaactcttgttcaccacgcaagcataaatatctaagaatctcttagaaacagaacatgtggacacatctaaattacatttattacatattgacgatgtatataacccgtaagtttaaattattgaaaatatgatccaaacacatgcatatgtgttttatggcatagtcttgaaggaaaaaccgttaacagtggcaccgccgtcaacgcaaatggtctgaccagtaatataagaagctgaaggaagacaaagaaatgccacaagcggtgagacttcatttgcttctccaacacgccccattggtgtcgtacgcaccgcttctttcttaaactcttcatcgaaaaactaagagattttcacacataaattaaagcccgaagtcatatttacgtattttttttgtttttcgtagtacgaaggagaaatataaactttggccttacatcgttacttaaaggagttgtgat

SEQ ID NO: 91 - DNA, 1885 bp, Arabidopsis thaliana
ttggtacacgatttcagttaccggaacaaccaagttcctatggttctcttcctctgccttatgtcccgaacaaaacctccaaccgtcgatcctattttcaccagagatgaatgctccaccgcaaaatctcttgtaatcgccgtacaatacccccgccttcatgaccctccgctttcacccaaagggaccctagggttacaactggtggacttttttggtgttggcccattaaagtgtcgaaggcccaatgttttaaaaggtgatccaaattttttttttgccaaagcccaggtctgatctcaacttttctttgtccatctttagccaattacaaagacattcatcgataccactcgatcgaggacatcaactcgaccatgaggtacctgtgttattatggttgaataaccatgagaaccctgtttatggtgctcccaagtggagaaccgttctgtgttttgggagaaaatttcatcgctgggagctcagagaacttctgcttggcttcttacaggggattttaacgacattcttgataactcagagaagcaagggggacctttacgttgggagggctctttccttgttttcaggagctttgtatcacagaatggtctgtgggatattaaacattcatggaaccctttttcttggagaggcacaagatattctcacttcatcaaatcccgattggatagggccttaggtcattgttcctggtcggaattgttccctcaaagtagatgtgagtatctaagattagagggctctgatcaccggccattagtaacatactttggtgcaccaccatagaagaaaaaaaaaccatttcgatttgatacgcgtttaaaagaaaaagaggagattcaattacttgtaaaagaagcatgggatctttctcgccaagactctgttcttcacaagatcagtcggtgtcgtcaaagtattattcaattgactaaggagcaaaactccaatagtgcaaagacgataaaaacagctcaacaggctttagagtctgctttatcagcacatattccagataattctctcattgcgtctattactaaagagttagaggaatcttataaacttgaagaattattctggaagcagagaagttgggttcaatggctaaatacactgtgtacttccacgctattaccaaaagtagaagaatgatgaacaaactctctgtcattgaagatggagagggtcaggagtttcatgaggaagaacagattgcagccactatatcgaactatttccaaaatatttttacctcaagtaacaacactgatctacaagtggttaatgaggtcttgctcccggttatctccactcattgtaatgaggatttgatcaagctaccttcgctgcaagagataaaagaggctcttttctctattagcgcagacaaggcacccagacctgatggttttttggctgcattctatcaggcttacggggatattattggtgaagacatttcccgggacatccggtctttttttgaggataatggtttatcgacccgagttaatgaaacccatgttactctcatccccaagatttcagcacctaggaaagtagcggactataaacctattgcactttgtaatgttcaatacaagattgttgctaaaatacttactaggcggctacaaccttggcttgctgatttgatctcgtctcatcaatcagcgtttgttccggggagggctattgtagataacatgttgattacgcatgaaatactgcaatttctaagaatctcgggtgcaaagaaacattgttcaatggcaatcaagacggatatgagtaaagcgtatgatcgcatagagtagaattttcttcaagaggtgcttaagcggcttggttttca

SEQ ID NO: 92 - DNA, 593 bp, Arabidopsis thaliana
actaaacacaattatgagtttacacaatttttactacaatcttatttatacttaacgattaatatataaatcctcaacaggctaccaaagcatcaacagatgaagctgaaagcaaggcaaggggtaaggaacataaccctagatgaagttgacgtgaagaacacgaaaactcgggagagtgtcccacgcgacgggataacgatgggagaaattgtcctcaaaggaaatatagttatgaaagggtatttaaagaaccctaaagcaacatctgaggtgtttaaacacggatggctcaacactggagacataggtgtgattcatcctgatgggcacatagagatcaaagatcgatccaaagacattatcatctcgggaggtgagaacataagtagtattgaggtcgagagagttctttacgagcaccagaaagtgctcgaggccgcggttgtggccatgcctcaccctttgtggggtgaaacgccgtgtgcctttgttgttttaaaccaaggtgaaaccaatcaaagagatcgtgaaaaggaatcggtgacgaaagaaggagatttgattaagtattgccgtgagaatatgccgca

SEQ ID NO: 93 - DNA, 567 bp, Arabidopsis thaliana columbia
  unsure (1)..(567): unsure at all n locations
atcgatcgattggagcaaatataagttccgcacaggttcctacagcattttcatccattccgctacaaagctaataaccaaaaaaaaaattatttcaggtactagagaccaacattaaaaccttatgcaaaatagacaacctaaagtacttacttgaagaaggaagatatctcttggaacgattgcatcttcaggggaatgaccaagaccttccaatttgatgacttccataaactgaatgaaaaaaaaccaaccattattcaacttatattatggagataaaagaaaaacattaagttcatcgaagaaaattaaactaacctcttcatgctcaatagtatgagcaagtggaagtataacctgccctccaaatcctccaactcgggcactacaaggccctactttaactgctgctgctagatacgcatcaatgttgttgtcagcccattctgacctatgcgtcctcagaaaccgaagcaggatcgccggagaacattctgtaggtgaaaatccantaaaagaaggtgaaaagtgttgaacaatcatcagttgatctataaaaaaatg

SEQ ID NO: 94 - DNA, 663 bp, Arabidopsis thaliana
atatgcacatgctatctccacagttcatacttctgtcactgaggacagtgagatttaacagggggaggttttgagatcaagatcaagacaggaaattgaactcgacttctttgctcggcttgttgaacgagcacatgacccgagtaacccaatccctattccaccttcctatttgcctgaactgccatttccaggaagaattgcacagattaaagaagggatcttcaagaaacagaagatgatgttcatcaagtgcatcaaagagttagaaaagaagatacccttggttgatactcccaaggaagtgattatagaaagactctaagaagtttaggaaatagttgaattgagctttgagtgtagtgctatcatacaaaggaaggtgataccaaagaagctaggtgatccaggttccttcactctaccttgttctctaggacacttagtgttcaacaagagtctttgtgatttgggagcttcaattagtttgatgcctttgtttgttgcaaagagattggggttcgataagttcaagcctatatgcattcactttattctagctgatagatcagtgagagtgcccatgggatgctagaagacttacggaaaaagattggattagtagagatccgaccgactttgtggttctagagatgaatgagg

SEQ ID NO: 95 - DNA, 887 bp, Arabidopsis thaliana
ctaagtcttggtatctaaggaaactattggcaaggcacagcggttgcattcgccgctctaagcagccaaaaccctggtgtcatcactattgccaacaccgtgtttggggctaacccagccataaacccaactattcttgcaaaggcattccagttgaacccaagggttgtcatggatctacagaccaagttcaagaaataatgatatcgtgatttgagttgctttccctttatgtacttgtgcctgaataaggatcttgtatttccgtttatcatatcatcatatgatgtcttttttgcttttaccttgattcaattctaaataaacaatgattttccgttcttaataagggatacatgttttgtacaccatctaaataatagagaagcatatggttactcaagcatctacatgaaaaccctagttcagatgctgattacaatgtgtatactttcccttgtgaattctcaaaattcatttagcatgaatttctttttacaaacatatctcttttagcatgttgaagatactctgccaagaaagttacgtaacgttctctcatcttgaaaattgttaagtattaaacaaatttggaaagaaataataaaaactaactatgatgagcaccgcatattcaacgatagataatctattggttgaaatttatgtgacaaagttagctattatgtaataacactagattttgaatcctttttttgataaaacctatcatctgatacggtcagttttggtaaaaaagtatcgcagtgttttagagtggacttctccctgaaggaccaccacactatatgtcatgagtttagaatttataatcttgagctcattgaattttatcatcgattttgattgacatacatgatacatgt

SEQ ID NO: 96 - DNA, 385 bp, Arabidopsis thaliana columbia
  unsure (1)..(385): unsure at all n locations
aatatttctaaacaggaaagaatcccaattacgtcttagattttaaatgatctaacaaaatagtaaaatccaacacggtacacagaacaaaagcaagtatcaaacagtaactgcaaaacaaaatcaagggacctgatccttatcatcttcagcagcggaaattgaagcagcaacggaggcaccagcggaacgaacagacgacgcaacgttggtggcgttacgtatacagttttaaggcaagaagatataatcttaaaggaattcggtaacaagccactgttctttcctttccccttcttcatcatcttctactaccataacacctaagagacaaactcaaaacganacaaataagaaaacacgctttctaattttgtcgatcatc

SEQ ID NO: 97 - DNA, 538 bp, Arabidopsis thaliana columbia
cacagttatacatcttcatcttctacttcatcttcgtccgaggacgataaattacatcggaattcgtcttctggttcagcatccccgacatcgtaattaaggattattgggtttaagttggctaccggagtttcaagaacaggatcttcaattatagtgagcaaaacatcatcatcattttctgtttgcaaaagagttggatcattgttttcatattctccagaaatgtttcccctcggattgacttttagaacattgagccaaatgttctttggtttcttcatatatggatacggaatataacaaacttgatctgcttgagatcctgtatacatatatcaaagatagattattaataattaacaaaaaaacgtattttggacttaagaataattacgtaccaagaataaatggctcgtatttattgtatttcctcgtagatagaatgtctacaacgccactatggcttcgtcgagtgcctctcccgatctttgggtcatacacttacacttaaaaagtgtgatcctcaaattgacga

SEQ ID NO: 98 - DNA, 691 bp, Arabidopsis thaliana
cacacattctctatattattgttcttttgttcccttttctcggcttcattgattatcgccaaagtccaacaccatgattttgtcgtacgtcctcaataaaagttgcatgttcatattgactaatacactaattaaattcatcatcaagtagtaattgtcattacttatatttctgtgtgcaatcatttagatacaagagacgccggtgaagaggctgtgcaagacccgtaacgccatcaccgtcaacggaatgtttccggggcctacgctcgaagtcaacaacggcgacactcttgaagtcaaagtgcataaccgtgctcgttacaatatcaccatccattggtacattttacacatcttatcggtttacgttttgaaactttaccaatatgttacttttcttccaaaattaatagaaactttaaacaaatcaaaaataccacacaaaaaaagtgaataagctttatcaaactttctagtttttttttttaatgggtcacagtatatatatttatcacataattaagatatttcgtatatgataatttttttttgaaaaacaggcatggagtgaggcagataagaaccggatgggctgatggccagaattcgtgacccaatgcccgatccgacccggaaagagctacacgtaccgtttcactatccaaggccaagaagggacattgtggtg

SEQ ID NO: 99 - DNA, 564 bp, Arabidopsis thaliana
agtaacgtccgccagtgtgctctaaagaatgtagctgaactgttaaaaatctcacgagaagatcaagatagttttgcgctacgagtcagcaacgtacggcaaaagcgcaatcctcaggcattctggctgaggagattgttccggttgtgttgaaaaacaagaaaggtgttgtaacagaaatacaacatgatgagcatctgcgcccggaaacgacgctggaacagttacgtgggttaaaagcaccatttcgtgccaatggggtgattaccgcaggcaatgcttccggggtgaatgacggagccgctgcgttgattattgccagtgaacagatggcagcagcgcaaggactgacaccgcgggcgcgtatcgtagccatggcaaccgccggggtggaaccgcgcctgatggggcttggtccggtgcctgcaactcgccgggtgctggaacgcgcagggctgagtattcacgatatggacgtgattgaactgaacgaagcgttcgcggcccaggcgttgggtgtactacgcgaattggggctgcctgatgatgcccacatgttaaccc

SEQ ID NO: 100 - DNA, 825 bp, Arabidopsis thaliana
tgcttgaatttttgttttctgcatgttcacttaggactgctagaacacaccaaaacttgtttttgcttggcttgactctgtgaactctattcacatcttgattgttagcatcatacccatttggattgacaacctaaaatactacaacgacatgattggtgtttaaggataattgactaaaaacctattataaatttggcgctattgccaattgggtgtttgtttgttacatttgagatttcagacttgcttagatcaagttctttttcaattttcatttcggttactaactgtatgtttttcttgttgtcttcttgattcaggtacacctcctcttatgcaaactcgatcaacaggcaaccagaacctccttttcaacgataacatcaaccacatagctcgaaaaatcagagaaaggagaaacacagtcaaccctgtacctcagcaaccactcgttatggctgacgaacagaatcaacaaaatggccatgccaacattggtgctggagatgcaccacgtgatcaccgttagaggaagggaattgcacctcctgctatccagaacaacaattttgagattaagagttgtctcatctcgatgattcaggggaacaaattccatggtttgccaatggaggatccactcgaccaccttgatgaattcgataggctctgcaacctaacgaagatcaatggtgtcagtgaaaacggattcaagctccgtttgttcccattctccttgggcgacaaagcacatatctgggagaagaatctgccccatgactcaatcaccacctaggatgattgtaagaaggcttttctgtc

SEQ ID NO: 101 - DNA, 649 bp, Arabidopsis thaliana
  unsure (1)..(649): unsure at all n locations
tacgtatatgtaataatatgtttttgaaagtacgtacataacatcagacttttatgtacttttcagcacatggaaatgatggcactcttgatgtggcataagaacggggagcatatgaagagaaatcggtatgtcggggtggatcccagactcactttccttctgtcaagttgtgccactgcattcagatcctgtcgtaaacccgacactttcaaatgggacaaacttctcacacggtttcccaagggagaatgccttaatcgtgaaccacagctgcattggatcagagatgtggacgtcatatctgttcccatgaactggaaagatgagaagcattgggttgggttggctatatgcctgcaacgtcgtgctattgaaatcatggatcctttgcgttcgcttacgcgggagtctgtggttaggtcacgtatccttccaataatggagatgctaccgtacctagtcagagcgacatgcaaagattatctcgataagccttatcccgtgactccttttacatacataaggaatcaacgtctagcacaaaatccaactaccggagaatgcggtccgtacgcgatgaagtttattgagttgtacatgcttacactcctgttgaggacaggtttcgattngagaagatgatatg

SEQ ID NO: 102 - DNA, 432 bp, Arabidopsis thaliana columbia
catgatccaacgatttggtccgataataggtgatcaatcagatgaggaaactaatgacggaagattcagcgaacatgacttacccttctttcttgctagacgtcgattcaaggtacgcaaaaaacaaaattctcgctttcttctcagtttctctccctaattactctcaatgcatgtttcagcattcctttctcagtggaagatgtttcgcaatccttccacggcggtaacattagcctctccgacgtcgatccatcgccgcttctccgccagcgatctgattttcacttcttattccagacattgccggaataaaggaagagaaacgtcggagagaaacttctctgtctcatagaaggttacaacagctgagaatattttataatttactaattaagccacgaattttccatatattacagagatggaagc

SEQ ID NO: 103 - DNA, 559 bp, Arabidopsis thaliana columbia
cgtataccattaagatttttacatacatgtttttttgaaaaaactataaaattttataaagcgaaaattgtcgtaaatgtgatcaaacagagcactatgccttgtatgaagggctaaaatgacaaaaaaaaattattttcctaaatagttatttattagtttaaatgacgagactaaccttggaaatttggctccgagaatatccttctggccgtactttctccaactgaatccatcgtccagcgttctatcaacaccagctccaggggcaattctgacttttgaactccaccttggcattgacttcttcgaactatagtacattttcaaataactatgagtttatgagaaataaaacaaaaatacgttaggacagtttatagatatgaatgtacctcttgatgacaagtggttcttgatcggaatcatcgctcttggggcttcctccaccctgagaaacttggtcaagttcgccggagtagttcatgatggtgagagacttgtggtaagattgaagaatctttttggctaaatgtcacgtgtttattgagatgaaggg

SEQ ID NO: 104 - DNA, 956 bp, Arabidopsis thaliana
caactttcaatcatctgtgttaaattagaatccaagatctcagcttttgaactattattatacaggtttttactttatacctgatgcattgagtttaaaggagcaatgtaaatggattaaagagagcttgacgagttttccgcagcctccgaatagaacaaaccacaatgcaatttacggtcctattgatgatttgtttgattcagctaaagaaaacaaggtattggttcaggatgatcttaccaacaacaagtggaagttctatgaagaagtagatattgaaaaagcaacacgaagtagttgcaaatcagtttcagcttcagttcttttgaggaagcttcgatggagcactctcggtttacagttcgattggtccaaggttgaatctttaacatcttttgatgagttttagtaacctattgcaatgaatctataatgagtgatgattctttcggctttttttcagcgtaactatgatgtttctctccctcataacaacatccctgacgcactctgtcaactagctaagacacatgccgccattgcaatgcctgacggagaggaatttcgtccagagggggctattgtaaactattttggcataggtagagtttaccttaaattttgtattttcttgctttggaaagccttaagatgttgaactctgaaagccttttaactcattctataggtgatacccttggaggccaccttgatgatatggaagctgactggagtaaacccatagtaagcatgaggtatatctcgttgccttctgtttttgctaaacgtaagaccgtatgatgatgtacaatagagtaactgtatgtcctcttacgtagcttgggatgtaaagctattttcctcttaggcggaaaatcaaaagacgatcctcctcatgctatgtatctcagaagtggagatgttgtactaatggctggagaagcagagaatgc

SEQ ID NO: 105 - DNA, 837 bp, Arabidopsis thaliana
ttttctttggaaggtgcttagtggtattcttccggttgccgagaacttgaatggtagaggaatgtcgttgataccacatgtcaggtctgtggtgagcttggggaatcgacgaatcataccttgtttctatgcccactctctagacaaatttgggctctttctgattatccttttcctcctgatggttttagtaacggctctatttattccaacatcaatcatctcttggagaacaaagataataaagaatggcctattaacctcaggaaaatttttccatggattttgtggaggatttggaaaaataggaactctttcatctttgaggggataagctacccagctactgatacagtgataaagattagggatgatgtggtggaatggtttgaagctcaatgcttagatggtgagggttctgcccttaatcctcccctgagtaatggtgttcattttgtaggcagtgtatcggagaatttatggattaaacctccagcgaattgggttaaatgtaacattggggcttcttggtaaaaaagaaacaattttgctggaggggcttgggttttaagagatcaggatggtatagtgttgttacacagtagacgttcttttgctcctatctctagcaaggctgatgctttgctcagatgtctcctatgggctatggagagtatggccagtcataaaattgataatattatctttgcctttcaagataagtctctgattggtgcagtgttgagaccaagggcgtggccttcttttaaagctcagagtgtggctttaaatagatcatagttaccttttttggtgtggaaggtggaattggaattt

SEQ ID NO: 106 - DNA, 894 bp, Arabidopsis thaliana
cttcatcagtggctgagtctggaggaatagagttctcaacaattgcctcgtcacctggtcaccggtagaagaaaagggtcaatgctagtaatcattacacaatgaactaaaatgtctatatctttgtggtcttatatgtttcttatcaccttttgctccatcaaacaaaacttcatgaatttgattattctggatttttttagaacacgtagttcatgtgactatttatgtggttaaggtctctactataatttggagtatccccaacgctttagctgtatatgttaccttggatagagttctaagatacaaacattgtataatctttttaaatgattctgataaactgatactgatcataataaaccaatatgagaagtagcacacaaaaaaaattacaatctagtgatttttagtcaacttacttttggtttctggaattggaggaaccacctcttcagcttcagctgctgcagcaagtgtttccgtttgctcttctttttccggcgaatcatcttcagctttggtagctatcacttcttcttctactaccttgggagtttctgacgagggaacctcttcacttgttacttcagctgggacacataccgattcctcgacttcagctgaggtgacagaggcttcagcttcaggctctactggtgtctcaacaggtggcttctctgcctcttcctccctcttgtcaagaaacgcagcaatctcttcgttcttacggaaagcaagcataaacggatttgtggctgtatgcacaactccctgagtggttgtttcacaaacttaccatcatcttcctctttcattgttaaagtaacacgtccccttgctatcctcaacacacgaaccttcacctcttgtccagcttgcaacgaagag

SEQ ID NO: 107 - DNA, 1449 bp, Arabidopsis thaliana
atgaattaaccggtggctccatacgaagacgacgcttacgacggcgacgttcagcggcggcttcttcctgagtcgcgaatgacatgtatcggacggcgagaaatggctgcggcagaacacggtggcggtaggatcttgatagtgtttgaaggtggtttaaaaaggcggctttagaaatcgacatggttgaaatgtttgagattttctgagtggaaaaatgattcctttcagaggaaatgagagagataagggttcttgttagggttttaggagtttggagatgatgatgatgaggtttagggattgtttgggaacgtggataaatatgcttgggcttggctatttacgtttgggctttattgggccataagctcgatttttggaggacccattcttgatttcatcatataattataattaaatatttttaaaaactttctttttctttggttaggaatctgcattctgcacaatgatgtaacaaaaaaagagcggaatacgttgtgcgtaatatacgcggtgccggcttatctatagaggccggcacttcgaccggcccatatctctcttaacgagaaatttgttgtaccacatccgtagtaattttttttctatcttataactgttattttataaataatttatccatttattattgtatatttagtccaacgaataagagaacaggtctaaattttaaataaaatacttgtatttcatgtatttttttgtttgggtattcagtttttacaaaatttagtacaagaagaatacacagtatagtatagcaaaagttattgaatctaaatctaagacaaaatggtccaacagatatttgaaaaacgtggaaaacaaaaaaaacaaaaagatatttgaaaagcaagctatggattattgactccaaaatcaagttagttccgcgctactcatttattatgtggcttgcgttcctgggcagattgcctactaaggacaggttgcggggctggggtattaacgtcacctcagcttgtgttctctgttctgctggcatcgagactcatcgatacttattcttcgaatgccccttctcttcctctgtttgggaagctttaacttctaaagtttggcgcttgccacccttggatcttctctcagtctcatcttagattttacagcgcaagctccaacctcaaactctctcttctgtcatcatcaagctcatcgctcaggttgcgtgctatctcatttggcgcgaacgaaatgcaaggatcttcaccaacatctccacttcggcttctgtgactaaggctgccgtggaccgcaccgttagagaccgccttctatccttccctggtcctccttcttcttctatttctcttcttagtttctactttggttgtatctccttccctttctaattgttgcttttttaaataagctgtttcagcattgtagagaaaaaattag

SEQ ID NO: 108 - DNA, 1057 bp, Arabidopsis thaliana
agaagtcaaggctaatgttaatcagtttcaggtaacaattattgtctaaaagattgtattaaaactatctaaaagaaaacctgagaaatgtgttgttgtcttttgcttgcaggaatggctggaaagacatggaccgtttgatgcagtcattgatggagccaacatgggcttagtcaaccagcgcagtttcagcttcttccaggtggttttgactctttctcattctaatgccaatctcaagaaccattgtttgactactttatctaatgcgactctttatctctccccactagcttaacaacactgtccaaagatgccaacaaataagcccgtcgaaaaggttaccacttgtgatcctgcacaagagtcgtgtaaatggaggtccagctacataccctaaaaacagagccttgctagagaaatggaaaaacgctggtgctctctatgctacccctcctggctcaaacgatgattggtatttgcatttgcctttttttctgggtctatgaattacattgaccatgaataatccaaaaaagacaaccatttcttatgtgaaatcaaattgttctaggtattggctttacgctgcggtaagttgcaaatgtttgttagtaacaaacgatgagatgagagaccatctcttccagttacttggaaatagtttcttcccaaggtggaaagagaagcatcaggtaacatataatataagagtctatgtaatgtatatacataagcttttgattgatactggattcaatgtttgcaggttcggatctctgtcactagagaagatggactcaaacttaatatgccacctccatactccattgttatacaggtcaacactcacatttctatgtccatctcaatgttttcgtatgcattttgcattaatgatgatgattgattgatgaatgatgcaggagtctgaagatggaacctggcatgtaccaatgagcgtagaagatgatctccaaacatcaaggcaatggttatgcgcaaaaagatcataacaccttgaatttttttaaccttgttgtacatctgacattga

SEQ ID NO: 109 - DNA, 589 bp, Arabidopsis thaliana columbia
tcagatactaattattgtgattaaaagactaattattgcggattaagataacatatttgtagatctgtataattgcttgtaacagcaaagatgatttctggttaagaagtaagaagagatttataattaagcaaaccatttgccttatgaccccattgttgtcacatccactttgtcttttcaccttccctgtctcaaaaaacagaggacccttgctctgtttcttaaccctgttttatctcctactcaaagttcaaatcttttgcgaaacccagtaatggaagatcaaagcaggtgaaaatgaggagaactagagacgttaacaagggctcttgttcaaggagatggtaagaacaacggcgtcgtttggaaccagctcaagctttgttcttcgtctcggacaaactctgttttcctctgcttcgcttcttttcatgtgctttaacgatgacgaagatttctacgcttacaccaccgttctggtaataaatcaaatcattcatttaaaaattagaaaccaagtgtcgaaacaagagacttaactatgaatgttatggacgagttatctagtcacagtcatgggtttagt

SEQ ID NO: 110 - DNA, 411 bp, Arabidopsis thaliana columbia
atgtactatactgattgagtcgcatgttaaggtttgggtttttctgcagcttcttagtttgtgccttgggtctttcacccatgttagcttgctatatgacacaagtaacgtaaatgaagtcatactgaaacaaatagtgatcgtttgatcttggaagttggaactgttaagtgttaagcttaatctttttacttttttttttgtaaagagaggattaaggttttttgtttcgaatgtctttgtcagttgcctttgatgttacagcaaacatacattggctcaggtttcatccttcttgtataggaacaacaatagaggaagctaaaaagccagataacttctactgcgaagagtgttcccacaacagcagaatttgcacaactctaattcaacttccaataacagagatgc

SEQ ID NO: 111 - DNA, 1004 bp, Arabidopsis thaliana
atttagcaaactgtaactcagatacttctccacccatcaatttcactagctcatcatgtacaatctgcaataaagccatgataagccacacttgagtactattgataccaaaatgatcatcatagagtgaatcaaatatcaaaccattatgctaatgaaacaaaaacaagaaccggttttattgctaattaccttgaccaattgctgatctggtttgactccacgaatgacacccattccaacggcttggtcactaacagactgaacaaaccttctaacaactgggagactcacctgttaacaaaattacttttataccacattcttcacaagaacctaaatgaaacagaataaaacaccactcacatctgcttccaggagagctcttctgatatcccgcattggctcagcaatattgtccttagtcaagacctctgcaagttcaaataacgtaactagcttaaacccgtgctcatcttttctgcatcttctaatagcaaacactactcttaactacaaagttttcttcattgaatacatcaataaaacttagtctctattcattcctcctaatttgagctcacgggcaacgaaataagaaagaaaaaaaccgaaccttcgcctttgagtttgctccaagcagcctcgaggccaccagtcaactgaccaaacatctcggctctcacttggcttcttctgtatcttccatggccaacaacagtcttcgatttcacccaactccatatctctcgctactcaacacagaacatcacaaacaagactaaataaccagaaaatcttacaaaaccaccaaactagaaaacgaaaagaagcaaactttgaagccaaaccgtggagagattcctagaggaggacagagaagctgaattgatggtgcaccggtgaacgcagagctgaaggcagccttaattccctatttcggtacagctcagatacaaggactctattccgctggaaattgagagctcgattctagtgagtga

SEQ ID NO: 112 - DNA, 418 bp, Arabidopsis thaliana columbia
gcaaatgggtcgagtcatatgatgattatcggacatgacgtctagcgcatactcttaatcgaacgcagatgcactatgcttcatgtatgagtgcctcccgtgcaaacattgaatgtctagagtgagacaatagtactcatcacatacatagaactgattgcttggatctaatgttccctcgctgatgtcgcagctatacgttatggtacttgtctcgatcccatatataagagtgagcacatgcgtatcatgcttatacctcacctcatgagttacactagcgcattctgaacgtgaggcaaagtcacactctaagcaagtgactgtatcatttgtcctagcatatgtgccatctttgcaaaccgatcatctgcttggagtctcttcaggtttggatgtcaggaatatcggatgcata

SEQ ID NO: 113 - DNA, 954 bp, Arabidopsis thaliana
gatgttcttcttcctatcgatgatcttcattgatccatcttcttgccattctccaatatctcctactcatataaatgaaatcaaatttcaacattatccaatacaagttgcttttgtaactaacaatctaatggttaaaatatagactaagttttagagtctacatatccattttaagtaaatttcaaaataaccattcgagacatacgagtggaaaaaccagccactcttctaccaattactatcacttgcttttcaatcatattaatagtaacaactaaaagttaatgcaaagcggatatattcgatttaagtgataatcatgatccgttctgcttcatctagatcaacatttttccaatttttacctacacataactagttggatatacatttaaacattcaaaacatttttccaatttttatctactccataactagttggatcaacaacaatacctgtgtggaaccatccatcgattaggacttgatcagttagatcttgtcttttatggtaaccagaaaacattgaatttcctctaagacaaatctctcctctcggcacgtcagcggaaaaggcgtcgtaacccatctctggtacggacactagccttgcctccaccgtgggcattggcacacccactgtccccaccatagaaaatactccggctaaggtcgtgaagcttcccccacaactctcagtcaatcctgtcacatttcattagaatcggcttagccaaaccaagagatcggtgtatgactcgaaattcggtttaggtacacttaccataaccttgagagagattagaggcaggaatgattctcaagaactcctctacatgacgaggtagaggcgctgctcctgataacaacatatgagctcttcctcctaatgcttcttttatctgtcacaatttaaattttctgaaactgtaagtctatattacatgttat

SEQ ID NO: 114 - DNA, 602 bp, Arabidopsis thaliana
tatttaagagtctcaccgattttgtgttcatatctctcatcagataagaaaatacaaatacgatcatgaatggagaagaaaactcagattccatccctatcgatctcattcttgagatactctcgagattgcctgcaaagtcaatcactaggtttcattgcgtctcaaagctatggggttccatgctttgccgtccatatttcaacgagttgttcttgaccatatcgtcagctcgtccacgtctcttatttgccttttcaaaacacggtgagtggaggtttttctcgtcgcctcagcctcagaatccatatgggaagtcatcttttgtagcaactgcggattttcatacgaagttctctcaaaacctaaacatttgtaactatacttctggtttggtatatttctctgctatgtggatcacaaaggcagatgtcatatgtaaccctagcacgggacattatgcgatgttacctaaattgttgttgacgtatggagagacgagaagcttttttttgtttgatccggttggcaagcaattcaaggtattgctcatgaataagataacaataatgaacaaaggacatcatattttgcattgggac

SEQ ID NO: 115 - DNA, 548 bp, Arabidopsis thaliana columbia
cggctctaggccgagtggcgactaccactagatatatatgaaggaggaagacaaggccagcaccagtttcatcacacccttcggcacgtactgcttcatcagaatgccggaggactcaagaacgctggctcaaccttctcttgcctcaccaagacggtgctcgagagccaagtgggccgcaacattttcacatacgtgtacgacatttgcaaacatgcgggacgacaacttcgcctcaaccccgagaagtgcgtctttggtgttcgccaagggaagatactgggctacttggtgtcgcaccatgggatcgaggccaacccgaccaagattcaagcaatcatcaacatgacacctctgcagtcagccaaggacgtccagcgtctgacaggcagattaatcgcccttaacagattcatttccaagtccgcagagcgagtctacctttcctcaagacactgtgcggtgcaaaagacttcgcatggggaccagaacaagcggtagcttcgcatcactcaagcagcacctgtcagaattggcaattcttacca

SEQ ID NO: 116 - DNA, 645 bp, Arabidopsis thaliana columbia
  unsure (1)..(645): unsure at all n locations
tcccctaagcactcctatcatcaaccctcctcaggttcgattcgatccttgcaatactaaaaaccaatcaaagaaaggtgtttttttgtttgtttgttactaatgcaaataaatctatcatacgtagtctgctattcttggaatgcattcaattgtgcaacgtccaatggttgtgggaggaagcgtagttccgaggccaatgatgtatgtcgcgctgacttacgatcataggctaattgatggaagagaggctgtgtatttcttgcgccgtattaaggatgttgtggaagatcctcagaggcttcttctcgacatatgataaagatccaagacagaagagatcataagtttctgtctttttaccagtttcctttcaggtaaaaccattacggatactgcaatctgcaaatgatgctttgaaaaaagaacgaaactttttttttggagttttcttaatagttttaagagtttttgccgggcgaggaaagcatcggtgtattgagttttcttttattttataatattcatacagtttgaacaaaatgttacaattttgactgtcaaaaaataatgccactgataccgaatccatttgaaaggccactanaattttattattgtatcactgggatatttaccgatttg

SEQ ID NO: 117 - DNA, 500 bp, Arabidopsis thaliana columbia
accttcttctcgtcattacgcggtttgatcagctctctctcaagaatattccatctttcactaaaaggcctctctgccacaaattgcccgttgatcgctaccaaatcgtacacgaggtacctcctcacatggcgctgcgtttctccttccttaattgtgtctacaaccatctctccatcaagcaatgtgtaatgatgcactttataatcacttggctcgtactcacaagggaaacgcatttgtactcttctagacctatactctctattgaaccagataacatccatctctagtcaagagcatcatgtaccgcgttccatctgccttccatgtcgcgtaatagtaccgttgcctcaagagttgcaatgctctctacctaatgatagagggtgcgagcagggaactgcatagaaatattcagcatatgattaattgaattctggtaagacacctcttgatcatagggtatttcatccccaaaacatcatcattagacaact

SEQ ID NO: 118 - DNA, 466 bp, Arabidopsis thaliana columbia
catccacgtgcgatggttatgtagtgagaaaagtccaaagcttctttcttatggatccttcaccgggtcttggtgatccatcatcatccccatcatcatcatcgtcatcatcttgattttcttcattatcatcatcttgagcttcatcttcttcttcatctccatcctcgttcgtatcctcatttactgttggttccacatttgcaaccggtacatctccattgttctcagcagaaacaacatctgcatttgtttctatccttctagctcgaagagtctccaccacagtttcttcgacagtgtcctttgatggggcagacgcagcaatgtctgcatcatcttcaccagcagctgcattatcctcaacatctgctggaacttggtctaactgttcattcataagattttaggcaatcaatgaacagaattcagatccactaatgatagggaatgtgaataaaagtag

SEQ ID NO: 119 - DNA, 1343 bp, Arabidopsis thaliana
atttcctataaacacacaccaagcatgaaatatgtgcatcaagtctcagattctaactaagcaaaatcatcacgcaagttctaatcagtcaacagacggactacaaaacaagataatgaaaacatcataacaatgaacctccaacctcttactagtaagacactaacacatgtttccctaatgaacaccaagctagaaaatctgaaattcctaactcccctcaaaagacgggcacagagctcacataaaaagagatataactccaccatatttgttcatcccttaattaaaacgctcccaatttcatgaaattcgaacaaaaaacttgacgaaacactagttaaatctgcgctagacaatgaatacgaactgtatagcttcccaagtcattcttatatccatacagcaattctcaatttgtcacagacctagcaatacaatcagaatacatgaaccctaaaatcgccggaaaagaataaattccaatagaaacccccaaattatatcctccgaaaacctaattcagaggcctctaaagcagaaaacgcacaaagtgaaattagaagaaatcttcccacgacaaaactatatccgagatccaaagatataaatcagccgttaattccatgaataagggagatagagaaagataagcgtacttgcgaagagccggagccatcttattggtaagagtaccggcgacaatcatacaatcagactggcgaggactaggcctgaagatgataccgaatcgatcgagatcgtagcgagcagcaccggtatgcatcatttcgacggcgcagaagcgagaccaaaggtcataggccagatcgatccggtacgagcccagttcatgagatcatcgaccttggagatcacaaattcggccgctttagagagaccaggaggaggaggggaggtcgaaggaggaccaggtctggtgtaggaagtcggtgatgtggagggagagagagcgggaagggatgtgtggaggtgagagaccgaggcagcggcgacggcgcgttgagattggaggaggagagggaggcgcgtggcggtgttgcgcgtaatcatcgccatttagatttgtctctctgagttttttttttcctctcgtcgtggagttgtgataccaaacgagtctctaaccatttactaaacgcaggtggcgaagtatttatatgactcgtaatcgtatcatttttttcaccttttgtacagtatttcatttatttcataaaacaatgacttggcaataataatttactcttgtaactttctcattacaaagactatttagacagaaaatttatcaatctttaaaagtattaagttttgattgt

SEQ ID NO: 120 - DNA, 526 bp, Arabidopsis thaliana columbia
atcatctctacccttatggcagctgcaccaccgatcgagccggcggtgacgacgacgttccctggcttcaaattctccccgaccgacatcgaacttatatcttattacttgaagaggaagatggatggtttggagagatctgttgagattatacctgaggttgagatttacaacttcgagccttgggatttacctggttcgttttctatacttaccctttttttcttcttcttacaaagttaatcttcttgttctgtaattgtgtttcctcaagtttgttatgttaggactaggttattcttgtcggaagaaaaagacaaagagtagaccgtactattttggaatcatgggaattttgttattttcctaaaaaaaaaaatcgggtcacaaatttggaactaattgtagcattttcgtgtgtgaacttcattgattgctgagcccctatgtcacaactcagggtatgcataactttcttgaaatttagctgactcggtatatgattgtagcaattcactggactgtg

SEQ ID NO: 121 - DNA, 552 bp, Arabidopsis thaliana columbia
gatttcatgacgctgacgtggacacttacatcgataagaaccgcgtgaaaggtatcaaagtgcactggacagtaagaatgcacgcctgaaagagctttaggaggaatacgaaattcatgcactgccgcagcacaagcatctgaatgtgtcacaggtatatcctccatgattggagaatacaaaagctcaaacttcaatataacagccgatgtagctgacccctgcgtcaatcacaactagtcatttattgtacaatgatgtaataggtcaaccaagtacagcacttttcacaagttggattattactgttgctgactatgaacaagatcagtagccaaaataacctcacaaactcaatggcgcagatactttgcagtagaaaaaacagtttcttaacaattcatgttgtttaatattatgcaactcatttgtcagtattagcctatagttgtgagaatacattataaaaagatgaatagaacaaaggagagaaatactggtacctcatatctttccagaggcatagtaaatgagaccacatgcagagacgac

SEQ ID NO: 122 - DNA, 429 bp, Arabidopsis thaliana columbia
ttccttgtccagcttcagatgcttctccacgccttcaattatcgcccttcctccggcatgtatacagaaatgctcaaaagctttcttgagggggggtgtgtatatctccttgtgcattccccagtgccgctttagcgtttagactatgtatttgagctgctctgaataaggtagcactcgagggccgaactgcaccacgttgatctttaaggccgttgatgctacgctcacaagctgcttggacaatgctacgcccacttttccttcttcatcaacttgctgcattacactctcgtacgattcagtgtctgaaccaacatgagttctgatagtatgctggagtttgtatttcggccttatgcgaatcttgcttcctattggaaagaagaagcgcagccccacccattctgaagatagtgttggcaatga

SEQ ID NO: 123 - DNA, 565 bp, Arabidopsis thaliana columbia
gaaactatcattgtttctacatgctttgtgctgcaccagaagaagtaagttttagatcaaaattaacttttaaaatgaccagtgaagtagctgctgattctcagcgtactaaaatgtatacttatttctactttcaggatgctaagaagtttaagcttggtgatcctaagatataccactatctcaatcagtctaagtgtatacaattggatgctatgaatgatgcggaggaatatcatgcaacaaaaaaggctatggatgtcgtcgggatcagttccgaagagcaggtacctccatctgttaaacatagcaaaacctgatatgttatcttgatcaccaacttcttaacatttccggcatgcctttaggatgcaattttccgtgttgtggcttccattctgcatcttgggaatattgaatttgctaaagggacagagattgattcatcaattcccagagatgaaaaatcttggtttcatttaaaaactgccgccgagcttctcatgtaaatggcttgacttatatagactgaagtgggttgcttctgtatgtgactgaagtgggg

SEQ ID NO: 124 - DNA, 567 bp, Arabidopsis thaliana columbia
ggagctgctttaatcttccttcgtatacttgtattagggaaggtcctgaccacgcgccgcgattcaaggctactgttaactttaacggcgagatctttgagagtcctcagtattgttctactcttcgtcaagctgaacactctgctgctgaagttgctctcaatgctctctctaatcgtggtccttctcactctcttgccgccaggatcttggtttgtttcgcttcctcttactctctttggcattttacttggaaaattgtgagctttgaatgctgaatttgcatgttgttttaggtgctttaggtcactgatgggtttagtttgtggttaggtttttacttattagggtcggtgctgagatctctgacttgctttttagggatttgggtttctgggttgtctgattagagagagtgatcttcacattcactgatctatggatccaaagtttgaatcttgtgcttacccattgattggtttgggacttaaatgagtagaacaaataacttttgtgattttggatgcatgtttacttctgatgttttgcttgttgcatgactgatga

SEQ ID NO: 125 - DNA, 760 bp, Arabidopsis thaliana
ccacaactcccagtagtagtaaccacttcaagattattcccctctcctcctccttcaactccggctccagcactggcattagcactacctcctcctcctctagcagagccatccggcaaaatagcgaatccggatggtaacaaagcgacataatccggatcaccaccactcaggacaacgttcatagctattatatcaactggtgcgtatatcacataggaccctgatgcgtccgtacaactttcttgtaagatcaacatgttgctctgccctgagttcccactctgtttttaaacaaacaaaatgttgagactttgaacacaagcaacagtggggttatacagaaactactagatttcaagaacattacttacattgactcgaagcaaggagacactattcccaggatcacgaccatttgcgatatgagccatttcttgaaccaagcctccattggaaagtatatcccactgcaaaaattgaactcaagaataagtaacttatcgatctttttttcaaaaagggcctctttatgacttgagtattaattacctcgcttcttgagttttcatctctgagaaaatcgaacactcgttttggagctacagggatccagaaagaagtagcggcgctgagaacgatgcctggaggtctcccggatcatccatgctctttcgggtcatgaccgaacgtcgtcggatcctgtggtcgacaatgtagtccaggcatgcgcagttgacgcgccgactccggtacagaa

SEQ ID NO: 126 - DNA, 590 bp, Arabidopsis thaliana columbia
atttgtgcacctacaggatttgaagaaacaacaacgagaaaaggtacccaaagagcatctgaaagtggacataacttacaaatgtttgcatctgaggtttttattaaatccttcacttttactattttttcgtattgcagaacaaatatttcttcaagtacagagataattcaagggcagcaagtgaaatggctttgaagaaagacagagcagcactagcaaagcctttgttctgaccaggtataagcagaagccaaatttctactacgttttcaatccctgtatgtcggctttgtactcatttcagtctttaagcaggtggagaatttcatgaatatgtggaacaatgacgacgagttccgtaagtactatgtaaaaagcaacacaaggagtacctttagaagactaggaaccctagatggacgatctcttggccctgatgaggagccacctcggatcacttatgctccaagaacggacaaacttagaacttctagtgacagagcagagaacaatgaggcagttccagcacagaaagagagagtcgttaaatttgaaggttcaaaagttggaaacaacgggtaaggagg

SEQ ID NO: 127 - DNA, 548 bp, Arabidopsis thaliana columbia
gttgattttgaaatctggtgttttttgaaggttacttctggtgacacaccatatacatcagcaagtagatttgaagacttgaacttgtcacctgaattgatgaaaggcttgtacgttgagatgaaattcgaaaagcctagcaagatccaagctattagtttgcctatgataatgacgccgccacacaagcatctgattgcccaggctcataacggatctggaaagacgacttgtttcgttcttggaatgttgagtcgtgttgatcccacattgagagagcctcaagctctctgtatttgtcccactagagaattagctaatcaggtttgtttagttactctgattttggttatgatctgagagtaatctgattgttgacttcttttaatggttgaatgacagaatatggaagttcttcagaagatggggaagtttactgggatcactgctgagttggctgtgctgactcaacgagaggtgcccggcggcacaagaggagccctgtttctgtcatgttgtgattgcaccctggacgcttaagaatggat

SEQ ID NO: 128 - DNA, 628 bp, Arabidopsis thaliana columbia
cgtgaagtccagattatttcttataatactcaaaaatgcatacattttagtgatattagatcccacaagaatgtcctccaggtccaccatatgagaacaatacaatgccctttccatcttttaagccataacatttagcactgtctaatagtttttctaacttgtatttgtcactttcctggatcttataattagaatctacaatttcaagtttcatgacgcgtgctgccgcattgacatcttcagttggtttatgaccgttacccattggagggcttacaccagaaggagaagcttgaactatcccgccaactccaatcatgtccacgctattccttataagatcaaacaattcttttggccaataaccaatttgatcatcttctgttgttaagttcacatctgatagccaccaatttcctgaatttttatccttcaatggataattaaaaaatggtaaaagagacacagcaatacactatgttagattaatttgataaaatacaaaacaatatttaatgctaagacaagtgtatatgttacctgttcaatactaagatatatacgcttttctcatttagggtcagtaggttgtggcgaaagaatttagtttttgcacttgaacaaa

SEQ ID NO: 129 - DNA, 466 bp, Arabidopsis thaliana columbia
acacttccaaggtatattatatattggacatgaacattgctataatgtataattttctaaccaacattacattatcttttgctcaggtcattcgtcaatattcccaatttgaagtactgccttggtttgcttacatgtcccacctacatgttactctctctatatcacttttaaattggttaccaatatttcttgagagctgtacggaattaaaatctctagtcttggtgatgatttacttaaccaatgaatttctttttcgtctttagtgtttttatcttatattgccattcaactctctttattttttttccttaggtattgttgcatagtgataacataaatcaactaagtttttcatctgttcctaagtgtctactatcatcgctccagtttgttgaactcaatgcccaaatcttgagatttgatggcgaaatactgaatctggcgaaatacttcttagaga

SEQ ID NO: 130 - DNA, 972 bp, Arabidopsis thaliana
tccctaaatgtatctctatttatattataatttaatttaaaatcaatataaaaaaatgtgttttttcaatttttaaaccacataacctaatagtataatatttgatatattattattttgttttaagaatgtagtatatttgtattttattagcaaaaccattattaaattgtaacttttttttcttctatataaagtttcaaaatccacttaagaagtgaagatataagtgaacaaaggatgtagcgtaatctagcacaacatatttaaacctcacaaaacccacccgaaagatgaacccatatctctctactctgttgctgacgatacatacacctttacttacattatattcccgccatcgcgatggcgacgtctctgaatctatcatcgatcttctcctcctcctcaaggctcgtcaccactccctcctctgtttttcccatccgtcagaggcgacggatcatcctcgttacgtcttcttcttccggaggtggaggaaaaccgacgattctcgtaacggagaagctaggccaagcggggatcgatctgcttaagaagtacgctaatgtggattgctcttatgatctgagtctcgaggagctttgtacgaagatctctctttgtgatgcgctcatcgtcaggagtggtaccaaggttgggagagatgtgtttgaatcgtcgcgtgggaggcttaaggttgttggacgcgctggtgttgggattgataacgtcgatttggcggcggcgactgagtatgggtgtttggttgttaatgctccgactgcgaacactgtggctgctgctgaacacggaattgcgcttttgaccgccatggctagaaacattgctcaagctgatgcttctatcaaagctggtgagtgttttaaacggttgttgaatttgaatagcgatttgagaaattgcgatgtgaaatgtagaaatgtggttgtttgtaggcaaatggacgag

SEQ ID NO: 131 - DNA, 270 bp, Arabidopsis thaliana columbia
tgattcgttgctggcccatctgggagattaaagtgaaaaaattacgtatcggcataatgggattaggtggcattgcgcaaaaagcgtggttaccggtactggcggcacatctgaatggacgttacaaggagcctggtcgcctacgcgcgcaaaaacactgccaatttgtgaaaactggcgcattccttatgccgattcgttatccagccttgccgccagtagcaatgcggttatagtgcattccagcaccgccagcaactttgacgtggt

SEQ ID NO: 132 - DNA, 862 bp, Arabidopsis thaliana
gtacgcttttgtaatgatcttgatctgtgtatggaagaactaattaaaatccactaactatgagcttccgcttcatcactaacattatatatacatacatactggttccaaattttgtttgtttggctagattaccttctctaccacttgtttcacacggtacaatcttcctaacggtctcatttctcgttcaatctctcccatgacatcaaacaaacttccgaggacgattcgtaaatagtctggtagtttatcactgacctcaatactccacctggtcataccaaatttttcttcccacgagtgagtgagtgatgagctgagtatagagaaagagagagcgagacgccactgagtacctctgcaaacattccgtaagagctttaacttggggaagggttgcatatgcgtcatatgtatcatccacaacaaccatgatcatgttgattttagccactatgatccttccaagagaatagtgtggctcgaagtacggtcccagagccacgagatggctctctacaagtctatccctaatgtaaggtagtttagatgcaagatctaagtccctccaccatctgcaaccataaaaaaaaaaaatatgaattgagaatattaattgaaacagagaccagtgtcatcaactagattgaatatgagtatgtcacttggtgagcgttttgagttcttggacgtaatgaaactggcaaaagttgaagttaagcttcgcaaacttgagcaggatctcgtcgtgaccttcttcttgttcgtagtaagatatatattctcttgccactagtacttctatgttacagtatcgaggtatgtataatgagtgttgtatatgcttcaagagatgggg

SEQ ID NO: 133 - DNA, 575 bp, Arabidopsis thaliana columbia
gcattgtgggtcgtggaggtcaaggtgatgttgggcagagaatccgtgacgaaatccttgttattcaggtatatagttcaaaatctctgcaactaaaacttttccttgtcttgttagagtagtttgtctttgtactttctttcttttttgttttaacattttcttgtctttattatcttttgttagagaaataaccactgcaaatccggcatgatggaagagtggcaccaaaagttgcacaacaacagtagcgcagatgatgtgataatttgtgaggtaaagatgcttccatttgaagtaagatactcacatttagtgattggtaaataagaggaagaataacatctcagataaagttgaaactccattctaaaactcgctacttcttaaaaagcagctaactagctagttcagaagtttagtttcctgttgtaaatatgtgatgagtttatttcttctgccatagcgtctcttgaactatgtgagatctgacttcaggatcgatgcatactggcaaacactacagaccaatggtctcacaaaagaaaggcttgcaagttatgaccgcccatagt

SEQ ID NO: 134 - DNA, 506 bp, Arabidopsis thaliana columbia
ggtggattcgttgtgtcgggcataaaagaagtaacgaagacagcaacagagattttactaggaaacatgtcggctgcaagagcatgcggtattccaccgaggctatgcgcgacgaggactactttatcatccgagccaaaagactcaagaacctcaagcaacggcttagcgaaatcctccaaagtctgaatatcttctactctgctcatgttcacaccatgcgccgtaagatcaaaaaccgtgacacggtggccggaatgttcaagcatcggcttcaccttgtaccaacaccacgcaccgtggcagcctccgtgaactagcacataatgcttcatcctctccgtttcttctttcgtgagtgttttgcctttttttggtatgtgatgtggctaaagtgacgatatgatgatttactataatggtgagggggtctcacgttatcgctttgaaatctcacaatcgatatcagtcaactactctgttttgtggcgataatcttgaggtgg

SEQ ID NO: 135 - DNA, 740 bp, Arabidopsis thaliana
aatgcaagtctctaaagttctcggacaacaacaaggagcttcgtctatggagctagaccacattgatcgtcaagatgaaaataacgactatgatgtggatatatcacttaggcttggaagatcagagcaaaagatctctaaaaaggaggaaaataaggtggacaagatttctactaagaacgtagaggagtcaaaagataaaagatctgcactgggttttggatttcagattcaaagctatgaagcctcgaaactagatgatctttgtaggcaggttaagcttgcaaacgctgaaaataaatgtgtatcttcgaggaaagatgtcaaatcagttagaaatgaaaaccatcaagatgttttggaggagcatgaacaaacaggtttgaagaaaactagggtttgtgttaaagcatcatgtgaagacccatcagtacgtaccatcaaaaccatacattacatatatgtgtttatttaccatttcacatctaatttaattatttgatcatatacacgttacatgaatatatatagataaacgacggttgccagtggaggaaatatggtcaaaagactgcgaaaaccaatcctctcccacgagcctattaccgttgctccatgtcttcaaattgtcccgttagaaaacaggtataatacattctataatttctcaatccaaatatctgtttattaacaattggttttgagtaaaaacttttaaaacgaatgtctataggtgcaaa

SEQ ID NO: 136 - DNA, 489 bp, Arabidopsis thaliana columbia
gatccccctgtctggacttagcccgtcagataaccgtcgaattccgcccttaaagtgtgtgcagaaaggcttccattactcttatggtcttctacttggaagatatattgctttaatactgcttgtttccatacatgtctcacgttttcatctgcacttctgcttctcaaatgcagatacgagtttttctttgcccttttgcgtgatttcccggacttaaagttcacaataaatggaggcataaactctgtggttgaggtgagctttctaaaactgatctttaatatgattcaaagattgcaactagcgtttgaaagaccagatctttacttcttgcattgaactgtaggcagatgcgcattaaggtctggagctcatggcgttatgcttgggcgtgctgtatactacaagtatgtaaagccttttgctgttaaacatcatatgagagttttgtccttttataatcttttgactgatttatgggaatat

SEQ ID NO: 137 - DNA, 361 bp, Arabidopsis thaliana columbia
ctacgtttaccgatgaaatgagcgttgatgtgaaggttaggatcagagataaggcagaagttggagtctttcttgccgtggaagtaaaaggttagaccatctcctccgatgaaacgtgggtcttggcaaacacatacaggcctgtcgcaatctgcatcacgctgtctcgcgatttagaacgtattaagtatctgaataatcacgagtttaagaggagatcgatcgatggagtaagatgagatactgcaaacacgcttgcaagtgacgcaatccacatgacaagatcggggacaatcggcggggcaagtgtattcaactccgtaacatggagagcgctgcttcttacacgtgagccttttgg

SEQ ID NO: 138 - DNA, 594 bp, Arabidopsis thaliana columbia
cttcttcaatctttttttcttctttctttgctgcagcacgagctcggagctgagcttgaacctttctgaaaagctccacgatctctttctctctaggtccaggggatgaggtagcttggaatttgggggaactagacaggttgaataaaggcccatttcttgaagacaacatatcagagttttcgatatcaaaatcttctctccctccgctttgcctgttgtttccccggtaaccatgcttattaagtcttgagaaatcaggatttctcctatagccgccagaacttgctcggcacacaaaagaacttctattggggacagatttcagacgcccattcttgtgatcgagacaggaagagcaaggtaatatggcaagtgttcttcttgaaacagcagagttaaagaagcaacggctgtctgaaagtgtgtacctgtattccaagcaaatacacaacatagagtaagcagattgaaagatagaacattcgttattcatagaaccctagaggcaggccagtacagaagcaagttgcattacacacacgaataagcagaagtctataaactcaagagaacatttcatcgacaactggt

SEQ ID NO: 139 - DNA, 532 bp, Arabidopsis thaliana columbia
tgtagtagttaaaacagcattccttgatatatattacctcctgaaagttggtttgttttctagccaacgtttctttgcttttcgaaagcttaagctcagaaacaaaacgttcatcacgctgataattctggtatctcccgccaaaaccaccacgattaccaccacgtccagggtaaggtccaggccgaggaagaagcccaggtcctcctctcccatttgaccaacgaccacgtcccattccccctctcccaccatggttatcattgctccatcccgcaggcaaaactgtcattatttcataacagaacatacttagcagccagagaaacccaaaagccaattcagtctcaagcaaattcgaactaacctggaattgagtaagtgctaattgcaggtgtcttagtatactcttcattatcagacccaaaaagatctttctcatcttcttcttcttcttcctcctcttcataaggataaactccactttctccattatcattgcttctatagctctctactttatcatctccat

SEQ ID NO: 140 - DNA, 562 bp, Arabidopsis thaliana columbia
cttctccacctttggaagaaagtatggacgagaattcatgaatcacgccgtccataatagattgttcaaatgaaactcctgaatctggagtttcactgctgtgaaaatgatccagtttatcaaataagtatgacgccccccacatgagcagtgcgtgcgtgagagagcggtttaggttctctacagctttattttgccgcttattttgcctagccagaatcagggctttttcttcaactgtacatactgagtacaatcggaatatcttagttctttcagaacatgactcgatttttatcttctctacgtgcttaacatcatgcgatggattcaagctgcttccaaaaagaataaacgcatcagctcgcaagagtttaatggtttgactgcaggcacgtgtttccaacagcagaacacagcattgactctccttgttgaaattgtttatagcggagttcttctttgaggaatatatcccatgctcataagattttggaccagatctttgacccacaaaatcttcgagaatattacgaagcagaagcccttcaggggtttgtgt

SEQ ID NO: 141 - DNA, 774 bp, Arabidopsis thaliana
ctatgtcagcgcaagaaacagtggccggacataaattctcgatggcattcttggctgtgtctatgactgagaatcctccaagagatgcgtttccgggatcgcttttctctgtgctattcccttgtatcaacactgatgcatcacaacccttgcaagttcaaccaacaaacaaagtttaagccaaattgtttgaactttcctcagtaattcgtaattagtgcgtgttacctggacgaaacagtcgtggaagaaaagacgaaggagtttcccggggatcgttggatcggaggaggtagctgatctaacggtgtttctgactagaaactcggctacagaacaagaactagcatagaaattaaaggagaggttggcggaggaagtgagaagactagacagaaacataaggagatgaagaagagtggaacagtttattctgtaagaggacgccatttttattgtctctgtgttttgactcgaataaagtgacaatgaaaatagaaaggagaatgagaggaatcttgaaggttgttgtaataaactgcaactgttcacttcataatttgcatttgatgttagtgtcagagatagaaaattagttgaggtgatgaagttgagtcaacgcattcaatgaagaatcatcgatggtcgtgtttagttgaatcaacattcccagcatcatccatggttttaagtgaatccgacatacttatctatgggttttgtcggcgagtaacttcccaagccaatgcatgccagagaccttgtggaagaaag

SEQ ID NO: 142 - DNA, 616 bp, Arabidopsis thaliana columbia
tgatgaaaaacgaaatattttgcgcatgaaatagaaagacacttgctcaaacaatgtagaatatgagttaagacataaagcaaaaataaggcgatgttaccagtgtatttgaagcaagtcaatgtaatcagttccaaggcgcttaagacttttctcaacactttctttgatattagcagcatctacacgcagaatctcaccactgtcccttatgtaagctgacctttctgagtacccacatactttagttgccaaaactatctgtatacagaaacaatgaacatcaatatcaattgttataacttcgattaggttttgctgatatcatatacattcgtgaccaatatgcatccaaagtatgataaatggttgataccttgtcacgttgctgagacttcaaccagctactgatataaagatccgttttaccttgcgtctccttcttcataggtatgggatactggaaataaacaatgatacttgaaaatttaccacagactaagcagattccagatagctaaacacaacagtgctaaattcaccagaattatatataaagtataaaacattcacataaacacttgcaatcaaattcccaggcaagaagagaaagatg

SEQ ID NO: 143 - DNA, 620 bp, Arabidopsis thaliana columbia
tataagacatgtaagaagtaaacacatcgaacaggggatgacacctttgttcccagcaataaatttgagatttaaagctcaggacatacacaacacatcatagattctactctgtccacccgcctatattgagcacattcggaagaatagtaggtttattacaaagaccaagagagcatctaagctagggacgcgtaatttatgtaactttcactagcaattgtcattgattcccatcagtataacaatcaaccacagccctgtatctctgtaatctatagaaagtagatcccatgactatacctttctcaaaagagagctcaagtcctgaggatgagactttgcaatatccccgatctgcttggctgcagttagccgagtagcttgtgttgaaccagctacaaagaaatgataattaaggagaacatgtaccttcttaagcgattatgatacgaagaaacgcaacaacaaaaacgaagcattattggtaacaaaggaaataatcaggaaaaatagaggatactgtccaacaaagtaaggagacgattgagtcgggaagattgttgctgtgtcatgaagggcacaatgacaacaacgttgatgatgacgatgacaagagt

SEQ ID NO: 144 - DNA, 659 bp, Arabidopsis thaliana
ggcctacgatatccattgcccagcgcttgaatggatacggtgccgtggacgtagttagaacttcaattggggtgtgaataatcgagatttgcctctgttaaggctcccacttgtctacaaaacgaatacaattcgtgattattgtaggccaatactggccatgtttcataattttggtagcaaggcttcgtcctcctgattgattcccacatgcaccatgtgtttctcgcatgaccagcttagcctcaactttacttaggcaccttaataacacgtatgaagtagtccaacggaaaagattttccttgatcatcgtatacttggcagcttttgttttaaggcgtcgtgcctcccacttctccttagggactacgccatcgggagtgtagtctatgaattcttgtcgccaatcgtcagaattacttgttgaccctttagggggctcttcttcttttgactcggctatcttacagattataatccgcctcggaatacttgatttttctatgcattcgactggtatgactcgccggagtccggattggatgttgaagcaagcgtacgtagagcattggctggagcgttcgccttctatgaattttgctaagtgcgaagaaattgaaggtcttggcaagccctgaacgatttatatgtaggcg

SEQ ID NO: 145 - DNA, 650 bp, Arabidopsis thaliana
cagtgtgccagtgtgctctaaagaataatgccacccaacatcaatagcacaatcagcgccgccagttttaccagcacgctgaaaattatgtcgccctttttacccggtgggttaaaagcaggcttggttgcagccataagttactcttcagttaaacgcgtttacaaagtcattttgtaatgccggatgcggcgtaaaacaccgtacccggcctggagttttattagtacagcggcttaccgctactgtctttaatattggtcttccacgcagcgcgaacctgttcaactacactatccggcaggctggcgtaatccaggtcgttcgcctgtttagccccggttttgtacgcccagtcgaagaatttcagcacttctgtgccttgttctggtttcttctgatctttgtggatcagaatgaacgtggtagaggtaataggccatgcatcttcgcctttctggttggtcagatcctgagcgaaggttttgctccagtctgcaccttttgctgcattagcgaagttttcttcggtcggactaaccggtttaccatcagcggagatcagtttggtgtacccaggttgttctgcttcgcgtaacgatattcaacataaccaattgcacccggcagacgctgaacgaacgcggcga

SEQ ID NO: 146 - DNA, 593 bp, Arabidopsis thaliana columbia
catcctgagcacaagtcctcgtagctccgaacgttagagagtagaccaaaccactcttcaccctcacgttctgagagatggtgcccaagtttccgagtctaaccgcgtggactccacgtggaacggggaaatagaatcctccaggctgaggtccaccggagactagctccacgtgcccggcgatttcccaatgaggaagagagttagccccgattatttgtcgacccttcatgtttgatttgagaggggttatctcgaagtttccatttgggagaaccctatagatatggaaaccatgaatattacaacgtcatgtttaattagtttatcaaattaattgatatagaaatgaatattataacttcatgttgattgtcttaccgtctagatgaggaactcgacgtggttgaagactgtaagagccatggcagagagataggaggaggaaaatgctaagagagtgatagagagacattttaaagtcttattaattagttcgcctatatcaatgaggaccttgtgggctatatataggaggttttatacttatcagttatccttgacatgagatattatagctaagaaccaaagag

SEQ ID NO: 147 - DNA, 515 bp, Arabidopsis thaliana columbia
caacaacttcatgaacatcatcttctctttcttatattttgcctttccataataagcaagataaaacctatgttcagtttcaccaatggaaaatatttattcattgttgtaagggataagtcatatagagaaacttgttactgtaagattttgttagctgattaggtacggttttacctttaccttaggaattaaggggatcatacaagagaaaaactaactttgtatatattgattgtatgttcgtaaaatgaaatttctcttttcagaaatttacatttttgaggtttagtattccactattcggattaactatatagcatgctggtttaatactactaccaaaatagtagaagtggtagatgacagatttgggggttcaagcatctcggaacatgatacttgcattttgaatcaatatgagcagatttttggtggttttgatggtgacccacgaatgtccaagacagtggtggtagattaagaagaaaataaggttggaagtattggccatt

SEQ ID NO: 148 - DNA, 535 bp, Arabidopsis thaliana columbia
gaagccaagtatcaagagaggaagatttaggctctgatgaagttgatcttcttcattcgccttcccaaccttctaggaaatagtatttgttatactttatactaattaattacttcgggattcataagattattaataacatattattcgtataatgtttaacaacttttagattggctttgattgctggtctattggctggtcagaccacaaacggtgtcaaaaattacttgaacactcaactgagtaagaaacatgaaccatgttgtaagatttagataaaaaaaaaaaaaaagcattacttccaatgctaccatactgggctaaaaatggatgtttttaatctcgaccttaatccttctcatttaacagcagtggcctaccaaaagctctaacatctcagttgctttggactcaaaaacaattatgagcgtatattttgtgactaattagcctttatatatggtttgtacataatatagttgaaaacttttggagtattattaatgtatatatgtatgcttagggttttatg

SEQ ID NO: 149 - DNA, 305 bp, Arabidopsis thaliana columbia
ggtggcggtgacgtttgcagcgtagttgggttgttgcgtgtgtttgttaaggagtaatggtgcggcttgttatttcttgcggacatacgttttgtttattgtgttcttgtgagcttttggtacatagttgtaactgttcactttgtaacactgtcattttacatgttctttattttttctaggttagcttctttttgctatcttatatcatttatatgtgtatgtcttggctcttgtttgttggtgttttcatacaatgatccttcactacaatgcttaatcataggcctatacccttaaatgag

SEQ ID NO: 150 - DNA, 424 bp, Arabidopsis thaliana columbia
aacttctagttatggaagcattcgtgacatcattgtaatagatatagcaagcgctactaccttatcagtttatgactatatcattcaatttatatgacattatgaattatcaaaactctgggcatataactaaagtactagcatgtagctagtcacttcatatgacatgcatcccaaaggatctaaacatgaacaacttcattctaacctcacgatgtcgcagctggtctagttgataagaaccatgtaggtgtaacaacttcacctgaaaatataaagtatgggcagaacatatctcgaattgtaacattcaagatcagattacgaagaacccccagtcccaggaaaaaagtactatccactatttctagccaatcaacttgataaagcagaagccatcacttccgcagtatcttggatcatc

SEQ ID NO: 151 - DNA, 818 bp, Arabidopsis thaliana columbia
ttcagagaagaaggaaacctatagaatcgtaccaaatccacttttcttcaacaaatccaaattctctaatctactagatctctaagaaaccactgcacgaaactcttgtttttagattttgatctaaagctgaggtattttgagtttgtttatcttctcccaaacttttcaatctcagacgtgggagattgaagaaactgatgctgtggtgtctggaaaggacccttataccctcactttgccgacgccggtttcacactcaaccgacactttctctttcaattaaccggtttagttttcattaaaccagaaaaatgattatcaattggtttaaatacatcctgagatattttaatttgaaccgttggattataaatttgtcaaaagagattggtaaagaagactttcatttgcttcgtctctccggttgttaccaccacacaacgccatggaagctgctcttgctgcatgcgctcttccatcgctccgaattctcaatacgaaacctcgtttcagatgttccttctccaatccaagcctacccatttctcctaattcccttatcacccgcaaatcaagtcgattcacaaccgcagtatcatcaccaccatcatcatcagccgctacgtcaacgaattctccaccggaacctgaagccctattcgaacccgggtcggataagttcgattggtacgctaattggtacccagtgatgccaatttgcgatcttgacaagaaggttcctcatgggaagaaagttatggggattgatttggtatgttggtgggataggacgagaagcaatggaagtgatggat

SEQ ID NO: 152 - DNA, 796 bp, Arabidopsis thaliana
gtctcaggcctctccactctttcccaaccttcgcaagcaatcacattcagtgcctctctcccaaagacctccatctcaaggaacatcctctcttcgtcttctcgtggcacaattgtctcaagcatgtcaaaaatcgaggagaaatgaaatagagcttcgcgaaaccgtgttacgaaaaacggtgcgttgtatgcaccattcacaatgccaaaggacaaagagatcaggattgatcttcccgatcaaattgagaacagtgtctctacaactttctactttgactgactcatcatgcaaattctcagcccggtacaggcaattaacaacagtaatctcatccctgtcgatatcaagatcttcaagttgaattgcatcccacttcttagcaattgctttatactcaaatggcaccccaaagagtttggcatacgctgctaacctttgaccagtttcttcaacccgctgtgccggacgaaacccgggctgcggaaactcaatcccggtgatcctaaccttcggtgatccatacatcgaaaaccggtgaataagagttggccattggaaaccgtaaagaataccaaaatcaataacatgaacgcgctgagagttcccaacaagatcacgtatcgtcttattagttatgaaataagagagctttctaaaaggacaacacgcaagaaaaagctggtgagccttcaacacagctgcagcggatctcggtttactcacaatccctttgtaaatctggcttccagtaccggctaacctcgcctcgagaccattagcaaaacaatga

SEQ ID NO: 153 - DNA, 402 bp, Arabidopsis thaliana columbia
tcaacttccaagtgcatctgcgtttgatctactctgttataattgctcagattacagaggagtttgaagaagttccagtacaaagccgtggctttggcattctagatgttggatatcgctcagaggtaaatgagtttccacgatgatcactcaaaactctgaatctgctccgatctttacaccatttttttttttttttgggtattgcaggaagaagcatgggcaacacgaggcagtggcatactactgagaacaagaaatggaggcaaatcatggaaccgtgacaaagctgctgataatatcgcagctaacctatacgcagtcaagtaagtctctaactcaaacatcataacacactccttcaataccatcattgggaccatcattgttccacccatctca

SEQ ID NO: 154 - DNA, 328 bp, Arabidopsis thaliana columbia
catatacctgtcctggcggaagaatagcgtcaaatctatccactccaaacataccgagattcgataaagtaaaagttcctgcattccatagatatatcccttaaatcaaaatccttaaacacacttcacatgtttgtcatctaaacaattcgttaagaatagtaccagagttgtattcatggggttgaagttgcttgcttctagctttccccaccagctctttccatttttgagataacaagtacaaatccaactatcaaaacaaccaacacgactcacacattcagttaaagaaaccagcctaataataccaagtgtgtgtgttaat

SEQ ID NO: 155 - DNA, 1592 bp, Arabidopsis thaliana
tcagcaggtcacgtcctaagcaaatacttagccaaacatgtgaaggagtgtttggtacagagcaattaagtagagtagaaaacttgcagtatttccctaccaatacctttgctatgaggctagagggtttagtgagtagacgccagctgatctttgctaggagggccttattgaaggtactgatatctctgaaaccaagaccaacagtcctaaaagattttgtcattttcttccaagaaatccaactcattttcttttttttctgtatttccatccaaccaaaaacgggtaagggctgactgtatgcgtttatagagggagctatgaagatggaagaaagtcataatatatgtaggcatagcaaataaaactgatttcagcattgtgtgtttacccgcagttgagaggaatcttgaagaccaactcagggctttttgctttatcaactatttggctgaaaagatccatcttcttctttccaaaaagcttaggtaaacccaaatatttgtcttgtcctccttccttttgaaaagataggatattctttgcttgcactttaactttagttttagtttttgaggagaaagtaatggaggacttctcttggtttattttctgaccagaagcttgttcatacttttgtagaatctgctgtaacttcctacagcttttcgggtcagagaggcagaagaacatagtgtcatctacaaagaggaggtgattaactcgaggactgcctttagagacccttattccaggtaagctgccattagcctgagctttgttgcataatccaaagagtatttcactacatatgataaacaaataaggtgatagagggtctccttgtctgatgtctctctgtggaataaccatttccttagcttgaccattaagaagaaaagagtaggaaactgtggagacacattgcatgatctaactgatccagctttggtgaaaaccaatcgttcaaaagctgcttttataaagtcccactctaatctgtcatatgccttgctcatgtctgttttgacagccatgaagcaccatttaatcgcccctgaggtctttagataatgaagggtttcgtgtgtgataagaacattatcaaatatggctcgctgagacacaaaggcagattggttttcaaaagtacaggtgtgtaagattggttggagtctcttagctagcaatttagcaatgattttgtagtagaccaaacaaagagctattggcatgtattctgaaactttctgtggactagggatctttggtatgagcctaatatgagtgtgattgatttttttgtggtagtaagctgaatataaagaaagattgcacttctgagatgatcttgtcacttactgtttcccagtttgactagaagaaacttgcagagaagccatcaagacccggagccttgtcggggtggatagcaaagaatacttgtttgatttcttggggagtaggcattgtgatgagggttgcattcatctcatctgttatacaaggggatagagctttagagataatagagctacagtcaccttcttgagaggtaaaaatttgttgataatagtcaggaatggatt

SEQ ID NO: 156 - DNA, 1052 bp, Arabidopsis thaliana
acaaaaatttcatctcataccaataagttagatgtatgaagtctcatacctaactcttaattaaactcaaatagcctatattagagtaagggttcattttggtatcacagacagactcaggtttttccaaaggatcatcttcgattctggtggcacgacaatcataaaatttcagtatgaaaggctcaaaagaatatgtagcagctgtttccggtttactcaaacagggactattatccctatcgtcaacgtcctcacagcatagcaagagcaagggctgccttcagagatagtgttctcagatcaagtttgaattctcagtctcagatgactgagacttcgtttccagctccagtgacaccacctccaagagtagctcctcctccgctgaatcatgaagaattggcagctgcaattccatacttcgccacaactagagatgttcataacaggtatggtagagagcctaatattgcaagacaacaaaggtattccaactctagcaacagtccaccaagagaggcggcaaacttatccggtactagcaaagtctatgaagtgggccaattatcaagaaggcatgaagatggagaagttagaagagagttaggggatccacgacttcagactcatcaacaaggtgctccaagaatgggagggattctgaaacctccaaagaaaagattgtcactctaacaagaattttgtcatcactttttgttgaagattgctgaggaacaaggttcgcagcttcaatgcttgaataacaccaaatagtttggttatggtttttggttaggacatacccttggcttggttaagattgatgtttgttgtttcagtttaaatttctaaggaacaatgttttgttctgtttgccttaagattgtaagtggtaagtccactgttacactttttgtaagaacacagtggtgataacaatgttctaaaaatcgctaggcgctacttaggcggtgtactagcgcctagcacttagacggtcgaggcagggattaatcggagactaggcattacaaaaaattaaggggata

SEQ ID NO: 157 - DNA, 556 bp, Arabidopsis thaliana columbia
taatttaaaagatgattataaaacgcatgaaggatgaatcatcttacgatcagaaaaaaattgtcaagcagagtttgaaatatcaacaatggccaagaaagctttactgattgggatcaactacgtgggaaccaaggcagagctacgaggctgcgtcaacgatgtccgtcggatgcggataagcctcgtcgaacggtacggattctccgaggagaacatcaaaatgttgattgatactgatagttcttcgatcaaaccgaccggtaagaacatcagacaggcgttgttagatctcgttgaaccggctaaatcgggtgatgttctcttcgtccattacagtggacatgggactaggttaccgcggaaactggagaagatgatgatactggttacgatgagtgtattgttccttccgatatgaatctcatcaccggtaagtgagaacataaactaaagttgacttttaatttttcatgtttacgtaacaattttaaattttccttaccagttccagttgttacgaattattaaggtgactctgttttacagatgatga

SEQ ID NO: 158 - DNA, 783 bp, Arabidopsis thaliana
acaaagagtcttgctttgttttctcgagaaaggaattgaatttgagattattcatatcgatcttgatacatttgagcaaaaaaaaccagaacatcttcttcgtcaggtaaaaaaaacaaatttcttaaacttaaaacataaatatattataattattgttttcatgtgtagccatttggtcaagttccagccatagaagatggagatttcaagctttttggtaacatcctaataacaacattttataaacattcttctatcattttctttatagtgttttgaaatttggctctttatcttctaagaatcacgagccatcgcgagatactacgctaccaagttcgcggaccaaggcacgaaccttttgggcaagtctctagagcaccgagccatcgtggaccagtgggctgacgtggagacctattacttcaacgttctggcccaacccctcgtgattaacctaatcatcaagcctaggttaggcgagaaatgtgacgtcgttttggtcgaggatctcaaagtgaagctaggagtggtcttggacatatacaataaccggctttcttcgaaccggtttttggctggtgaagaattcactatggctgatttgacgcacatgccggcgatggggtacttgatgagtataaccgatataaaccagatggttaaggctcggggtagttttaaccggtggtgggaagagatttcggatagaccgtcttggaagaagcttatggtgctggctggtcactgaattagctccaatttatgatgatctgagat

SEQ ID NO: 159 - DNA, 489 bp, Arabidopsis thaliana columbia
tagtaacgcgaatcctttgcagacgacttaaatacgctacgactgaaaacctctttcgcacgaaccgtaaaagcctggaccatattagccgccagctctttaaacacgcgaccaaaggcgagttcaatcaacttattggtaaactcaaagtcgagatgaaactcgatacgacacgcctcctggctcagcggcgtaaacttccatccaccaatcaatttcttgaacggcccatccaccagattcataagaatactttggttactggtcaactggttgcgggtagtaaacgttttgctgatcccagccttagagacatctaccgccgcagtcatctgcccaggagtggactccagaatccgacttccggtacaacccggcaaaaactgaggataagactgaacgtcattcactaactgatacatttgctccgcgctgtagggtaccagtgcggtccggctaatctgaggcataccaatttccatcagcaaa

SEQ ID NO: 160 - DNA, 622 bp, Arabidopsis thaliana columbia
tcgcgggaaatgtcttccttgaaaatcttaaacaaggaattgatcttgatgcagttgtgaaagcaactatgaaggagtcaaataaactcagtacgggaactttcagttcagtttataaagccgttatgccttcggggatgattgtttcggtgaagaaactcaagtctatggatagagccatatctcatcatcagaacaagatgatcagagaactcgaaagactcagcaaactttgccatgaccatttggttagaccgatagggtttgttatatacgaagacgttgctctcttgttgcatcagcatttacctaatggtaacttaactcagctgattcatgagtccaccaagaaaccagagtaccaacctgactggccaatgagactgtccatagctgttggagcagcagaaggtttagcatttctccaccaagtcgccatcattcacctcgacgtttcctctagcaacgtcttgctagactctggttacaaagccgtgcttggggaaatcgaaatatcgaaacttctagatccatctagaggcacgcgagtattactcagttgcaggccttttgctacattccacaggtataaagcttaattttgttccagtactttatcaaa

SEQ ID NO: 161 - DNA, 745 bp, Arabidopsis thaliana
ctttagagatactgatgtttatctgatgaagtgtttcgtttagcctaacgcattagtattcttgtttttcttgagtgacggaaaattcggatgtgattttaattgattcttaaaatataggtattttctgcgttcacgattgctgccatcagattacgaacatcagcatcagttaagggcaaaagtttagaagcttcagagcagatttttgggatggtgttgaaagaaaccatgctacatttgggcccaacttttatcaaaggtctgtgattagcttattatttttgaagtgaaactatccatcagtcaccatttacatttactgccatatattagatactttgatctgttgtgaatgattcttccctctcttctgctggttcagttggtcaatcgctttccacgaggccagatatcattgggactgaaatctccaaggtcagatagaagttatggtcacatttgtctaaatctcttagcttttaatagtgtctttctggtgcatgtttccattgttctttctctattctgcatgctacatttggttgttcttagggatgtagctgtctgactatgtctgttatgatttgaaactgcaggcactatctgaactgcatgaccgaatccctccctttccctggcctgaggctgtaaaaatccttgaaggggaattaggtggtcctgtcgaatcattctgtagtcagttttcgcaagaaactgtagcagcagcatcctttggtcaggt

SEQ ID NO: 162 - DNA, 728 bp, Arabidopsis thaliana
gtcgactctatagccaacagatcctggcagtagctcgctgagcacgaagacttggtcgccacattcttctggggataagcggactttctgaagtagaactggaatttgggggaactagaaaaacaaatatatattgtttgtcaactggtaattcgtttgtatattaaacgaagttaaaataaaaacaagaaaaattgtacctataggcagatcggccacatggtctagttggacctgcgggacctcttcgattgggtcccgctgaactgttggaagagcaattactggacctgttgtagctacggcgagagcagtttttatgcgatccctgttgaaggttgcccaatcaatttgaccacgcaggaggagggtcagcaattcaagttctgtcttcgaaagggtaacttctttgatttttgctgcaaaccaccaagagaagatcgatgttagtaacaataccaatatttcaaaagcaagaaatctatacacgactaaaacaataaattcaaagcggcagatctccatctgacccaggttagaagaccatgtcctcgttatcctcgcagggtcaaaatcgctgacggaatgatgatccacccaaaagaagcctacttaactcgccaattcgtgtcccggaaggcctttaaaccacctaagattagagattcaggacaagcactgatatagtatgtccctggtggctcctggcattagtcttcacttggcag

SEQ ID NO: 163 - DNA, 474 bp, Arabidopsis thaliana columbia
tctctgccttttcctcaatagcaacgcgtagtcaagaagaagaacgtgtttaacatggaccaatcttgattaagataatagtatgatcaaatgcttatataaacacactaaaaaggaatcaaatttaaccattccacaaatcaccaacaaaatttaatgaatcatgtctctgcttctaaagatgttattattttccttattcttcttctatatggcttcaatttctcaatgctcagacccaaccggtggacagtttagcttcaacggttacttgtacaccgatggagttgcggatctaaacccggacggtttgttcaaactcataacttcaaagacacaaggaggagctggtcaagttctttaccagttcccactccagttcaagaactcaccaaacggcactgtttcatccttctccaccactttcgtctttgctatcgtcgcagtacgtaaaacaatcgcctggttgtggac

SEQ ID NO: 164 - DNA, 1181 bp, Arabidopsis thaliana
tagactataggttaatacaaaatcatgtaatcagtgttgtcttaaaaccaccttgaaagtgataagcaaaaaataaaaacaaaaatcatatattaagtacctgaattggttactgcggtgtaacttggataacacgctagacttgatggctgggtcgtaataggtgacagtgccgtcatcttccgccggaagtttcagctttcgcttcttacgagctgccacgataacttgagcgatcccagagaatatacttccttctggtttaacgtagacataacgcttcattccggcaaaaaacataacaaccgcaagagccatgagtccggtagggatactaaaaccgataatccaactgacttgatcctggatatacacaactacggtctgtgtaatgatcagaaccacagtgaaagtcatgtaataccagttgaagaaactggccactcctttaaccccttcctcagttcgttggtcaaactgatcaaccccaaaagggatgctacaaggtcgtattcctccactccctacggagaggaaacagagtcccaatagcaaaactccgatctggagcttattcggaccgccgcaactgagtgggtcctggctgttgcatgatgctgggtggagttgaggaaacgatgctgtgagtgtaattgttattagtccctgcatgttgtcaatgtaattataatcagtcattattaattttgaaaccgattcttcattattagatattctataatatataacttgaaactgaatgattgttaattaatattgaagaaagcaaacagtagtgtgggatatatagattgaagttatgcgaacaaatacaaacaattaataaagtttacaatagtcttaattaggtttgacttcatatgattgaaaagtgatgttaccttgattaggtgaaagtgacagtgacgtagaacctaatatcatttatttctgttgtaaccctaatatagtaatatgagcatttgtaacagtttaagttcaacgtttaactaattacgaaaaagacaaaaaagtgcaagagaaattaacaagttggatgcgatcataattctataattgtgaatgaaacagacactagaaaagtaactattattatatacgtaacgtcactgtgatactgaccaaatctaaaacccaactagctagctaaatcatcaaga

SEQ ID NO: 165 - DNA, 577 bp, Arabidopsis thaliana columbia
cccaacgggtatataacatggtgtacctcctccttcgcattagctatccacttctccaattctgaaatcccagatttcacatattccccatttgaaaatgtgcaacattcacgacgaagaagaagactgaagaagaattcagattatatatgcagaaaacaaaagtaatatgcggtaagtgatacaaaaagaactgaattttggatcacatttacctgttgaaaagtgataggttgatgaatgagaaaacctgagtcacaagtttgcgaatgaagaacgagggtacctatcaatacaatagtctggttataaaaaataaaaatagacatggtacatgagcagtcaaattccttatcctcatatgtggagcaacaggaaaataacaaagtaagtactatatctaagacaataatttagagcaatataatctacataaactcagtagagtgaaagtttctgtggaaaaaaacaagtcatatgaagcagagctggtagaaacgaacagtataattgaaagtatggatgtgcatacatgattttcgcgtagcgagacatgagagaaccaagaatttgagta

SEQ ID NO: 166 - DNA, 529 bp, Arabidopsis thaliana
ctagtttttacttaatgatagtatttgtttcctttccttggtgttttgtgcgtattgtctatcatgagttctcattcagcacggaaattttgtatctggagctgatcattttatgtggttgatgcagtaccttgtgacacattttagcgactttcaactggcatgtattgggagttttctcctccatgaaagcgtgtttttcttatctggactccctttcatttttcttgaaaggcaaggctttctcagcaagtacaaaattcaggtttattctcttcttattatttatcttttacaagtgtcttctatgtatgcaatcatagctttgtgtgatggtttgaatatgatagtctagaggttgatcccaagaattcagtctcacgtgaaaagtgttttcttatgacaggctgatgtccatttcagcgattactaataattgtgaatatgacccttttctatgcttctcttaccctttatggtcacacatacttttcttttgccctatgcagcaaaaaatacacacctgcag

SEQ ID NO: 167 - DNA, 573 bp, Arabidopsis thaliana columbia
tgaattatagtttagtgagaaaaaaaagagttaatgcgagctttgaatgtgtcaatcgaatcttatctaccactgattaaagaagttgaagaaattctggtgagagacgaagatgtgtgtgagtgtgagctcgaagccctatccgacgaaatgtatccgacgagtttcgatcctaaatctgttcttgaagaatctgaatatccccaattgtcgtgaatctcaggaacatcttcgtctctgttcaggtacctgagcaccattctcatcagcggccgagattccggtttgtggtgacaacagagcaaaccgacggcgagactagccttgcctctccttcgtcgtaaccagatccgagtctcgggtcgatcgcactgaggatctcaccgctcgcttgtagctccataacccagtcggctataaagaaggtcccagagtccgtcggtttctcccggagacgatctctaacagcaaaacgccaaacgcgaaaacgtcggaagctgatgaggagttccgttgcgggctagctccgggccatataccaatcgtgccgcgactacggtggtcacgattgag

SEQ ID NO: 168 - DNA, 517 bp, Arabidopsis thaliana columbia
ctgatttgattttcactgtctttctaagtttcgaaacggtggattttgtccgtacgtggttttgattctcgtagatgtcgaagctctgacgtaagattagagtttcgatttctaggtttcttataactatggcggtggaatatgaatgctgcgggaccagcttcttcatacacatcgctgtgatagtgttactagtcttgttcgctggactaatgtctggtcttactttgggtcttatgtctatgagtctcgttgatcttgaggttcttgctaaatccggtactctcagagatcgtatccatgctggtacttatgattctcaagagattttgattgttgtatatgctttatttttggaatcttaaaggaatcagaatctttagcatgtgttagtttgggtttagtgcttctcgaagatggttcacaagtgggctctggctttgatgcagcatagattttaccagtcgtgaaaaatcagcatctatggctttgtacatcactgatatgtgatgcagct

SEQ ID NO: 169 - DNA, 717 bp, Arabidopsis thaliana
aatgtgtagacagtcctcgaccatatcagtttattggcatcttccagaatccgcaacacaaaacttcttgtgacttcatgactctgatctccagagggcactggccatagtatgcctaatttacctttgcaacttatgagacttgaacaccaaattatattttccacaactaaaaacttgaacttttcagacctaacatcaaagcaaactaccatataaggttctcgagtttaatttccaatgcacttagctaaatagtacaaaactccatcaatgcatatctcatcacgaaaaggcctatggggtagcgagcattggatcattctccagcaaacttcttccgttcctaatgttgaaactcgacatgcaaaatcctcggacgccaacaataccttgggcacgcacactttctttgcaagattctcagcatctacggggagaatgtcccaaagccccttttctacaccttgaatagtttgtcgataggatcatacccaaaataggttctctcaatcctcttactagaagctctaggtaagggtatgcacactctcctgtgctagggttatagacactagctttgctacaaagaaacccacgtacaggggcatgaatctcattgtcataggaaggaacgatacctttggaaaaagacatatgatagtagggaacaaaggagatgaactcgggtctgaatgtagatgctgagatatggag

SEQ ID NO: 170 - DNA, 544 bp, Arabidopsis thaliana
  unsure (1)..(544): unsure at all n locations
atcccgggcttgaatcagttaaaaggcccattgagaaccatcagaatccccgaaatctcgttcttctccaattgttttttttttcgtaaaaaggcttacgatttaaattaaataaaagaaaagaatacaggcccagcccaatagcattttactgacccaaattgttgagattagcgaaatagaaaaaagcatttgtcggagaagaagaactgtgttggtcggtgactgccagaggatcaagtcgtcggtgaagatgaggaagaagaagaagaagattgtgttgagtagcacatctgaagctgaaaaggttagtataccatatctcccagacgatctactcttgaattgcttagcacgcatctctagattgtactacccaactctctcgttagtctccaagagattccgctctcttctcgcttccacagagctctacgagacccgacggcttttaggtactccgagagttgtctctatttctttatgactgagaggcgcaacgaccatgaggttntatgggaagttgagtggtgtcatgttgtgc

SEQ ID NO: 171 - DNA, 398 bp, Arabidopsis thaliana columbia
gttatagtatggtactatggtgttggtttggttttagtttcttaatcggttctgttttcggaactatattgaatttaatgtggtttcgattaagattggagcggataattttaccagtattaaacatcgttaaaagacacattcctcaaaagcaagctgacctcaacaacatttgatgattctgcgatgtcaccatttggtatctgatgctcagattcatagtaggatttgtcctccttctccaaaccacctctttggccaacgtagccatcgtcttgcacaacaccatcctccattttttgggtcgaactagcccgaaaatcagcattttttcttaaccggcacaccactaatgcatcctgtgaaatccaaatttcaatatatctcaaaacattaaa

SEQ ID NO: 172 - DNA, 1011 bp, Arabidopsis thaliana
cattccacattcattttcacaaactgcgacaaattagaccgtactgcaaaggatgtaatcacaacctatgctcaaaggaaatgtcaaatgctatcagatgcactaaaacgctggaatgagtgatctctctcactatctcctcattcatttatcgctctcaagtaaccatatgaacctttaacttttgtatgactttttctgcagggttttgttccagaggctttgttcagcacttgcttccctgggtgtgaagtaccttcatggttttgtcatgaagcagttggatccgtcttaaagctcaacctgctcccacattggaacgaaaataggtttgtcggaatagctttatgtgctgttgtgggatccttaccaaattgccaagaacaaaccaactcttgttcagtgacatgcacgtttaacatagcaagtaaagattccaagaaaggggatccttacaaaatctcctttgatcgactggttgggcgttggaacaaacatggcaacaaactagacaagaaaggcaacaaactaaagaagacggaatcagatcatgtctttatctgctataccagatgctcaaacagcataaaatgtcttcaagaccagcactcaggtacatgtactccaaccgaagctttccttgaatttggtgtgacagataaggaatctcgactcgaggtgctcaagtgtgggttaagattggtatatgcatctgatgaaccccagaagacaaactcagatatggatctttcattatcatcatctgattcaactccgacaaggaacggcagttccaacactactacatctagtggaagtgtatctaccaataccattagagaagaagattccaatatcttacatgaagcacaatctcaaaatgggagaggactttgacatccagaattaatcaactgagtcgtcgtcttttcactctcttttgtgtttggctatgtcttataaaacctccataatgtatttctctatgtacaacacgatttagatttgcga

SEQ ID NO: 173 - DNA, 575 bp, Arabidopsis thaliana
tagcttctcaggcggttttgttatatgtctttgagaatatacttaagctgttgcatccgtttatgccgtttgtaaccgaggatctatggcaggtaacatgctctcagttttgctatctgtgtatttcatttttacttaaattggcccttaaccatttacttaggccaactgcactgggcatgattttccttataccttagagtttttgtagtggccgtttttttaccaaagcatgcttaagctgttatctttgagtttttttttggtagtttagcctcttttgaggatgaaataaaaggaccgaaaacttagttatatatggttgatactttggtactgctaccaaaaaatgatttcagcttcataaaactgtaattatgaatgcatttataattgcaggcacttccctacaggaaagaagcgctcattgtgtctccatggccacaaaattcacttccaaggaatgttgaatcaataaaaagatttgagaatttacaagctctggtcagtatgaatttttaccttaatatattctgtaacctcggacagaaccatacttaaaggaattaatattt

SEQ ID NO: 174 - DNA, 465 bp, Arabidopsis thaliana columbia
ggataagtcttcaacaagaaattagttgagggaaacattcttctctgtggatattcattcaactttgttgttggtacagcttccatcaagaaagttgttgcaaccgctaagcatcttggtgctgctggttttgttctagttgttgaaaatgtatctccgggaaccaaattcgatccagttccttctgccattccaggaatcctgattacagatgtgtccaagtcaatggtaatgagagttttgatgctttcacttactcttagcctagtttctctatctgaaatgctgtcttttgcatctttaggatttgatcgattactacaacgccagtacatcaagggactggacaggacgagtaaaaagctttaaagccgagggaagcatcggagatggcttagcacccgttcttcacaaatcagcacctcaagtggcattgttctcagctagaggacccaacgaccaaga

SEQ ID NO: 175 - DNA, 525 bp, Arabidopsis thaliana columbia
gaggatcccctgaaacttttatagttaagtctattaataaaatggtaatgaagtgaaggaaggatttgatgatttgtttgtcgtacagacaattaataaatgctctctcgcttttagtttgaagtactgtaccctctctactctactttctcactcacactctcacagtgtctcggtttcaacgctatcgtcgtctccaaacactcttcgatctcgacaatggccaagcctcacgatcgtcgccgttcttccggcagaactaatttagcttcttgcgccgtcgccaccgtcttcttactcatcttactcgttgttctccttgtcgtttacttcacagtcttcaaaccaaaagaccccaagatctccgttaacgccgtccgactcccctcattcgccgtctcaaacaataccgctaacttctccttctctcagtacgtcgccgttagaaaccctaaccgtgccgttttctctcattacgacagctctattcagcttctttattcgggtaatcaagtggggtttatg

SEQ ID NO: 176 - DNA, 581 bp, Arabidopsis thaliana columbia
caagtcactgtatcgaggaaacagaaaactagatgagagaaaattttatgttacataaccaacatagaaattcttgtgtttcagggatttatttacaagtggaagaagcttgattcataccacattatattgacatatgaatctttccagaacagagttgacacctaaaatgacttaatattcttctaacaatatatgcttagtttcataaagactaagaagaaaagtaaatcatgatcactggtggggaataggatggtatatccactcaccgtagtcactatgtgagaagactttcaaacatgtcttgctagataagtcccatagacgaacagtcttatccatggaagaggatagcaggtgctggaaacaaaaaaatgaagtgcaaagtcttgagaattcaagattttatctgattaagaaagacgaagcagattctcacataacaaacttagaaaacctaaacttagcactagtaagatgagcaaggttcgcatgaaaatttttgctccacaaaatacagttaccagtatgaaaacaaacttcatgctttaaataagaatttgtagcgaaatgagatg

SEQ ID NO: 177 - DNA, 528 bp, Arabidopsis thaliana columbia
tttagcagttaacgaaccagttcaaccaccagcaccaaccattactgctgaagctcaatcaccaaatctgtcgacttttggtcaaaacgttttgatgacagcaccgaatccacaagctcaatcatcagatcttcctgatggaacacaatggcgatacagtgagtttctaaatgctgtgaagaaaggtaaagttgagagagtgaagtttagtaaagatggttctgttcttcagttaacagctgttgataatcgtcgtgctactgttattgttcctaatgatcctgatttgattgatatcttggcgatgaatggtgttgatatatctgcttctgaaggagaaggtggaaatgggttgtttgatttcattggtaatttgcttaggcctgtgtctgcgagtggagggttgtcatacgccttagacgaggtcacgaggtcctgcaggtccttgaagcatagcacgacctatggatttcggaagatcgaaatcgaagtttcaggaagtgcctgaaaccggtgtgacatttggtg

SEQ ID NO: 178 - DNA, 1019 bp, Arabidopsis thaliana
tcaaatctccaaagttaaacatgtattcttaacaataaatcatacattaatccactactgtaaccccttcacaatctgccctagcacaaaaactgtcatcatcagattgatttcctgaatcatcaattggttggactgaaaatggtgcactattaaactcctcttcagtctctaactcatgataacctcttggtggcgctctcattaccacataccactgactcaaatcatcctctctagagtaaaacacttgtctcgcttgggatggcataatgtaaggatcttttacaaatgctgcttggctcaagtggaggttcacaagcgtgaatccttcttcttctctcacaccatgacctttatgggcccaattgcacttgaaaataggtatttggaacatatggtagtcaagcaataaaatctcctttatgactccataatatgtaactatgtcagcttggtgcctactatcacgtgcacttgatctacgcatactaaaggcttcatatgtgactccactattctgagtctttcgctttacatcatcggtgtggaacctatgcccatttacgataaaccccttgtaagtctgagcaattagtcttggtccaagtgctatccgccttagcttcattgaatgatcctttgagtttgaagggatctaataaaaacagacaatactcaatacatcattacagagaaacaatatcatatttgtaagtgatgaactcataccttatttttaatccactttgcaaatcttttgttgtgtaacttgaacactagagtttcgtttcttgcacaactatcatcaaattcttgtaattcttccaaatgcatactgaaaaaagacaaaacttaatgtaaagatcatactcgatgaataaagatatatacaggagattcagtgctcttactcaatataaggttcagtcacagccatgttcattagaacatatcgatgtgttatctctctttctttctctattagtgtaacatttgtaccttatataatggacgac

SEQ ID NO: 179 - DNA, 546 bp, Arabidopsis thaliana columbia
tttcatctacaacttttgatttcttcataatcatcccaagctaaaataataaccctttctgtcataatgttcttttcttcaaaacaggttttgtttcgaccaaatgagttttctttttaaccccaaatctcaaacctttctcctttttcacacactttatgttttgtttttctttttgttcctttcttgtgtgtttgttctcttttctgggttttttctttgttgttgttaattctcaagcatttcattaacacctagttcataaaacccaaatgatctcaaatcttggatctgcttcatgtaaccgacaaaaaatcaagatgattatgatggtttggaatagttcacttatggtctctggttcttaatatgtgcagcttcggcgttaaacatcatgttcagctccatgaattctccaggacagctctcacaatggacagcatcaggaggtgatccttgtggccaaaactggaaaggcataacttgctctggctctcgtagttcacaaatgtaatcacttgttaatcataattcaatatcactttg

SEQ ID NO: 180 - DNA, 450 bp, Arabidopsis thaliana columbia
caaaagaaagaaaataagatagccaagaaaacagtagtggccagaacattcttcatcaatctctggctatcatctttcttgattttgaacgggttcgggaatctccagctggagtcggttccggcaacgttcttgatcctgaacaaagcgtaacaattcattgtttccgttgattctttttttataccacattttgacctcttactcgatgactcgcttgatattgtttcttgatgagttggattagttggtcgaaacgcttggctagctttcaacgcttcttcgtcgagctttattatatcatcgttcagaatctcggcgtaacaatcatcatcggtatcggcctgatcctgcatcgcaatagaaagagatcaacttcagttacaaactctaaactctaccagtacaagaaaactaaggatgttcagcccaagtgttggtttagtctat

SEQ ID NO: 181 - DNA, 988 bp, Arabidopsis thaliana
tttagcaacagatattaatgtgcaattaaaatctggcacaaatagcacatctggaagaacatatgcattatgtaaggcaagcgttccacgttttgtggcacgagaggcagtcccgtcaggcttagtgacaggcgaaggaatgatatcttccacatttgtgagtaatgtgatatcaccggtcatatggtgtgaagcacctgtgtcaatgataacgtaagtagtaaatgttttaccagacaacttttgtgaagatgtggctggattttgagcttgaagtagagagatcaattgattaatctggtccgcatttgaaggagttgatgtaggaggtggatgtgtactagcagcgttacgacgtcctttaccacgagaaccagaagatgaagaacgtccgccacgattgttgttaccacgaccattgttcccacgaccggaagtgcctcgtccagcagagccattagaaccattctgttctaaccaccagtctggataaccatgaaccaaaaaacactctgtaatgtcatgtccttgacgatggtagtgagtacaagtcaaagaggagcgatcacgaaatcgaggtgcagagactgccgcaacttgaggtgtaggcggaacaggtgtggcttgaactgtaaacccaacagcctctgttttgatgtcatcttttatgcgagaagcattgagattctgttcttcatgaatcacacgcgagtacacttgattaagagccggtagaggatcttgaactgtaattgtagagcgaataggcctgaagcgttcatccaaattgagcaggaattgatgaaccttgtcgtcttcacgttctttggcgatgtcgggagcagcttcacacgtgcaagtccgactggtcttgtaattttgcagttctcccaaagcttggttagtccccgtaataacaagaacagattgccatcttgcttcacgccaaattcatcttcacaattgtttcgacaccgtttcattggag

SEQ ID NO: 182 - DNA, 570 bp, Arabidopsis thaliana columbia
tgcttttcgatttttttttgtcggaattgttgtttgtgtaatattctcgaaagctcggtctcaacaatgggaactccagaatttccagatctgggtaaacactgctccgtcgattattgcaaacagatcgatttcttgcccttcacatgcgatcgctgccttcaggtctccctttctccttctccgttttctttcgataccattccaatgccatgatttttctgtatagagaatcatcgtggcttcttctaagtctctggtcaattatatgatttatacatgagttcgtctctttttatgttcaaattcagtagttgatttgaatctagactaatcgtcatttcgaaagaattagatgctaaatgattgaaaagattcatttgttttatctgaatccggagaggaagcttatatcaaatcttttgaactttttttttgaaaatttattgaaggtgtattgtctggatcatcgtagctatatgaaacacgattgtccaaaaggaaacagaggagatgtcactgtggttatttgccattatgtgctaaggagtagattaaccctgacgaaga

SEQ ID NO: 183 - DNA, 528 bp, Arabidopsis thaliana columbia
agatggtccatacattgaacttgttacatctccaaacaaccctgatgggttcttgagagaatcagtagtgaacagtactgaaggtatattgatccatgatttggcttactattggccacagtatacaccgataacatcaccagctgatcacgatgttatgctcttcactgcttcaaagagcactggccatgcagggatacggattgggtaagtacaatcttttgcttttgtgggagcaaaacagagaacaagtctcttaaacgttacattcttgttcatttaatttgcagatgggctttggtgaaagacagagagacggctaggaaaatgatagagtacattgaactcaacacgattggggtttcaaaggactcacagcttagagtagccaaggttcttaaggctgtgtcagacagttgtgggaatgtaacgggcaaatctttgtttgaccatagttatgatgctatgtatgcgaggtgaaactattggaacaagcagcaaaggatactaaaagtttcagtgttcatg

SEQ ID NO: 184 - DNA, 543 bp, Arabidopsis thaliana columbia
atatccccgttacggtttgctaagtatctgacccacccatttgttggacgcctccaattagggatatgacttcgaattgttgtaccatggctgttgatgtgtgatggtgtgacagcttcattccactcctgaagatccatttgagcaagctgtaacgtagtctcccatggaacatgtcgtcgctgaaaatacaagatatttctgctattccaaagtctccaaagaatccataaaggtagttgatggaaccgctgtgtttgtgttgtgtttgccaattggaaaatgccttgcatcttgtcttctaacgtggaatttgaatccgtaatgatgttgcttggaagaaagagatttatctgaggaaaaaatcattcatataaatcattcatcgtgcaaattggaataaaattactgtacataagtttgttcttagaatcttaataacacaaaagacaagaaaaatggatgattcaaaatgtaagttttaaaagctaaagatgattcgtcaacgttaagctacacatataatttttttataaataatat

SEQ ID NO: 185 - DNA, 520 bp, Arabidopsis thaliana columbia
gtcttctgtatcctctgcgtgcataaaatctatattattttatttaaaaagttagaaattagtagggtgaaatcctaagatggaagccttttggtgcaaaaactctcggaaacaccattaattcatcccctcctatttcctcccatctgccattataataatacatcaaaaaggattttagtattaacacaaacttctcaaatcaaacaacaataacttcaaacaaaacaaatacattagatcatcaccatgaacacacctgtatctcgtaacaaagtaatggagaaagctcgagatctcgacaatccctagttccttaccaggacaaagccttgtcccacctccaaacacaaagcatgagttttgtgactccaagctcttcttctgcattaaaaatttgataaaaccctcattttcattcaaaagtttgcactcaaagaaaaacaaagcaaacgataactacataatagtctttccattttaaattaagtttcgtttataaatttatatatatacaatg

SEQ ID NO: 186 - DNA, 578 bp, Arabidopsis thaliana
ccatggtcatcatcagggaccaatacttcaatattatcatccaacggctctgtataacctgccaacaacataacattcaagttcaagatctgcttcataactcacttttctaaaagtccatgacttcaacagtaatctaaattccgaaatcctctctattatcaagctcaaataaacatttctataaatatcaagaaaggttcaaaatttaccagttttgggattatagagagaccagaggctctgcttaaaggcaaggttagctagaaatattcggacccaaacccgaatttcagactttgaattcttcttcttagaatgcagaatagagcctccaattccagatactagaagcaccggatcacgatccgccacctcgccggcgttttcatcgtcgttggttccccagcacggacacggaatccagcccatcaaagcgggtcaggtttcgggtccgaaatattcaattcggatctttctacagagttcaggagaaaatggtaagtgggacttatcagaggtacattagtcaacaatgaggatttctgagaatatgccatctgtgactgtgactgtct

SEQ ID NO: 187 - DNA, 562 bp, Arabidopsis thaliana columbia
caagaaataaccatcactgcctgttgcattccatatcctccaaaatggctgataacacaagttaataagaaatacacaagaatatgaaatccgctgtttatcttgaaaatcaaaggcctagtatggagagtttaggcaagcaaaacatgattcaagtagaagcaaaccttgatgagccgatttttgtggtagacattaaagccttgaacatcaacatgatgttttgcgtccttcacaaatccaataattacaatggcagacatctgataaaagaaagttgtgcacaataccagctttatattatagctagaagatcatggtctgtaaataaaaaaagaactataagaaggcttgtataaagaaaagttattaaaacttacatttgtcacaactccatatgattcagactgtggtcgatatgtgatctgctcagtctgcatcatgtcattcactacgctgtggtgctcgacatctattccccgtagaatgatacgaaacccaggtggaattcttaggtagaggatctgatcataactctgggaacatgtcgaaaggatgtgag

SEQ ID NO: 188 - DNA, 940 bp, Arabidopsis thaliana columbia
cttattctttcccaactgctgttaaagaagtacatatatcacttttatcatccttgatctctctctttcaatgcatgtgcatgtgcatcagtatctgtttcacaactagttttctgattattgcagtttaaatggaggaatggttggttttattcactctcagagaaggcgattgcggaagggcaaccggatccgtgtcccctccataccgaatggctgaaagagcttaaagtgatatagagccagtctttctaaattgtgagtatctggattaagtatcattcttacatattttaagtagatgatctgaaactagtgtcaactgtgtacacgcctgagaagtgaaaaaaagatgtaattttttaataaagaaagagaatcagttcacgctttgtaaaatgtccagacttttatatgtgtaaacttgtgcattttcaagaatcaaaacttttctgcttctagactcccatcaattagggaagactagaatcttcaataataaacaaattatgacagatacctatgtagactctttggaatcatcaatagttgacaaagtaagaggcaggatcgtccacgcttgtttgaattttcagcctttgcaggcaaggtggtccaagtaggcaactgtggtttcttcggttagttactatataacacataattctatattagctttagcgttagcttcacataacataactcagttttctacagagatacatatacagagcataatgagcagtgagaagttttccatatataacttgctctctcttctggttctgctgatccatggtttgattgcagcatctgctcaagatctcactgtcttcagtgcttgtcaaagccattgcgggggaatagcgattccctatccctttggaattggtaaagattgctatctcaacaacaatgagtggtatgaagttatctgtaa

SEQ ID NO: 189 - DNA, 350 bp, Arabidopsis thaliana columbia
tcatcgttcttgcttcttgctaaaggccttgccttgtgcttcctcgtgctatctctcttacctcggtgatttgttcgtaagagaagtatcgtgatggggtactgagataaagaggaaagttagtctgttcgatggtattggcgatcggtctgctgcggcgaagaacgccaaaaccagtggtcttcccgacggcgggatcaacagtctgatcaataaatggagcgggaagccttgtgcacagagatgttgtgacattctgggggaaccgaggactctaccgtgtctggctgcagaaagaggagtttctcgaaacgttgaacgagaatcggagcctaatgctggttggtgaa

SEQ ID NO: 190 - DNA, 513 bp, Arabidopsis thaliana columbia
caaacaaaaacaaccttattcacatcattgctacagatagatacattcacttagaccagcttaggttacctcgtaacggtgcctatgcctttcgtctacataagaaacttggccgtatctggtaaatgcccggagaaaaaacaacttgctgtctttaaaaccgtgaactgaaggattctcaatgcaatttttaaacttacagttttgaagtgagagagtctcggttgtgtaaatgtgttcttcgggatccaagtctcattgtgcttcccatatgtgttcttgagccctgtgttaatatatcaccaagagtgagagaatgaacggactccattgataggtttctgaatacatacatgtttggaatacatacttctggcataaatataacaacagggtcagatgtctgagcatcgaactcagtgctatttgctctttccaaacccaaaacctgtaaccaatgtcatagaataagaagaagaagaacgttaccaaagtacagagcaagttgaagtt

SEQ ID NO: 191 - DNA, 380 bp, Arabidopsis thaliana columbia
cgagacggtccaaccgacctgaaccgggataagccttgttcataaaactagtatgcagagcagagcctttctggggaccggactttgtatcaccacagtacggcaaatcaacaaatccacaccgttttgatgaaggccgctcgtaaaataactgtggtcgagacttcggggcactagcggacctagccttagccctagaggactctgtacaagccatgtagcttggatggtcaccatcacagcagctttttgcgcaatcgctcggtgctatagaactagcggtgaaagcactgcgtttgcttctagaagtagctgagtataactgaggactgttctctgcagttgcaaactggcatgtaatctcttcatgcgacgaggac

SEQ ID NO: 192 - DNA, 637 bp, Arabidopsis thaliana columbia
ggtcatgatctgatgagttaatgagtcttccttttctttgtcttcggtttccatcatcgtcctcactagtcgacatatctgcatagagatttagtcagagaacatggtttgatagagtaagtggacacaccacatatcaaaaacactaaaatatccctcgtttgataactattcttcacattaggtctatttgcactacctgaatccacaccggtttgaacatcaacagacattatgtattcgatactcctttcgacagtctttagcttcttctccatttcaccaaacttgttctcccacttttcaatcacttccttcttctccaatgcttctttttgcttagtcaccagatcttcaacagtgaatccatgagttttctctagcaactcgagcgttttaattaggctctcatgctctatcaccagactctcatacttgtctttcaaaatcatgtgttcagcaaatgaaacattttcacacgatttgttgtacttgttcaccaattggtccaaacgactagacattgttgtctttaatcaattcaagattaacctgattaacaaaaaaaattggaaatgtgtccttaaaaagagaaactttaaaatctacaaaaccctaaaactcagatctttattga

SEQ ID NO: 193 - DNA, 518 bp, Arabidopsis thaliana columbia
tattaaacaagtacaaactaaaatccaaagtcaaaaccattaatccatcgtcatctcaagctcgtgcacccacgtctatctataaataagcgaagagcgttgatcaaagaagtatttcgataatataagtttcatttcattagtcagcgccatccgtgtgtcccaccttctcatctttcacacatagacacaaaatcatatatacttaataatagatactgatatgtatattctctagcttatatctattgtcgtgtatatatatttgcacacacatagttcaattcaagccttacatcttctagcaaatggcttctcttttcttaacaattatttcacttctctttgcagctttctcttcttctgttgtagaggctgcttacagtaatggttataccattcccaaactattaccaaaccctatcgattcttgctggcgaagaaacccttattgggcgtctaaccgtcgtgcactagccgattgcgcggtagggtttggaaaatctgcggttgggggg

SEQ ID NO: 194 - DNA, 519 bp, Arabidopsis thaliana columbia
ccagtgtgctctaaagatggtttttaactgttgcttccttgtgaatagcgatgcaagaacatactgaatcatacaaacacattaaacaagtctccaactccatttgcgccatccctcaccgcgcgctacatggatatttcacaaagggaggtcgtatggatctgttgtaccgggtaaaaacgctttgggccgcgctgcgcgtaatcattacacctggcctgccatcgatatcaccctccccggcaatcgccattttcatctgattggcagtattcatatgggtagccacgatatggctcccctgcccacccgtttgctcaaaaagctcaaaaacgccgatgcgctgatcgtcgaggcggatgtttcaccagcgataggccttttgctaatttgcctgcctgcgaggcgctggaagagcgcattagcgaggagcaactccaaaacctgcagcacattagccaggagatgggcatttctcctcactcttttctcccaaccgctgtggaaatccgatggttc

SEQ ID NO: 195 - DNA, 549 bp, Arabidopsis thaliana columbia
gctgcgtaataatagctgtcagcaggagaaagagtgcttagcttcggggcaaggtcccttgttgtcacatggtacttcgtccttctcgtgttaactcagagttacacagccagtttggcgtcgcttttgacatcacaacaactaaatccaaccataaccagcatgagtagcttgcttcatagaggagaaacagtgggttatcagagaacatccttcatccttggaaagcttaacgaaacaggtttcccacaatctagccttgtgccctttgataccgcagaagaatgcgatgagcttctgaaaaaaggaccaaaaaatggtggtgtggctgcagctttcttgggaacaccttacgtgagactctttcttggacaatattgcaacacttataaaatggttgaagaacccttcaatgttgatggattcggctttgtgttccaatcggatcacctctggtggccgatgtttcaagggccatcttaaaagtagcagagtctccaaaggcagtggagctcgagcacgcttggttcaagaagaaagaacaaagtt

SEQ ID NO: 196 - DNA, 244 bp, Arabidopsis thaliana columbia
tcccgatgaccattgttgtcttgcagtactagattctccaacatgtaaagtatgagtatctctaactgatgcatagtatggatacgcagctctcaattcttcaggattcagctgtggttgagcaattcgaggaggcggtgtcacaggagcaggaaacgaagtctccgtcatctgcgattgaaaatttcagcttgaactaatgaacactgtctctgaaagcagctctttctctggctatgctgtg

SEQ ID NO: 197 - DNA, 415 bp, Arabidopsis thaliana columbia
atgctaaactctatgaagtgataacagaatgccattatatcctcaccaccgtacatatccttcaccagattgcatccttgaaatatctgtcttccatattttcactgctagatcatcactgcaaagttcagacaatccaaatgttaacagaccaggtaacagagatgaaatctcctatccgagactatgtggagcagattcaccaacctactagtgaccatcttgtcccctgcagcaatcaaagagatactccagacggtagaacaatgaccactgagtgaagattacaggcaacatatattactagacgcctaaaagcaacatctctaacacagtcgcatcaatgtaggatacttatcccatgtgagaagtacagcagagacaaatagaggatatacttgttaagtgcacttaa

SEQ ID NO: 198 - DNA, 529 bp, Arabidopsis thaliana columbia
tcaatgacccagccgctcaaactgcgtggtttccagaagtgggatgtgttctgtaatgccgtcaacaacatgatgaataaccctctattacctgcccacggtaaaggcgttctggttgccctacgtccggtaccgggtatccgcgttgaacaagccctgacgctgtgtcgccctaaccgtaccggcgatatcatgaccattggcggtaatcggctggtgctgtttctctcattctgtcggattaacgatctggataccgcgttgaatcatattttcccattgcctactggcgacattttctcaaaccgtatggtctggtttgaagatgatcaaatcagtgccgagctggtgcagatgcgcttgcttgccccagaacaatggggcatgccgctgcctttaacgcaaagttctaaaccggtcatcaatgccgagcacgatggtcgcactgcgacgaataccagaaccatgcgactgttagatgatgctgtggacgctcatcatgatgacgacagcgatacattgaaattat

SEQ ID NO: 199 - DNA, 863 bp, Arabidopsis thaliana
  unsure (1)..(863): unsure at all n locations
agttgttaaagttatcatgtgtcgtccttttctttttgtctatagttttatttaatggtccttaaaattcttgtgccagccacgtaagaatgtcggtccgaaaacgtaaacaacccttcaagaaaaccaagttaaacaacacatctanaatgaaatatattatcaaatctttcaaaccaccaaattattttcaaaatctcctcaaaagaaaaaaaaaaagaaaaaactagatatttattataaatttaataaagtacaaacaactcccgcacaacgtccaccacacacaccattaaaccaaatgcaaaaaaaaaaagttaagaaaactcaatagattgaaatctgttttattaattattgcgtagtcaaattaaatatagagaaagacaaaaatatcattaattaacctcaataatgcaacacgtaacaactatactcaacagtagcatcaccgttcttgagattaatccactttgtcctagcctccacatagcctctagcaaatcggaaaagcccacttcctccgacgatcggcatttctctgacttccgacaacgccgtgttcctgccaagaatcgtgatcgtgcttccgttatatttccctgtcttgaaagcaaagttcatcgccatcaggaaacccaactccttttgggccgctccggcgtaaaatccttgggcctgacccaacaccgtggagttcatcggaactttggccgtcaaagcgttgtcgatcatggagatggctcaaaataggaactgtttgtaaccggtggttgtacatgatggaggttgggttcggccgcttaagatatcgtccaatagactttgaaatgggtaagtttccctttttgtggagacaagaa

SEQ ID NO: 200 - DNA, 1000 bp, Arabidopsis thaliana columbia
ccccgctgattaccagaggaagattcaaagatctttcctttgattgatctgttgttgttgcctctgaatctttcaatgaatgagtcggagatcaaatgtaactcagcttcgagatcagtctcaggacactttatcttgacttttccggcccaatgagctcccggcgccggtaagaatttcataattagtctcggttggtccatctcataagtctctttatgatgcagaagcttcattatccttttaccatttacctcaacatccacgtacgcaccttatgagccattaaatgaggacaaattagatgttggaaacaagacgagatggttcggttttagagtaaaccggacgcatggtcaaagtaatggatggttctgttcgttattggacgaattattcaaaaattagacttcagttttgacttttgagatcatttggatgtagcaaaaacaatttgactgctacattaaaatgaaaaaaaaaaagacataccacgaaatttgggagtgaaatattgacaccatgtgacgtcgatattttcttgttcgtgagtcgcatgaagtgcggacaccggaggatgatgcattacctgaaaattgtatataatacctaaattgtttgacggatcactatctacaacccacaacactagtgaatacttaatactttcatgagttaaaaaaaatgtgtaaactgagctaaattttatattttcgtattgttttttttaaaaaaaaaaactcatgtgtatcaataaaatatctacatagattgtgaatttcagttgagcttttcctataaatttttttttgtttctttttataaaatgaaattattttacttgttcggtgaggacgttgatgtagccgttggagacgtgatgagtctcgccgagaatggggttgtacggagacatgccaacgaccacgggacggagtgtggagatgttccacgtcaccaccgatttgagccgttcgatgggaatgttacggcggctgca

SEQ ID NO: 201 - DNA, 1596 bp, Arabidopsis thaliana columbia
ttagaatttatgaaaaatgtcacagtatgtttcaaaacgcagtcttttcgaaaaatgtcacaatctacatcttattatacttttctcttttctcgcttgtgcagtccgaggacatgagtgtacatgtcaccagtgtggggaaggtatgctcttgtgactctcccttgcagcctctattctttttctctcactttaatatttttacttgtgcttttgaagcatggagatgagctgcattggccttgtacatggaacgggattaaacggccttgctatctatttgcaagaaagttccatcctgatactctcgacacattggtcaacctcttcccaaactacacaaacacagctgtctgagagaggattcttgaaccaaacacacacattcttggacctaattgtgtccaaatatgtctcagagatggatattttagatactgtaaattttctgaagaaactgaaattattcttggattttgatgtttcttgatgaaactaaaagcctggttatatgcaattagagcagaaatttttggttataagagtttcatttttgtgatttccctgttggtttggtcgttattaattggtttatgttacatggaattgtaataacttaagctatcatcaacaaagagtgttgaaatcttgaaagtggtttatttctctgtgatgacgagtggagcccgaggaaccgtgggctgtagcggtgagcagtgccagtctttaccgtctttgactactgagaaatgtttgggaacccatgactcaccagaagcctctctctgtttcagagcctctctctgcttctcctccacaagtatcttagcttctcttgctctttcccaatctttcttcagtattccttcacttacttcactccacactattgtcgactcgctctccattacctcctgcagattcttgacagttggaggtttgagtcctgtgatattctcattggcattgtagataacctcgagctcaccagtctttatatttttcgccattaccgttctgaaacatatttatgggaggcgtatcacatcattcaaagctaatgatggtttttaagagctgtaataacgactatgttttttacctgtcccaatggccaaaaatgttgtagagctgattaccagaggaagattcaaagatctttccttttattgatctgttgttgttgcctctgaatctttcaatgaatgaatcggagatcaaatgtaactcagcttcgagatcagtctccggacactttattttcacttttccggcccagtaagctcccggcgccggtaagaatctcattattagtctcggttggtccatctcataagtctctatatgattcagaagcttcattacccttttaccctttacctcaacgtccacgtgagtaccttatggaccattaaatgagtacatgcagaaattagatatgtttgaactttgaacaaagacgagatgcttcggtttgaaagtgtaaccggatgcatattcgaattggtgttcgttcttggacggattactcacaactagacttggttttgaggtttgacacaacaacaatagacttggtttgagataattgggatg

SEQ ID NO: 202 - DNA, 908 bp, Arabidopsis thaliana
gtcgtccttttgattttcctcgtatatccaagcccctttctttctgttgcattggcacaaatcctcctcctactatggctggtctacaacgtcgccgtcgtcaatgtcctttgtttgcagagatgggaccagtttatatatttaaggaaccgattggtcctgagagaatggcgcgtttggcgtctagaggtggagatgttttgccttgttttggcaatggggcaggccttccttggctagctacaaatgactatgtacgtaataaggcagaagaaagtagtattttggatgcagatattggaggatatacccacctgctttaccacccttgtctgctaagtgggagattttgtccagatgcttcactttctggagcagcaggtgcgtatatttatactccttttttcttatcaaatgctctttaaaagtgaaaacgtgcaattcccatgaatgttgatatgctatcagattgtcatggttgatttgttatgtactttgatttgcttattctctctatctgtggtcttcttttcccttcatgatttccttccgtcattttgtttctggtcgagaatcggaatcaatcatttccagttttgatatagtttgaactaatctttttgttttacttttttttttcttcgtcaaggcactctaaggcgaccagctgaggtccttggacaagtccatgttgcaacgagaatgaagccagtggagtctttctgggccttagcttatggaggacccatgtccctgcttcctttgaccgtaagcagtgtgcataaagatagcttggagccatgtcttggaaatcttccactgtctttgtccacagttacacttgctgcacctgtatttagaattatgtcagtcgctattcaacatcctgggaacaatgaagagttgtg

SEQ ID NO: 203 - DNA, 853 bp, Arabidopsis thaliana
ggatcccccatagatagtttaagtttgataaggtgtctaatgagtgtttttatgtttgtgttaatggtttctagtgaacgtatctcttagatagaagcttgagatattgcttcctagctctatgttatgatttctaccttttctagatagttgagatttaataaatttatcaattgacaaaaagattctgttttatgctatataatgatttttttttaaatgtgttttatggtttctaatgaaattctctatctccacttaacatatttgttttgtcatttgcttggaataagaacacggctcccgcaccaaaccccggagcagtcgatgcacaagcggtggctttgaaggttgtaggcgacaaagccgccttctatggatgcggtttctatggaaatcaagacacactcttggatcaagaaggacgtcatttcttcaaaggatgcttcattgaaggatcaatcgacttcatattcggtaacgggagatccctttacgaggtaatacaaaaatacaacaatgtcgtaatgtttcacatatacacttttacatgtaagttaacaattcaaaaccaattttgtttttgtaggattgcacacttcattccatagcaaaggaaaatacaatcgggtgtattacagcaaatggaaaggacacattgaaagaccgaacaggatttgtgttcgtgaattgcaagatcacgggaagtgcaagagtgtggcttggacgtgcatggagaccttatgcaagagttatcttctctaagacatacatgtctagagttgtttctcttgatgggtggaatgatatgggggatcctaagacacaacggttagtaaacaaaatcacaatg

SEQ ID NO: 204 - DNA, 442 bp, Arabidopsis thaliana columbia
tatatttagtcattttggctgagacataggagatgttagtcagtcaaaaacggagactaacaggtgtgcttggttatattttgctattttgcagataatttattttatgattttttctccgaagaaatagattttcattttctgaaaaacatttgcatgttagcaccttcataattgtgcttttcttagagaacagatcctttttttttaactcttcaacatcaacttgcaataacacaatggagatccatctgtcagaatcttgaccattaatgtatccggcaagaaaagcctctgcatgttcctgattcctactaacttgttggttggttgtcctgatccccaagttacgtgctagtacttgcgtggctgaaactaggctgtgatgttggttgacgctacaagaacatttagaaatcaggttattgatgaccatcaccca

SEQ ID NO: 205 - DNA, 799 bp, Arabidopsis thaliana
gagcctcaatctgtctttaccgttggaccttatgctaatgaaactcaaccagtcactcctccggtgttctctgcgtttataactgagccatctactgcaccgtatactccacctcctgaatcatcagtccatataactacaccttcttcacctgaagtgccctttgctcagttgcttacttcttcgttggatctaactcggagggatagtactagtgggatgaatcaaaagttttcgtcttcgcactatgagtttcggtctaatcaggtgtgtccggggagtcctggtggtggtaatctaatctctcccgggtcagtgatttcaaactctggtacatcttctccttaccctggtaaatcacccatggttgagtttcgaataggcgagcctccaaagttcttgggttttgagcactttacagctcgtaaatggggatcgaggttcggttctggatcgatcacacctgttgggcatggttcaggtttggcttcaggcgctctgacaccaaatggtccagagatagtatctggaaacttaacacccaacaataccacatggcctcttcaaaatcagatctctgaggtcgcttcactggcaaattcggatcatggctctgaagtcatggtagcagatcacagagtttcgtttgagttaacaggtgaagacgttgcacgttgtcttgcaagcaagctaaatcgatcacacgacagaatgaacaacaatgaccggatcgaaacagaggagagttcatcaacagacataagaagaaacatagagacaaggtcaggagacagagaga

SEQ ID NO: 206 - DNA, 944 bp, Arabidopsis thaliana
catatccatgattctagaactcttcctagttggcttcaaaaacatcactgtaacaactctatttaatcaatgaatttgttttgacgtaaaaaataaataaatatgattttaaagataattagtagtatttaagacgaaatgcgtgacgtttcatggaatcaaaacggcgcgtagtgcaacaagtatatggttaactgatacgccacgaaatagtcggggataactaattcaatcgttaccgaaccaattcaccggcgagagagaatgaatacgccgatgtcactctcggcggcgcgtggccgtatgctaccttttttagagaaggagaaatcagaagaagagtctgaaactctggaatcgagtctcttacagctaatcgacgacaatcgtcgatcatcgttacagctccgggaaaaaaccggtacgtaaatcgacccattcctcagctaattctgattcaaataatcgagaatgaaaaagtgagattcacagagacacaaaatggaaaacagagagatcgagaaaggaagcaatcaggcacgcggcgagaacggcggatctgctagtgaaggcggtgaacggaggagtagaggaatgtttcgttaacgagaaacggattgagtcggagattaggaatcttgccattacggtggcgaaattcggcaaacaaacggatcagtggcttgccgtcactcacgccgttaatagcgccgtaaaggtttctgatcatctctattttctacgagtcttcaaaatcacgtttcgtcttctttgttatgttcaatgatggatctgtgtgttgattttgttaggaaattggagattttgagaattggatgaagacgatggagtttgattgtaagaaaatcactgctgcaattcgaaagattcatgaagatcgacaataagagcaagttattgtgatgcattcacttgttggtgtt

SEQ ID NO: 207 - DNA, 307 bp, Arabidopsis thaliana columbia
catcagggtttgagtctctgccacacgttttccatctgaatctcagcaggaacttactgatcggcgttgttccgtttgattcaagtttcttaagacggttgggtaagaacttggatttgagcgggaacagaggattgtgtctgaatccggaggatgagtttagtgttgtcaagaccggggttgatgtatgcgggaagaacgttagtagtggtggaggtttatcggtgcattcatcgaagaagaaatctcaagcttctcggtattacagatcttgcttcttcgccaatgctctgtttccggttgctct

SEQ ID NO: 208 - DNA, 531 bp, Arabidopsis thaliana columbia
atccctggatcattagttttcattatgtgaagacaagatgtgccaataggattcttgtttaataaagggttcgatttcttccacaatggtaaagagcacaagccagattccttaagttttaagacaacactataaggacccaaaaaggagaccaaagacaaagacaaagaccaaactgataaaatgaagctgttcaggttggtaccgtcacagcaaactttaggaaaaagcatcactgagtaatagtacgaaaaagtttgattcaaccgaaattttcaggggatttctttcatcaattggctcggcttttgaaaacatcaagatccatctcggttggatcggttgcctgaagctcgacctgaattccgtctagttctctcttgaacctgtccttggagctcgcatagatcatcttgcttctcactcttgctgtgtccggagacctggcaaaaaaaaaacaagaagaaatgttaatgaaaagaatgtgaaccaagatagacaggttttagcagagatagtatagttagttag

SEQ ID NO: 209 - DNA, 445 bp, Arabidopsis thaliana columbia
gacctcattattggctgttgtaacatttgatggaagcgagactccctatgaaacagagatccacaagcatgtcacacagattgttactaatgaagctctaaaaaaggtaagtaactgaaggaaaaaagaacgcacttccgcaattatttgaacaatagtggaagacagaataacaagtgtatcgaccacactcccgcttgctacattcgatatacttgtccccttcttagtaattcttgcatccttcaaaacaatgcctgtatcacacagagacatattaagaaactataccaaaactgtacatgtccttgatctggacaagcctaactccataattgtccaaatcatagactgttataaactgtctgtttgagttgaaattaacagaacctaggaggattcaatagtaaaagatcccattcagatctctaataggtaacaaatt

SEQ ID NO: 210 - DNA, 596 bp, Arabidopsis thaliana columbia
ccaaccactcaaatgtttccaacacttcgatagagctagaaattgcaatgtaagtacctaaaaggaagaacttttatgaattgaagttaacactttttggggtattaaaaaaacttcatttaggacaacacaaccctcataattctcaaaacatttatacactaccaattatatctcgaagtgcaatgtaagtacctattaccccaacaaaaacactcatcactaccattccaaacaacattatagtctcacacccaattttcttgtagtttccaaagatcttcaagtaacataaacaaggcagaagtatagaaaccgtaacgctcaataatgctccaaccagcgacatcatataaccaaaaaagggaagtgtctcggcgatcacgacactacttatgatgaaaaatgtgcttatcaagagatgtaagtatgcctttttggagtactgtgaaggaaaccaatcttttatagtgttcacggttggtgtgatcatcagtgcgtatttggctaccgggtttacgagagttgtgtatattgccacttcgaactgcgcttatgaattggaagattcagtgttatttgtgataatcgttgtg

SEQ ID NO: 211 - DNA, 579 bp, Arabidopsis thaliana columbia
aagctcattatatgaatcatgatcatcaacacctattcgacatttgacagtgacagctgcattggtattggctgcaatgacagacatagcctcaccaacaaacttcgggtcaagcataagaagagcaccaaaacaacctcgtccacttacttttgggctaggacatccacagctacaaaacaaaccggcgtgtcaatatacgaaagcttactgggatggaaatggtaccaattttgttatgataactcaacggaaaggaaacctacttaaaattaatttcatcataggcgtaacgattagcaagtctggttgctttagcaaattttccaagtttcttccaccaatttgaagaacgatgggatgttggtctggagagaatgccaaaaagctgtcctgagcattacaagagtaaacacatgcatccattcgtcataaattcaaaatgtatctgcagggttaagcaaaaaaagaagaaaatgaaacccttatccatttaagtaccaggttatcttcttgatagacaatggtttcagcagctaacatttcagtgtagagccatgcgtgttttgttataagacg

SEQ ID NO: 212 - DNA, 556 bp, Arabidopsis thaliana columbia
  unsure (1)..(556): unsure at all n locations
ctnnnnnnnnnnnnnnnnnnnnnnnctaaaggtcgttttcacgcgcatcacccagccagtcgccgaccacggtcagggcatcttcttttggtgcgggcgcgggctccagcgtccagctgttatttcccagcggttttacctgcagtccgctgccgtccagcagttgttgcaggccgctctcgacgtcgtaatcgcctgtgcaggccgattgctctgcttgccgcgcgtcaggctggcgtcaaccgagagggtaaatccgctgtgtgcggcatactgattgagcgctttatcgagcgatcccggtgcgatattaacctgtgcagcaaaagcggaaaacgagagaccggcacggacaggctcaggcgaatggtgttaacaaaggtgttgttttacgaaaaacgcgtaacggcgtcataccttccccatcatcatttttgttgtgttcagctatgagtcgaacgagaagggtaaaaaggacaatcgaaataagaattattttccttacagtggtgaaatgtttatccagtacagcgtaatagactgaattttaacggga

SEQ ID NO: 213 - DNA, 496 bp, Arabidopsis thaliana columbia
tctgaagcttcgagatccagatgaagcagatagtaatttctcggatgatgtattgctttaagcagccgcttcactcgtttcccatctcctttcgttcccgttaccaaatacgcaaacctcggaatcgtcgattttgtggctaagtatcgatttggagctaaaccggaggatgcatctgatggttttcgagagcttagtgttaaaaccagaagatacaagaggaagacatcgaagattgaaatcgctggtcgtgaataagaacgaggagacgaaatgtgagatctatacatgattcgatttcaccggcacatttccgtctagatctgatgcgacggtggagagagcatgagagtatagccgggaagcagacgaaagtttggttttttaagtttgaaactataggttggtgaaaccaaaacgacagcgttctgatgggaagacctgtatgacttaataaccgtccgattagtataagatcttcatacaccgttagatg

SEQ ID NO: 214 - DNA, 780 bp, Arabidopsis thaliana
gatcccccggtagtgtataggggtaggaatatttaataaataaatagtacatacatatttgatgatcattatttacttgtttgttgtattcggctttaatatatgtaaatggaagcatccgttgaaaaagcttttatcacgctagtcataaacttggatcatatgttaataaccgttatagctaagtttgaaaacaacatacaatcagaaattatacagaatgagaaaacgagtctaatccaatggagcctgagcacagccaaaaggatactcaaggacttttctgacagattgagggtttgagtaatgaacacaactctccacataagccaatgcactgtcataagatctgaaaaaacaaaaactaaaatgttagaagagagccagagactttgaatgcgaaatcaaatgaagagaagcaaaaaaggttaaaaccttgatcaaagtggatttttctacccttcttgagctttgttgagctcccatccttgattaaaattaaaactgctgtaaaggtccattgaacttttaagtactaaaaactaaactcgaagtcagatgggagtggacattatttgaaaatgagtagttgagagagaatcgagctttcgattgatccgggaacttgaaatcctatggatgaagacatggaactatcaatgatattcttggtttttaaaggcgaaaggcgaccgaaggagtaaagacccctctctatcgccttgcgcataagacgagcacctcggtcgcatttcagatgtgaagcgaacgctatcagga

SEQ ID NO: 215 - DNA, 575 bp, Arabidopsis thaliana columbia
tacgaatccaaattataaagacacaaaatctccgcgcctattttcttcagatttattgattaataagctcataattccgaaacccagatcgagaagtaaggtaaagtaagaacttacagtgacaggggcatcaactctctgaacattactctcttcaacaagaatttccatggctttgaggcaaagagccttcacctccgattcgctcaatggttcgcatcgcttaagctgccctatttgccgatctaggtctgacatttttacctctcctctcctcttcttcctccttctattactcttcagccaccggaaacgatccttaatctgatgaataagaaggaatcaaccaaccctcgccaaaaagaatctgatattctccactgtcgaatgtattaagctcgtcgtcttcttcccaaggagagagaattagctcctctccgcaggaatgttttttcccccaaggtttttctttcctccttatggtttagattatttcaaaatcgcctacttcttttctgaaattcatattcgccagaatgtgttaagtcacataatgggccagaatatactttata

SEQ ID NO: 216 - DNA, 539 bp, Arabidopsis thaliana columbia
cgtcgactctatccccatcaaaattttgaccttcatttaacaaatcttcccaaaaaccttcaccataaatctcattgttctccttatggtacccttgttgttgatcttctacttcttcctcatcatttcctttttccacattcaagacttcttccctagcactggaattatctccaagtccttgaatgtgcatagcaagtttgtccaactccgacatctcgaattcagacatgtttccatatgtatattcctgactcataccaatcaatgctgaggatgaggctgcaacatcattcccataaccactttcatcaccataatcttccacatttctttttccttgatcgatcggtctttgtctcttcttgctgatcgcctcttcgatctctttcctcttttccttctgctctactagctgctgaataaaatctggattctgcattgcgcgggcaaggaagctcatcatttgtttttgttttgactcggtcttcttgagcttctcttcaatcaatgtgagatacattttggtgctttgttgt

SEQ ID NO: 217 - DNA, 772 bp, Arabidopsis thaliana
ctctctttccgtgatcttcgagataaacttgattgcgacatgacaatccgtgcatatccttatattcttagtgactctaattgtcgtgccaggttctgtgttgatgataccaaaggcaacagccaatctctcactgtgtccgaacaaaagctctctcttatgctcttcgtctacatcgtgaagcacgccgcttgtgtctgcaacatacccttctttctccatctgttccattacagctttaagaaactcgttgatcttgtccatactcggatgcgatctatctcctgaaacaaatccatgagtcttgtttttcatttcgatccaactacaagctggctttttccgcaatcctttcttcctcatacgcaatcttagtttcgccatttctttccatcttccattagacgcatacatattgcacatcaaaacataagctcccatgttttcagaatcgacagtgaatatcttctccgctaccttctcagccaactcaagattcttgtgaacgctgcaagaagacaataaggtagaccagacactaccagttggttcaacacacatctttgaaatgaaattgtatgcttcttccagcttccctgcacggcctagaagatccgctacagctgcataatgttctaactcctggtttaaaccgtaaaccttagtcatgctgttgaaatatccccatgcctcatctaccaaccccacatgactacaagccgttagtacagcaacaaatgccacttgattcggtttcactccttgtcgtttc

SEQ ID NO: 218 - DNA, 554 bp, Arabidopsis thaliana columbia
ccccaagaagctgaattaataaagaacagagcataggttaaatcaaaccatcttctttagctagtttttgtactagagaaacaacatacctgtaattcttgagatgtcgaagcttgcgataaaactcgatgaagacattcttaagccgttcttctattttcttgagattttcttttgtaaattttatatcttccttgttagatagcttgaggacgtttctaattgtggacagaggattttcttgatttttgtttaatctgatacggtcaagaacacttaatgcctctggtgcagtctctttcgttgaatctccaccgttggatacattttcctctactttgattcccatctcttcagctaatgtcttcccttctaagtcaaagacacaacaaagattcaagatttgtgccctttcagactaaaccagtaacaaaaaacaatctctgaaaactcactctgttccttagaatccaaggcattgatatcgactgatacagtttcagaacagctccaagaagtagaaggttgatctagtttgattctgtaagcaatca

SEQ ID NO: 219 - DNA, 613 bp, Arabidopsis thaliana
atcagattatactactattactaaaaaacaagatattacaaaacaaccaaggacaaagttacaggttacaacaaaggagagagctacaaaacccaaaattatgggcacaatacaaatacaagtatcaagtatcaaagtctgaaaccagagagagaaccattcataggtctcttgacttattaagaatccaatagcttttgaatcaatcttcattctcttctctttctctaggcacagcaccaaattctttgatcagaatctcagccaccaatggaaccaactccgtgacacgaacacctttcttatagatctctccgatatgcgagtcacttcctattcgtcccccgacgtacacgtcagcaccctcgactggctttccttcctcgcctcgtgttaagcatcccatgaatccgatatctgctacttggacttgtcgcaagtgttgggacacctgtccaatgcatccttatcggtcttggcacagatacaagtctctctacttcttctgtcacttttaaagctcttagcttagtctcgattatcgcttgtccgcagaaatggctaccggtacaagcaactaagcgtttcattaggatagatgggtcaggggaga

SEQ ID NO: 220 - DNA, 670 bp, Arabidopsis thaliana
tatttttcaaataaacattcaaaacagctttctaatttttcacctcagattgtgcgaataatatcagagctctttccttgtaggtttccgtgattttgtcgctttaacttcccttcttttcccactctcttctcacgcgcgcgtgcttcccctttctctctttcgactgtatcacacgctccataaactaataaacagacgcaccgagatcacgacacgtgtacacctacagctgtatcccaaaactttcaaaaccgcttgcgtggaagaagcggtgcatgactttctccaccgtctctaccggttaccggttattatccatcctcctctctatctctctctctgttataaataccttttttctcctctcttcagtttcctccaccttcttcttcttcttcttcttctctacaacaaacaaacaaaagatctgtttcaatggcggatcgtgttaaaggtccatggagtcaagaagaagatgagcagctacgaaggatggttgagaaatacggaccgaggaattggtctgcgattagcaaatcgattccaggtcgatctggtaaatcgtgtagattacgttggtgtaatcagttatctccggaggttgagcatcgtcctttctcgccggaggaagatgagactattgtaaccgcccgtgctcagtttggta

SEQ ID NO: 221 - DNA, 554 bp, Arabidopsis thaliana columbia
ccggcgctgctcgatagctagagcatcagatgtacctcctgaagattcagaataagtatctgatccgtcagcagactcatcagcatttccatttgccaactggggacttccgggtcccaaatcaatctcaattacgtcagatttattcaatgaattagaaactggcaggcgcaactgcttgttcaaccaatctcccattgatttcaatatggccactaagcatttcatggcttcaagtttcatagctgcctcctgtggtggcatcaatgttgtagctgtaccaggaggaaccccttgagccgttttaaggagaccattgaccatcctaaacatgatcatacagaggaaacataaattacgcaaagaacttccacctgaacgaaacttaaactttaaacagcgaacgatcaagggacataacatacctctcaaagatatttgatgaattgacatcgcaatcgtagttcaagaatatatcaactaggatttgtgaaccaaacaaagtttgtcaagaaaccgaagaacaatcatcttttgttgaaaattaggttgag

SEQ ID NO: 222 - DNA, 551 bp, Arabidopsis thaliana
tgtataagacaatggtgtctctggtaggttaaaaagccaactgtttttttttttgttttttgagttcttttgggacaatggctcatgagttatgttgtgtttgcaggaaggagagaatcagtggcctatatggctcaaaccgttactaaagcaagactttgttgcgtcatgcaattttcatggacacttacctataaccgaatgcacaatgtattgcttagactgtaccaatgactcgttttgttctctctgtctttctgaacacgagtatcatcgtaccattcaggtgtgtttcatctctgaatccaaagttctcgtattgcttaattcaggttttgaatgtcaagcagttgttggtttgctggagataaggctatcatgttatcataatgtgacacaggtcgatgagatacagacatacttagacatatcaagcattcagacatatgtgatcagtagctcacaggttttgttcttgagtgagaggcctcagtctaagcctggtacaggttttagtagtgcctggatggtctgtcatcgtggccttgcga

SEQ ID NO: 223 - DNA, 448 bp, Arabidopsis thaliana columbia
atcaataagcttcatctggacacgttcctcacgccaaacctcagccatctgcagcattcttctttcatcgtctacttcctctctgagattcatggattcgctcttcaatgcttcaatctcagctttatcttcttctatttcctttgccagttcatcacaaacttcttcgatcaattctcttgccttcctttcctgttggtaatcatgcatgtaacgctttactgctaactttgaatctgcaagctcattgactaattttgaattgacgatttctaatctctgacgagtcttcttttcctggttcatgtcagctttcatgtcatcaataattgctcggaccttctcatgctctctgctccgccaagctgccctctcctcgctaactttcttcaggaactgctcaagcttctttttctgagatcgcttctcactctcaagatccttaatg

SEQ ID NO: 224 - DNA, 573 bp, Arabidopsis thaliana columbia
cgtgtgctctaaagcgctgcataaccgtctgttcgataaaaaactgccggtttttctcggcattttccaggggacgtcttatgtggtgattatcgccttcctggtgatgatcccctgtgcctggctgacgttgctcggctggccaaaagtacaaatggggattgaatctctgcaagcgttcctgcgttcggcgggtgcacttggggtctgggtttacaccttcctcgaacgtattctgatcccaaccggtttacaccacttcatctacggacagtttatctttggtccggcagctgttgaaggcggcattcagatgtactgggcgcacatctgcaagagttcagtttgagcgccgagccgctgaaatcgttgttcccggaaggcaggttttgcctgcacggtaactcaaaaatctttggtgccgtggcatttctttagcgatgtacttcactgccgcaccggaaaatggggtaaaagtggcgggcttgctgattccgcaaccttaaccgccatgctggtgggaattacgaaccgctggaatttccatcctgttcatttcacgttgctgtttgc

SEQ ID NO: 225 - DNA, 529 bp, Arabidopsis thaliana columbia
taaattggaatagtgatgaatgacctgaaaccaaacagaggacttgtgggttagaaactattcattacaacaaaaatgtgcatgttcaaaacatattatatatataccttgaaagtgttctcagatattttcaaacccatgaccttcgatattgcgggcagaaaactacggatgcgacttctcctcgatgaaacgcttggttcgccaaaatcttcagaaccaaagtctagatgtatatctaacttggcattggactccagatcatttaatatataggtttctgatacacgatcattgattctcaaatagcatattagaggagcatcaataacaacacccggaacagaatcaaacaccatagtagaacttcgtagtaaacggagtctcttaagtgaacgagatttcactcgataaactcttccatcattccataatacatcaatctttaagtcttctaagacagggcaagaagagacaagtctctcgaaagtggcatcattgggaaacgaacatagtttagatgcatgat

SEQ ID NO: 226 - DNA, 460 bp, Arabidopsis thaliana
agacaaatagcgtctttgttgaccatttcattattcagtctttcataattattataaccgattctttagtgaaagtcttttctccaataaaatttcatccaaattatgcaactcataataaattgatctaaaatttaaatgcaatgccggaaaaaaaaaagaaaaaaaaaagaaacaagtttaaaatttgcacagcagaatgcttacttacatataaagtaaatttgttgttaaaaacctttaaaacttaaaatgtaaatttttataaaaagaaaatcggaactctaagagttcgcaacggttcccttaacgagctcaggcgacgacatcatcttctgaaactcctcgaaattaacatttccatcgccatcagtatcaacatgaccaatcattctcacacaatcttcaacagagcaagtcataccaagacgattcagaactttatggatctcagaggacg

SEQ ID NO: 227 - DNA, 409 bp, Arabidopsis thaliana columbia
ccaaagcattgtccgagagattcagatacctaagcttagaaccctctaaagcagatgaaaacatattcatgacttcaagcgcttcagcctctggtcttcctgcaacaaaatccgagagatccacttccgtcagctgatccttgatggaagacaaaacgctcgcagcaaatttggctgcttcagacccaaaactcctgttgctaaaacggattttggtataggagttacgcgggtcagccagaggcttcaaaaggtcgcgtgcctcctcttcttcaataaaagctctgctcccaccagatatatcaaaaaagacatcaccatccttgctcacctcaacctcggattcttcctgtggaccacgtttgatgacatcaagcatgagcttgctggattctttagcatagacgtg

SEQ ID NO: 228 - DNA, 573 bp, Arabidopsis thaliana columbia
tgctgtcaacttgtagatgaacctgttatcattgttcttgtaattgtaagggttaatgagtattaaaatgtttggtagccatgtaaggggcaatatcgtaggttgttagatgtctctttataccatttctgtgaacaggaggaggtttagtggacattccattttgtcatcctcttactctcttgctattgttgcttcaggttcaaaatgctgatgacaataaataccctgaacacgtggaacccacactcacattcattcttcaaaagaccgggattgttgttttaaacaacgagtgtggcttcatgcctgagaacattcgggccctgtgtgatgttggtcaatccacaaagaaaggatctggtggatacatagggaagaaaggaattggcttcaagtcagtgtttcgggtatgtacaacccaagctttaatgagtttaggattatagtatgttaagctaagaataggccttggaatttctttctattccaaaacattctctagagacatgccagcttgaaaggcttatatgaactttaagctcaattgttagacgaattatagcaaattct

SEQ ID NO: 229 - DNA, 697 bp, Arabidopsis thaliana columbia
ggcttcacagagaaatttaatcaaattaccattacaggaatttactaggcatacaaaccgaacctcgtaatccactttaggtgaaggtactacagtcttcagtacatcgtacaataccgatgcaatttggtaaagccttgccatttcctccctgtagcaaataaaaacataagagtacggctcaatatcactacacttagcttattgaagctttggcatgagttaggaaagtggcctcacggttttcttgatgtttctccttctttaatatatttctcatagaagttctggtaatatgcctgaatttctctaggatcgtttttcgccagctgaggcttggtttcctcttcttcctagaacaaatttagacacatcagctcaaaatgatcaagcaaagtggaaatctctgcccacttagagaaaccatttcaccaagaaagtatgtaccttctcaagtctatgtaacagataggtcttaaactgacgaacacctcgtccactggatgtagcatccatcctatgagctttctcaaacgcatgaaaccggcctgatgtcatcaaaaacagaaccatactcattacagaactatgtctatgttaagacccatctatacaacgtccttaaatagaaactggctaaagcaaacatgactattggaaacaaattcagactcacatagataagcactcgaggatt

SEQ ID NO: 230 - DNA, 518 bp, Arabidopsis thaliana
gtacacatggcaacgggaaaaggaaagaatgttatgcgaggtctttttcatcaatagttgtggaacttcaagaacaactacgccgcaagatagctgagcacgacactgagaatacaagacgggacgaagagcacaacaatcgcatatgcggatctcaggattggcaatgcttgttttgtacatgaaagataaataaccataattagcagcttttctggcctcttctacaccacctgcgaccatacctgtagccaccaataccataccaacatgcaccacaccagcagccaccaacaccataccaataggcaccacaccagcatgcaccatacttgcagccaccataccagaagggaccaaaccaatctcatcccctttgtctaacgcaaccttaaactcatgaacttcttttcatatattgttatgttgtaaacttatattgtaggatgataatcttttgtctgtttaggatgatatttgtgagacccgtcccggacgtctcggcgtcggcgacgttg

SEQ ID NO: 231 - DNA, 639 bp, Arabidopsis thaliana
tatgatgcgatataaagtgaatgattcacaaacaaatataataatatgctaagcaaaataaatacattaagggtgtcatagacactatacctggagaaagatctcatttttatcatcaatgttgaggtcacgatgagttgacagttcagaggaattcattgaagtttttggaccatcatcgtctatttctgttagtttctcttcacatgccttcttataaacctcagctactttttcagcttttgcatcaacaaatgacccgtccgctcgagtatgtgttttcataaacacttccccaagtgatacatggcgcccatatagttcctcctataatgaaattgaaacacattaaaaacatgtaactaatatatgaaaatagtgtattgtttggatgaaaattagaggaatgttaccaattcttcgtgaacttgcacaaacgatttctgactggatatatttctgtggggaccaagaccgccacgatcggagtttctgaactgtgaagcactttcactcctcaccgttgcacgactagtgttccaatgaaccacatctgatcctaaagtttacacgaatccaaagagattgtacccactccgcttagcttgactaacaatgcgcgtcatccatttctgggat

SEQ ID NO: 232 - DNA, 564 bp, Arabidopsis thaliana
agacacaaaggtgaactctacttggtgtatgattgtatggccaaaggaagtcttgataagttcctttaccatcaacagactgggaatcttgattggtcacagagattcaagatcatcaaagacgtagcttctggactttattatttgcaccaacaatgggtgcaggtcattatccacagggatattaaaccagccaacatccttcttgacgctaatatgaatgctaaacttggtgactttggtctcgcgaactctgcgatcatgggactgatcctcagacctctcatgtggcaggtacctttaaatattctacttatttgtattggagacttatagccccaaaaaggaacttctcactcaaaatgttgttacttggaaggtacacttgggtatatttcacctgagctctcaagaacaggaaaggcaagtacaagatcagatgtatttgcgtttggaatagtgatgctagagattgcttgcgggcgaaaacccatattgccacgagcatcacaaagagagatggtactgactgattgggtgctagagtgttgggagaatgaagat

SEQ ID NO: 233 - DNA, 503 bp, Arabidopsis thaliana
tcaaaataatgtatgtttaatattttctgatttgcaataataacaaagttatatgaaataaaataattttaaaataatttgtatttttcagagaacccgagtcagagagcttatcattagagtacgaaaaactaaaaaaacaaaccaaaagctctcttatacattttttagaaaatttaatcatataaaaatggagagagcccatggaggggttctctccattggagatgctctaagacactctgttagtacgctgataacttgggacatgcttggtcgtttttcggaagatgggtttgcacatgacatagccaattcaagagctttccaaacagaatttgagttgtaatcgccgtaaagattaggatccatgatcttggtaatgtctcctctgttaagcactaaagctacccattctgttatgtgtcgcttttcacggttttggtcaatcacacgttggtttgtcacatctccaatacacaatccgaagctgtagacattgc

SEQ ID NO: 234 - DNA, 578 bp, Arabidopsis thaliana
tgaaaattaatccattttcttgccttcccagatattacagaacaagtcgattggctgagatgagcgatgtgtacagttttgggattgtgttattggagataatcacaaaccaacgtgtgattgacaaaacccgtgaaaagccccacataacagaatggacggcatttatgcttaatagaggagatattaccagaatcatggatcctaaccttaacggtgattacaactcccattcagtctggagagctcttgaattggcaatgtcatgtgcaaatccttcgtcagaaaatagaccaagcatgtcccaggttgttgctgaactgaaagagtgtcttatttctgaaaactcgctgagaagtaagaatcaagatatgagctcacaaagatccttggacatgagcatgaactttgataccaaggatgtcccaagtgcaaggtagctaggctatgcatctttacttgtgatatagttacttggtgagaggggtgcttcaatttttgttttgagatatcttactaaataaaagacatatgtagtaatgtttttatcttgcaatttgtcttttatttgaacttgt

SEQ ID NO: 235 - DNA, 944 bp, Arabidopsis thaliana
tcaacttttatagttaagtcttctaatttaaagggtgtagatatttttaattttttttttctatagaaattggatgaaaattggactccataaaagtaagaaatgaaaatttgataactcagaaaatctagtcgtctttttttttcttgtcatctttttaagtttctagttaaatattttaaaatttaactatcatcattatactatgcacaatgtaaatatataaataagaaaaaatagtcggcaaaaaataaagaataataaggaagacttacatttttgagcatcgaaaaattgaagtgctttgtgaagggcaagagtgtaattatcaggcggaggaggtgcagacttatgacgaggcaacgacttgacgataatgatcggaagagcaacgacgagaaacaagacggcaatagatccaacggtccacaagaaaaccgtgcggctcacggaaacacaacctaggtttacatatttcttcttcttctttctccaattatcttgcggtgcaagcaaccagccttgttgcgtttcgtctaattcacttctctgtgagtgaatagctcctctgtcccactccgtcgtgttcctcagccgttcttcctcctctgccgcaatacggtcgctgtctacggcgtctagcgacccaccccatacattcccgggatgcatttcgaaagagcttggatgattaaggttttttttggagaagaaatatagaaaggatataaagagttctttttttctatggaaaacataagaagtctacttaattttggttaatgatcggtgagagggattttattaaagagtgagttgaccaaaattgggtcttaggaaatgggaacgatgtgtctatattgtatattctagtagaattgtaatcgaatttttttatatttattagtttgaagacttgtttcaaataattttaatgttttttt

SEQ ID NO: 236 - DNA, 1133 bp, Arabidopsis thaliana
ctcgactctcccctcgtctgcaaacaggctacaataagtttacaacataacgcgagatgttaatagttcatgagtttcagaaagcattagacaaaggggatgagtttaattcgctgcctgctggtatggtggctgaaggtgtggagcttgctggtatggtgttggtggctgccggtgtggtgcctgttggtatggtgttggtggctgaaggtggtgtagaagaggccagaaaagctactaattctggatctttatctttcatgtacagaacaagcatctcgaagcctgagatccgcttatgagattatcgttggtcctcatcccgtcttgcattctcagtgtcgtgctcagctatcttgcggcgtagttgttcttaaagtttcaaagctattgatgaagaagagcttgcataactttctttcattttccctttgctaagtgtctgcacaagtgatccaagaccaaaatggttgcccttttgatctttttcagtacactataacaaagagaaaccaatgcaaagtcaatcaacataacaggctaacaacaaagtattaaaattagataatcctatgatgcgatataaagtgaatgattcacatacaaattaagggtgtcatagaaactatacctggagaaagatctcattcttttcttcaatacagaggtcacgatgagttgactgttcagaggaattcactgaattttctggaccatcatcatctatttctatcagtcgctcttcacatgtcttcttataaatctcaggtactttttcagcttttgcatcaacatatgacccgtcagctcgagtgtgtgttttcataaacacttccccaaatgctacagggcgcccatatagttcctcctacaatgaaattgaaacacattaaaatcatgtaactaatataagaaaatagtgaattgtttggatgactattagaggaatgttaccaattcttggtgaacttgcacaaatgatttctgaccggatacatgtttgtgtggaccaagaccgccacgaccggagtttctacactgtgaagcactttcactcctcaccattgcctgactggtgtccaatgaaccacatctgatccaaagtttacacgaatcaaagaggttgtgaccac

SEQ ID NO: 237 - DNA, 471 bp, Arabidopsis thaliana columbia
ataaaagaaagaaaaaaacaccttaaaagattaaaaacattaccatcaaacatatgaatatataaaagcacagcaacctttagaaccaaatccacatgattctgtccactctttttacccatctcttctcatataagttttggctgaagatatatataaatattatacggtttctttctctcttgtcctccctaccttaatgcaagagatatgatgagtcttgagagtaatgatcgtaccgcagagtttttaatgctcaacagcaaccgcttcagatacctcaatggacttgtcggctctgtcttcattcatccttggagatacagtctcatgtgaatcttctacatcagcattggatgatactgtcacttgtgcttcctcttctgtgggatgtgaagtctggtttacggtttctgcatctttttcaagtttctttttctcaggtcttacctttgctgggattatggcagc

SEQ ID NO: 238 - DNA, 461 bp, Arabidopsis thaliana columbia
atttcttagttcaagatattcacaacaagatcaagccaggctgcctgaaaaatcacacaaacaaaacccatttcagaagttttcagagaagaatcacaacatttacagattaacgaggagaaaactcagaaacagtaacaacattagacgacatttgtaacccttccgatgaagatgaaacatttgaaggtatgacgacactctccaacacaagcgcaggcctcaaaggcgtcgggagggtagaagactagctattgagcatgagagaaaccgtagccattgttggactagtcgctgcactttcttgcacacatcgaagaccaataagtatgcatctcaagatctcatgtcttgatcctgcggttaaaatcggatcgatcacgaatagtatagtgtcttctcaccagcttctcaacacctccatcagatacgcagaatcacaaattttatcaacaagatga

SEQ ID NO: 239 - DNA, 1109 bp, Arabidopsis thaliana
gtgatgccacgaaacagaccagagcaaatatcgcagcggttccagcatgttccatgcctagtagtaggtactggattgcagacattgatgaagaaaacaaaaccatgaacgaacatgtagctgcagttacctgtagagagagcacgattaacttaagaatccaattgcttgttttggtaaaactttggttctgatgctgctagagaacaagactcaagaacgtacctctggagcaataccgatttggagaagaagaggactaatgagcattccaccaccaataccaaagaggccacccaaaactccagccaagagagccattacagggagcatcaacttgttttgtcttcctccaactccagtctcctgtggagtaatttcagtttcatattcatcaaacctgttgacttttgaccaacagaaaagctaatttaatcaacagcaagtagtatgtattggacctgttcagagttttggttactatgcgatgtgtggttgctttgaacattgtcactgaagtaaatgcagagagtaaagaagatagtgagaggtatttgaagcgaggagaggaaccagtagagagctccacatggcttgatcgatatgattccctgtgcaaatccaaagtatatcaacttcttacttctacatgccattaagatttcaataatttggaaagaattataacacttcaaggaacgttcaaataagtggagggaatgtggaaacagagcaatgagagcattgagatagaaaaatattcaaatcaatcgaccaaaaatcataaatacgcgtttagatacttaaattcatacctgaccgtatttgtttccgcggaaaagattaatagagaagaacaataaccaaatgatcactaaaactccaagcttcatccatggaaacctaatcatccctctctgtctcacatcttctctttcttcactcagaagcggcgatctcgctacctcgatgccatcaacgtctcttggactcttaatcttcgctctttccgactccaaattccagtaagaaactccctttttacaagtcttcatcgttgaccaggcgaggaacacagcgaagagaaacaacacaagccaatttgggaa

SEQ ID NO: 240 - DNA, 534 bp, Arabidopsis thaliana columbia
cgatcgcttggtataacggaacagtgcatcgactctatagtctccagagcttcctcagctgatccttcactcttcggttggccagtaaacgatggcggcggaagaggaaacatctccgccaccgatctgcaacttatacccggcggcgcggcgaaatctcgaaagaaaccgagtagagattcgaacatggagctgtggtttgaagatctgacgcaactgagtcttccgatcttcaaaactgtgatcctatcaatgagatcaggagatctgagctccgatatcatagagagctgtttgatttgttacgctaagaagcacattcccgggattctacgttctaaccggaaaccgccatcgtcatcttcaaccgcagtttcagagaatgaacagagagaactactggaaacaataacctctaatcttccattagataaaagctccatctcctcaacaacgagattcctcttcggcttattacgaaccgcagtcatcctcaacgccgccgagatttgccgtgatctgctggagagaaag

SEQ ID NO: 241 - DNA, 465 bp, Arabidopsis thaliana columbia
  unsure (1)..(465): unsure at all n locations
tacacatattgttatgaaccatgcgactgcgtaaccgtcaaacaaagtttggttggacggagaaaagaacttcagcatgactttgcaggccgtagtagacccggacatgagattcctcgatgtaatagctggttggcctgggagtttaaatgatgatgttgtcctcaagaactcaggattctacaaactagttgagaaagggaagagactgaacggggaaaagttaccgctctcagaaagaaccgagctaagagaatacatagtaggtgattcaggttttcctcttcttccatggcttctcactccataccaaggcaaacccacgtcgcttcctcaaaccgagttcaacaaaagacactccgaggcaacaaaagccgcgcagatggcactatcgaagcttanagacaggtggaggataataaacggggtaatgtggatgcctgattagaaccggttaccaaggat

SEQ ID NO: 242 - DNA, 539 bp, Arabidopsis thaliana columbia
tatttacggtcatttggttcattcttgtccaagaaatgtggtggtgaaagtttcggctggggcagagacggttacggatagagctgtggtgcctgttgggatggagggagatgacgggttcacagtggttcaacgcaccgctagacggccggcggaccggtgcagaagatggtgtttgcggtgggtgcgtctggtggtaggtcaaaacagaggttaagggaactccctaaaaatcagggggtggatctcgcaaatcgatttggtggattggatggtaatggtgatttgcctgatttaagggaagttgccattacagaagggccaaataaggaaaatgaatatcatgggaggaatgtggggaaggttatgggtgcccactagttaaggaagctcggggttctacgcagatggagaaagggaaaggcgggagtaaaggtggttttaaatggaagcgtaatggagggatgaaggctttggagcgcattggcgcaaaacagaaacatgggccacaaataacctgctaggggattatatttggg

SEQ ID NO: 243 - DNA, 310 bp, Arabidopsis thaliana
ttaaaataaatcaaccacgtggcgtgcatgtgcgccatgataccgagctacaacggggacacgtacagcctagatgattaggagtctcagtctgagcgtgcacaattttgggttgcaacattggatgcttctgccctgctataacctcatgtctattgcttcctgaagtgcagtttacgtctatggagaaacgtgcacgagtttgacaatgaagctcctgctttcagacctatcgtgggatccacgctgtcgaggatccaccacttcctatctcacaaggtaggagacgagtcacgtgcggagaagatgc

SEQ ID NO: 244 - DNA, 567 bp, Arabidopsis thaliana columbia
ttctttctttatttatatacctctttagttaaattattaagaggatggattagttaaaccggttttccggtttggttaagtgataaaaccgagactttgtgttgaaaaggagactccttgaaggccagaagagagcaaaaaaaaaaaaaaaaggaaccacctttgaatttttgcaattctctctgatttctccaccaccaaagtgattatatagttatgaatattgaacacaattgcttacatgccgtatacaatgcattatctgctgctactgtcaaaacagctctactcgttatgaatattgaacacaaccccagccttgttcgtgcccgggggagtcatatttgtacccgaccccaaagagaaaggaagctcaaatgttaggttgggccaatcatgtgtcttcacatcctctaatatccataaatcaaaactttggaaaatcatgttttgtttgttattctccttaacattgttggacataaattaaaaactcatttgaatcaaaacgtaagatatctcttttcgaaacaatggaaaactaatagatatcgtacatagtattta

SEQ ID NO: 245 - DNA, 584 bp, Arabidopsis thaliana columbia
gttcaggtgagtattaaggagattgagaaacagggatgttagttccgggaggacgagtacgtctgcatggtcggcgtggcatccactcggaagccattactgctgccggagaacctccacatgaacttgagggtggagtaaatacgataggtgctccgttaaacgcccacgctgcaattgataaacgaattcatcgactgagttaaatacgtgcgacacgggagacagaaactactaaaatagactgatgtatggctagctcaccctcagcctcattccgtgaggtagtcatcaagtgtttctcacttcaacattctttcaaaaacgtaattcaaaaacagatgtatacgttgtaaaaaagtttttttgttgaatataattttactttaaattcaaaaaaaaaagagagaaatgcattcaaatttatatttttttagtaattttacttgcaaacttttaatactgtatatgcttatgtgtttgcaagttgtaacgacacttacaaagttttcggcctgtagatccacaacttcaacttgagaggaaatagtgaaaagtcaagaagcattggtacacaaatgcag

SEQ ID NO: 246 - DNA, 729 bp, Arabidopsis thaliana
taaaaatattattataaaaaagaacaaaatgatgtttagttattatgggatgggttattattgtgagataggtttagatgagacatgtttttaagacgggatggatttagatgagacagttttttttttttttttttaacatcttcttttccattgttattatgatcaaaagttttccagctgtaaggctgaagaaattacaatcggaatgtaatcataaaatttaaattgttcattctggggtaagtgactcttggcaagaatatccgccggtttgttctgttttcggttgatccatgtgaatctgcattcctgaaatcgttgcttccaagcttgaacatctcttatccaattaaagatatcaaaacgtgattttctcctattgaggatttccatcacctccctgttatctccttcaaaccagatttttctatgaccgtggctccaacagctttgcattgtgataagaagagcttgaaactcgctttctagagcattagaagtgtggttccctgtcgcttgacctgcacttacaaattggcccgactcatctcgaattacccatccagccttacttggcatctcccgattgtacgatccatcatagttacacttcttccagccgtggggtggtcttgtccacccatatataaatttttaatctctcttctctgcaaacaaaaaaatcacatatttaatctctttctagtttcttcatcgaggttttga

SEQ ID NO: 247 - DNA, 515 bp, Arabidopsis thaliana
caattccttaaaactttcttattattaatggtgcttaattaggaaaatacgcaaaagcagaaacagagcaaagatcacagtccataattagctaagaagaaacttctagaaacatagaaattgaaaccgtcaccaccacaaccggaatctaagaagagatctcaccacaatcagcgatcacaacaggcttcgtcggctttccagaagaagatccgatcttctcaatagccttaacaacgtccaagccttcaaccacctgaccaaacaccacatgcttaccatcaagccaatcagtcttcaccgtacagatgaaaaactgagatccattagtgttagcaccagcgttacgcatcgacaaaatcccaggtcctgtgtgcttcctctcgaaattctcatcctcaaatttggctccgtagatcgattcgccaccagttccgttacctttggtgaaatctcctccttggcacatgaaatttgggatcacgcggtgaaacgaagatcctttgaagtgaagt

SEQ ID NO: 248 - DNA, 557 bp, Arabidopsis thaliana
tcagaatttgacgtttttgtggaatcaacaggatacaccattccagcaggttggatagtgatgattataccttcagtggttcattttgatcctgaaatctatgaaaacccttttgagtttaatccatggagatgggaggtattgtacatttaatttagtcttcatatcattttggtcaactttacggaaaaaaagatccatttttaaattcgaaaaattttcataccaaacgtatttctccatttttctagctagatccaataattgcaaaaatatatgcatattgatattaactctggtgtacatatatgtatgacagttgcaagcactagcttggctgttttatacacttgaccgcctctcattatatatagatatattgatattaaatctgttgtgtaggggaaagagttgcgggctggatctaaaacgttcatggtgtttggaaccggacttagacaatgcgctggtgcagagtttgctaggcttcagatttcagtatttcttcatcatcttgttaccacttataatttctcgttgcaccaagactgcgaggt

SEQ ID NO: 249 - DNA, 548 bp, Arabidopsis thaliana
gttcaagattattacagtctcggaaaatgtatagcgtatgtatcctaccaattattcactaattaaaaaacattctctagtctctcttcttatggagtttgacatggtaaccatttggaaactgtaatccaggcgttcgagttatattccctccttttatctcctcccacctgataatttcaagagccggaatcaaaatcagccttagtgttcttacacagttgaaagaataatgacttaagagagatgattatgtcaaacctgtattttgttaccaagctgtgaagaaacgcagccatctgcaattttgtgaagtcggttccaacgcagaacctcatacctccaccaaacgccatgaagtgctttgatgcgtttgtaacttttgatccctgtatgtattgtttgatttgttttgttattattatttttactttacttggagtaaaagttacttatttaggtttgaccactcacctcccatcttgatggattaaagactaaaggatctttatacatttcgggattcaaatgtacagctggtggacaga

SEQ ID NO: 250 - DNA, 348 bp, Arabidopsis thaliana columbia
  unsure (1)..(348): unsure at all n locations
nnnnnnnnnnnnnnnnnnnnctaaaggccgcctccggctgaagcttctatattctcatcgaacgaactccagatcagcgccgcaaataagatgacatgcagcactgctgaaataattatcgcccgcttgagcttgtcgttttgttcggttgcctttgacactctcggtttccaaaaactgttcgcctgttacccgctctctttcaagcaagggaaacgcagatgtttagataggctgcgtcattaaaccaaccgatttcacacccgcactatgtaacaagttcagtgctttaattatttcatcgtaaggcacatcttttgcgccaccgatcagaaagaccgttttcgg

SEQ ID NO: 251 - DNA, 618 bp, Arabidopsis thaliana columbia
tgataaataatgtaatcaacttaaaaaatttatattattcatgaaaatattctcaaagtttgggtcatctagtacatataataatcccataaaaaaaaaaaaaattgatggtgttataattttttttttgggtagaatgatggtgttataactgatgagtggcagtatgattatatattaaaaaaattcaattaattagtattaaagttattcaaaatattatatgccacatcactaaatttattgtattaaacattattaacctaatacttgcgaaacagagcatgttatttattgggtaagtcatacaaaacaaaccagaaaaaatacatcaaactaaaacagaggtaacacaacacaaagtacaagaacaagtagacattaaaatcaaagccactcttggaaagtaactccagtgggtttcaaccataatcctccttgaataagcttcgccacagtgaattgttcggcctcttttgagtctttaataactttaaatcccttccaattcactctcttactcgtatccgctccaggaccggtatttgcatcgctccataatacaatgtggagagcgcaactcaccacccatgggaaccaccagccgggcaatgtggt

SEQ ID NO: 252 - DNA, 541 bp, Arabidopsis thaliana columbia
tttcttccccgttgttactctcaatacttatgtacctgctagtgcattgttgacgaacacgtggacaacatgtcctgatgattctgtgtagatagacgggttcgtgcagggtgaatccagcttaaagcttacattggaagagccaaacttgcgttagaaaagataaatgaacattagaaatgtaatgtgtaatgtctataatattttaccttgaagtgtaccaaagataatcagttttgtcctttgtcaaattagtgtgttccaacaaagcatttgtcttcaaagatgtgcctgggaatgcagggattgtttctctaaacaaattccagttatcgggaacgttgaacacttgaaccggcgttgtaactctcgtattcatcttcacattcacctttattaattaagcggttaaaatgcttgaatagttgttgattactattagtatgatctgtaaggtcgcaaaaagacttacttttgcagtttcataaattaggtttttgcagttctgaagaatacgaattgacttgggactcaagctata

SEQ ID NO: 253 - DNA, 441 bp, Arabidopsis thaliana columbia
gcgatttgctgcttccttttactcaggtctctgtttctccgacgacgacgaagaaaaagaatcttgttgaaacaaggagattgagtttggattccgcgagaaggagttgttgggatcaaactcctccggtgactcgtcgtcgtgacgctgcattgcttctttcttcaccacgtcttaaatctaaattggtacacctttcatcttttttttttttttgttgtttttttctgtgaatcgctctgttttagtggtttgtagggattcttgtcctttaagttgcctacaatggtatgagattgatatatgtgacatgtgagaaaccaacaatactactagactagttttcgtagaccttgaatgttgctctgtgagtcactctgtttgattctttttgttgcatttggttggattgtggaagctgttgttttgagtggtgtaggg

SEQ ID NO: 254 - DNA, 596 bp, Arabidopsis thaliana
caagtgcttgctaaagagtcatctcctttttcgacatatataccatcttcagatgatctatttccatctgacttggatttctttttagcttcaaaacaaaaacaattgcagagttaatggcaaaaacctcaacttttttttgaaaacaatgttaaattatatataaaaaataaataacgtttgtacaactagtgcgtcgtgagtttgatagaaacaaattaaggaaacacaagttatttgagcttgaaaatgatcaagctcgactttggagccaactttggaagctagcgtcgtatcgtcggtctttcatccttcgaatggtagataactaatttcgcatttgcttatcaatccactgaataagtatagttgcagactttggcttttcctcatggcgcctcccgtttctttccctccaaacagtatagactgtggcttgaaataagtatctcatgagaaacctctccactcgatcactacgaggggctgagactatattgataagttgagccaatcacttgtaaactcctgcttaaacagtcctctagcaagtgcacccaaatttccgaagtaaacgtgcatgagaaaaaaagatg

SEQ ID NO: 255 - DNA, 534 bp, Arabidopsis thaliana columbia
atccctggcttttgtgctgaaatttgttggctgtgggtatagcttactggggatctagacaagatggttgcactgcaaaggttattggagccctatggtatatgtgaggtttgtttcgcaatctactttcatctcttagtgaatgcataaccccgtgaattcttaatttcttataatgatactccaattgttcggataaagtcccaaaatttagttgtagtctttacgacttagaaacagagtagtgaaatctaactctctggtaaaatcaataaccaaagctggacctagttacatgaatcttcttctggttgtgtgtagaacaagaataagcttgacaagccatgactactttcagattatgcatcgtgttgacgcttattatgaacaatcaatcacaggttgcaagaaccggtcgtgtggcattggctcgtgaatcgggagtggacccaagtaccttcgtggatatcctttcctttaacaggctaaaccgttgcagagtgcatccatcgaacatcagaaacttttgaaggt

SEQ ID NO: 256 - DNA, 622 bp, Arabidopsis thaliana
ctcttccattcattgcgcttttgctcgctgtagaaacgtataaaatatttttcaacttctctgattccatgacacgccattaaagctagattaggaagctcgtggtggtggaatcaaattggctccgacctaacgtcgttaaacccagatgtgtgtctctcggggttcaccaaacttaggccaaaagcccaattctcattttcaggcccatttgtttgatctttttcacagcctattttccagctttgtgaacatcattattaccaaatgtaaacaacttgtaaaaacataaatcttttcttttcttcttgatctcacaaaagaaagactacaaacgcacgatagtgtctgaaattcacaagatagaactcatagcttttggtctaagaatccgtgaattgaaaatacgattatggaagaagagctctggtgtggtttaatcatatcattctctacttcttcggcttcacatcaaggtccatagcctgtaggttaagcaacagatcgttagagctcaagtaaaccttgttcgccgacctagagatggtctgtgcgatctctctagctgcttcgatcttcctcagtgttaagaacgcttggttgtttgcgattgcttgaccaa

SEQ ID NO: 257 - DNA, 166 bp, Arabidopsis thaliana columbia
acgagacagagtgggatctaatcatggtggatgctccgacggggtttcatgaagaagctccgggacggatgtcggcgatttacacggcggggatgatcgcgaggagacggaaggatgaggaagagacaacggctgtgtttgtgcatgatgtggataaggaagtgga

SEQ ID NO: 258 - DNA, 705 bp, Arabidopsis thaliana
gatctttaattttattttattcttatgaaaattaaattctcaataggattaataaaattagcattagtatgtcacaaaaagggtatatcttcatgttaaaggttttggctagaattacggtttgaatgatatgaaaattcaatcacatgcaaaagactatggaagttaaacaataaaactgtttacatagcctcaaatcattcacatacaaagactttgaaagctaaaacataaagcttaacagtactgaatcttaaagtcgccataagtttcacacatgctatgatcaaatacatatatcaaataaaataggaaaactcaaagctagctccacttacctttaccatcatccatttgcttatcattttatcacatctaagatgtccttagacggtggctcgatccaaagactcctaagagggcaaagttctttctgcatttgccacattgttggtttagggaactgcttacgcggatagtacctggcttcatcaaacgagtaggatacacatcccttgcaatctaaaccatactttgggaagtacacactgttcctcatcccaagaacatccaatctcgtctccgaggaatacatacttgcaaagattgtcacgccgtcaagagtagtactattcatctcctccaaatttgaggagacaagtttatacccatcggtatctcgctgctacatgtatacatgagaaa

SEQ ID NO: 259 - DNA, 788 bp, Arabidopsis thaliana
gtaacgaccgccagtgtgctctaaaggccttgactcaatttgcccctcagtaagacaagcctcattcacctcagtcctgaaactctctaccacatatatcctactgggcatctcatatcctagtattccacaagaaacggacaagaaggtctgaaaatgggcggcaaaaagggcggcggcgagaactcaaagaaggccgctggaaacgctcgcgtgcgtaccacttcttccccaaccaaaacttcatagaatcgacctatagctaattgtaaactttaattcatgggagtacagaaagctgaagctgcagccaacaaaaaggccatcgaggaccaaaagcgtgccgctgaagaggacaagcaatgggccaagggcgcgaagagttcatccaagaagtatgtctcgaaaaacaatctatacaacggaaatcgaggtgaaggaaaagcactaacatgcttgttcaaaataacagagaagaggccgaagccaagaaggccgaggccgctcgtaagaaagccgaacgcgatgcgctccttgccgcagaagaagcctcgcagccctccaaacccaagaataacaaatcagccgctaagaagaacgctccctctcggggaacactcaaccttgaccagctcgacgatgctccctcttcgagtagtagcgcattgaacgcatcgggtatcgacaacgccctcgatgctctctccctcacgagcaaggacactagcaaggtcgaccgccaccccgaaagacgatacaaggcagcctatgcggcgtttgagctttag

SEQ ID NO: 260 - DNA, 765 bp, Arabidopsis thaliana
actcaacttctgaacgtccaggtctaacttgatctctcctctctctagtcactccagttctatcttttttttcaccgcaggaaaaaataatcaaaaaacatatattgaacgattataaacactatgtggtctcacaaaacagctccaagacaaaaggtatataataagaaaaaaacaaaataaaaatagataaaagctgctccttgattcatacaaaatacaatcttcttacataaccccaaacactccctctccaatttgcatttcacttttttgtcgttttcaattactttgtcatgtctctttcaatatcgccaaaaggggaaggagaaggagtcctcgacccgcaacagatagaggaggatttattcaatcacatagtttgggctcctagaatatggcgccctcggggctttctatttgattgaactatagataaattttaaacacttgatggataaattaaagtctaacatttaataaacaaccaaatttgaaaagaaaaatccaaaaaagagaaatacatttgtttcaattttttattatcattatagcccatgatgtggaggtagatgtggagcaactctagaaccattagccactggtgcaccgatgaaggtgtaacttgagtcaggtagtgcacgaccaccgcaaacgctattggttagggtttggtgacgcgtaccgttgttgcctatgttggtgttatgttgaggaaacggtgaagacagcggaggataaagatatggtggttgcagctggagg

SEQ ID NO: 261 - DNA, 581 bp, Arabidopsis thaliana
  unsure (1)..(581): unsure at all n locations
tgtgcaatgggacaaggaagagaaagtgagagagatatggagtgagatggagagaagtggattaggaccagatcagagaacatatactattaggattcatggtctgcacacaaaggggaaaattggagaagcattgagttactttcaagagatgatgtcaaaaggaatggtaccagagccaagaactgagatgttactgaaccagaacaagaccaagccaagagtagaagacaaaatgcttagatcgaacttaacaagcgaagagtctgaaagcgactaaatgtacattataaagaaacagattttgattttgaaagatctagtaacaaaaacaaatttccgttatccccatgttcttatgcagccatgggcacagcttctgatggtgctgcagcagctgcgtctgggacgtaccaaccatggtgaatttcaacggcttttttcctcctagccaatcgagacttcctacgggcaccagtgttcttgtgtagtgctttaaccttcactgctttgtcaattgcagaataagcctctcctatcagtttctcancgtcacaatctcatcagcttgcgcatcagtt

SEQ ID NO: 262 - DNA, 612 bp, Arabidopsis thaliana
cagttcacagctgccattgaagcaaagcaggtggcggctcaagaggctgagcgggctaagttcattgttgagaaggccgaacaagacaagagaagtgctgttatccgcgcccaggtaaagagattctctacatttccacttgtaatctaaactctgagagcgaaattgttgtgtgacgaaagttcacatggcttgtgtagggagaagccaagagtgctcagctcattggtcaagcaattgcaaacaaccaagcgtttatcacgctcaggaagatcgaggctgcaagagagattgcacagaccatagcaaactcggcgaacaaggtttacttgagctcagacgatcttttgcttaacctacaagggatgaatttggatgttgatgcaaagaactagagaggtttcttaagtaaaactgcatgtgggtcatttcgtcttttaagttcctagaatccgttggaacaaaagcttgatttgtactactaaatactacttttaaaattcttgggatcagtctatctcaaggtgaaagttgaaaaagaagatactgtcttgctgaatgagttaattgtaataaacttgtcgtttgggggagaaaacacttgcatttgga

SEQ ID NO: 263 - DNA, 808 bp, Arabidopsis thaliana
tgtgctagggaagacataaagaggagaagtactgagatcaccgtagactacaccaaagctctggtaggccaaaatcaagttactagagagattcatccacgagagctgaaggaaacggatatcaacaattcagtaagtctgaaaacagagcaatagaagaatcccagcacaagaaagcaagggtctttatttagatagaaatgaaagcaaaagccaaacatgctatgaacagttcaagtgggcataaaggagctaacttgagaaggattccgacggggagagactccagattccgccggcgccatcgcaggttgtcgatacaaaagagatcaattgagcgaatcaagttggagctcttcagacgaaacccatcttatctctcactctcctctcctagcatcaaatatccaccttaattaattagcaaatactctctcaacgcgggaacctttatatctgtctctctcctccactcacttgtttctccgattagcaattttcctcgagaagtgaagtgaaactgacagtcttctaataataatactcaccagtcacgttttcccgtcctcgggttggccccacctatgttggctcgtcgtcaggcccattatgggctctcctaaaagcccatcatagatcttgtcactaatatacagacactatatcttatcttaaaaagtacaaggcccatttaatcaaagggcgtgataatatgtagtaggagctgtaaagcttatcaaggtagagaagatgtgtctgtcgaataggaggagtttagtaagattgtatatgctttggaatattcgga

SEQ ID NO: 264 - DNA, 470 bp, Arabidopsis thaliana
cactttctttcatctctcgccggaaaaacccataaccacaacaatggccaccgaaacccaaatccgaatcggagtaatgggttgcgccgatatcgctcgaaaagtctctcgagcaatccacctcgctcccaacgccacaatctccggcgtagaagccggtctttagaaaaagccaaagcctttgccaccgccaataactacccagaatcaaccaaaatccacggctcttacgaatctcttctcgaagatccagagatcgatgcgctctatgttcctctccccactagtctccacgttgagtgggctattaaagcagctgagaaagggaaacatatccttttggagaagcctgttgctatgaacgtaagtgagtttgataagattgttgatgcctgtgaagccaatggtgttcagatcatggatggtactatgtgggttcataatcctagaactgcgttgcttaaagagtt

SEQ ID NO: 265 - DNA, 646 bp, Arabidopsis thaliana
tggtgccaagagggagaaggtgaagtcatatcaggattatgccttagggcgcaagagagaggagagcttacaggaatacgagttgctaaaggtagccccagagttaattacctcctctttgccgatgatactatgtttttctgtcgatatgatcacaagagttgcgcagtctcctctccattctacatcgatacgaatctgcatcagtgcaaaaaatcaataatcaaaagtcagcgataactttctcctccaaaactcaaatgcagacaaaagataaagcaaaaaaggagtttaagatagaaaaagaaggagggcaggggaaatatctaggtctaccagagttgtttggccgtaagaagagagatcttttcagcataattgtggatagaattaagcaaagagcattaagtctgtctttcctcttcctctcccaagctgggaaacgtctcctcctcaagttagttcttcctgctatgcctacatataaatgacatgtttcaagctgccaaacaacctctgcaaacgtatccagtcagcactcacacgattttggtaggatggcaatactgagaagaaaaaaatgtgttggctatcatggaagaaacttaccaaatccttaaaagatggcgggttgggtttcgtgata

SEQ ID NO: 266 - DNA, 812 bp, Arabidopsis thaliana
tggaaataacttcttctagggaactaagtaagtcgctcaagatgcaactgtagactccctcagtttttatgctctctgacacaaaagcattaaaaaaatgttgcagtgcagaaggaacttgttgaaatcgttgtgtattgttcttcagatcttctttgagaactttaatgttcaagagagcctgcaataccacatgtttttgtgaaactatcaaaaggaataaggaaatgaagagatgtggaatgagttgaatcagtaaatgagagtttaggtattcaatcttcctttggttggaaactgctttaccttcagcgtcatgtcaagagctgaattgtatctggctgcagcttctccaagctgctggactccaatggtccgacagaggatcttctccatgtctgctatgcataccttgaaaatggcgaatgaaagaaataagaattatgcatcttaaaaacaaaatggttcaaactattggtcaattgtgaagcttttaacaaccagggtcatctttagtagcttcctcttgaatttctgttttggatgaaatttccaatctacccgtctcacttgcaagagcatcttctggttccatagaatcttcttcaaccgttcttagtgatggagatgtactctcaggtttactgtacatgagacaaaacgttttgtcagagaaaacccgaaaacaatttataacatgcgaactgaccattgaggtacttactgttcaacagtcttatcaaggagactagatatgctcgttgaaggtttctgttgcgtcaagaagataaatcaaccatataagtattata

SEQ ID NO: 267 - DNA, 1045 bp, Arabidopsis thaliana
cttaatcgggagacttgatttgtttttggtgtttgaatctcagctattggtgccatatttgctgcaacagattcagtatgtacactgcaggtaatgtgttttctccaacatgacttaaattacttacaaaccctgaaacatagtggaccgaaagtttctgttcctgttgtgttgtgatataggttctgaatcaagacgagacacctttgctttacagtcttgtattcggagagggtgttgtgaatgatgcaacgtcagttgtggtcttcaacgcgattcagagctttgatctcactcacctaaaccacgaagctgcttttcatcttcttggaaacttcttgtatttgtttctcctaagtaccttgcttggtgctgcagtaagtccattgttttcttccctgccattctttcttgtagctgcgtatatgcacgctctggtgttcacatctttgttattcatcttgcagaccggtctgataagtgcgtatgttatcaagaagctatactttggaaggtacatatttaacgtcatatatgtgacttgttttctttaagttgtttcctgtttggtctaacgtagatggcctcacattaattgtcacaggcactcaactgaccgagaggttgcccttatgatgcttatggcgtatctttcttatatgcttgctgaggttagattcttttaaataacacgaacatattcattcagttgcattcaaacacaaattatattgatgttatattaatttggttgcagcttttcgacttgagcggtatcctcactgtgtttttctgtggtattgtgatgtcccattacacatggcacaatgtaacggagagctcaagaataacaacaaagtatgcaaactttagtttctccgccttttgctgagattaacactttctacctcccaatgattatcttatgatttttttcgatgaaacaggcatacctttgcaactttgtcatttcttgcggagacatttattttcttgtatgttggaatggatgcattggacattgacaagtggagatcagtgagtg

SEQ ID NO: 268 - DNA, 881 bp, Arabidopsis thaliana
ttttttgtttcttcggatataataagaaaattggtacataaatatctacttttgccttaacttggaatgcttttgtagcaagcttgatagaaaaccaaatcttaatcgttcttaatagtaaattgtatggcacagacatatatcgatattggtttcaaaacggtttggttagttgtataactcaattgaaatcaatggttcatattatagagaacaagaagataagggaaaagacaatgacaacgcaaaagatgattcaaagaagaaaaaaagaagagcaataacaaaactgtatatcaacataagatttttttttaatgttttgactggcaacacgagccaggctcaaaatcaatgggaccaaaaaaatatcaaagaaacagcggattttgacagtgttgtttagcacttttgcatcacccaaagttcttatttcaaagttttctcctttttctcttatcagtctgagaagtcatttaaaaaggaagagtttttaattgatgggttcctttccgatggctttctggacaagcccggcttgctctttgacatggaaagtatagaaacccgtggcagttgcagcagaaggaccacgaccaacatacttaatgtcttccatatctcctctgtttacgcttctcattgctgtccatagccgtggagatatgtagctgaatgctcccatgttcatcgcctcttcttggcaccaaacgatctccgcatctttttcagaccaatacaaaaacaagttatagaggtagacataaaagctaaaccaaaccaatccaaagatagtttaggtacgtacttggatatctcttgagctcacgctgaatgagatcatatgggaaaggacaaagctgttcaactctacagatagc

SEQ ID NO: 269 - DNA, 581 bp, Arabidopsis thaliana columbia
taccggacaacattgggtttgcttttgtgtcatatgtaaaacccaaatcacctggtttcaaaacctcccaaacatccacccatttgtctggcaaaggaaacttcccatctagcttgtcgcaccagttcatgtctcccccgaatatcacattggcattaggtctgagaatctcaattgcctccttggcttgttcaacgcgttctcgactgaacatttggtcccattttggaggacctggacagggactctcaagatggctagttgcaaaaacaagtggctttctccctggaacttcaacttctgcgatagatagttctcttcccattatcgagttcccaaagcttttgctgctgaaagatttcactcccaacttgctcaactgcaaattacacataagggtcagttacaagaaccacagggaattattcagatacagacggcaagagcctaagccaagcaagcacaatctttaccagcatgcagtagtagcctctcgaaacctgcacatcaactgagacagaacaagaatacgctttccaccaattcgacttgcggaaaatatcatatatctcaggagtgac

SEQ ID NO: 270 - DNA, 574 bp, Arabidopsis thaliana
gagcaaatatgaacatgcatcagtatttttatggacttgtatataattttcagattacctgttgtgaagatacaaccttctaaaacacttgttggacaaccagtgggcacaaaggttgcagatttctcatcaagaggacctaattcaattgagcctgccatcctcaaagtatgttctggttttttgttgttctgtttttcagacatattacattattttactacaagatgtgtgtaatctcatggtattgtcacaaatgcagccggatatagcagcaccaggagtgagcatattagcggctacaactaccaataaaactttcaacgaccgaggattcattttcttgtcagggacatcaatggcagctcctaccatttcaggagttgttgctcttctcaaagctctgcaccgtgattggtctcctgctgccattagatcagccattgtcaccacaggttcttaccttctttatacaatgctagaaaaaaacaaaaacatactgatcttaattgttttatttactctatgtagcttggagaacagatccatttggagagcagatatttgcagaagg

SEQ ID NO: 271 - DNA, 1289 bp, Arabidopsis thaliana
tcatcacagtggctgcaactactctggaccggtcctttgccacacctcttacacttgggaataataaagtgatattggtaacaacaagatatacgctctttattaattgttctactcagtactcagattacatctgtgtcttattgtgagtctgttcactatattgcagggtcaagcaatgtacacaggtccaggacttggcttcactagcttggtttatcctgagaatccagggaatagcaacgaaagtttttctgggtaatttttatatttctagtttcttgatgttcatcaaatcttgcaatgtgaagaagatcaattctctgacatcaccatggttcctgtaatgcagtacttgtgaggagcttttattcaattctaatcgtacaatggaggggaaagttgtgttgtgtttcacaacatcaccttacggcggtgctgtattaagcgctgcgcgttatgtgaagagagcaggtggtcttggcgtaatcatcgcaagacacccgggttacgctatccagccatgtctagatgatttcccttgtgttgctgttgactgggagcttgggactgatatacttctctacacacggtccagtgggtatgaaaatatatcttcaccactcaggattttaaggaaatatatctgagactaagtttcacacttgtggtttacagatcgcctgtggtgaagatacaaccttctaaaacacttgtaggacaaccagttggtacaaaagtggcaacgttctcatcaagagggcctaattcgatcgcccctgcgattctcaaagtacagaatccttgctttgtcttttcttttcagacccattaaatgatcttgcctaaggttttatcaatcatatgaatgcagccggatatagcagcaccgggagtgagcatattggcagctacaaccaacaccactttcagcgaccaagggttcattatgttgtctggaacatcaatggcagctcctgcaatttcaggagttgctgcacttctcaaagctctgcaccgtgattcgtctcctgctgccattagatcagccattgtcactacaggttcttatcttctcatcaaatgtaactaggacaaaacaagaacatactaatctctataagcgtcttttactctggctgcagcttggaaaacagatccatttggagagcagatatttgctgaagggtcacctccgaagctagctgatccgttcgactatggtggaggccttgtaaatccagagaaatctgcaaatccaggtcttgtatatgacatctgattagagt

SEQ ID NO: 272 - DNA, 501 bp, Arabidopsis thaliana
cagtgatgcttctccgtttcggggtcgtcccgatggttgttatctcttccaaggaagcagctaaacaagttctaaagtctcgcgatctagagacatgctcccgacctaagctggttgcgaacgggttgtttactcgcaacttcaaagacattgctttcgctcagtatggtgaggactggcgagagatgaaaaagctcgtggggcttgagctcttcaatccaaagaagcacaaatttttcaggtatatcagagaggaagagggtgacttgctggtcaagaaactatccaaatcttctcaaacacaaactttagtggatttgagaaaagcctttttctccttcaccgcgggtatcatatttagagtctcctttggacagaacttccgcgagtgcgatttcatcgatatggacagacttgaagagttggtgcaagagtcagagaccaacgtattcagcttcgcattcactgacttcttcccaacgggtctcggttggcttgtag

SEQ ID NO: 273 - DNA, 555 bp, Arabidopsis thaliana
atctcgcttgctgcatcctgagcatagttctctagataaggccatacgtcgaatcttgaaatccacttacggaggattcctttctcagacctaaaaggaacccggagaatatgagtatgctctgttccgctgactctctctaaccgctggttacacgtagttcctttagcatccggtatcaacctagttaccttggaaaacaaggaagaaaaaagttgtagtctataaacacagtttcagatattgatattagtcattaagaacctgcaatgaccaaaacatgcttacaataagaatactaggtgatatatccaacccctgtctctttattctcaacagcatttcagtctcaagggcacggacttggtcaagaatatagacaacctgagacatcgaagaacttttaaatgataatcgaaatccgaaagacaaattaaacgtaggggtttagggagatacttgtccaccagtgtcaggtaagcctaaaacattggcttgccgaaatatccatgtggagataagatacaacgttgaaaacgattggtaccacccaag

SEQ ID NO: 274 - DNA, 639 bp, Arabidopsis thaliana
cagactctagacagactgttatttgaccgacaagctgagagatagatgagtcgttgtaaccagcagaacataagtagagaatgtagtcttgcggacccatatcgtatatgagaccgggttctgcagctttctcagggttcacaatgcctccaccgtaatcaaacggatcagatactttgcgagatgacccttctgcaaaaatctgctctccaaatggatctgttctccaagctgcaaagtaaagaccacaattattgagttaaagggattcaagattctataaaatgctttgctgctttggcctaaggggatcaaatacctgtagtgacaatggctgatctaaaagcagcaggagaccattcaggatgcaaagctttaagaagtgcaataactcctgaaataactggagtagccatcgatgttcctgaaagcatagcaaatccaccgacatttaaggtgtcattgggagatgtagcagctaatatccttactcctggtgctgctatgtcgggctgtatcgcgaaaatagagtttcttatgattctataaaatctagatattgcagcatttcttgatgagaagtttaaggcatacttttagaatcgcaggggacatcgagttaggtctcttgatgagaag

SEQ ID NO: 275 - DNA, 865 bp, Arabidopsis thaliana
ttccccagcgattcttaaagtatgtccggatcctaattttcagattttctgcatcagatgttttcaaaaacaagaaaatgtaacgttttttgcaatgcagccagacataggggcaccgggagtgagcatattagctgctacatctcccgattccaattcaagtgtagggggatttgatattcttgcgggaacatcgatggcagctccagttgttgcgggagttgttgcacttcttaaagctttgcatcctaattggtctcctgctgcatttagatcagctattgtcactacaggttcttattttcactcaatcgcagaacaaccgatcaaaagcaaagggcaaaggatacacttgtctcaataattgtgttcactactttgcagcttggagaacagatccattcggagagcagatatttgcagaagggtcatctcgcaaagtagctgatccgtttgattacggtggaggcattgtgaaccctgagaaagctgcagatcccggtctcatatacgacatgggtccaagagactacattctctacttatcgtccgccgggtacaacgactcatctatcactcagcttgtcggtaatgtaacagtctgctcaacccccaaaacttccgttcttgatgtcaatttgccgtcaatcaccatcccagaccttaaagacgaggtcactctcacccgaaccgtcactaacgttggaacagtcgactctgtctacaaggtcgtggtcgagccgccgcttggcattcaagtggttgtggcaccggagacactagtgtttaactccaaaaccaaaaatgtctccttcacggtccgtgtatcaactacacacaaaatcaacactggattctactttgg

SEQ ID NO: 276 - DNA, 541 bp, Arabidopsis thaliana
ctcattctggttttggttgagctatttctataatcgtgaaatggagaaaattggaagtcatctaatgctgttggtccggctttggctccatcgattaacaaaaggcctggtaattttcaccctctgacttcttaacgcttctatagctttaaaagaacctgtttctgaaaaatttattcgccttgcaggtgctggatctatgttttccagtagcgccagaagctcaggctcagattctttgatgtcttccatggctacatgtgctttatcagttaagaccttcacactctccgagcttgagaaggctactgatagattcagtgccaagagggttttgggcgagggcggatttggtcgtgtttatcaggggagtatggaagatggaactgaggttgcagtgaaactgctaactagggacaatcagaatcgagaccgtgaatttattgccgaagtcgagatgctaagccgtttgcaccaccgcaatcttgtgaaactgattggaatatgcattgaaggtcgtacacgttgcttgatttatgag

SEQ ID NO: 277 - DNA, 701 bp, Arabidopsis thaliana
tccatttgtatttttcatgaatctgaattgatgttttgatatgtggcagggagattatgatggagtatgcaaaggaaataatgaatttaggtgaattgatctgtgagcttctatcagaggctctagggttgaataattctaatcacctcaaagacatggattgcagcaagtctttggtcttgttcggccagtactatccaccttgtccgcagcctgaccatactttaggcttaagcaagcacaccgatttttcttttctcaccattgttcttcaggggaatctcggtgggcttcaagttctccatgataaacaatattggatcgatattcctcccgtccctggggctcttgtcgttaacctcggagatcttctccaggttaaagaagtgactttttagctttgtaacattttagctctatctttgttaggaatatcatatatgaaataatatggaatttaaagtagtaagtaaaagatataggctagttatgatttgaatggagatgtgagttgattttttatttgaatttgtgcagcttataagcaatggcaagttcataagcgtggagcacagggtgatagcaaatagagcggctgaaccgcggatttcagtgccatgtttcttcagcaccgtgatgagggagaccatcgagtatatggaccataaaagacttctgtcagacaaaaccctccaagtata

SEQ ID NO: 278 - DNA, 1336 bp, Arabidopsis thaliana
gatttctctcgatccgcttcttctcggcgtcacggctatggaggtacgtgcttacggtgtttcttagagtttgttgagacaatttttgtaaaccaataataatccattttgaaacgtgtaatacacgcttctctatgttattttttaatccttgtgtttgtagaaaacaaagaataaaactccaccaccacgtccagatgatgatgagctgagaagtattatgttggagagactttcaattgccgctgccagagcgggttggagatggaggagaagctgaagtccagatttgttggccttgatattccatcatgcagctttgtgttccctaaaggtcgtgatcaccatatttacaagcaaaaaattgctgagtacaccaagtctcctcctcttcattctcctcctcctctcccaccgggcctagttgatcaatgctgtttaaagtataaccctctggagcaagttgctattatcgacgaactgtctgcgtttacagttagagtccctgaaggaggcatgacgcgcaaggaacttggtatcattaagttcacagcccaatttgtgttgcggtatgggcaatattttcggttggctctacgggatagagtgtctactgatactgagttcaagtttctggataagggagattcaagggctcactttttctctcttctttttcttgggtatagtcatctattaagggcttgggaatatcctctggttggtatggatgttcttgttgacggttttctcagtgctttgaattctttcaaggaaaagctagagggtgatgaggagctagtggacaagattaagactgataggcatgattttgttgtttgtgatgaatattttgctgacctcgagaacaaagcccttgaactcaaactcaaaacaatggctaggatgcatcatcctctgaataaacacgattctcagggtacactcagggtgccacctgtccttgtcttgtttagagttggaatccctcaaggaggcatgatgcgcaaggagcttggtttaatgaagttcacagccatgtttgtggtgcgttatgggaatgatttttgggatgctctgtgggatagagtgtctagtactgaaacagagtttcagtttctgaagaggaatcctggaaatgatagaggaatgcttcttttctctcagcttcttcttgcttttggtaatgtagtacaaccttggggactgtgcccgagagagagtaaccgcccgctcgtatggaagctgttctcgaggggttttcactgcttttagtgctttcaagaaaaagcaagaggatgaggaggacgaggtagtgacaagcttgtgactgata

SEQ ID NO: 279 - DNA, 1360 bp, Arabidopsis thaliana
tacaaactttatattcaaattagccacattttttagtttataaccgaaaaaaaattgtgagatgatgaagagtaaccttggatatgcataaacaagaaaatcaataaatataattactcgaaatttgacagttcttgttttagaaacaattttaatcacattatcttctgttgacatcaatacagttgcaaaacaaactaattctcgaaactgatatcagaaattgtcgccatatatttgttataactagatttaggattatgctcttcttcaagttttgcatctaattttgatgcacgcattctgaatttctgattaatatattttgtaacaaaaatgactacaatatctcatgtgctataattttaatcctttttcatacatttatgttttaccattttgtttttctttcgaaataatacaagtcaaatctcgaccgttggatggaaccggaaaaaaaaaacaatgtaaaaaaaccgcgtaaattctgaagctagcaagtgtctaactgtctatctctatgtccgaaccttcacagaataccttgaaccctaataacaatggcgacgctgttgaaactcgacatagccacgactttccttgctttcatcgttccccgagctaatacctccttgaaccatcggttcgcttctgctaggctcagtacagccacagtttccctcagaacgaagtcgtcatcgttctattccgcggcgctttactctgacagccgtcggagattccactccgccgttgcctctgattcctcgctcgccgttgtagatgatgaagatatcttcgatgttgccagtgagattttgcccgacaatcgaattccggccactataatcaccgggttcctgggctctggtaaggtgaggctaatctagggttcatgattcggaaattcctgctcaattttgagcgatcagattctgaatttcactggaattgtttttttctgagtgtatagacaacattgctaaaccatatattgacgggagatcatgggaagcgcatagccgtgattgagaacgaggtattgtctgagaagctgaatagagattgttttatgttttatggtttcactaatttgttctgaaatgtgaattctcagtttggtgaagtcgacattgatggatcacttgtggcagctcaaactgcgggagcggaggatataatgatgcttaacaatggctgtctgtgttgtactgttaggggtgatcttgtgaggatgatttctgaaatggtccagaccaagaaaggaaggttcgaccatatcgttattgagacgacaggttcaatattttctatcactctggagctacatgattcgttaagaaccaactactatgttatt

SEQ ID NO: 280 - DNA, 936 bp, Arabidopsis thaliana
  unsure (1)..(936): unsure at all n locations
taaacacttctgtaatgactgtaaagcgtggtttcggacatcctccctctggtctaaacacacttttcttagtccttgaacaagccttaaccacatttccccaatatcttgtgacatcttcccgaaatcttcttctcccatgttttccttagctgagagagcccatttagccaaaaattctaatgaatctcccattagatcaagggcacggatagagcgttcggactgtcccacgcgggattcagcaaactgtcttgcagcatcaacacagagtacataattggctggatacaggtgagttccttcagacataacaaaggatacggcatcaaatcctgattcagaagcttctgggtgccgcgctgtgatggagagtaaggatgtgattgttctccaacccgcctgagacctgatgtgattagcattggctttcacaagacggctgacttcaattgcaatttgctcacaataggcatctgcaacacgtgcatccagtttcagcacaagctgaagagatctcaaaagctcatcagctaggctttctttataaggaagtagtctctggaagatccgaagaaaaccataaaaagctttatccactaagttgcagggaatcaccgttaactgagcagttatagctatatgttcatggacgccttgccgtgggaggacgatcctgtctctgttgtatggagtaattgcagtgagcagttccgggcggaaagccgcggtatcctcatcctctggaggactggttcctttctgtggcctgcctgcggcccgggtgagagcacgcgcanctgctngcgaaggttcggcttgtaggggcttgctttcggtaagtgtgctgtcggtgtggcgtttctgggttgtttgacgtgttcgttgatgagctgcnagctgttgctcngtaggctgtgatcttggctcttctgt

SEQ ID NO: 281 - DNA, 535 bp, Arabidopsis thaliana columbia
tagtttactccaaattttaccctataggttttctcgggtgtttccttgatctatgctatattacgggcccaaaatgttttgttcgcacattgtttttgaatatttttcatatatcaaagctcgttaaaactagatggggtatccctaggtagcggattggaccgacggtgaatggttcctagagtcttcaaaaaggataaatacgattgcattgcatgaactaacagatacaatcattccagcactacgggaccgaatcccatcagaactctataatgacgagagtagtactaggaggtgacctcccgggaagtcctcgtgttgcatttaacttttttttggatccagaaccaaccgattggatggatccaatcaaactttatatagctgatggagaagtaccagcagatcggtgggaggcttgacatctaaggacaaaagtcgcgaactacatccttcatgagggtgaacacaaaggaagctatagttatcatgaaggaaacacatgacagagatgttggaaatcattctggtg

SEQ ID NO: 282 - DNA, 574 bp, Arabidopsis thaliana
caaaaactcaaattctcaagcatgtaacatgtatgatgtatgtatgaagattaaccagcattgtcatgtgtgatataacatcataagtcacaaaaagcagagtccatggtggttgagaagcttttatatctgaaaagaggaaaattaaatgccgccaatgaaatcatttaatgatataactttaaggagagccgtgagaccaataaacaaaagcaagaaaaaaatcaatagaaattaccaacaaattaattagcagagatttgcaaactttaaactaatactgataattaagtccttaacccctcccgtcggtcacgtgatcatcaccgttaagattacgacacgtcaccaaatcacaaaaacccttgaaaagaaaaccccaaatttactgcggctgaaacggcggaattcgaacgcaagattcttgttgttccttctgtcgccggagctccataactttccgatgagagttcgaatgctgagtcaatacaaacgtcggactcgacgccggtctgtattccggtacaagcctccctgatttgtaacgaactcacaagcgttacaaagtgtttta

SEQ ID NO: 283 - DNA, 855 bp, Arabidopsis thaliana
gtttaaagggtccttgcctcttccttggtctatccggatgaagattgcattaggtgctgcaaaaggtctcagtttcctccatgaagaagctttgaagcctgttatatatcgagatttcaaaacatcaaacattttacttgatgcagtacgtatctcttactctttaggatcaacatcgttatatttgcaaattttttaaccaataaatcccattgtcaggactacaatgcaaaactatcagattttggacttgccaaagatgctcctgatgaaggcaaaacccatgtttctactagggttatgggtacatatggctatgctgctcccgaatatgtaatgaccggtgagtcctcgttggtttcatccattttcttcaacttgaaaacattcaatgtttacatctttgttgatttgcttcctgttgaacttgttaaggtcacttgacatcaaagagcgatgtttatagttttggggtggttctacttgaaatgttgactggacgacgatctatggacaaaaaccgcccaaatggtgagcacaacttagtggaatgggcaagaccgcatcttcttgacaagagaaggttttaccggttacttgatccgaggcttgagggccatttttcaatcaaaggtgctcaaaaagtgactcagcttgctgcacaatgtcttagccgtgaccccaagattaggccaaagatgagtgatgttgtggaagcacttaaaccacttccgcatctgaaagacatggcaagctcttcttactacttccagacaatgcaagctgaacgtttgaaaaatgggtcaggtcgatcccaaggatttggatcaagaaacgggcaacacctaacccgtg

SEQ ID NO: 284 - DNA, 693 bp, Arabidopsis thaliana
gtggaatgtgtttacattgaatcactgagataacctcttgggaaagttgtctagctagattcagtttttgtaaggaattggtcaatttgtcatttcttgagatgcttttgtatatgaattggtcatgtgtttcctttggttttcgtgaattactcttaactaatagtcaaagtatacataatcgtttacggtccaaccattgcccccttgtctctctgtatgtgataatgtgcatgtgttcacatataaagtcttcgagataagaaatggtcagttaaggatattgaaagaaaaatctacacataataatgataagttaaaaaaaatagctacatgtatataaataaatcaagttgtttgcgcactcaaagaaaccatcacaagtgtgtgtgtgtataaatcaaactcttctaatggcttcaataagcttattcgaagcttccatagccatcttttgctttatcatccttcacttcttccttgggaactggccggttctcgggatgcttccgggtctgctcttggagttccatcggatctatgacttcagcgtggaggttctcgagaactctgacttgacatttccatttaaaggcccatggttcactggtatggatatgttgttcactgttgatccaactaatattcatattatgctattattcattatcgaagaacaagagacttaattaa

SEQ ID NO: 285 - DNA, 845 bp, Arabidopsis thaliana
taattaagtctcttgttcttcgataatgaataatagcataatattactctagtgatccatccaattataaagagaatgtaaaggatggtataagttaagcatgtaaacccattccgcattggattaacctgtttgcatgttgatcaatttcgcacacacatttataaataaattcaggtttaagtgggacgtaaattcggtaacttgttaatcacgttttagtggctaaattttaaatgcttcttcccatgtgtttccatgttatatatctttagtcactataaaatggtgaaacacaaacaaaacgtgaaaacgctagtaaacaatcatggttatgaatatttagttaccgtaacattgaaaatcaaatctaaacgcaaaataaacaatcgtagccataatttgaaatagtctaacagttgatattaaactttttacggatttaaaagactggtttcttcgtcggtttggaaaagatcttcagttttcctaacagctgcatgagacaacacagccaaggcacctgccacgatggccaccgcgatattgagcttcgcatcagttaaaaaaaggatggaaagagtgataacagacatgattataagtacgatacggtggtcaatctcgcggtcaaaaacagtgagcggttcatcacggaggaagtagaggaagagccatgcaccgagtagggcgagtagaactaagagggagaagggattcaaatcaggctgagaaatacggagaagaggacgacaatggtgtaattggtctggaaatagaccgtgttggctctgattctagtgatcacggtggctagtttgcgggggaagttgaaggacccgagg

SEQ ID NO: 286 - DNA, 513 bp, Arabidopsis thaliana
tgaagatttttgtatgatggtgatgtgggtggatttcttaaacgtgtcgtgttatttgcgtgacttgaaaaaagaagtgagataattttgaaaacaattttttaataataatgcaaaacagatcaatctcgcaagtcgcaacgatggcgacgagctcttccaccgagaaactgccacgtgtcctcatcgtcaaacgtcccgacgccatggctgtgttaggcgacggattcgtcgcctccaccaagttcgagatcctcaaagccttcgagtctccgcttcctcttcctgaattcttggcctatcactctgactccatctccgccattatagcccctgtagctgctccggtcacagccgatctgattcgcatcctccctaatcttcgcttggttgttactaccagcgccggcgttgaccatgttgacttagttgagtgtcgtcgtcgaggcatctccgtcgccaacgctggctcaagcttctcggaagatgtcgcagatactgccgtcggtttac

SEQ ID NO: 287 - DNA, 782 bp, Arabidopsis thaliana
tcttatccaactagacattattagatttctttttctcataatttcctttctgaatttcctttcttgtatctcttctagcatcttctacaaggagtaacttgcccctcaagtaagtggaattatccaacattcttcccaactgcaaattagagggaatcatttacaattaatggaatatttgttgctaatttgattttttcgcaagttatgttgcaaaccttggaaccgaggggataatctcctttgagtggccaaaaccgttgcataactaaccgactggtagcagagatgcgacggaaaacgtcgataagtaaaccgatggcagtatttgcgacatcttcagagaagcttgagccaacgttggcgacggagatacctcaacgacgacactcaactaagtcaacatggtcaacgccagcgatgatagtaacaaccaagcgaagagattttctttgaagtcaaaaatacatgttgcttttgaggtcttggttatcaacgcccgtctgtcccctattctgttgcatctgtctctcgaacctctgttccttccttgtctctcgatagactcgttttattctgtttttttctccattaattttctcttccatttgatcggatccgtacagtctcaggctcgctctgtctccctccgatctgaccgattctttttcttcgatctgaccaatcagagtcaccaaaatggcggagacgaaggccaagagactacttaaagtggaaatcagattcagctttctcgtcccaattcgattcactaacaagag

SEQ ID NO: 288 - DNA, 618 bp, Arabidopsis thaliana columbia
atatagtatataataactaattaatatgcatggtgaaatccaacggcgtgtagacatgtggcctacaattaactatacgtagataaagtaacattaattcacagcctcatttatgcatatatcttgtttgttctttgaatgtttttttgcaattaaattttacaagttggtggtgtgggactcagtttgttcccttcctacttccacgtaccttaactacatgtctccccattactcttctctacctatatactcaccataattctatatatagctgaggaatatgataaataaattgtggccgtttataccgttgtgcacattgaagtggcaatcatgagaaaaaactaaagttctgttaaaagtttgaagatatatatgaaattgttacaaagaaagaaaaaaggcagtagcacatgttgtcacgtactctttgtaagggatataatgatcgttttttgtactttaaaactaattgtaaaatgtttaaactattggacaggtgtcagcatctaaggtactacaagagacttgcaactacatcaggaacttcacagagaggttgatgacatcagtgaccgtttgtcggaactcttggcttcgacggacgacaacagc

SEQ ID NO: 289 - DNA, 700 bp, Arabidopsis thaliana
gataaatatccatattgcaagatatgtgaggaaacatacttggtaacccatggaaatgtgagacctgccgcttcgagacacatcagtactgtgtggagttgggcgaccatcaagacatcgatttcatcagaaccatcctttgacactgttgacaaagtatccttcacaggaaaagatgaaatgtgacatttgcagagagaatatatacgatttcaatctcttctgccgtatatgtacttttgttatccacatcaactgtgccttgaaaagtaaacatgttcttgaagctttaaggcagaaattcactggaacttggagtttttgtttgggaaagctgtgtcatgtatgacgtgtgaagagatatatcatcctgtgtattgagagctaccatactggttctgtctcaggattcaacacatgttatttccttgtgttgttataagtttaggtgttttactcttggttggttttgtgaaggtcctatttgatcttgcttctctgttttttcatacacagatcctattggttttttaagaggacacagtttgatttggttcataataaagagtctgaatgttaggtttcattgttttctcataaaagacttttattgattagttttctactcaaaacatgtttttaatattacatgactatgacaggaccgtatctgaacatattttacagagacctagccggt

SEQ ID NO: 290 - DNA, 667 bp, Arabidopsis thaliana
caaattgactttttataactttttgaacgttttaagagtgtggatgagtatattttgtttgtgtaaaggtttataagtatttaccccatcactggccaagattatgaagtggtctttagtagagatgtgtctttgagtgacttcagggactgagaccaatccatactctttaatacagtagtctccgaatgctcttgacattgcgagccccggtgtttctgcgtctggctgccacacacgatggactcccggctcatcatctagacagaaaacccgccctttgcagccaattatccgctccttctcctctgttttgtttttcaaagcaacccaaattcaagattaagagtcaagaattcactagaatatacatataagatttgtattttgtttgcttctttgatttctaagaggacggaagttaaaacttccgagatctagtaaggtaaaaatgcttatggaatttaagagggattaagaaaactaacgtggtagattcggtttgaaatcgagggtgagctgaaccgcaaccaagcttccctcatccgactccatggctagtaccgctcttgaatcgcctacatttgctacataaataacttcaccctacatacgccaataaaccattaatcagtgaacagaaaaattctcaaaaaacgttgggatc

SEQ ID NO: 291 - DNA, 738 bp, Arabidopsis thaliana
ctagaggatcccgggtaatagaatgtctgggggagagcactggtcgaatcctttccctctgaggttcatgaccatctcttcttcttacatccccaccagattcccggaatcgtctagagcagtccgtttggtgtctttgcctattacgggtgcggtggttggaggcaggcacatctcttctctgagaggaactatcctcagatatcctgaagattcttgaggcagaggacgagttggagcttttgcctctaatctcctcccacgagattggattgataggttcttctagtcttctactctcttttctaccaaggagggggcaggacagatgggaatgatccagcttgtagcaggatttgcaataatttctcagcttctcgtaaactagggaggcttccacttcactcccatcttcaaactccacaatcgtcttcaacacgaggggcttcagccatttactagcaccctcattcgaaagaaggtagacgaaacttcagtcttctctagaactcccacactcttcgcaatactaaccaggattccttcagaccaaagatgaatcgacacaccttgaacattgatccagaaagggatctgggaagggaaatccttatcaatcgtcggctcccaacgttggaaaattatcatccattgcgaaaaatggtagggttgatactttagggctctagcaaggtcttgctcagtcgcgaattggaattggaataaccattcccaaga

SEQ ID NO: 292 - DNA, 681 bp, Arabidopsis thaliana
ttttttaaaataaatgtatgtctgaatataattttcaaaactggaaccctaataaatccagatgatcggaagtctaatcggagaagaagaagagagatataacgaactttattatctgataaaatgttgttacaaagcttttttaaaatgaattaattacattctcaagtttatatactatgtacattaaacttaaaccgaaatctagttaaccggagttaactagattaaaccagtccaactatcccaatatcccctcctcaagtctttaccttagcaacatgatttggaaggtatagacttgacagtgacattaacttcagtaagtaatggaagggtccaggataaagagccttggtcaagatatcagcgtgttggttttcagttggaacgtgcaaagccttcaagtttccagcctttatctgatcccgcacagtgtgacaatctatttctatgtgcttggtcctttcatggaacacaagattcatagaaatatgaagtgcagacttattatcacaaaagagtttagttgtactagtgactgaaacatgaagatccttcaagagttgttgcaaccatataatcttgcaagtggcctgtgccatactcctgtattcagattttgtgctactcctactagccacagactgtttctttgacttccaagataccaatgaagtg

SEQ ID NO: 293 - DNA, 995 bp, Arabidopsis thaliana
atatacataagaattacgatttaacttttgtgccctcgatttatttgacaaaacaaagggttgtgttccttctaattggtgttacatatatatgcaggtggatttgacactgcacatgctgctgctcggtatattttcgaacctacgtaacgcattactatactagtatcattttttgttcattattttgttattggctataatatgggtcaataaatatttgagacagagcctatgatcgagcggcgattaaattcagaggtgtagatgcagatattaatttcgacattgaagactaccttgacgatttgaaacaggttctatataagtcttttatggatatatctactttaggttatactagtaatttaattacttactactcagaagaaaacacaatgaaatattggttttttttttttgcagatgggaaatttgacaaaggaagagtttatgcatgtacttagaaggcaaagcactgggtttccaagaggcagttctaaatacagaggtgttactttgcacaaatgtggaagatgggagtcacgtttgggtcaattcctcaacaaaaagtattaatttcttcatagtttttggtgcaaatattaaatttccagtctgattcttattaatttgaagtgtcctgtttgcttatgtagtctgctatcttttcaggtacgtttatttgggtctctttgataccgagattgaagctgctaggtactgcttcattattcactgtctcatcaccaaaaaaaatatttactttgttcctggtacgaaatatgaaaaaactgaaatttgaatatagagcttatgataaagcggcaataaagtgtaatgggaaagacgctgttaccaattttgaccctaaagtatacgaggaagaagaagatcttagctcaggtaaatttatttttacatttgtttttcgtcttaaaatttactccagtcaccagattctattgtaaaaatcaacagagacgacgaggaac

SEQ ID NO: 294 - DNA, 650 bp, Arabidopsis thaliana
tcactaattagctcaggtaaaaatatataattcaataaaatcgacaaacacaagagatgacttttaacctgatccacgagtgcaccactgtgctggcgaactttatcaaccacctcttgagccgcagctctccgaagattgcttattgatttacatgcaacgagaaggggatacatcagagcctgaaaacatttgaaaaataaatagtcaaggagaaattatgcatccaaaatcgaagtacatatgcaatcaaaatggcagagtaaaactttatgtatgtcttaattcccaccatagaattgtaatactgatgaagatttataaaatttctagaaggctgcaaacctgtgggtggttttcgcctatgcggatgagaagagactgaatcagttccctgacagcacgattattagaatgtatcctagcaatgatttgaggtagcacaacaagccatgtgttaatgttgacatgactgaatcctgtcttcaatgcggtttggacatcagctgtagctccatggttgaaccacaatgtcagaagacgcagtatgtcctatggaaatgagacagcagaggaaaataatttaacagacgcacccgtatggtaaaacaacacctcgatttcaacaagtataagacaagtagcaacat

SEQ ID NO: 295 - DNA, 702 bp, Arabidopsis thaliana columbia
tgggttctcttattcaaattgattaaacgtgatttcagagaagaagaaacactaaacaaaaaagtatggtggaattggagattgtgtggttggttagaggcgcttggatcactgtttggatcgtctctatacttcctttggtgattgcttcgatacccacttcaaagctcaactcttttcgtgaactcgttttgagtttcgctggtagaggcaagattcttcacccttcttctcaggtattcttctaaagtttgtaacttttgcctaatttctgtcaacttttaagtttggatatctggttgatgtgaaaaaggtttgaactttgttcttataatgatcaattagttgatgtcagttttagtttgaatctctggtttcaatttcagaaatgttctgtttttgatttgagattgtaaagtctgtgaatttgcccatctggttgaagtggaaaaagggtttgtatttgttcatataatcagatgtttttccagcttttttgctaatttcttgactcttgaatcgtgttttatatcatcgttctgttgttaatccagattgaaaacgagaaagcataccacttttagtttgaatctccggtttcagtgttacacttgttttctcagatgtgtaattctctctatatgcagaagtttacaattcctcagaaatgctttgcacacttttatgttattggagtggtgt

SEQ ID NO: 296 - DNA, 783 bp, Arabidopsis thaliana
tatgacggtaaaatagatatcagcaaggctaatgaatgcatataatggagtgttgtgcaggacgtcgtcaaacagataggatttggagatcgttggatacaatggataatggaatgtgtccgctctggtgccttctctgtttcggtaaacggtagcccatatgggagatttgagtcatctagaggtctgagacaaagcgatccactgtcaccgtacctttttgtcctatgcgcggatgttctaagctctttgatgactaatgcacaacagacagggcatataaaaggaatccgagttagcaatggcggtccatccatctctcacatacaattcgctgatgattcactatttttcttaaaagcagaccaaaaaaacagcaccagcctcctcaaaatattcaatgagtatggagaggcttcgggtcaagtcattaactttgataaatcatccataacatttgggagtcgggtctatcaacaaacaagggatcaagcaatgcgaaccctacaaataccaaacattggaggtggagggaaatatttgggaataccagagcaatttggccgaagaaaaaagaaatgcttcaatacatatcgaaatctgttcagaaaaagattaatggatggcagaacaagttcctcactactgcaggaaaggagaatctcattaaatcggtggctttcagcaatgccgatttattcaattaatgtcttcgagctcccgataaaactttgctctgaactaaatagcatgatatcaagattttggtggggtacaacccca

SEQ ID NO: 297 - DNA, 1212 bp, Arabidopsis thaliana
gcctggactttaaccactgacctctcaagccgttcctccgcttgtttctggcttgtcttgtagaaatcctccaccgcctcactcccttccttctcgtcaggttgacttacctgaaggcctctgaatccttttctcttcagtctccatctcagaattgccttctcaagaactcccactgaccatgttattttctggtactgtcttcttacttggaaacctctaaacgcagcctgcaaaacattgtcatattcaaaaccatagaacagttttatacggttgcagatagtttctcgtttcttttcttaaagacggtagaaagattagctttcgcttgtacctggatcctaattgccttctttcgcatgttcagaaattcccgcctcattttccatgtttggaacctatactgaatccgagcagcggctgcaatcttcctacgaacctcgaaattgcgaaacgcgtgctgaatcttcatcgcggctattatgtttttggcttcttcttccttgctagcaaacctaactgcgcttgacctaactttcagctcgtgctccctgaacgctccctgaatccgcgccgtgcctctgcagcagttctgtatgccgctagagtgtccttcaggctttgctcctcttcatttgcattccctggatttgacgacttctctgccttgatggtttcaaggttgccactaatgtttccagccgtttgcatgtccttgaactgtgctacaagacatttctcagcaagaaaagctgctaaaccgtcataacctttctgttgtgccagatcagctgccgtgcacgcgccgaggaattccttagtagggtctgtcaccaggtttggccttgcccccgcagatagaagagcagccaccattttctccctttaaaaaaaaataaaacttggtaaaaaagtaaattaaataaaacggatacaagattagcaaatctcatagtacttgaaatatgcaagttagtttaccttccatagtatgctgcccaatgaagagcagtccaaccctgcttatcacggaaatccaacgatatatttgcccaggagaagagaaggattgaccaagtgtatcctaggacggcacagaggtggatcctccaagccctttagagtcatattccttagtgttgcggttttcgatgacctctccaaaagccactctttcagcctatttttcagagtaagctcaaagagatg

SEQ ID NO: 298 - DNA, 823 bp, Arabidopsis thaliana
cccctttaccggcttccatatcctctcttgtcacgtcgtcgtagaaaagaagatcagtgaatccaacttcttctccgatgtatagaccttcttgaccctgagaatgggatcccacagaaaaagaagagttaaaacttaaatgaacggtcacagtttcttgtgatacaagcaaccaaatacgtaccagtaaggttatattgtttccaagagtgatgggcgtgaagtattctctgtccatggtcgtagccgcgacagttatgagccacggagcaacattagagatggtttctttttcaggaccatcgttccctccagcacataccacgggaattcccttcataacagcgtggaaagcagcaatagcgaaatcatctctatcaacctcaaaatctacaggtacttcagatccgagcgagagcgatagtacatcgacaccatcacggatggcatgatcaatggcctttacaatatccggtgtgaaacactcctcgttgttccaacacactttgtaagaggctatacgggcccgcggggcacttcctctcgcggttccttgagctagactgaggacatttgcgtctgggacaaaagaacccacggctgtcgatgcacagtgggttccgtgtccaattttgtctagaggggacataacctcacctttctctgccgcgttaaacgatccgttgtacttactctcaagaccctttgagtagtacatagctccaatcaactttctgttacagctcgatgcgttgaacgcttctgctgaaacacattttcctttccaacgtgttgggattggtccaagaccgttgtcgttgaa

SEQ ID NO: 299 - DNA, 743 bp, Arabidopsis thaliana
cgctgcgtatttaccggctactactgcatcttcaccgggagtttcccgtccacgtccccaacgtgcgtccctcaatatgttaacgtttgggctccaatacgtaagcccaccaactccaccgttgtacatggccctggctcatttgacacaacctgcgaatccccaagagcgtaacttagtcgtggttaattgttaatgataaaatgcgcatgactaatgttgcaagttgagagcatcgtatgcaacttgcggcttgcctcgattttagcgaaaagcgtacgataagttcatattcatttcacctttttaataaatattaaaatagagcagtgttattttttaatatgttatctgattaactataaatatcattaagtattcaaattagttaaaaattgttagaatcagatctttgtcgtaaattggagatggcataaaaacgaaaccaagagcagaatgtaagttactttaaataaattagttttatttaagaaaagttactttcaatagcggtaggctaataagagattcgtgcgtatgtttatttgcatgaagtaccggacaaaatcagaacatgagaagtgtcgaaatatcacaattgtatataagttattttagaaataagaaacaaaaaacgaatattagttccgataaaagagaatatttcgatacagtataagtgttttacatataaacgcactagaggtaattaatacataataaatgtgagctgtatatatata

SEQ ID NO: 300 - DNA, 468 bp, Arabidopsis thaliana
gtgtgctctaaagaccacagttgatccagtggcggtctttaaagacatgcagcatttgtgccgcagcgatttgtgacagaccaatggtggtgacataacaaacatcgcgaccaaaggctttgttcatctcttcatacacgcgctgcggtttcaccggcacgttgtcgaagtgggttttgcgcacaaagtgcgtttacctgctggcagtcggcgacccattctttacgacacggcagacgacccgctttttgcatctcctgcgccacttcaaccagcagtgtcagcgccgctttagcatcagagacaataccgagatccggacacagcacgcgaccaatttgcgtcggctcaatatcaatatgaacgattttgcgcccttcggtgtatttctctaccgagccggtatgacggttagcaaaacggttaccgataccaaacaccatgtcagacgccagcagcgttgcgtta

SEQ ID NO: 301 - DNA, 1111 bp, Arabidopsis thaliana columbia
tcgtttcgtcttctccgattgatgctctgtcgcgaggtaactatttctatcgagtgattttgctagctgctgactgttcgatttgatgattaaggtcttggttccgtgataatctctgttaaatttagtttaggctacttgatgttgaatgattagtttgataatctcgcactctatggtttgctccttcccgaaattgaactctcagattgttagcttgtttgtataggttattaattgcttgacattgatttggatttttgtttatccgttatcgactctctcgatgttcattactttattagttgaacaacgctctctcgctgttgtgtatccctattggtggatttctaattgaaatcttcaatgatgcagagtcatgcctacattttctgctgccgctttgggtagatcactaaattcagggacgtccttatctagtaaatttccaagcacactgcagtcaaagccgtctattttgaatgatgaaagtaagcaacctaaagaaaagacattcactcgtcctcagatgtcaccttctctatatgccactactaaagaaatcctcatcccaattcgccttcttcctaccctccatctccctatatcatcaatcacaaagctcgtgggcctgttcttttcaatagggactctgaggtggatgggccttctcacccgataacctctggtgaggaaaagattagtggtaatgtagatgtggaggctactgcctccttgagcaagtccacatccctatcatttcctatcaccgaggctattgcggtggatcacaccaatggtgttcacacccaaggcatccatgaacgtcctgtttgggattgcagtccccctcttgggacatttttgaacgagaagtcgggaagagatatcagcaatggtgggattggaagtaataatgctaccagtaatttagaatggcaaagttacttattggagccggtaagaataaaagcagacaaggagcttgagcctgaaaatttctataacccaggtgaattagtaagcttcacaagtaacccagaggtagaagatttcgagagagctgaaactcacacagtcttgctacacatgttggagagtcttatgatgc

SEQ ID NO: 302 - DNA, 341 bp, Arabidopsis thaliana
ctttgtttccctctcccccaccattctttctcctctctccgcttcttcttcttcccctgttcctcttataacccctctcgtctcatgtctacctcctcctcttcttccgacaacggagccggtggaagcggcggcgttttcgaggccccatctccatcccgccctcgccgcggagcaacgatgtttggccggagccttttcttgaatctctcgccgttcaagttgccgttaacgcttccacatccgccggcctcctcgccgcagctccggctcttgccaacgtttttcgggtcagttctaacgttctttgaatacttcttttagttttgtaacggtcgaga

SEQ ID NO: 303 - DNA, 788 bp, Arabidopsis thaliana columbia
atgttaagtaagaccaaagattttggttttcactaaacttcactttcttggtaattcaggtctaatcgcaactggtcaaccgatgcatctatatgctccacaaccatttgcagccaatggacatcagccttacacagtcatgcctaccgatattccggttatgcagtcaccttttcccattaaccgggccatgccaattccggttcctaatggtttctatggcacaaagtttctatagaaagtcttgtttttcatcttcattaccttattatttgcctcccagcttaataagtttttgatacatagttaaaaaccaaaaattatagatccgtctgatgacttggattttttttctttctcaatgatatacaactactagctaaagaaaacagaaagaggaagttatgagcattttatataatgaatcacgataattttgctgacatctttaagctagacaatagttagattctgttttcctatttctgattacaataagattgaatcagactttaagctcttaagggtttgcaagaagaaataatagtcttcagaagatcaatggccttgagaaaaatgggtctctctcacattctcctgcacagcctaagacaaatcaaacatgaatctctatagagaaaaccaagtaagcttgggatataatcattggtatggttgggtttagtacctgaaggagttctgtcatcttgcctcgtccgtaactcggcatgggtttcagcatatgtactggatggattgggtgtatcgcctgcaatggctcaatggac

SEQ ID NO: 304 - DNA, 1425 bp, Arabidopsis thaliana
acatctccttttgtcaatgtggcagcatgtttgccgctgtccaatccaaatccagcggcttccacaccaatcattcgaacctctgtgtcatcgacaaattcatggaagagtcccatagcatttgaaccaccaccgacacaagcaaccagaacatcaggcttcccgccccatttctccatcgcttgtttccttgtttctttaccaatcaccgcgtgaaagtctctgaccatcataggataaggatgaggacccgcaacggatcccaatatgtaatgtgtagtctccacattggtcacccaatcccttatagcttcagaagttgcgtcctttaaagtggctgttccagagtggactccccttacctacaagcatcagacttagataacaatttgaaagcattgcgattttgcaaggtttacgcagagaattcacatcacctcagcaccgagaagacgcattctgaacacattaagagcttgtctctccatgtcttgagcacccatgtagataatgcactgcaaaccgaaacgtgcacacacagtagctgtggctacaccatgttgaccagcccctgtctcagcaataattcgtttctttcctagacgcttggcgagaagagcctgagccacagcgttgttgatcttgtgagcaccggtgtggttcaagtcttcccttttgaggtatatgagcggcccttcaccgttttcacggcggtaatgctccgtgagcctctctgcaaagtaaagaggactttcccgaccaacgtagtctttcaagatctctgctaattctctctacagattcatcaaacattagttagacattgcccaacaaacgaactaaccaaaaagacttctaacttacatcacacagaagcatgtaatgctgaagaaactaagaatatgaaatgaatgtcgtttccagatttctggaaaaatacaacactttcccagaattacatcctacatcgcaaacaaatcgatttgtcccatacggcttaacattgtttggcagattattttttagaattggaacaaaaaaatccgttttttaaactttatcactagccatggcaatgacaacgcttgaatcagaaactcacaaagccaaatcatttcgaatcgattcaaaaactatgaacaagatggaaacaaaatcagcaggcatacctggaaatcttcgtcggtggcgagcgaatagaaagccgtttcgagttcagagagggcgtgcattagagtttcggggacgtacttgccgccaaacttcccgaaacgaccgaatgaatcaggtcgttgccacatagtcggatcagatccagcggccttaatcttctccgagtccgccatgacaacagctgggtccttagcgatggtgcaggagacggagaacgaagaagaggaccgtgagcgagcgatggcagaggcg

SEQ ID NO: 305 - DNA, 640 bp, Arabidopsis thaliana
tcagcttcttcttcatcatcatcattaccaattccatatcaggtctcagtttcctacttatttctcggcagctgctgcaagctcattggtagaatatggtagtgaggatcattaattacctactctatattctataaagtaaaaagctaattaatttctaaattaaagaataatttccttttctgtcatcgaattagtctattatcgaataatgattgctattttattttatatttctctgttagtgcgtcttgggctcaactttagacacaagccatcaaagacgtctttgagatcacatcctggccggtgctcccatcagcgtcttgtgctgaggttgttatctgaaatcatacccaaacaaaggactgttcccatctttctcccactaattaacaacaaaaatttaagcagctcttactaaaaaccttaagcgagagattaggttttcttctttttttttttcttgccatccaagaaacttgaccgatctgtttaccttcctttgatgtaaacctctgctttgcgcatagatggtttcccaaggttgttttcgtgtagatgcgacagacttttccaacatgtgtgacatcaaaacttgagaactttcagaacagaacagaggagtgatgttgtttag

SEQ ID NO: 306 - DNA, 808 bp, Arabidopsis thaliana
catgcaaattctctacagcttcgcagattttatacttgggatccccaataaccacttgtgttttcacattcacctgagagtaaaccatcacaacttggtcatgaatgaccaccctcaaatcaatatacacttctatagataacacataagtaattgctccagattctaatccatcagtgaaagagaaatattctaatccataaaacttatagaattacactactagatctggactatgaggtaaaatatcccattctcacaggggacacaagggaaataactctactcacagatttttcagcacaaatttgactagcgtgttcgaggatggtgtcggtgatccgcttctggtgttgctcgattgcagcagtgaaagcaggaacctcaagaccaccttaatcgcaaaattcccagagtcaaacaccacatggtcgagatcatatatacattaaacaatcacaaaattagtagtaacgagactcaactgggaccaccgaaaggtatggtgccgggactcacgccggcggctacagaaggcgacggctggacgtggagcacgacgaatgatgaatcggaagaagacgaagagagcttgaggttgtctagagcccacctcagagcttccatactcacctcgcttccatctaccgccacaacaacgcaattcaagcttcctgaaacatccatgacttcttcaatctctcttctctgtgctaaggctttctgtgattttcttcaactcttggaaagttcaagaggacgatggctttcacgtctcccatttttaaattcgcggctatcaaaaggg

SEQ ID NO: 307 - DNA, 916 bp, Arabidopsis thaliana
tcgctgatagaactaatttgtaaaattataaccactttaaaacctaactaagtcaatattctataacacatagcatgttgcctcctcttaccacttaaaaaacactacaacatgttatatgttttcaaccattgtaactcgttatcctctcgagctgatcggccaaatcagctttttaagcaatcaatcttgcgtggtttttgcagtaacttataagaaacgtttccatataatgctgagcccattctcaatttccatcagattatataacgtctaactgtttctaagtaatgattttatactccatataacatataaccgattgctataacatgctgtatacacgtctaatatgattattatacatgtaaataaatgaaactatatcgcaaatagaaatggtaagcaataatgcgaaggcgttaaaaagataattatacgaagaaataggaaaacaaacatcaaattaagatttacaagtcaagtaacgaccgttacggctttataacattgacgattaacctaacaaaaattatttgcctactacaaaaatatttcagtcttataattataaagcttcctcttttcttcttcttcaattcatccgaagctaaaagaaaacactagaggaggtgaagatttttaaaaatgtcattcttatcattttctcctatttctctggacttattatctagtaatgtcttcttaaccattctagcgattatcatatccggtttacttaaaaccattacgtaccggaaacacaattcgaaccatttaaatctcccgcccggcccaccaggatggccggtgatcggaaacttatttcagttcacgcgctccgggaaacagtttttcgagtacgtcgaggatctcgtaaagatctacggtccgattcttactctcaggcttggta

SEQ ID NO: 308 - DNA, 619 bp, Arabidopsis thaliana
tgactgaatacaattttacattctttcaaaaaaaagattttattttttcctgcattcaaatatgtaatcaaacaggtataagtagctagctttagataatatcagagtaaaccacaagaaattagatattacttacaatggtctcgacaaattcggccttgactggtcttccatcagaatgcgtgtgtcctgcaacccaaactttactccttgtcacctgcgaggggtctgaactctcttttttctacaagtaaaagaattgaatgtggtgtatctgagactttatctcttacttcctatgattaaaaccatttagcaactctcactttcgccagaaggttggatttagaagccctaaacaaacaacccatatgtttgaaaatttctcttctttgcaattcttggtccacattgaacctcccctacattagtatacaaatgtatagaaaatcactattctttacttaattagtttttcaagtaaatgtaataagatgatcaatacacttacctgaatttcctcgcatagtgctgtccttattatatcatctagctgcctccaatcatccagaataatagggacgtactctctcacaagtgctccaagaaatgatgaaag

SEQ ID NO: 309 - DNA, 855 bp, Arabidopsis thaliana
agacatgatcatacagcgtgtttgccactgtccaatccgaatcccgctgcttccacaccgatcatccggacctctgtgtcattcacaaattcatggaagagtcccatagcgtttgaaccaccaccgacacaagccaccaagacatccggcttcccgccccatttctccaacgcttgtttccttgtttctttaccaatcacagcgtgaaagtctctgaccatcatggggtaaggatgaggacccgccacagatcccaatatgtaatgggtagtctccacatttgtcacccaatctcttatcgcttcagatgtcgcatccttcaatgtcgctgttccagagtggactcctctcacctatagcaccagacacccaaaaaaaggttcagtaacaaagtttatcacatttaaaagagatggaaatgaatcctaagcatcacctcggcaccaagaagtcgcattctgaacacattgagtgcttgtctctccatatcttgagcacccatatagataatacactccaaaccaaaacgggcacacacagtagctgtagccacaccatgttgacccgctcctgtctcagcaataatcctcttcttccccaaccgcttagcaagaagagcctgagccacagcgttgttaatcttgtgagctcctgtgtgattcaagtcttctctcttcaagtatataagaggcccttcgccattctcgcgcctgtaatgctccgtaagcctctctgcaaaatacagaggactttctctacccacatagtccttcaagattccagccaactctctctaacaaagattcattcacacaaatacacaaaggacatgaatgagacattgaaccagaggaa

SEQ ID NO: 310 - DNA, 755 bp, Arabidopsis thaliana
acatcaatatttgttttttcttacatatcatatatggacctttaaaatttaaattttttcttacaaatcaccatcaagcctttaaattacttttttgtagaaaaacgataggaatttttcttacgaaatttatgtgaagaaaaattgcagaacagatgatctcgtgactcagctgaagtgttacaaaggacacaaacagaggatattcctctgttccaagatgccattttgtctccggttgttaatctgtcatgagcagcaacccaagacataaaacgtgaatttaggcgtacgtccggagaaccaaattgccttgtgccattgcttaaccagtccttgttctcttatctgatgccaaattttgaaagagaataacttagacttaaacttgcccccgcacttcgacagagaggcctatcttttcctatgcaaatacctctacaccgaagcttttccaactcttctttaatgtcatttaagatgtcagcgcaatggcttctcctcctatgaccagaaagcgcttccgccacagaaacagaagatgatataccaagatcaataaaacctcgatcacctagtctaccatgaagctgacccaaagagcaccatcgatcataccagaacgaggatcagcatacaggcttggtaatgctcatgtagaatttattgatatttttccagaatgatgaggatcacaatctacagatatcatacttcagtatagataatcgtaaacggtgtaatatttccttata

SEQ ID NO: 311 - DNA, 914 bp, Arabidopsis thaliana
catatagtgttaaatcaaagccctcgcgatgaaaagtttaattttaccttttaaaattttaaaagtgcaatgtatatgtgaccgtaaaaaagtttataatatatatataagggtcatattgcttattattttagattttgtaagattaatctacatttgttgaaagtgggaaataaaattacaaaaatggatgagttagagggtttttttttgcacaaaacccttatctaaaaaaacaaattttaaagaaaaacgttagacaataaaaacaagagacagggtcaaaaaatcaaacctccattgagccaaagagttaacggtttagagtggggttgcttctcagcttcgacgaagtaataaaagagactccgaccagctttgacatcgatatcgacatagcccgcaaattgtctgaatgccacttcaggttgtccaggcagctttgtcacaagatcttgtactggaaatccttcagctaaattaccattataatcgcacgaccactgcaacaccattactacgactgctacttctaggaaccgccacttacctcccaccatttctctttctctctttctttttttgtggaggctcgctctctgtgttttaacttccgctctttgtttatgtgccttgtgtacttgtattcgtaacgttatttatagacaaacacttcttctcgacgaagtttttcactctaataaataaagttacgtgtaaaataaaataatacaaaattattgcaacattttaacaaacaaacaaagaaatatttatgaatggagaaccgacttaataagtaaaactacgtttcttgctattatttaatcccacttttctgatcagtcctatttcttttcatttttttatccctctttattccatttttttgatactcaactttcgatttatat

SEQ ID NO: 312 - DNA, 1331 bp, Arabidopsis thaliana
ctagaggcatatgtatccttcattttgtttggtctcaagaacaaggtgttgcagtttctcttagttctctgtcttaatctgagtatctattctttgaatttcagcatggtttcttctggatgagatctgtcctctgttctgtttcaatatcttgttgtgtttgtcggttgtgtgtgatgggactaattttcatgatgacactttggactaaatacttaaatgggatttgtacaaaatcgttcactcacttgaagaaaacattccttgaattctaccattcctggtttctattagtctcagtcttcatgtttaaagtatgcaacttcttgttagcttagttttgaaacttttggttctctgtaacaaagggtcttgtaagctgtctttgaaagagggaacattctcgttaacagtctttatgggtcttatgctttgttgcttctctaagttttttgtttgaacttgtgaatggcgaatagatgagatctgtcctctgttcttaacatcttattgattttgtcatttggtttaagaaatgggaccaagaggcccaggaatcaggtccattacgagccccgcaataatcgcgccacaatccagtgaagtccccgtgtcattcatctctactcactcggccaacgcgcgaaacgtatcactccgtctctcaatcaattctccgatcagccatggcttctgattcttctctcggcaacaccaacgacggtactatctctctccctctctctaaatctgaaactgcttcataattttgacgaatctcactacctcaggtcctccttctcccggagaaaacgtttcaagccctatcgaaaacacatactcttcccccgccgcacttcaccgtcgccggcgaggaagatcctctactcccacgcaattcgcaactcctccaccaccgccttcacgtctcgcatcatccaattccactcctccaacatctcgtccttccgccgccagatctaaaggaagaaatggacacggaggtggcggtggtggcggtggtggcggagacccagggacgccaatgtccactgacgagccactgccttcttccgatgacggtgaagaagacggaggcgacgatactactccgactttcgtttggggaactaacatcagtgtgcaagatgttaaatctgcgattgaaatgtttgttaagcatttcagagaagctagagagaatagtgatgatttgtttagagaagggaagtatatggtttcgataaggaaggtgattgagattgaaggagaatggattgatgttgatgcgtttgatgtgtttgattatgatcatgatttgtatacaagat

SEQ ID NO: 313 - DNA, 554 bp, Arabidopsis thaliana
cttaaccttctgagtcctgacaagtctagtgtggctgaagtccatctttcttctggaatttggaagtcaatcgctgatgaaggtgttctgttgatcagatacactgatgttgaagctgcttcagcccataacctttgaccgagaccactctcgctcagcatacttctcaccttgttcatgatagttctgttaagtctctcagcaattccattttgctgtggtgtataggtacacgtcctgtgtctcaccattccctcttgtttgcaaaaatcattaaacttatgatttcaaaactctagaccgttgtcagtgcgtagctcttcacctttctttcactctaaacctctaccatctttttccacagtacaaaggcatcgaatgcttcgtctttgggtttgaggaagtataccaaactttcctagaccagtcatctgttgaggtaagaaagtactgaaacttaccaagactcaaaggcacattgggtgatcccataaatctgagtgacatagcgaacttctcttagtgacatgttgacttgccaaactcactttatg

SEQ ID NO: 314 - DNA, 1074 bp, Arabidopsis thaliana
tacttgatctagttcagcttcatctgtgatgtagtcttctagtctggcaggtctgacaatctgtctttttgctctgtgaattgctatttgacgattaacaggagtccttgttcttgcctctggtgttgtctcatttgtattctgtttaggtgtgttttctccaccttgatcaatagctccacctggggataagtcccttttcgttctacctgtttctgcaattttactaacagactcatcagtagacaaatcaaacaggttagaggacatacctgatttttcttgtgctatgatgtctttatacatcactctttctctgaagacaacattcctgctaatcgtgcatctctggtcttctagaagccacactctgaatcctttcacaccctcaggataacctgtgaagatacctctttttgctctaggattcaattttcctttatctgaatggatgaacactagacatccaaatcttctgagtcctgacaaatctggtgttcctgaggtccacttttcttctggaatctggaagtcaattgctgaagaaggtgttctgttgatctgatacactgctattgaagctgcttcagcccagaacctttgaccaagaccactctcactcaacatacttctcaccttgttcatgatagttctgttaagcctctcagcaattccgttttgttgtggtgtgtaagtacacgacctgtgtctcaccattccctcttgtttgcaaaaatcattaaacttatgattgcaaaactctagaccgttgtcggtgcgtaacctcttcacctttctttcactctgaacttctaccatctttttccataatagaaaggcatcgaatgcttcgtctttggttttaaggaagtagattgaaactttcctggaccagtcgtctgttaaggtgagaaagtactgacatttaccaagactcaaaggcacatttggtgatcccataaatctgagtgcacatagtctaacgtctcctttgtgacatgttgagcttgcccaaagctcactttgtgtgttttccgaagacacagtcttcaaagaatttcagacttgagactt

SEQ ID NO: 315 - DNA, 553 bp, Arabidopsis thaliana
atagagaagggaataccaataattgggggaggtgctggtactggaatatctgcaaagtttgaggaagctggtgggattgatttgatagtgatatacaactctggacgttttcgtatggctggaagaggatccttagcaggcttacttccatttgctgatgccaatgcagtcgtgcttgaaatggcaaatgaagttttacctgtcagtttcttatttcattcccacaatacccaagaaacttgcattctctttccagttgcttctgttagttattcatgcattttctttctaagacccgtcttcatatgtcaaatttaacttgcaggtagtgaaggcggtgctgttctggctggggtgtgcgcaacagatccatttcgtcgtatggactatttcctgaagcagttggagtccattgggttcgttggtgtccagaactttccaactgttggtctctttgatggtaattttagacaaaatcttgaggagacaggaatgggatatgggtaagctacaaagcaggtttcaagaatcattttttgtgtatggattgtgt

SEQ ID NO: 316 - DNA, 789 bp, Arabidopsis thaliana
ataatctcaagcagtttccccacactccagttgtttcagatgctcttgtcctcattccaccacgtaaaccaactctgatctgctttcgtaaacaacccgcctctagaccatagccatgcaatgaaatcatcaaaatcatttactgttttgagccaatcgaagccagaagggttaaacagaaatggagaaataatccaagatgtaataaggaaccagctcgaaatcgtcatcagtatgtaaacaaacgaactcttagccaacgggctataagccgcatataccaacagaataatcgcgagctcaatagctttaatgaaatgagttcgagcatacaatctgtagttctcagcaaatttcttatgctccaccacgaaccctcttccagtggcacgatacttggctccaccatggagtatagtccggccaaagtaatgggttcgagttcccatggagaaagtgtagaaaaacgatgcaagttgcagctgcattgttatgaagtcccaaaccgctggaagaaacccacgctcgagagaattttcaagaatcattggaagtgcagtgaaaagtcctagctgaataataaattgctgattcaagattgcaccaagagcttcattgctgctactcctatcctttgctattttctcaacaccactaagtgctagataaagccgaccccacaagaatgcataaacagtaaatactatcaacattgtgttgaaatagtagccaaccgttgtgtagaagaaagagagcattctagagaagtccagcctgtgacctaacctg

SEQ ID NO: 317 - DNA, 774 bp, Arabidopsis thaliana
aaaggtaggattttttcatccagggcacggcaaatgtcaccaagcactcctactgtgattgagcagacttggtattcttcgaaattctgcagccccatctggagatatttgaaaagctcgggcatgtatttcacaaactcagctccagtagcatatgcaagagcaccgatttgcaagcatggcttcttcgtggacacttgaactatggcatccaaacactcttaggaacagcctcataatgtcatctgcgctctgcattatgatgggtttcgtatcctccctgccgctcagcttctggattataacttggagaacaccacacagagaagcctggacttccgcttgcttctcacggtcatcagttgatattatagggaggtccattgtctcagctaattttttcatgatggcagggaggagatgcgctatgatgcttgaggcctctgaaaggtttgaacaccggacaacctcgttcaaggtttcatacgcagcacctcttagcttagactctgccccatctgtacgctcagcagctgcaagcagatgtgtgatgatctctgtaagataaggagagagaagagatgaacttgctccagagtcttcatatccctgtgcaagattgtatattgctccacagaccttctctgcaacatttggcacatctttaattgattccagtaatacactcacaattctagggaggttttcgggtgatataacagagaaaccactgtctggggagtgcaaaaattcaaagatacggctcagagtcca

SEQ ID NO: 318 - DNA, 860 bp, Arabidopsis thaliana
ataacatgaaatttaaacttcaagaacttttgttaaaagccttaagcgaaacaagcccaatgacagcaacaagagtcgaggcccaaaagatgccatttccagcaaccaacccaacagcactgctcttggccggagctggcgccggagccatcgtagaagtagatgactttggagaaggagtgggtggagctggggctggagcagccggagtagtagatggctttggaggaagagtgggcgtaacagcggctggtcctggctttgggtggttaggtgactgaaccacgacagtcactttctcacctttagcacagttaccactcggagctccacttatgaagtagtaaggccctgagacgtcgagtttcactgttgtgtatccgtctttgtgttcttccaaaggcttctgtgtgttgcatttttcgtagttttcttttgttacttgtaacaccgaatcgatctttgaatcgtatttaaacactgtcacatgcaaaaacaatccttagcttactatcttatgcattcgtatatatgaaaaaataattatatatcttaaatgtgttttaagttccttgaatatatctaaatgatttggattattgacatatcaaataaccaaacccaactcaagacttctgatattcaaaccagaagcctttgcagactaaaagtgtatccaacaataactaacatccggatcttgaccatcatgacgaaactatggtagcatcaattttttttttaaaatgtcaacctatgttaaattttattaacatgctaaaagattaagacccatttaatcataatggaattttgtggaaaaccatggtaataatgtcacttgataaaactagctagca

SEQ ID NO: 319 - DNA, 696 bp, Arabidopsis thaliana
tggtctcagacattgatgggtcaacctctgcttcaccaaatccggagtactaaacctggttcaagacagaccgagtcgtcaaatcttggcttcttggatccttttccgaggatatcctcagtgtggttgtcaactgcaacacttcacatgaggtatggatctctatagcgaaccattttaatagagtctcctcttctaggctgtttgaactgcaaagacgcttacagaatgttagtaaaagggataagaccatggatgcatatctcaacgatctcaagaacatttgtgaccaactagcatctgtaggtagtccagtgacagaaaagatgaaaatttttgctgcattgaatgggttaggtcgtgagtatgagccaatcaaaaccaccattgagaactctatggatactcagcctggtccaagtctagaaaatgtcattcctaagctgactggttatgatgataggctccaaggatatcttgaggaaacaaccatttctccttatgttgctttcaacatcaccacatctgatgatagctatcgcaactcctacaaccgtggcaagggtaagccaatagaggcagaagctccttcagcactcgtggtagagggtccatcagcagatatcctcacaaccagttcttcaagctcacagcctggtggttcttctgttatctgtaaaatctgtggcaaaatga

SEQ ID NO: 320 - DNA, 549 bp, Arabidopsis thaliana
cagagagtggctctaaattacgcctcgtcctggctcaatgcaacttcccacttcccctgaagctctcactcttgtccgttggatcacccgtagttacaggtactcttcttagaaccttaatctaaagacttgtaacaatatagaatgtgcttatctcatttaataactcaataaaatgtttttctccgatgttttagtattcatacaggtgcagatctgtttggagctgattctcagtcctgtggaggagacacattgcttaagcaactctgggaccatagtgatgccatattgtgctgctccctgaaaactaatgtaagaattctgtttttttaagaggtgctcaatctagtttatggttcggtttgggaattgtctgattattttttggttctcaggcctcaccggtattcacatttgcaaaccaagctggtttagacatgcttgaaactacacttgtggcacttcaggatataatgctcgacaaaacacttgatgactctggtcgtagagctctttgctccgagttcccaagatcatgcagcaggt

SEQ ID NO: 321 - DNA, 548 bp, Arabidopsis thaliana
ggcacctccctgtcacacatattatatgttacgttttatgagtatatatattgaaacaaaatatgatgtatttttattttatttttttaaatatgatgtatttatatcaataagaaatttagtccatatatatatatatatatatacctgcatggttgaggccagtgttgaagagcctcactgtcattggtgtaaagcatgctcacataatccttccactcaatcgccttctccttatctggcacaaagctcgttccgtacttaaccagcttgcttggactcacttccttcaggtacatcgatttttcctcaggagcttgtgcaaaaaactcatgagccgacgattttagcaactccagcagctccaccgaaacaccatggttcaccacctgtcattttcatttcgtcctcaaatcatatagtcttctctcattaaacatgcatttgttagagattggtaaaatattctcaatcttataagcccagtttactctttttttccaagatatatacgtcattttgtaagtaataccgcgcaaatttacatg

SEQ ID NO: 322 - DNA, 750 bp, Arabidopsis thaliana columbia
tcctactgcaactcatcctcttctgacgtcttggttagctccacaacaaacctgaaacaagacaagatatgaagaaattgacaatgtgaatcaagcaaggccctgtatttctctcacctgcgatagttccaagcgtgaaagttcctgctgggatcgtcttgcttttcatcgtcttgcttttgatgggcttgcttttgatagtcgttcaaaagttgcaattcattttctaaggagggataataatgcccttttttactcaaaacccactttcgatgataccaagccccatatgacttgacattcctctccaaggcattttgtacctgaggattaacaaccaagagatcatgagaaaactttcacatgaatgggatgtgcaagctaacacagctagcaattataaaccactcacgactcctagttcttcatcgataattgagttgaccaagcttggatcagagtcctcgtcgagtcgggactcgaaggcgagcttcggatagttccaagcagtgtagaactctggattggttattagaacgttcgcgcttaattgaattgcttcctttgtgtaactggaaaaccaaaatcaaatgaatgggttggttgagagagaaaggaaagagaagaagaagaagactgtatgtacatcttttgatggtgattggacatgaactgggactggagagaccggagctcaagggctttagctgcggtctcctctggattcggatcctcctctctcttacgacc

SEQ ID NO: 323 - DNA, 700 bp, Arabidopsis thaliana columbia
caatattgttaactttcaagccagatgatgctgtggaatcaacttcagattcaaggctactgaactgttcataactatcaatatgtgatgacatatctcgcgacacaatgctgaatgatcgcttcattctcttagacggatttgtttcttcgtgtgtcgtaaagtttcttgtcctctcactcaaatcctcgcctaaaccatctctcgatcctccactagggtggaacgatcctgcagtcctgtctaccatactgatcaccgagctaatctcacttacagattctgccaatgattttggtgatgctgcttgaaactagaaagtacagacattaaacattaggtcagtaaataggagaaggtaatgaaagtaaacttggataagctatagagtttatgatttctttacttaccgcttttataagtcgatcaataggccgctcggtgattggctcgggcggaggaacagataacagaggagtttcttgtgtgcccagtttactagaagaatctaaagttgagtttatttcaacaccagaaactggagactcaacagatataggcatttcagaatctccaggaactggagatggagctggagcaacaaaaggcgagccactagacttcaatggggtgccggttttgttaaccgtcgcaggaagaatctgctggtcaactaactgaggagaagagtggttctgta

SEQ ID NO: 324 - DNA, 598 bp, Arabidopsis thaliana
ctaaagccgaagttactgtcgaaatatgcaatgcgcggtttaacatcgtttccagccagagaatctcttcctcgctgctatcacgcgtaatggtactctccccttccggcgacattttccacaacagaagataatcacccgtccataccgactcaaaccatttatgtgtcagcgtccacgtttgctgacctacgaggacatcaacgctagcctcaccgacgcgaacgaccacaacaggcaattttttgtccccgactttaagcgatgcgatccagggcaaattctgatctaccaatgtttgtaaagaagcattcccacttttacatgccagccccgctcttactgcctgatcgcaccaggccgaatcagctgggacctcgtacccccatacgccgtataacacgcttagcgcctcactatcgcgcatcaccacatgagcaatatccttagtcatatcttgtttaactactggcgttacgggtatcagccacgcaggaacgggtaacgtagctgtaaaagaggacagcagtagccaaccacaggtaagagcgataatggttccactcatcacctacgcaagcctatactgcacagctta

SEQ ID NO: 325 - DNA, 1042 bp, Arabidopsis thaliana
ctctctaagtgagcgcaccaccaaagaggaatccccaatcataaccccgaatgagctagtgaagctgatgggttgtctttggttcccaacaagatttggtatgatggctgctcagttcaaagcctttttggatgcaaccggtggactctggagggctcaggcactcgccggtaaaccagctggtatcttctacagcactggctctcaaggtggtggccaagaaaccacagcgtaagttctcatcaggaacaaacacttcacatcatctcttgccactatatttacttattgaaaacattttgtgttaatctatagattgacggcaataactcagctggttcaccacgggatgttatttgtcccaatcggttacacatttggcgcgggaatgttcgaaatggagaatgtgaaaggtggaagcccatatggagctggaacatttgcaggagacggttcaaggcagccaacagagctggagctacagcaagcatttcaccaaggccagtacattgccagcatcaccaagaagctcaagggatctactgcttagagcttaaaaagattatggtatcaataagaaaaaaagaaaaaaacagtttggttctgcttttttttatattctttctctttgaatttgggggcttttgtgatttttcgggtttaattatcttaaaatacatgatattatttcacagcaataattcttatcttggttttacgtatagatgataatgtatgatttgtacttgtgttacactccaaacaaaagatgcgtcgtcattattcttgtagtttacttttgttaaagttgattgtttgctttctttaacctatttctcattttaccataataataatataatcaagatggagttagattggaaaattctaaatttgttttctaactaagagtttttatggtcatcatcataggtatcaatatttttctgtgaaaattagtgattttagttggtttacatttctgcaaagcaatggtacatgagagattgttgtaagtgacattatgtacactacttgtagg

SEQ ID NO: 326 - DNA, 1261 bp, Arabidopsis thaliana columbia
tcccacctaaaaactatcttgtacggtgagtgagaaaggaagtattagtcctcatgaagctcttagaaccgtttcccaagcaccatacttggagctgaaagtgcctccaccatgtctctctgcgtactcaaccattgtcgtctcgcacaatcattccacgtttgagctattcctttcgaaaaccctggttctgaaaattccttcatggacaaactgaaccttgatctggttctcgcggatagatcctcatacttgtgtacactgaaacatgcagatataaatccttaagatcatatatatttactccaatcgttgttacttgatttctaagaaagattcatacctagtgtcaaaggagatttcctcgagaactatcggagaactatacggataatccataggaaatagtaagcgtaaaggttgaatctgtgcctgcatcaaacatttagagacataaaaaatctgagcagagtgaggaaaaagaagaagtttgaagtaacttacaatttttccagacttgtaatgatctttgaatgtggcactgagagccacaggagcataagtacaagtgacgattgttcctaaagaatcttcatcacatatctctaccactgtctctacaagtctcccatttgtttctttgatttcttgcaaaagggcataaccaggctacaagattgaaaaaatggatttatttcgatgtttcatttgttttcgtagttcgataccaatagagtagattttaccgcaatattgttaactttcaagccagatgatgttgtggaaacaacttcagattcaaggctactcaactgttcataactatcaatttgtgatgacatatctggcggcacaatgttgattgatcgcttcattctcttagacagatttgtttcttcgtgtgtggtaaagtttcttgtcctctcactcaaatcctcgcctaaaccagctctagatcctccactagaagggaacgatcctccaatcatgtcaaccatactaatcaccgagctaatctcacttacagattctgccaatgattttggtgatgctgcttgaaactagaaagccacacacattaaaaattaggtcagtaaataggagaaggtaaagaaagtaaacttagataagctatagagtttacttaccgcttttataagtcgatcaataggccgctctgtgattggctcgggcggaggaacaaataacagaggagtttcttgtgtgccaagtttactagaagaatctaaagttgagttta

SEQ ID NO: 327 - DNA, 546 bp, Arabidopsis thaliana columbia
atgccataaatggaacctaaatctgttttgaaacaattatagaataatttcttgttaaaatatatacaatacgacgccatgagccacatcatacaaataaatgtttattctatctcaaaggaaataagaaaacctaacttgggctataaggtttcccacctaaaaacttctatccacgtctgtgcaaaatctcacgaccttatctggaacggtgagtgagaaaggaagtattagtcctcatgaagctcgtagaaccgtttcccaagcaccatacttggagctgaaagtgcctccaccatgtctctctgcgtactcaaccattgtcgctctcacacaatcagtccacgtttgagctatttctttcagagaccctggttctgaaatttccctcatggacaaactgaaccttgatcttgttctcgcggatagatcctcatacttgtgtacactgaaacatgtgaatataaatccttaagatcatatatgtttagtccaacgttgttacttgatttctatgtaaagtttcatacctagtgtcaaaggaga

SEQ ID NO: 328 - DNA, 1081 bp, Arabidopsis thaliana
tgatatgtgatagtgcccacgggagcaactactacagcagttccggtgcaaaaaacttcatctgcatccattacttcatccacatgaactgccttctctactacctgatcataactcaggtgtgaaacttagctgagtttagtttttgggtgtttagagtgattcaatcttatctgtgttacctgataaccttgatcacttgcgatctccatcacacttttccgcgtaatcccttcaagaattgttccattagttgcaggagttgagattgtccgaccctgaatcaatgatacaattaggatgcaacaaagagacatggagacaccacaatatatcttaccttgacaacaaagacgttgcaagaagaagcctcctctaagtacttcttcttgacagagtcgagataaagaacgtctgaaaacccccgactcttggctctgctcagtgctttcaaaacctacaaacacgtggtttatcaaaactctttttctgactctggtctttgagaaactaagttggtttaacacttactggcgcataatttgtgatgctcttgacgcctccagctccaccaggagccgctcggacatattcttcctcaacatagaggttaagagcagccatcccttcctacaaatcagtgaacaaaacatttgctaatcgttccatcgccaaaaagcatggacatgcaagagtattgtatataccttgaagtagttaccaactggagatgcatagacaatgaatgtatattcaggtgcaggacctaaaccaagtattggaccacttcccatcaacaaaggcctaatgtacaaagtccctttccctgcaggaggaacctgaacaaacacatcatcacttatcagatcccaaaaacaaacctcttcagaagaaatatacgtcacaagaaagcgtttttacccaacgtttgtttgcaagagcggtttgtttaactgcattaacaaactgatcaaccgaaggagaaggcatgagcatccgttcagcgccaagcttcatccggatagcgttgtgatccggcgaaacaaaagaagcttccattttctttcctgtatgcttttgt

SEQ ID NO: 329 - DNA, 547 bp, Arabidopsis thaliana
cattcttcttcttcttttcgtctcggctgcagattctcacatcttgctgccttattttcccttgaaaaagcaaccaaaaacccgtgcttaagcaaaaccaatgcctagaactttgaaacatttcactttcttggctcttcaaacctccttgacgtagttttcttcacctcctccaataacagcatcatctggcatgtaacgtttccagaacggatgttgcttccatactcttcccatttcttcaattggaaccccttttgtctccggcaacaagaagtagatgaagacggtcatgactgcaaccattcctccaaagaagtagaagagaccaaacttcatgtggcaaagcatcgtgaggaaaaactgtccaatgaggaaagtgaagaacatgttgacagagacgttgatggcttgtcccgctggtctgatttccaatggacagatctcacttggtactaaccatcctaatggaccccatgaccatgcaaatcctgcaacatacaaacatatgaaagccaggatccaatctgctgttgcaggtgttaag

SEQ ID NO: 330 - DNA, 637 bp, Arabidopsis thaliana
  unsure (1)..(637): unsure at all n locations
cataatcagaagcccaaattaatgatataagcttaaaaagaaaaaatgaagaagataatagtcagaattttgggtcctcatctcgttgttgattgcgatcaattaatgaacttttacataccgtaattaacataatctaaaattctaaagtccgcccaacactatttcaagtttttttttaaagttccgaatctttggcccataaactctttcgacatccgggaccagcctctagtgtccatttgttcatagtaactttttggcccttactacactaaaatcttattttttttttgaaagaatgtaaaatttatattcaaaaaaaaaacgttgttacaatagatgcttctgtttttctaatgatttagactgagaataaagaagagtgcagataatttctgaaaaaatgaagcagttagaagagaatcatggtgaaggacgcgttgagaaccatagtcgtagcnaattgtcgtagctatggtcgccaacgtcgttgattgagctgattctgtttccacggttttgtcgatgagttggatgagtcgagttgagggggactgcgcttctccgtgacgtcttgcatttctttccgccagatgtgataagagatgcttggaagacgtacgaaacaggagag

SEQ ID NO: 331 - DNA, 318 bp, Arabidopsis thaliana columbia
gtgttgttagggaatggatgcagaaaagtccgtcacagctttcagaagcatagatcgctggttgaaatccttgagggaaagtgataagagtggaggacagaatagaagccgattccaaacagattgtactaaaaccaatgtctgtatctggacgaggctgattacctttacttcctttcaaggaatattcttcagacatgaccatgacctgtggaaaatccacgcgtgatcgctcgacgatcttcaagtgtctctcttcaaaactgcgagactcgatcgtcgatctccattgttttgagagagactttagttggatta

SEQ ID NO: 332 - DNA, 523 bp, Arabidopsis thaliana
gtgcgtctaaaacccaagtcacctagctacaactattttggattattattttttctagggtacttttgttttatatctacacaacatgacacaagatgcctatagatcattaagctataaaaagatgtcaagaaggctcatgtactaaaccaatccacatagagactagagaatattattatataaaagaaatgaaaacagaatcacatttcaaagactgtttgtactcgaaaaatcgaaattctaaacttgcagtgatctgaattccaaaggaaccgaggtcaaacttggaagatagacacattgagaaaacccaagagagacataatttatttgaatcttcttgcacaagtctcccctcgcaataaagatgcaacccactccagtttgattgtcgtcacagcacaggataagggtcatgtcatggatgaagtaactaatatcagaaagctgatggaatagcgagggaaagtcaggtattgacagtgtcatcaagtttaacacaccacgttattactagagt

SEQ ID NO: 333 - DNA, 742 bp, Arabidopsis thaliana
taatgtataactaaatctacaaatatcattaatatcaacaccgcaagcgacataatcacctatgtaagtacattatgctattttttaagctggaagagtattgcataacaacattatgttaaccacactagacgcattccccagctttaaccttctgcttcttccatttatgagcagcttcaagaatcttaagactcgttgtctctgattcttcggggaacaaataatcagtgtattcttcatacctgccaaaacattcaaataatactttcacatttcgattctcacattccaaagataacaaatcaggaaattatatgtatgcaatgcgtactctgtacagccatcttctctactgctcagctttctcttcttgaccttcttcgggagcttcgattgaacgactctaacatccccgagcttaccaaagcccgtctccatgttaagccaatcctccaaaagcatagcacgctcttctttcagctctggtgtggagtctttgttgtatgtgttggctctgtcgaatatctctgagaaaaagaaaggaaatacagaacagttaaaacttgtcacaaggaatcgtcaagacgcacaataaatatagcagtagcttcgaacctctggcgcgtttgatgccatcttttttgcgttcaatagcatcttcttcttcctcgtcttctttgtgtccgcagcagacgcttcaaactttgcaaagtcaaccacaccttgcaatgctttgtac

SEQ ID NO: 334 - DNA, 521 bp, Arabidopsis thaliana
gactatcccttttaccgggtaccgagcagaaagtaaataaatgtgcagaaactgttaaatggatcctcaataaattagcaaaaacaatcaataattgtttttcacaattttcaaaacaaactcacgcttcacaattttcaaaacaaacccacgctacacgtgggtatttatctagtataatataaaagacatgaaaaaagaatcacatttcaaagactgtttgtactcgaaaaatcgaaattctaaacttgcagtgatctgaattccaaaggaaccgaggtcaaacttggaagatggacacattgagaaaacccaagagagacagaatctatttgaatcttcttgcagaagtctcccctcgcaataaagatgcaacccactccagtttgattgtcgtcacagcacaggataagggtcatgtcatggatgaagtaactaatatcagaaagctgatggaatagcgagggaaaatcaggtattgacagtgtcatcaagtttaacacaccacattattactagag

SEQ ID NO: 335 - DNA, 781 bp, Arabidopsis thaliana
tggtcgattttcagtttagtgtcatagaaacgattaaaatacccaaagatcttgtagcccttttcgggtttaccagcatcgtatcctacaccgcaaaaacggaaatctctgttctccttatactcgatccacccaacctgtcttaaccatgggattccaaatggtaaccccttgattccaaaagtcacgaaacaataatccatcgcaagccgcggtaaatgcccacttctcagcctcaaaatgaaattgacaagctagctcacgcacctctatcttcggatcaacgccgtccagaccgatggttcctatcgaataaatcttgaatccgggcaggattatgaattggggacgtgcaaaacccaagcttttcttgatgaaccatttgtcgttataaagatcgttccagtgtttacatacggatcttagccgaacaagagatccaggtggaagccgacacaatatctcttcctccaactcccacggaagcttccccgacgccattacctttctccgacttcagtggctttagaggagaatctatatatataccactgcgtgtgcaactcaaataaatcagataagtgatctttttatctgttaacaccctttttttgggacaatattaaaaaaatatatcaaaagtaaatatcatataattcttaataattatttaggaaagagatttatcttccaataataaaattactaaatatttatttctcaaggataagaacatagatttgaggattaaataaataaacaattattctttaaattgtta

SEQ ID NO: 336 - DNA, 526 bp, Arabidopsis thaliana
cacacccttaaaccagtaagttctagcactactaaaacagttcgtgttatgaccattgcaactgagcatagattaagcatgaggggttgtaataccagaagtggttggtgtatcttatatgaaatttggacatgatgtgtgtgtgcaggtgccaattgccataggaggtcctggcttgtcagcaggagttaggtttagacaggatatcgagacacctgggcttgcaaatgtagctgcgacagtgatgaacctccatggatttgtggccccgagtgactatgagacaagtctgatcgaagtcgtcgagaagtgatgattcttgttgttgtagttctttttaaaagtcccacctgagcctctatagactctgattctcttttaagttactattttcaccgctctctaataaggctcgtgattttttgggagccatactgtatactcgccggccctctcacgatgttgttcaattcacagactaaatttgatttatctatttcgccaaaacataacttcattaaaaaat

SEQ ID NO: 337 - DNA, 666 bp, Arabidopsis thaliana
gaatattaaatcgtttctcggtggcaatatataaatcgttgtagacgtggttaaaaaaagaagattataacatatgatttacctgtaataaacctctccaatagaagcaccagcgtgaacccacgcgctgttactttctatatcaacactgatctgtctaagcttggacaagtcgacgatcacaaacgccgtttccatctccgagacgtaagagaggccttcgtagtcatgaccaccgcttcttaaccgcaagtgaagcttcagcttcttggcgcaaagaacggcggcctgaacgtgcgtttcgtaaagcggctcgaaaatgaactctggcttaggatttgaaggcatcaagtaacggagattttgagctgacgtctctaaggcgagtttaaaggaagaggcgtttaggtcgtgagtgaagaacgatgagtccattggaaaggaagcgtcggagttgtcgactagacacatcacgaagtcttgttggattgtggaaaaagacaatggaatgtaagaaagggatagtaatagtagcgttacaagaaacgcgtttgtgttattcattaatacaaacgccatttttgtgtgttgtttagtggttgtgaggtttttgtgtttgttgaggagtttcatatgtatgtgttgggtttaatagagagagggaag

SEQ ID NO: 338 - DNA, 2296 bp, Arabidopsis thaliana
acgatgaaggatattacgcgaataagcaagaggtctcagctgacaagtaagtctttttgccaggttatatttcaagtacgaaaataagttctaatctaaaaaattgtaattacataagatagatttagttttattaactacataataacgaataaaaaataaacataaattagcaagaacaatcagtaatttttttttcacaattttcaaaacaaactcacgcttcacaattttcaaaacaaactcactcgtagcgtgatattcatttagtattatataaaggacatgaaaacagaatcacatttcaaagactatttgtactcgaaaaatcgaaattctaaacttgtagtgatctgaattccaaaggaaccgaggtcaaacttggaagatagacacattgagaaaacccaagaaagacagaatctatttgaatcttcttgcagaagtctcccctcgcaataaagatgcaacccactccagtttgattgtcgtcacagcacaggataagggtcatgtcatggatgaagtaactaatatcagaaagctgatggaatagcgagggaaaatcaggtattgacaatgtcatcaagtttaaccacaccacgttattactagagttaatcttgtcctatgttacccaaatctctgtattacttgatatacgagattgctttaacaatgcaaactgatcgcccttaaatacagtgaggacaagtttatctcgtaagccagaaacatgcttcccacaaggaaggagacaaaagtgcatggatatttctgtggagaaatcaaagcttccgagaaaatgctcacgagtatcttcattgtaagcagtccaatacaaatttccattcaaggacacatattcacctcgacctgccagcattggccattccggggaatcaatgaacttaaacgcttgagacgcacattcaaagatcgcaaatctgtggccgattttcagtgtagtgtcatagaaacgactaaaatacccaaagatcttgtaatccttttcgggtttacaagcatcgtatcctacaccgcaaaaacggaaatctctgtcctccttatactcgatccacccaacctgtcttaaccatggattccaaatggtaaccccttggttccaaaagtcacgaaacaataatccatcgcaagccgtgatcctggtaaatgcccacttctcagccttaaaatgaaattgacaggctagctcacgcacctctatcttcggatcaaagtcgtccaggccgatggttcctatcgaataaatcttggattcgggcaggatgataaattggggacgtgcacaacccaagcttttcttgatgaaccatttgtcgttgagaagatcgttcagtgtttacatacggatcttacccgaacaagggatccaggtggaagccgacacagtatctcttcctccaactcccacggaagcttccccgacgccattacctttctccgacttcggtggctttagaggagaatctatatatataccaccgcgtgtacgactcaaataaataagaaaaggaatatttttatctgttacgaaaatgaaataacacccttttttggggataatattaaataattcttaaaagtaaatgtcaaataattcttaataattatttaggaaagagatttatcttccaataataaaattactgaataattatttctcaaggataagaagttaaaaacatagatttgaggaataaataaaaaaacaattattctttaaattgtttataaaacagaaagaaatatatctttcaataagaactgcatatttttgtaagaaataagaaaaaaatatttatttcttaagagttaagaacaagaagacaatatttggagaaatatcttgtttatatattctgtttttaattgttaactttgtaacctgtttacgacaaaaatagagaagatctattggttttctcagtattagtcagcagaatctaacaagaaactagattgattcccattatacgagattacaagaattgatttcaatgcaaaacttaatttataattcagctaaaggtagttggtcggtaggtttgacacagaacatataacctaacttttatatgactatggttttgcctatgcgatctctacaactcattgatcaacttgaaagctagttctaaaattttgcacaaaataccaacacagagactaatcaatcatatcaaatctagagcagctgacaaaatcaaaaacattccaaaacaataactccaaatcagacagatgtttatatcactaaatgcatctaaatgtg

SEQ ID NO: 339 - DNA, 1011 bp, Arabidopsis thaliana columbia
cttgtttcagcttcagcttacttttaatgatgcaattacatctgatttgcttctactgtttcaacattatcttatcaaggtatacctggagtaaaagaatcattgctcaaggactatggtgttcgtctagtgtcatatgatcttccagggtttggagagagtgatccccatcgtgctcggaaccttagctcatctgcctcggatatgattgacctagctgctgctctagggattgttgacaagttctggttactcggctattccagtggtagtgtgcatgcctgggctgcaatgagatattttccggaccaaatagctggtaccttcaattttttggataaaatttgaaaattcacaattcatggccaactcatgtttttcacagaatgacacaaaataatatgggaaggtattgatttttataaatctacaggagttgccatggtagcgcctatgataaatccatatgagccaagcatgacaaaggaagagatggcaaaaacgtgggagcagtggcaacgaaagaggaaattcatgtacttcttagcacgtcggtggccaagtcttcttcctttctcctaccgtagtcctttctctctggtaatctcgagccgctggataagtggatgtcagtgtcattaggagaaaaggtaagtctgtattcatcaagtgtttcttcccaaggttttgagtctttgtgagttatggctcacaagctaaacctgtatacaccacttttctatttcaggacaaacttgtaaccgcagatccagtttttgaagatctttaccaaaggaatgtggaggagtctgtacgccaaggaactgcaaaaccatttgtggaagaagccgcattacaggtatcaaattggggctttagtcttcccgagttccacatgcagaagaagtgtagaccaatggcgtccctcttggctaatgtcaatgtacagtgaatctgaatgtgaactaattggttttcggaaacttatacacatatggcaggtttgttgaa

SEQ ID NO: 340 - DNA, 849 bp, Arabidopsis thaliana
agagaagaaacgctcgtgccctaacgaaagagaaaaattgataaatgggctggcaataataattttcaggagtgattttaattctcatttagcacctgtgagttcattcacaaaaagcccttaagtttcgagccgcctcacatttttttatatttcccgccaaacctggcaagagtggtgcgattgttgctctatccccctaaaccaccggatttctcaacaccggtcactcaatgatatctgtataagctaaggagagggttatgggggatatgatgcgtcccattccgtttgaggaacttttgacgcgcatatttgatgaataccaacaacaacgctcaatctttggtattcccgagcaacagttttactcacctgtaaaaggtaaaactgttagcgtcttcggtgaaacctgtgccactcccgtcggccctgccgctggcccgcacacgcagctcgcgcaaaatattgtcacttcctggctgactggcggacgcttcatcgaactaaaaaccgtccaaattcttgaccgcctggagctggaaaagccctgtatcgatgccgaagacgagtgctttaacaccgaatggtctaccgagtttaccctgcttaaagcctgggatgaatacctcaaagcctggtttgccctgcaccttctcgaagcgatgttccagccttctgattccggtaaatcgttcatctttaatatgagcgtcggttacaacctcgaaggtattaagcaaccgccgatgcaacagttcatcgacaatatgatggacgcatctgaccatccgaaattcgctcaatatcgcgatacgctgaataaattactccaggatgacgcatttt

SEQ ID NO: 341 - DNA, 660 bp, Arabidopsis thaliana
cttgatcattcttttttaaaaagtattgcgaatctgatgataaacctttgatcggggatgagaaagtgaacgaaatcacatccatgtccttctttcgatcatcgtcccctgtcttcaacccgccatcgacggtgatgttacattttatcaccttctcaccctttttgatccgtttatcactgttaactccagcttcttgcaccccatttgccggttttttgctgcgggaaagattctttttgcgggacaaagatgaagaagtgctctttttcgctgatgttgctgtaaaaccaggcttcttagttgtagttccgttttccaccaaaactttgtttactttcttcatcacttttctgcctctctgatttgaaacagacgtttcagcaaattggttctgtttctggttatttggcttatcaacggttttcctagtgctagcagaagattctttaagaccactttttactatgcggttcttagtttccaccttcttcttttggtctctgtagccatttgagagcattgaactgtctcgcttgtgaatagtattggcctttgcatgtgcagatacagagggcggcttcactttacccttcgaaccaccaaacctgctttctcccaataaattatttcgctcttgtgtcttgagtggtaatgtag

SEQ ID NO: 342 - DNA, 611 bp, Arabidopsis thaliana
cgtgagtgtaaccccaagcattctcttctgactatgcaactaaaggtaaaaactgtgagcttgtacttttagatatccacttctggaggtgaatgattggagtattaagttgtggtagttggaaatataattacaagtcaacaaaaaaaaaatccattatcagctttttttctaacagtagtttttatgtccaggttctactgctacagattggactcaggataatgagttcacaagctggttggatcagcacacagttgaagaacaagttcaggaagctagttggtcttcacagccacaatcatctcctaattcaaattctctgtataggacatcctcatatcctcagcagcaaacacagctacaacattacagtagcgaaccgattatcgtaccagaatcgacgtttacatcttttccttcgcctggaaaaagatctcaacagtcttccccgagccatattcatcgtgctccttctcttcctggtggtagtcagtcgaacttttcagctccaaacgcctctccgttgtcgaattctactttccatctctcgggattgtccatggaccgtcgcattatggtaataatttggctagatatgcctcatgtgg

SEQ ID NO: 343 - DNA, 561 bp, Arabidopsis thaliana
tgtttttaaaaccaccaaaacttgtgttataagtttatatttccttaaagagatcaacaagaatcgaaaagtgaatggttttaaattatacctccaaaatgtaacgagcgatccatatttcatcagcagctgagataccgaccgatgggccgacttggaactcccattgtcccggcatgacttctccattgatcccactgatgttgattccagcatacaaagaggctttgtagtgagcatcaacaatgtctcttccagaagatttgtcagctccaatactgcagtagtatggtccctgcaagagtgcaagagataattcagaagccaagaacggagaatcgaaaaagagcagtaaacaaacgaaaacactccgcaaaaacggaatgtacctgagggccagggaagccaccaatgggccatccaagaggccagttcacatccttctgcaacaaagtgtattcttgttcgattccatacctaattaaccgtgaaaaaaatcagcgatctacgaccagcgcaagaaagcgaaaaagctatatcaacagaacaggggaatttgga

SEQ ID NO: 344 - DNA, 1006 bp, Arabidopsis thaliana
gggtatgagatcagatataatatattgaaccaataaaacaggagtcacatagaaatgatgaaaacatttaaggtgtggtcgtacaaagaaggagagcagccactggttcacgatggaccggtaaatgatatctacggaatcgagggacagttcattgacgagcttagttacgtgatgggcggaccaagtggccggtttagagctagccggccagaagaagcccatgccttcttcttacccttctccgttgccaacattgttcactacgtctaccaacccattacctcgccagccgatttcaaccgggcccgtctccaccggatttttaacgattatgtagacgtagtggctcacaagcacccgtttttggaaccaaagcaatggtgctgaccatttcatggtctcttgccacgattgggtaacgtatacataacttctataaatcatttcaacatatcatttggttaggttcggtgttaattgggtttttttcttaccaatttggattggtacacctaacaatgactaaatattttctacttaacttgatataattaggctcccgatgtgccagatagtaaaccagagtttttcaagaacttcatgagaggactatgcaacgccaacacatcggaaggtttcagacgaaacatcgatttctctataccggagattaacattcctaaaaggaagctaaagccaccatttatgggacaaaaccctgagaacaggacgatcttggctttcttcgcaggaagagctcacggatacattagggaagttttgttcagtcactggaagggtaaggataaagacgttcaagtttatgaccacctcacaaagggacaaaactatcatgaattgattggtcatagcaagttttgtctttgtcctagtggctacgaggtggctagtcctagagaggtcgaagccatctactcaggctgcgtcccagttgtcatatcggacaactactcgcttccgttcaacgacgtgcttgattgga

SEQ ID NO: 345 - DNA, 618 bp, Arabidopsis thaliana
tgtagactctacctggaccagtgactgacccttcgcagctaccaaagtggaactatgatggttcaagcacaggccaagctcctggtgaagacagtgaagtcatcttatagttaataatctttctttcttgatcttaaatcagattcttctcattggtttttttttcgattcttgtttactaatcttttgtgttttgtacatctttgtttagccctcaagccatattcaaggatcctttccgtagaggaaacaacattcttgtgagtttcttttagttttgaccttttttgttgcagccatgctttattacatccatcttaacttaatggttttgatcaggtcatgtgcgatgcgtacactcccgcgggtgaaccaatcccgactaacaaaagacacgctgcggctaaggtctttagcaaccctgatgttgcagctgaagtgccatggtatggtattgagcaagaatacactttactccagaaagatgtgaagtggcctgttggttggcgtattggtggttatcccggcctcaggtgaagaagatggatatataatcggttttgtatcttttccgttgtcggttattctaaaattttaggcgaaaatgtattgcagggg

SEQ ID NO: 346 - DNA, 630 bp, Arabidopsis thaliana
tccccaatcaaaaagctcagcaatttaactttatccgccttaaccaaaggattagcctttgcaattgcatcacgtccaacttctttgaaatcgaagctacactcatgcttctccgggtacctatgactcccgcaaaacgtgctaccgcatttgcacttaaaccccattacaccaaccttcttgttacagctgaaacacctgttgttcggtctaacaggtctcgacggctcagcctcgtcctgttccgcggctacaggtacagaagacggctcagcggttacaacaacggtttccaaatgagctggtttaatttccagaggatgtttttgtccaggtgcaatgatactgcaagatggaagctttaaagagttcttcaccgcagctttcgctaccgcggtttgatcttcctcggctcttaagcttctgtaacatttcgagcagagattcatgttggatggtgacccgaagaatccacatccgttatcacagagctttggctctgttggtggaaagcttgtgctgttgttttcctctgagcccattttttttgtatctatttcaccttcaactaaacaaacaacaaaaacaatttatcatctgacaccagaagactcattttttaaggttgtc

SEQ ID NO: 347 - DNA, 436 bp, Arabidopsis thaliana
aaatcataaacgagcgacaacaactcgaggtcctctgagcaacaagcctctcaaagcaactgaaagtagattctgcataaggacgtgatgatcatgtgattttaacccaccaattccaagaggctcaactgatacacagtttgagatattagcacaatatccgtcagacccctaaattttgctaacctattgcagaacaacttcttctctgactttgatagccaataagcggcaggaggcaggtaagttctctttccacgtgtgattgcatataagtgttttctaatccctatgtcttctaaatcctttcgtgatttcaaaccgtcttttgatttaacactttgcatcaaagttgacaacattgcatcagatatgttcttttccacatgcatcacatctatattgtgtctcacaggcatatcctgagcaatggaaa

SEQ ID NO: 348 - DNA, 565 bp, Arabidopsis thaliana
ggtgtaagcctcatttatatgtgttaatttgtcttaaagccttgaaatcacttgaacaacaaagattatttgaaacaactacttacaatcactgtttcttttgtctgtgacatcaagaacttaagcatcccatatttacaacatcttgtctacataggaaggagtataattggtagtaagatattaatggacatcgattaatatagggcggagacgaagatcaagcactgaatccacggtcaagagagctccaaggactggtagggatggtgggacaagcctgcattgctgcctcctccatttgcctcatctgaatccctgcgttgcacatgtttgcaatcgacctcatgtgctttattccgtactgagacaacgatccacagtgcctctcgaaagctctcacctaacaaccacataaaggagaataagaaagtgatcatcacaagaagcttaatcatctaatgaggactgaaagtgatttttttccgacatatcatatcgtatctaacgtcctgagtcttgcatcctctggccaataccattgtttaatacaaaccatatagag

SEQ ID NO: 349 - DNA, 537 bp, Arabidopsis thaliana columbia
agttggttagaagtaaccggttcattcgacaagattgaacccgggaaaacatatcgaatcggttttaaaatctcgtttaaaccggatgcgaccggttgggacaaagcccctgttttcatgtctgctaaaatcgggaagaaaggcaagacagtgtggaaaagaatcaaatccgttagccagaactttggtatactgaaaggtggatcagaacccgtcaatatacctgacgagtccgatggcctgtttgaaatcttggttagtcccacagcgcttaaccaagatactaagcttcagtttggtctgtatgaggtgtggactggacgatggaagacaggtctgttgatccacgaagcctttgttcaagaagtgtaagggggaatatgatcattattgattttcataatccgaacgcaaatcttatacctcgtttcagttcaaatataagagctttagatcataacaatgtaatcttatatacctttcttgaacaagtcttaaagctctgtatgataatcttccggtttgaacataacgaga

SEQ ID NO: 350 - DNA, 1275 bp, Arabidopsis thaliana
tgtgctctaaagttattacgcatcaggatgggatatagggtaaaaagtcaggaagttcgatacctctacagcgaatattttgctgatgatacttccctttgccaaatgaaattaacctctttctctattaccacgtttttccagaagcaagagattgggtatcaagaggctggctgctatgataaggcgtcttggtttttaagcgaggaaagattttgagtgcgggacgctgaataaaaaatctctgggtatcgtgatgttgttatcggttggactgcttttggcgggctgttcgggtagcaaatcatccgatacaggaacgtattccggctccgtttacaccgtgaaacgggggatacgctatatcgtatttcgcgcaccacgggaaccagcgtaaaagaactggcgcgactgaacggcatttcccccccttacaccattgaagttggtcagaaactaaaactgggtggggcgaaaagtagcagtattacacgtaaatcaaccgccaaatcaacgaccaaaaccgcatcggttacaccgtcatcagcggtaccgaaatcatcctggccgccagtagggcaacgttgttggttatggccaacgacagggaaagttatcatgccgtattcgacagcagatggcggcaataaagggattgatatctcagctccacggggtacacctatttacgccgcgggtgcaggaaaggtggtgtatgtgggcaaccagctgcgtggctacggtaatctcatcatgattaaacacagtgaagattacattacggcttacgcccataatgacacgatgctggtaaataatgggcaaagcgtgaaggctgggcaaaaaatcgccactatggggagcacggatgcggcatctgttcgcctgcatttccagattcgttaccgtgcaacggcaattgatccgctacgttacttgccgcctcagggcagcaagccaaaatgctgatggcgaattaatcagcagtcagcagcgtggcacttgctaaggagagcgtaaggtttataatgccttacgcatctcgaagcgggcgtagttcaatggtagaacgagagcttcccaagctctatacgagggttcgattcccttcgcccgctccaatttatcttcgccgtaatacttcccattttgttgtaaataaaagcgtttaccaatgcaatccttttgtaacaaccaggtaaacaccttatttcaagttgttaaaaagtggttatctcgcttttacaaacgattgatggaatatcttatgaaagg

SEQ ID NO: 351 - DNA, 537 bp, Arabidopsis thaliana
caattttatgtttaataaacctgagaatttcgagataatattacgaacctggctttgcaattttgtcatttctttgtttataacaccgttagatttcttcaaagtatcaatcatgcccctggaaaatccagaactgcgtggagggcttgatattcttgatgatcttgtacccgaagaagtgtcgatgtcgaagatgaggcaacgggtttaaaggcattttgaatcgcgctaagagagcttgggaatgcaacatctctaagttgctggagagctggaacttgtgaagctctgacaatagaagattcagatcttgatgacctaacctcagaatacttgactggttctgttttgggggacagtagaatccttgaagaccttatatctctgtctggtcttcctgtcccatctagtgaccgtgtaggagttgtggaatttctattagcaacattagagttataaccagactctccagctttaagttttgtgtacaagcatcacatactcgatgtggtttcctggagttggagctaatgctgc

SEQ ID NO: 352 - DNA, 492 bp, Arabidopsis thaliana
atattcatcaaccccacctaaaaataaccctaacatctcacggtttcttccacatgtaccctctctgtgcgtctccaattccagtttccgccgccgaagctaaatttcttcaggcttcatagaagaagaccgaacatggcgagacgtaaccgtggggtgacaaggcgcgaaaggccgaacctactgatcacggggactcctggtaccggcaaatcgacgacggcttctgctctagccgaagccacgaatctccggtatatttgcatcggagatctggtcaaagagaaagaattctaccatggctgggacaatgagctcgagtgtcacttcatcaacgaagactcggttagtttcttactccatccctatccctttatcctccttatttccttgtcaacaaaacactttgaaccgttgctagaatcttaagcttcactctttagtttgataaagatttggattcaattcgaagaattagccttcttagctata

SEQ ID NO: 353 - DNA, 900 bp, Arabidopsis thaliana
aatcgtagtaaaagagaaaaacggcaaatggagagtctgcctgcccaaatgacagtttcccattgccgcatatcgatcgcctcgtggaatcaacctctggaaactaattgctatcattcatggacgctttcgctcgctacaaccaaatcatgatgaaccccgacgatcaagagaaaaccgctttctacacagaacgaggaatgttttgctaccgagtgatgccattcggacataaaaacaccggggcaccttatcaacccttcgtcaacaaaatcttcgcattacagatcgggaagacaaaggaagtttacatcgacgacatgctgataaaatccatggaagaggaagaacacatatcccatttgcgtgaatgtttccagtagctaaacctctataacgtcaaccttaacccagccaagtaccgcttcggggtaagatcaggtgaattcctcgaatatctagtcacgcatcgcggcatcgaggcaaatccgaagcaaatcgaggcgttattaggattggcatcaccttaaaacaagcgagaattgcatcgcctaactggaagagttgcagcccttaaccgattcatctctcaatctaccgacaaatgcttggctttttacgatgtgctccgggggaacaaaaaattcgaatggacaacccgatgcgaagaggcttttcaggaactcaagaagtacctggcgaccccaccaatcctcgcaaaacccgtaatcggggaaccactctacttatatgttgtcattgtcggatactgcagtcaggggagtgttagttcgagaagacagaggcgagcagaaaccgattttttacgtctcgcagacattcaccagcgcggagtatcgctacccgtaaatggaaaaactcgccctagtagtcgtaatg

SEQ ID NO: 354 - DNA, 700 bp, Arabidopsis thaliana
cacatggcgagagaatgtctgaaccaaagggtgatgatcctcactcctagtggtgactatgagtcacaagatgagcaagaggattctgatgagcatgaggacattgagtatcccgatgtaggagaactccttgtgattcgcaggacattgagtgtgttcgttaacctcgaatgattattgatggaggttcatgtactaatgttgctagcaagtacatggtagacaggttaggacttcagaaaacaaagcacccgaggccatacaagcttaggtggctcaatgacgatactgaactgaaactcgcttaacaagtgaccgtatcattcagcgtgggaaagtaccacgatcaagtcgtttgtgacgtagtgccaatgagagttggacatcttctccttggacgaccatggcagtttgatcgagctacatgtcacaatagacgcaccaaccattactctttcacctataatgaccgtaagtacaaccttgcccctcttagtcccttagaagttcatgacttacaaattcacatgaacaaggagcacgaggtaagaagttctagtctttatttaagctctaaagatgtttgtaaaaccattgacccaagggcaccgtgctactaatggttttcaaagaatgtcttagtacagggataggtgatcctgcagtatccgctgaagtacaagttgtactacattggtac

SEQ ID NO: 355 - DNA, 759 bp, Arabidopsis thaliana
gtggtgcgttgttgagatcgcctctcaagacattcttccccttcgtccggcggagaatccctgtaagcgcataatctatcatctccatgtccgtgttagacacggtgcctgtagactccctggagtaaaagacgttggcgaccgattgctgaaagtagcggatcacaggacttcgaatttggttgctcttagaccgcgccgagtttagcggtagattgttccctatagtggcccacaaatccttaagctcttctctgtcaaatctgggtttggttccctttccactagggaaaccaaacagttcttccaacttcttgatcgaaagctgataccgctgttcattcactgagaacgtcaagaatcctaaccccatggtatcccgctcaaagtccgtgagtgcctcatacatctccacttgcagcgtggaaagaaactcgattgtctcctccttataggcagggtaagggtaagacatgagtttctccagatgacacttctcgaacagatgctgcacgtcctccagtaaccctagctgggctaaagtctcatagcacggataccgcgttccccagaaattattcatctcaaagaacctgatatactcttccactgtaacctcgtctggtttgttcagcagcttcgtctccttgcgccatgactcgggctcatactcactttcgatagcgtcatcaatcagctcatacctacttgacatcgccctcttttctctggcgatttcagcccttctctgattacgtc

SEQ ID NO: 356 - DNA, 726 bp, Arabidopsis thaliana
tgcggtggataaatccagaagtttggaaaggtctggttagcttttggagggatccgaagtcggaaagaaagagtatcaacagtaggaatgcaaggtatcatgatccggacggccttggggtacataaacaccggtctgggcagacctcatacaaagccagagcccgcagacgtgtaagttaatcaaattttttcctttaagaaaccttgtatttcaaacaactgacctatatgtttatgtgtttcactgtgagatgacaggagaaagtactccagactttctcctcctcttagatgaaacacacaggaaacctgatgggagtttcatcgacagaaagtcggaggaaatctataaggaaatatcatcgaagattcaggaggaatagtcacttctgtgttcaggcgacactacagagagcacgggttcaggcgggttatctgttcaggcaaagaacaagatatatgcacaggtaatttatctttttcaacccaatatagaagacagcatttttttgttgctttggattggtctgttgtggcttgcattatgtctttgatggaatagttgcaggttcaaactgaattgaatatgttgtgtctttgtgtttttggcctgattcagttgttgttggtttgaatgaaatcattgtattgtcggcctaatatgactatgtttgaagctaaaagttgtctaatgggatagtttcagttttgtatgttgctttgt

SEQ ID NO: 357 - DNA, 592 bp, Arabidopsis thaliana
ttcttgtgaggttcttgaggttgataagtgaatccggaagatttccttgaagagaattgttgtagatcataaacagttctaatgccgttaagaacccgaacgaggaaggaattgaacccgagagctggttatccgctaaatcgataaccgtcatttgatgacagttacctaaactggcgggaatgttacctacaagctcgttctctctcaagtgaagacgagtaagatctttcaatcttccaattgaagaaggaatctctccacttaaacgattcccgtaccaatcaatctcctgcagtctcgtgcaattcccaatctcaaccggcatttcacccgaaaaccgattctcatacagatacataatctccaatttaccaagaaatccgatttctttaggtaccttgccttccaagttattgtgatagagagtaaactcttgtagattcgtgaggtttgatattgatgaagataacgtaccctccaagctattgttgttaagataaagattcgtgagttcgacgagctgatacaacgaatccgggatttgacctgtaagcgtattgttcgacaaatcaagcaattttaatgactg

SEQ ID NO: 358 - DNA, 571 bp, Arabidopsis thaliana
cgttaaagttatgatctttcattgtattcaggacatagctacgaagatattggcgtttacgaaccaagggccacgcgcaatctgtattctctcagctacaggagctgtaactaatgtgatgcttcgtcaagctaacaatagcaatcctactggaactgttaagtatgaggtataaaattactcatgtgctttgtgcattgcttgcttcttggcctcattttgagctctgttgttatcgaatggagctggaatttaaatcttgtattgagctgtattggatgtgttgttgtttcagggccgatttgaaatcatttctctgtcaggttctttcttgaattctgagagtaatggtactgtgaccaaaactggtaacttgagtgtgtcgctggctggacacgaaggccggattgtgggtggatgtgttgatggaatgctagtagctggatcacaagtccaggtttgtcaaattcttaacctttacacttgagttaagatcagaaagtattcaagatactgactttgattgggggttttatataggtcattgtgggaagcttgtaccagatggaag

SEQ ID NO: 359 - DNA, 535 bp, Arabidopsis thaliana columbia
cacgattgtaatacatagcgcaaagagcagtctcgtagtgaagtgacatctttgaattagggtttcgaaattggagttgaagatcccatttaccagagacttgattgttggagacattgaaattggagacggagagtgagtttaggttaacgtctggtagttgaggacgaacgattaggaagaagatgaagaggattagacctaggagtaggaggaatgttgtgaagacgatgaagagacggcggattatgacggcgcgtgggtttggttgtggcgcgtagtatgggttgtggttttggtaggggtaagcggttccggcggcggggtttgggtacccgttggtgggtggttgttgttgttgtggattcgggtatgggtatgggtatgggtaacctgtagcgggtcgtgatggatcttgcatagcttttgatttgttttttttggaatcttcaagagacgaagatgtttgtgatggtgaagaagaagaagtaaagggaagtgagaaattaacgcaatttaatttaaaaggaaatgt

SEQ ID NO: 360 - DNA, 908 bp, Arabidopsis thaliana
cttaccagtctagtccagattttcaaaaagatgagcccaagagcccagtcttgatacaggaggaacacagggctttcatcaactgggactctcattgggacaatcaccaaaagctcaaacagaagtccaattagcaccggaatgataaaaacctgttcaatcaccatttgaaaagtacagaatccacatttagtagagtttagagtttctcgtatattgaaaatttaacagcacaaaacacttacccatatggctaacagcaccgagctcttgaatacaatcccacaccatttccatatttggttaagcaagactgaagtcctctttgacttgacatgctcgatagcatacctggccccagatatggtagtccaaaaggcatatgtgccaatgacgaaagcatacagatctacatatttttagggaatactgttaataatgtgtaacccgtgccaaagaatgactcagaagatcaaaattaacaaacattaccattgcacttgatgccatgagttattggaagaatgggaatggcactgaatagagcacgtcccagcgaaactggcacaactatcaatgctgaattgaagagaagaagagtcacccatgcaacaagtagaaggagaattatccggaccacaaagttgtacctgctaaaaatatacattcatatcaggggaagccctaatgggagtcttaaagtacttagtcaactctatataccaagcgaaaagtcctgttaatttattcaagtatgccaaaattcttaatatcaaacaagctattagcttatttttaaagtaagaacttactcagaatcagattgttcgtcatcatcttcatattcctcaccccgtgttgacattcccagcacggaggcgacttctgttagggtcatcagctactgg

SEQ ID NO: 361 - DNA, 609 bp, Arabidopsis thaliana
tagtaacggtcgccagtgtgctctaaaggtttgagtttatcggtcatccgtttaccgcgattctggttgcttgtctggtggcgatttacggtctggcaatgcgtcagggcatgccaaaagacaaagtgatggagatttgcggtcaccgctgcaaccggcggggatcattctgctggtgattggtgcgggcggcgtgttcaaacaggtgctggttgactctggcgtaggtccggcactgggcgaacgttaaccggcatgggcctgccgattgctatcacctgcttcgtgctggcagctgcagtgcgcatcattcagggttctgccaccgtagcctgtttaacggcggtaggactggtgatgccggttattgaacaactgaactactccggtgcgcaaatggcggcgctgtcgatttgtatcgctggtggttcgattgttgtcagccacgttaacgacgccggtttctggttgttcggtaaatttaccggcgcgaccgaagccgaaacgctgaaaacctggaccatgatggaaaccatcctcggcactgtcggtccatcgttgggatgattgcgttccactgttgagttaagtttgtcgcccggtagttgt

SEQ ID NO: 362 - DNA, 482 bp, Arabidopsis thaliana
ctaaagagaacaatttcacgcgcaatgttgggggcttcaggcatttgtacgacctgaccaaagaccagttgttcaatcacttcggcggggatctcgctgcgtgccagcagttcgcctaccaccatcttccctaaatcaaccgcgggaatgccatgaaaagccgtcgcctgacgggcaaaaggcgtacgtaaaccgctaacaatggcgatacgatcgacctggcgggtaaccagcggtaaaacctgacccataacactcccctgtaaaaaaataaataaagtggtctgacctgatcatagtcttaaccatttttttacatttagccaagtggagaaaagggaaagtgggagctatgacacagagagaaaagaagaagagaaaagaaaacgctgcctgcagcaactgacaggggcgtacgtacccgagaggaattaacgcagacccagctggaaaatcagcatttcagcttcgcaggcaaaagt

SEQ ID NO: 363 - DNA, 1158 bp, Arabidopsis thaliana
ggtcaaatcaaagctaaagggtcaccagaaacgcatcacaggcctagcattttctacagccctcaacatcttggtttcatctggtgctgatgcacaggtgtgttatgctgcgtcttgttgttgttgttgttgtcctgtagtaaatatatctcaactgaagggaaaaaatgcttgattattttgtgttgtttccttgctggattttctaccattagacttatctaatctaggaggatacttattcttcctgttgtcttctcttagatctgcttttggagcattgacacatgggagaagaggaaatccgttgcaatacaaatgccagcaggaaaagccgccaatggagacacgcgggttcagtttcatgtggatcagttgcgtattctggtagtccacgagacacaactggcggtatttgatgcttccaagatggaatgtatccgacaggtatctatgactatgatgagatcatctctgtaaatccacttatataaaatggatcatctctgacctggcatgtatatatgaaatgcaaggtcatatatacatgaattcttaatcattattttgaaatttgtaatgacttatgttctcttgttttcatgtctcagtggattccacaagactcgctgtctgctcctatatcttcagcggtgtacgcatgcaacagccagctgatctacaccactttccgcgatggtaacattggagtatttgacgcggacagtctcagattaagatgtcgtatctctccatccgcctacttgcctcaagggtaagtttatccaacatttcatcagattcttatttctaaatcactgtactttgtaaggtttggtacatgaatctgtataatagacttaaattgacttctgaaacatgagaaattggtatattttcataagccaaaatagttataaactcttctcattgattctctttgctttcacaggaatcaaggcttgtctcctcttgttgtggcggctcacccgcaagacccaaaccagtttgcggtaggtttgaatgacgggtcagtgaagatgatggaaccgacagagggtgaaggcaagtgggggatgattccaccctctgaagctatcaattcaccatccaccacaagcaaccaaactccagaacagttacaaagatgaacaaacc

SEQ ID NO: 364 - DNA, 462 bp, Arabidopsis thaliana
ccaaaaacttaagactttattttgctttctcagacctaaagatagatatacaaaacaattaaatcaataaatttctcatttaactcgttcaaactcactactttacaacacaaaaatgcaccatgttcgagatatgtatttactcttcaaaaacttctaaccaaatcttgcgatcttaataactaataatagcttaacttgtcgtccgatccggataacttccaatcctattttctttgttaataaacaatacctaagaaaaaattactgagagaatatgagcttacgttgggagagacaggagagtcgaagaatctcttagaaggaggagatggttcggagagagaaggcaaacgaaactcatgcatcatccaatcagtcttaactcctttcgctgctcttcctttgtagaacactaaggacttctttaaacctatgcatttgtttccttctgacgagtat

SEQ ID NO: 365 - DNA, 811 bp, Arabidopsis thaliana
tggcattcccacgagcctggtcttgccccaattcaaccctaggatgtggctgctccaaacgacctatctgttgcctgaatcccgttaactcctctgtcaaagtagccatcatttgcattacggcgtgttgggaaatttctgcggcctctcccatagtatagcctaaaactgacctatgcttagacaaaaacaacaaagaaatcaacgtaccacagcaataaaaaagaaagatcaaaaacaagaaacctaggacttgttgaatcacttcctaacacacttgctgatgtagtacaaagttaacaataatatatattacgaaactcaaaaacaaattatttaacacggaataaaatgaaactgaaatacaatttttttaaaaatttttttaaaaataaaacagaaacaagactaacgcagaaacagattcagaaagtaaggcagacaaaaagaaacgatgaaacctggcaaaagaagcgcaactgcgctctgataccaagatgatacaagactcgatgctgagctttgtatttgatagagatggtggcctcacaagctggcggtcgcttctctcttgtgaagggaagatggtcgatgatggagatctaacacgatggcgatcgcttatctcgtatgggatctattgtaggggaagtgctggcggattgaagtacacgacagagatgcgataagtctctgatacagtacacgaatttggccttggtgaattgcacactcaagacaaagaagaggcttattctattaagaacacttaaagagaagaagtgagaaaatgcggttcttgattgataat

SEQ ID NO: 366 - DNA, 941 bp, Arabidopsis thaliana
tctagcttttggagatggttgttgtttgagagagcgttgatgtttccggtgaagttgttgttggaaagtgagagtacttttaaacgttgaagcttttggattccgcggttgatttttccggttaaggctaaaccgtcgagagaaagctcgatgactcgagatgttttggggttgcatttgacgtaactccatgaacaaggagtgttgtcgtcttcggtccatgactcaaggtgtgaaaatgggtcgttgaggtctgatttgaagacgatgagtcctaaaacgtcgtcgtttagttgaattgagtcggtatcgccattgatgagtgatgacatcattgtcaatgtgagaaacagagtaaatgagatcatggttcttctctgtttgcccattgtgatgctctctcttgatggatagagagatacagattaatttttggtatataggggaagagagagttatggcattttggtgaaagatagaagagagagagaaaaagagaatggagttaagttttgtgccaatgagaagaaactcgaagtgttagtgagtaagattctgaagttagctacatgacaacaacttacaactagatcgagtatacatatgatcactaaggctaaatggaccacatggtctttatccggtctaaccaaaattgtccggtttagtcaattttctcttaatagacatgtctttactaattaggtacacactattagttaatgccattaacatgattccctatcctgccaaaaaaattaacatgattccctaaaaccatgttacaacttacaaggttttagggatttatcttcatttgaggtcagaacacccactcgaatatccggaaaacaatatcatattataaggttttacgaaggtattttcataacctaatccgtacccgactaattatccgagttttttagataaaataatag

SEQ ID NO: 367 - DNA, 658 bp, Arabidopsis thaliana
acaatatcacagagtgctcatgttcttgtctcaaacaacaagaagagagagagacaaacatgttcttgtctccaatgtggaagaagctcatcaagtgccaggggttcaaaaacatttccagatataatgtgtcctcctacaaattgaagaaattcacaaccaatttcaaaaatccaaaagagagctgataattgcaagatcaatactttgaaaactgaccaacttctgctcctttctcaacgacacaaacagatagatcaatgttcttctcctgagacagttgtttcaatcgtatagcagcagataaaccggccggtccagctccgacaatcagaacatcgtactcaatcgattctctgaccgcttcactgctgatacatctactactagtaatcccattgactcctaaaatcctcgaatttgggtttaaaggtgacaaatttcgaaacaaatcggcggaataaggatacccaaatcgattagaagcgttcaagggacttggaggtggtgacacagaggaggaggtaaaaggttttgaagaaggtaatagagggagaatcagacgctggttcttcaagcttctcaattgattagagaatggtgaagaagagaagatagctttcaaggaactatgcatgatactgagtaataggaggat

SEQ ID NO: 368 - DNA, 606 bp, Arabidopsis thaliana
taatatccgcgtcaaatttacatgttcacgctcatgtatagctggtttatacaccaaccaaaatactatgtgtcgactattaattacctggaagaagccaagtgtctcggcagcttcgacaatctgcttggccacctccttgtgttgtgggccgtctaggttggaaagatcgattggctgggtagcctcacacgtaagggctttttgggtcgggattcgctcagagagaggctggacgaagggccgtggaacactagagaggcccgagtctatcattcctttcacgccgttaccttctctgaccacgaaattgaacaatgtggtttggtcctcgaaattgatacccattgtctccacacttctgcttgaaaactgaatgttttttgtttttgttttttggttgaatattgaaaagtgaatgttgaaaagtaacaatttgaagcggatataaatagtaacgaaaatagagaagtttacgtacctgagataatgttttgaatgtaattatatatttgattataatcacttggtaaactagtcgtcgatttgtctaatcacaagcgtgcataatgccaagatttcagtttaattttctgttgtacgtta

SEQ ID NO: 369 - DNA, 764 bp, Arabidopsis thaliana
cctttgataacttggctttcccgagctgtagttggtcttggtgtgacttgatcgggcgttctttctcttgatttgctgttcgaacatgaccgctttgtgaagcatctcctcaagctccacatagtgttgagtttctagacggtcttggatttctcggttaagacctcccatgaatcgggacatgaccgcttctccatcttcttgaagatcagctcttaacataagggtttccatttccagaaagtattcttcaaccgttttgcttccttgaaccaaatttctcaaccgctgatgtagttcacgatgatagtaactcggcacaaatctctttcgcatgacgaatttcagctggttccatgttttgatcggatagtctcgggtacgtcttcggctagtaacaagttgatcccacccacttaaggcatagtcgtaaaactcagtagccgcaattttaaccttgttggactcaagacattcttgacaaagaaagactaactcaattttctgctcccattccaagtaagtatccggattgttggttccatggaatgcgggaattttgagttttaggcctcccaagggatctctaggtggtggtctctctcgtcgatgcctacgttggctactgtgagaggaggcgtgactatagtaatttcttgcctcttcatcttcccttggttcttcttgtcttagacgtggatttgcgtccgggttgacttgatgtaagtttagagcaccaagcttttcatcgattaatgttgtca

SEQ ID NO: 370 - DNA, 646 bp, Arabidopsis thaliana
ccaggtcgttgttcgtcattggggtgcctcccttttgcttgggagctttcttcttcttcggcttgtcggctctggttgactgcggacagattggacccattccgcctaaggttataacgcgcctttgtacttgcggcggtgacccgcgacctcgtctcggacgaactctcgtcgttgtcgtaactgtggttgctcttgttctgggaatcctctaggtcgctcatctcttgatttcgatggagaaagacgagagagatgaaggaaaaagccaagagggcagatcgagaaagaagggagcagcagagaaagaaaacgatggagatagcagaagaaaggtgaaacttttctatctctaaaaatgaaaactaaacgtagtaaatagataagatgaagagaagtcaccttgggagttgtgtgagttgacgtgaaaatcaagtggagatgtgggaagttatttaaaggagccatcatcaccacaattttcgagattacagagatctctcccccgcgcctgatctgggccgtcagatgcggtgcgctgaagagacgctccatctcagccgtccacgtcaacagcaatttgtcttgcgtatctactcaaaatctttcggtcaggaacctgaaattcaatcgctttgttgagttt

SEQ ID NO: 371 - DNA, 578 bp, Arabidopsis thaliana
tagtaacgtccgccagtgtgctctaaagcccacaagttcaggcaaagctcaaagaacgttacggcaagaatattccgcttgaggaaacggtggtctcgccacaagccgttttcgatgcgccacaactcaccacggtcgccaaagaatggccgctgttttcgtggtaatacgaccaaaattcaggcacaaaaaaagcgccgtgcgcgattttttcggaaatccggtcttatttgctgcccgggatgttgaaacgcttgttgaagcggtcaacacggccaccggtagcaacatcacgctgtttgccagtgaagaacgggtggcacttgctgcacacgtcgaggttcaggtcatgaccaacggtggagcggattttcattacgttaccgcaagagcagctagcagtaatttcttcgtatttcgggtgaatatcttttttcatgggaaaacctcggtttaaggccgcgtcgctcttccagccctaacgccagacaccacgcgatgttaaaagtatagcttcaatacgatcatttcgtacgaaggcgcgaaatcatacagaaattaaccagcgtatgaaactg

SEQ ID NO: 372 - DNA, 617 bp, Arabidopsis thaliana
ggcatggattgttcagagttcactacgactatcagtagcattgcctctggcacaaacacacctcctaaaactgctcagaatccccagacagagacacacacaatgctcccatcagctcagctcgccaatgaaagttgcagagcaacgatgtcgatcgacactatccctcctgtcgatcgacaccctcgggattcacagacagaggattctccacattctcttcagccaacacctcttgcggccctctatgataagttctcttctatctcttgtcctgctttcccttcgattaattctttagattcttcgaagtctgcttcacaagataacaagcctagagttcttcgaaagcttgtttctcctgttgttcttgcaggacacgaggagagtatcgatcgacaccaccatgagtgtcaatcgacacctgcagctgccctgaccagatcagtttacacaccgccttggaaggcgaggaggcagcagcaatcctccaccactccaccctcatcttgaactccgccaagtcaagctattgactcaaaacaagcgcttagtgggaggcaacgcactagtttgatttttctttcccttctttttattttctttattcttgattt

SEQ ID NO: 373 - DNA, 653 bp, Arabidopsis thaliana
cctgatatctaaaatgtagcttagatcttgactcaactaaaacacacatctaattgtaggacatggaaattcatgaatcacttggtaaagcagagaaagcactgaagatgagcaaacgaaaagattggtataagattcttggaatttccagaaccgcctctatctcagaaatcaaaaaagcttacaagaagcttgctcttcaatggcatcccgataaaaacgtaggcaatagagaagaagctgagaacaaattccgagaaatcgctgcagcttatgaggttcaacaaaattccacatcactctttcatattcacacacatggtcatggtctctctcattctcttgacattttaaccttttaattttaccagattcttggagatgacgataagcgggcgagatttgacagaggagaggatcttgaagatatgggtggaggcggcggtggaggatataatccgttccatggtggtggtggtggtggacaacaatacactttccatttcgagggtggttttcctggtggtggtggcggttttggtggtttcggtttctaacttgaacaacatgatggaatcatgtaacttaagactaatcttttcaaattatactcaatatcacattttcctttctttcatctaaaaaagttgtgt

SEQ ID NO: 374 - DNA, 929 bp, Arabidopsis thaliana
ggggggtttgagtcagttcgtgtcattcgataacgtgttttatatcgatttctcatcattcttgcatacgtttgcattattagggtagctttgcatacatattgcatttctgagttgttttcaggtgatttggagctgttgaagaagaaacgagccagaaccaggagacatactcgaccaccaggtcgtgtgcatctagcgccatactcgaccccctggtcgagtgactttggagccattcttcccatctactcgacccctaggtcgagtatcctcagctcaggccactcgatgatgccactcaaccccctggtcgagtaacacttcgccacaccacctgaccacactcggccgttcactctaccacgttactcgaccccctggtcgagtatcatcactcaccaccaacaccatcactcgaccggacactcaatcacgtcttcaaagtctactcaaatccgcactcaaccaggcaagctgagcacaaggaagagaagaggagaagacgaagtgtttggaagcggcctggacctccaacggatcacgaagcgcatctcggcccattatcattctatgggccgggcgattaggttattggcccgtctactatcattttatttcgttttgtataaatagatgtcttaaggttctgtcttgggacatctagttgacattgagttttcgcttcagttttattttctgtttgactactgtgcgctgtttttgcttctgcaacctgtaattcgagatttttccaagttattcagattccgcatttgattttatctgtcatcttgtttctctactctttatctctttacttatgcaatattatcatttatctgcgtttatgtctttaagcatgttgtctaagtagtgacttagaattcttagggatgggataaagtagttgtggaatccatagtctg

SEQ ID NO: 375 - DNA, 846 bp, Arabidopsis thaliana
tttaccaaattcgcagctgatccaagaaatgtcagacttggtttagcgaatgatggtttctacccatttggtactatgagtagtagtatagcatctggccagtgatactagttccttataactttccaccgtggatgtaacgcccctgaatcgctctatggtcggactaaccaagggcaagccaaaaacgctacgttgatagctcatctggtcgagttaacttaggttccaaacgcatttagacccttatccgaatcatccatatgaagaatccctcaaattgcaagttgagggttttcaacccttgccatgatcgcaagttgtgttagtctggacaagactaatatcgaatgaaacacactctttatacgaaaataatattttataacatataagttctcgtacaataagtatccaaacgttttaacaatgggcccttgagcatacacgctcaaatccaacaagaatcgaaatcactaagttttgcaaaaccaataactctatatttacattcctatgtcctgagcatctctctaatggctcccactaaggttttctgcagaataaaatggagtcataactaatctaacattacttagtgagctcgtaattccctgtaacagatattagttcttcatcccataattctaacacgaaacacgcatcagagaatagcaacgaaaggtagcttgccgaagcaattacaaaaacatgcacatgcaattttgactccatatttaaataagttttatagggcctgatatgctgccttcactcacccacaccacacattcacccacaccacacatgcacccacaccatacacactcttgtgaactccaagtt

SEQ ID NO: 376 - DNA, 967 bp, Arabidopsis thaliana
caaacctcgtctccacgtgaactccacgtccctttaacatctccgccacgtgtctctgacgatccactaaaggatccccaccgtaaccgttgataagagtcgacggaaaacgtcccatcttatctttttcctgaggcccactgctcttaattggattactgtacacgtggtcacgatctacaccgtccggtaaacaaagtgaccacaacaagtgagtagctggtaacggacagatcttatcgtctttaagccgtgactcagaatccgacggctcaacgccaccgaagaaagcttggttcattatcagcccttggatcttaacaggagaaagatctgtgtcaactacacgcaacgccacgttgtagacaatatttcctccagagcttgaacccatgacgtagcatttcgagaaatcgacaccgtcttttaaccacgtgtcgcaatcaccaccgttgattggcccacgagcttgatcacggagccataagatagcttcgacggcgtcttcgtacgccgccgggagacggtgttcgggagctagacggtattcgacggagaggattatagtttgaagacgatcagccattttggtgcaagattcatggaaaggagctgaagcggcgctgtagaggataaatccaccgccgtgaaagtaaacgaggatcggaagtttggattccggcggaatattccgtggcttgaagattcggatgaaggtattgttggtttggtttaatggtatgtctttggattgctctgttgggggcagtttggggaaatcacggtgtctggtgagagatccatctgagttaagtggtaatgttgaggaacttgtatggatcgcttgaaggtggaggagcttccatggatgcttcagagaattagctagatatgtttctgaggtgaaaatgtgtgattatgaagaagaattgggaaaataaggattttagaggttgaaaagatcaac

SEQ ID NO: 377 - DNA, 816 bp, Arabidopsis thaliana
gcagtgcaggtcggaggatccccatttctgcagtctgcttcgctccgcccctgtgtttctcccgttcggtcgccgtggcgccccgccgcgtggcgggccggcctcagcgggctccgatccgtcgtgttcgggccgggtgctctccttggctccatgctctaattccactgatttctcttctgttttagttaaaaaccgtttagtttcatccctctgcagtagaccaatggttgtatacgtcgattcgctgagaagattgagctctctggctttactcaatacggattcagatgcaacatccagaaactggacttcaaacaagctggttggagccacatggtcagaaaactgagtgagcgtgatggatagagttgtgctcagtaactgctcttttttccgcaaccccttgtacactctaattgatgtctttctgactggtaattaataaaacaagctatggtggttgactttgattgatattctgcaggctgtggaatttgtgtccatgcagcacgatgatgatctatgggaagagctgattaaacaatgtctaaacaagcctgagatggtaaaagctgtatttgtgatgcaaatcacaacacaaaccagtcttgattctgggaaacttgtgtccatgtagtactgtttccttaatcttctgttcttttccaccaattttaggtgggcttgctgttggagcacacagttggcaacctcgaccctctttacattgtaaatatggtcccaaatggcttggaaatacctcggttagttttaactattacccctcattgctgttactctattcatgagttg

SEQ ID NO: 378 - DNA, 952 bp, Arabidopsis thaliana columbia
tgtgagcttgagatagacttactttctcacgttgtcgccaccaatatccatcttgattgttagccgtttagttgctttcatgaaatcactgcatttttaaaccggttaatcaatcaaatgacgataatcgcaaacaaacggttaattgaaagaattcttttgagatttttacctgaaaggttcgtctccaatacgtttgataacaccatttgcatcccggtacacaacatgagtcaacaaatccgacctctcttctatatgaaacatctcagccaatttccggtacaattcttggtacgagccaataaccgagagatcgagtgtgcgtccaacatcctcagattccatgaaaactttacaatgacccgtctcaagtccttgcaaactataattccatgttaacccacgagccactaaacctttctcctcctccgcttccgcctcttcttccaaaaaccgttttcggttcataacttgctgttcggttaaaatcggttgaccgaacaacacgaactgatgagtcttaaccgaaccaacagacttcttcttatcctgaaccatagcaggattccccatagttaaagaacacgaaatgttattactattctcactatccctagcctgataatgatgatgcctcgggttgaaactcgatagaaacatcgccggagaatgtaacttgttgttaccggtgtaactactaagattgagatcagacaacaaagacggagatggtgatccgaagagttgttgagcttgcctggctccctgtattcctgcaggagcattattgttgtcgtttgacagatatcacatggactcgccaccgtcattgttggcgaatcccggggagaaaatcgtgaatttagtaccgtggaatggaaactcaaatgtctgcggaatcctaatcttcatcctcggagagaatggagataaatgtattgtaggcatg

SEQ ID NO: 379 - DNA, 562 bp, Arabidopsis thaliana
ccttgtataataaaaatctgagaaagaattcaagaccaaaacacaaaacacacaaagaaaaataaaaaatatgctatggtatatacaatggttgaggtggtgatacctcagtgatcaggtgaactaggaggagatgaaattatccatactctcctttgtgtaactccaaggaacgggttgtgctgaacttggattagctggatgctcgaccctttgctcgggttgttaatcgagtggctcctcaagtcgtgcggtagagtggcttgctccagcatctgatttccttgttcttattcactttttcaacttgctcctattttccttttctctaggttcgaacgatgattgccttggtggtgaaggtgcaacatggtgttccctcggctcatatgaagactgtcttggtggtgaaggcggatcgaaatgcataggttcgtgacgagtggatcctcttctcccaaaaggcatgttttgtggtattgccgtagttaaggaagaacagctgatcttgacttggagattgtaaacttcttgttgagtgcgcgagagctttgtcgtggac

SEQ ID NO: 380 - DNA, 550 bp, Arabidopsis thaliana
gaaatgagatgcctcagaacccaatcttgaaagttgagatctttcatgtatggggaatcaattttatgggttcattcccatcttcatacggtaacaagtatatactggtcgttgtagattatatatcaaagtgggtcgaagctattgccagtcctaccaacaatgcaaaagttgcgctaaagctgttcaagaccataatcttcccgagatttggagttcccagggtagtgataagtgatggtggaaagcatttcatcaacaaggtttttgaaaaccttctgaagaagcatggagtaaagcacaaggtcgccactccttatcatccacagacacgcgggcaagttgagatttccaatagggagataaaagcaattttggaaaagactgttgtgattacaaggaaagactagtctgcaaagctcgataacgcactgtcggcttattggacagctttcaagacccccattagtacaactcctttcaatcttctctatggaaaatcatgtcacctacctggttgaactcgagtacaaagctatgtgggcggtaa

SEQ ID NO: 381 - DNA, 537 bp, Arabidopsis thaliana
ccacagtattaccagtattgctaacaatcacctattaatataagttgtaactaacctccatcggaagacagaaacccggaactggccatatgtacttttcgttgttggtgactgaaccattaaaatgattcactgggtgtgagatgtttcctaacatgtaatcgaaagaatacctcccccactgaaaattcctacaaaatgtgagatcactcacagccttgaggcaaaattcatccacttgaggtgccttatccccggtcttgataggcgctatgataatgttgcttaagaaatacaaaaccatcatcctcaacctttcttttgatctttcacccaacggtaccattcctatgagcttctctctcacgtcttcgtgtttcacaacaatattcttgaaatgcttcttcttgaaatccaagtattccctgattttaacgccaagtgtataaatcacatagttcttgcaattgaagcccgatatcaatgcgtgtatcgatataccatatcggattgaaacgccattgacgatgaccacgg

SEQ ID NO: 382 - DNA, 1600 bp, Arabidopsis thaliana
agaaagaaagcgtatagacatttatatacagtgagtaatgagatatttgaaacttgtttcgcattaaaagaaagttcagttttatatgttaaagtgaaaattgggggtttcaacattcaaatgtttcatgagtttcacttactagggagtatcagtttggtttataatgataataataatatcataggtgttgttcacaaatagtgaccagaagagtttacaatgttagagggacaacaaaaaagaagctaacacctttctttcaagctcttcattaatggtgattgtttatttatataatatcaatagcgaggcgtgtaagagtaaggtcccatggagtatggaagctgataatattgttgttgttggttttgtccgaaattcatgtgaccttgtcttccacttctgttgtattgatcccacattatttgttcttccattaacaatctttgttttttctccatatcattcatttgcacgtatgctggtggggctacctctagcgacgccgcgaatggatccaccatcaccggactatttctgtttccattggctgtcggtggcggcgctggcaatgccaacatcgaggctgcatcatcatttagatcagattcattgaactgactctcatgaaactaagataaaaattgaaaaatgatttcattttaaatttgttttacctgctgggcttcctgcagaaccaaaagccacactactagcacttccactacttccataagccgtagacgttttaaccgcagcattaaccgcaccgtactgatacattccatcaagcaacaaagtatcaaatcctcctccgagctcactcttttgtcccgacaatcttgtcgccgatctcaccaagtccgtctcccaatccgccgaattatcgttaaacgcttcccaccccggtccagacgcactctcggtcccaacgacaccatcaaataacgctaacgccaaactatcaccaaccgttcctgccgttacacccgcttcatctgttaaatccagcaaatcaccctcttgatcttgtcttgaaaccacttcttcaacatctttctttgtttccattttctcttcttcttcctcttcttctttctgttccggtgcgggtaatgctttgatggagtttaaatcttcttgattttcttgaatatactctgttttgctctcctcctcctcagatttgttagacctttttgatgatgattttgttgtttgtgcagctaaagctgatttatctcttataaactcatccatgagatcaagtttcttctgtgtaatcttttccaattctggatactctgaagatcttgcaactgccatgttcttacaccatccgtaaaacggatctaactcgtcaaactgtttagaaactcgacagaagatttcatagactttgatggaatcatgaatgtctaattccatgaatcgctctattaatactcccatgatctctgttatattgtagtataactgaaaactctcttttactatcggatacatagccacaatcaccactctgttgttcttcgcattacctgttgcaaaagacctaacttattaaccaagaaatccgaaagtggaaaagcgtgtg

SEQ ID NO: 383 - DNA, 632 bp, Arabidopsis thaliana
ctgcagaagtggtgcaagaagcaggacaagctgctcgccaagtgtttcaagactatcaagtttctaacagataagttgagttgttcctcctccaccactgctattccacagggacaacctcctatggagatgccatcgaggagatttgatgagccttagcacatgcctgagcttagcgagcagagagtttcacatgttccggctaggcattcgtcattcgagtcccgagagcacaagagaagaaggaaggctacactcactcaatctagcagcagatcacgcctcattcactcgaggagataactcgaccgcggtgctggccacaacaaaagaagggaggttgagtattcatagagcggtgcttgccgccacatagctgatgaggtcgagtacccacctgctggagctgatacagaacaaggcggttcgtctatggcctgggagcaatcacaggcagccattgacgaccaactacgttcattcttcgactgaggtaagcgcctcacttcaccattgtaatatatcatccgttgtgatttgtttcttcattttgtttttgtgattggatttgtcccgagtactgtcttccaagtttagtacacaagtggactgtgtgatttaagtttggggga

SEQ ID NO: 384 - DNA, 660 bp, Arabidopsis thaliana
gctttcaagattaagaggatgggatactattggcctactatgatcacggattgcgttaagtacgcccagcgatgcaaacgttgccaactccacgcgcctctcatccatcaaccttcggagttattctcttcgatctctgccacgtacccgtttatgaggtggtcgatggatatcattggaccattgcacatgtcaacccgggaacaccaccggttgctctaaaatcatagtttgagtttgagaacggtgcagtaaaaatcctaattttaactagatctacaatttatctatctttaaagacaattccttagacccgacgctttaatcacttgaatctataactcgtttacttgcttatttatcttttacattcatttactttgtcttgcttatttatcttttacattcatttactttgtctagcttatttaaaaacatcataagtatattgtgtgaacatcgagagctcagtggaattagacccttaaatgctaacgacgatctcttatttgagggagtaagcttatagcaatttgagctatatcaaatttggcaccgttgccgaagttctcttttagttcaccattagactaggtgtcattttaagtctatatacttcttttctatcgcctattcacgtgtttctttatcttttggggg

SEQ ID NO: 385 - DNA, 408 bp, Arabidopsis thaliana
tttcttcggttcagaatcaggaacaggaagtggcttaggctgtcttgcaggaggaggatcttgccatttctcaatcttcttacggatctcctccctgaaaccttttccacttatccctaacggatcccctctagtagcatcaactcttgctgccaaagttgattttgcagccacgagcctgccagcgcgagcgtgaagtccaggaggcgtgctttggaaaatctctgtctgctccagataacccacacgggactgagacgttgcagaagaaaacccaacaaggttcttcctcttgtggccaagaacttgaacattacaggcaggcattttagcaagtgctgacaaacctccagctgtccccatgagtttggctgcaacagcactcccaacaatagcagaaagattagg

SEQ ID NO: 386 - DNA, 510 bp, Arabidopsis thaliana
gactctacgacgtcccttccaaagtgaccataggcagtgacagttttgaccagataggtctcgctcagaaggtaagagtttaaatctatctatcgagtacacatttatatttccccttaaatactaatttatcgttatgggatggtgcgaaatagattgagaaacacgagcttgttgaaatgagacgtgtggctgcttatatctataagaaagctggtagatggaagcaatcgattgctttgtcaaagaaagatagcatgtacaaggcctgtatggaaactgcttcgcaatccggggaccatgttcttgcagaaaacctcctggtctacttcattgaccaggaatggaaaggtttcaggcaggattacatcgaaagccattagtctattttcaactttttaccgtatatggtaaaacagaaagactattggtactgaagatgaaatttacatcccccgttgttgtatgttgtgctggtattacaggggaaacaggaatgctttgctacat

SEQ ID NO: 387 - DNA, 558 bp, Arabidopsis thaliana
aaaaccatcatggtgattgttgtggtgagcacatttaggggcattaacaggtagttgcagatagtttggtccaagacggtgtctctgactatcagcgtaggagaagatccgggtctggagtagcttatcatctgaatagtggatgcctggaaccacaagagcaggacagaatgcaatctgttcgttctcattaaagaagttgtcgatgtttttgttcaagaccaagcgaccaacaggttgtaaaggcaagatatcttcaggccagatctttgtgacatcaagcggatcgaagtcaaatttgtcttcatgggcaggatccatcacctgaacgaagagattccactgcggatagttcccggctgcgatcgagtcatagagatctttggtggcatggctgtgattggctcctccaactctgatagcttcctcatccgacaggcatttgatccacaagtcggcttccagtggaatttcacatagtgagctttccagctttgttgattagcatgtaagtgttgccccagcgccttccatgtgcctgtagtcctgtggatacga

SEQ ID NO: 388 - DNA, 426 bp, Arabidopsis thaliana
cacagaacccttaaaagctgattccataacttcgagcacactacatatgccagccacctgtttggaacaccttaggagtttatctaaccacgcttgcatctcttttgtttcaagattatctgagggccaatattaaagatagacagaccttacggtgcacaaatatacagtcttaagaaacataaaaatattaacagctaaaaggatacagatttcttgaagttcagctaaggtgctccggaatgtacgcttgacccaatccttgacaacaacttcatccagcaagaaagcaatgaccggatcactagatacagctgtctcatccatacagacattggtgatatctattaattttctgtcaaggagatgtccactatgcatccaacataaaatacctcttagagaatgcatgacaaaaacactatg

SEQ ID NO: 389 - DNA, 587 bp, Arabidopsis thaliana
cgttacatatatatgacaattgaacttactcaagacttcgtaacaagatattaacctttaactagcttggtgttattatgatcgaaatattaaaaactcgttacattaatagtctaatattctggtgttcaccaaacaaatgatagatattaataagaaaatactaaattaagaataatgtacagtatgtttgacttgtgggattaaattttaatacaatgacgaaacagaggaatctttccgtaaccacgtagtcatataacacaagcccaagcattccgcgtacgatagctacagccaccattgtaagatattttattattatttttcagtctattttcccaccaaatcatcatcgagattttccgggtcaggtaacttgttcaagtcaacaagctctaataacccgccgccaaagtcacgcttttgactaaaaacgcggcggcgtttgttgttctgcaccaccgtcgcccctatcgcatctacttgagctcccacctccgtcgcctttttcctgatcgttgccgctgacatatcctcggcggaggtacacggcagaagctccgggaagttgagcgtagcagttg

SEQ ID NO: 390 - DNA, 546 bp, Arabidopsis thaliana
gcctgtatcatgtaaacatgtcttatacactatattgacaagtaaatgacatctaacctaaatgaatcagcggatctataaatcgataaacacagacgtaataaagaagacattacctgtttacaatactcaaggtgaggaaggatctctttctttagattatctctcatcattccataaatcttctggaggaaatcaataagctgcttcttgaaaagcattgcagggcactttggtacgacttggctttgtctatccagataagagactagaacaccactcatcaatccctatttggattgtaaagaagacacaacattatacaggaattgaagcaaataaatgttaaggaagataatatttttatataaattagatttgcagcttcttactttggacgatagcattgtagagcttctgaatgtgcgttgcagtacgcaaactaacatggctgaattagataccaatacgccaaaacctcgttattatctgaaaccttgtaactatctgaaacgtgtaatggaagaaaccagtttcatattgata

SEQ ID NO: 391 - DNA, 573 bp, Arabidopsis thaliana
tgtccaaaattggtctaaaggcaaagatagccgcaaaatgggatcactggagaggtcagaggttaactctggaaaattcccagcagtgcggagaaggaagtttattgttgttattgctcttgattttgatggggaagaagacacgctagaggctacaaaaagaattcttgatgcggttgaaaaggaaagagcagaaggatctgttgggttcatactgtcgacatctctaacgatctctgaggtacaatctttcttggtgtcaggaggcttaaacccgaatgatttcgacgctttcatatgtaacagcggaagtgatctccactacacatccctcaacaacgaagacggtccttttgtcgtagacttttactaccactcccacatagaatataggtggggcggtgaagggctgaggaagactttgatccgttgggcatcttcgcttaacgagaaaaaggctgacaatgacgagcagattgtcactcttgctgagcatctttcaactgactactgctacacatttacagtcaaaaagcctgcagcggtaaatttaaccagggcgcacattattag

SEQ ID NO: 392 - DNA, 942 bp, Arabidopsis thaliana
aagtatattagtccccaatactatcaatattcataaaacaaattaaaatgtcaacacatatattctatatagaatcctaatttagtaacaaagagagactgtaaaaagaagtacgtaccatgtaaatggtaatccaaagtattgttggggacaaactcatagatgaggaatctgtgttgttcagagatgcaataacccacaagagacaccaagtgcctatgatgcactctgcttatgatctctacttcagctttgaactctctatatccttctgcgctgaccgacttcagctgtttgatcgctactggctttccctcgaataggatgcccttgtagacacacccgaacccgccttctcctaccacaaagctcttgcaaaatccttcagttatctgacttagctcttcgtaggtgaaatggatctttgaagtccctattactgcggagtcaggggttcctctaccatgttttgggttcccaagactgttagtatccggtgaagagttctgcgccgagctgttcccattcccgggtttctgtctgtaatggatgaatccttctgcgacaagaaacaataatcaagaacaagaactagacttaagggtcaagtacacaaaaataaaatcaagagcaggacatgatttcaagagccaatttaagacaacaccaaaaggtaaaaatattaacctgtatttacagagacattagccggtggcaaatactggttagagcgcggggaagaagagcctttcttttgtttcctcctaacaaagaaaacgccagcgatgaacaatatgaccaacacacctgcgatcccaataccaatcactgtcttctcggtgtaattagactcattactttgttggctagtacaccatccccgttactattggcattatgtctattagagccccggaatggttatttgatctggagagggaa

SEQ ID NO: 393 - DNA, 607 bp, Arabidopsis thaliana columbia
gaatattgattgcttgaaattttaaattgtaggcgaatctgctcaaacgttatgaagcagagagaaaacctgcaaatatagcaatgatggcggttttagacggaatccagaagatgtactcgttggatttcggaccgctgaatgctctaagagcagctgcattccacggggctcactacatttcgccgcttaaaaagcgtatcatatcttatgcttcaggagagcaatctttgccgctattttcttgaagaatgcgagggattgttcgctttgttctcaaaatactctgcatcatctcttcttttgccttatatagaaatttaatggtgactgaaaacagctcccagagcccatgttttaaataagtctgttgtatttagttttttatgtttcagtcaataaaatactaaaatgttacataatctgatatcaaaacaatgtaaaatgtgaatactgtgatttaaattttgatgtccaacactgccacataaggaaggcaaagtcattgttccattgcaactgtgtatataacatcaagtgtatatgtgttaataatgcaacttaatcagctatatattcgtttgtagtactttaaaatgcacttata

SEQ ID NO: 394 - DNA, 571 bp, Arabidopsis thaliana
tgcattgtccaaacgacattctcggacacttgtctgcgagagatgcaatgctcagcctgctactgtcaggtgtgttgaagaaagggtttcactctgtcaaaactgtgactggtctggccacaacaacagcaacaacaacaattcttcgtcttcttctacttcgccgcagcagcataagaggcaaaccataagttgctattcgggttgcccttccagctcagaactcgcttccatttggtctttctgtttggacttagctggacaatctatttgtgaacaagaactgggtatgatgaatatagacgatgatggtcctaccgacaagaaaacttgtaatgaggataagaaagatgtcttggttggatcctcttcaattcctgaaaccagttctgtaccacaaggaaaatcatcttctgctaaggtaactttttttctcaatatgttattacttttgcatccatggatatacatatctatcatttctttactaaattcagagttgttgtttgttttggtttaaggatgttggaatgtgtgaagatgcttctacgggaacttggtatggatgaag

SEQ ID NO: 395 - DNA, 680 bp, Arabidopsis thaliana columbia
tcatctatctcaacatcagcccattttcatcgacattatcatctgttgtgacacttcggtatcgagcccgctcgattttgctccatcaaacgctgaaggattgtctggtccataagagtgttgatcgacatcaaggtcatgtcgatcaacactgagacttagtgttgagtggttctacaaattagtgtggcaagcggtcatgagtggtgtctctaaggtctggtgctgaatccactccttgactaaactacattaacatcctctctgttgaaccgagcattcaaatcttgtacatcattatacagaccatcaatcctttgattcgtcatcaattggctcttgagaatctgttctagcatgcattccatcctactcgtataagtgggttaagggtgggcttggtgactagaatagctggaatgaccagcatagaacatatcaggcgtgttgtagtcatcaggttgaataacacgtccatctgcaacagctgcagttctgcattcgccttggtgtgaccgacacccaggtggtgttgattgtcaccctcggcaaaatcaggtatcaggttttcctgctcatcgattttctgaccatcctcattgtatccctgaccagctctgtcccttaatactcctacaacatcaggtacgacaatcaacatcttggtgttgcaagtgaat

SEQ ID NO: 396 - DNA, 761 bp, Arabidopsis thaliana
tccctttccattgtagcaggggagcttaaagtctcggaagtctcgaattcgaaatctcgagatccttggagtaaaaggtgttcgtcgagttgcttcggtcaccctatcgactttgggagctgatgtggtagctcggtgaactttggcgttcatagcccaaatttgatctttgagagtctgaagctctgtattgacaacatctgactcctgggtgactatgagctcgggagtctgactgaaggctctactagaaacaatgatggagtcctggccgctactccatccacaggaatgtcaggatttgccgagatagtcagaacagccgggttttggttcgaggtggttccaattttgattggagagacacaaggtaattgagggggcgcagtctgctgatttgctcccgcctgcgaagtttggatgctaggattgatgtctccttgaaaatcgaggagtgctcggactccagcggtgcgcgatgctctgacatacagaaagtcaactcgatcctcgtatgcattaagagctgtcctaatttcacaatgactggtggtgagcgctgcgagctgtccgccgcactactcctgaaaagaaacgaacttatcagataaagaggttactgcggtctgttgtcgcttggtcttttcggagagttcttgaagtagattgttgatatcgtcaagggtggaggcttggtcgccggaacttagggttgtcgcggtgctcatggtgatcaacctgagctctgaagtagaagattt

SEQ ID NO: 397 - DNA, 569 bp, Arabidopsis thaliana
cttaaattcgctcacttcacggcgaaccaagcgattctcgaagcttttgaaggtaagaagagagtacacgtcattgatttctcgatgaaccaaggtcttcaatggcctgcacttatgcaagctcttgcgcttcgagaaggaggtcctccaactttccggttaaccggaattggtccaccggcgccggataattctgatcatcttcatgaagttggttgtaaattagctcagcttgcggaggcgattcacgtagaattcgaataccgtggattcgttgctaacagcttagccgatctcgatgcttcgatgcttgagcttagaccgagcgatacggaagctgttgcggtgaactctgtttttgagctacataagctcttaggtcgtcccggtgggatagagaaagttctcggcgttgtgaaacagattaaaccggtgattttcacggtggttgagcaagaatcgaaccataacggaccggttttcttagaccggtttactgaatcgttacattattattcgactctgtttgattcgttggaaggagttccgaatagtcaagacaaagtcat

SEQ ID NO: 398 - DNA, 759 bp, Arabidopsis thaliana
aacaaatcatagcacaccaagaagcatcctgaatgttatgccattagtggtaggctttactatccaatatccacaagttatgaacaaaagtaaaagccgagacaatgctttcctcgcagaaggaaaagttatcacccatactgtaacctccacagaccttgtaccagcgagataggcgaagtcaaagtagcagtggagtcttgaaacttggaagcgtaaagagcttcactgtcaccgggaacatagagaccgttggcaattttcgtaaatctcagcatcagtagtcttgatcaagctcccgatcaaaacaaggaaaattgcagaagaccctaaacactggtaagagctcactcactgccactggtaagcttacttcactcgcttagagaagaagaagaaggctcgtgtctactgtgtgtggttgacccgggtccagtactattcaaaaagttcacacgtgtgtagagttaggggtattatagacatttcatcgttttatttatttttacaatctagtagactgattcataagtcaaactgacaaatcgacaaagatgtaggtaattgtgtaagtaacctactaatataagagagatcatatcctgattttaacaaggcaacttgattgttttatatattagagaattagggttatcaaaattagggtttggaaaatgttggccttgcgccgaatggtatcatcaggttctcttcatctatggaaaagagagatgaagattctacgcttacgagaacaat

SEQ ID NO: 399 - DNA, 520 bp, Arabidopsis thaliana
cccggatcgttcagaatcaaacatgttcaaagtgaggaatgcatggaggactttagcttagaacttaaatcctttgtagccttctgctatctctagaaggagccattaacctaattcttccaatctttctccgtctgtcaggttcttagtactgagcaattatatagaatatgtactctctgcaaggacaaagacgatggagatcataacgtatcaccagaggtacatagctctgagctctgattaaccaaaaaaaaagacactctgtattaaagtgtctatcttggtcttcacaatgcaggtgatttccaacttaaaacttctattgacaaatgaagatgaaaatagccgttccttcttgctggacgacgattccaggtactgactaaaatcatttaaaatttgttcggatatcttgagcatacgctcctaaataatttgccatttgtgtgacacaacagcatcccttttgacaccgatgaaatctcgagctgcatgcaagaaaaggactttgcgaatg

SEQ ID NO: 400 - DNA, 326 bp, Arabidopsis thaliana
ggttgcaccgctactctccggtgcttcctcatttacagtcgaagaatgaacgtagttgctcgtcaatggctgcctgcgattgctcccaggccatagacggatatacatggacgagatcgtctcgactttcgagtttggacattggaatataaaccaataattgataaaggagaaatttgatcattgcatgaccatcatttatggagttaggtgttccttttctatcatgattcatgatattagaatattagatcattgtcttaatttttggtttagagttaataatttttgttcaacatttctatatttttatacaaattttgaaa

SEQ ID NO: 401 - DNA, 598 bp, Arabidopsis thaliana columbia
  unsure (1)..(598): unsure at all n locations
gtctccaccagattagctcactctcttgtcccgccgctttcaatgtctcctccggcttcaaaaacgcaactccgaccgccgccgtgaagaatcttgaaaaagaatgccggaactcttcttactccggttgtaccagatgcctcggtgctcttcaaaaggttcaatttttataacttaagttcaaatttttcgcattccgtcacattaaattttcattctttatgtccctagtccctacactaaggattcacagagcatttaatgaaatttttttcttatccttaaaagcataataaatgttttgatttcatttgcgtgaagtcttcttcagaatgttcaagtagctgtcactctctatccatgagtaacatgttcaccaaactcacaataacaaattttactgttaattttagggtttatgttgaaagagacacacacaagcacattgttggtttttctttggctatccttttaggttgcaaacaattggagatgtgctttttcagaaactttcttttttcgtatagaccganagcactgcaacactctgaaacccttcactttcacacgcaatctttttgtttccattatattaatg

SEQ ID NO: 402 - DNA, 499 bp, Arabidopsis thaliana
ttcaagacccatgtcacaaaaacttggactttatgcaacacatgattgagatagaagcatatagagataaaggtttatactttgctagaaccaaggacgaatgtgaaaggaacagcttcaccattactatctttatgatcatatgttgaatcaaatctccatccttgcttcgcagctaatctcccatagtaatgtatttcaatctaaaattcaaaactttgcaaaattgaatcaaatggttcgttcatttgctgaaatctatacaaaaatacaaaaacacaaaacctgatctccttcaatgggaacgtcaccatcgccgattcggaggtcgagagctttaacgccgccggaattagggatttcagagaagtcggctagtgcggagacgagaagcaaaaggaggagacgacggaagacgtgacggcgataattgacagagatattgatcttctagatgctgctgcaactgtcgatgatgatgatgatgatgatgatggtg

SEQ ID NO: 403 - DNA, 541 bp, Arabidopsis thaliana
gtctcagggctctctgcaacaagctttgacgtagtttagatttggtacgtcggattcttgaacaagtctttcttttccgacaaccatatcgatctcttccaccgctttttctagaatctctctctggttcaacatttccgcaagtgtccactctattacattcactgcattatcaatccctactacatcaagatcctgccaaaaccaaaaagaaaccataacttatcagatatataatatacaaactaattggtagtaattatatgagtatatttctatcacgaaccacagagagatgtgtgatttcttgcggggtaagcaacggcttcccattctcatctttaagagtgaagagaatgtcgagccaatccttgatcataggaacatcattcttcgtctccgcacgattgtagtctttattctgccccctccacaactctatcttctcatcgataatcatcttattgtacctagcaatcacatcaacggcttctcttaactcagcctcctctccctggaggttccatcctcttaagaaagg

SEQ ID NO: 404 - DNA, 495 bp, Arabidopsis thaliana
taaaataataataagttttctaaaggccaatttccgccataccgtctttatgacgtccgtaactctggtcattactgggatcgccgttttcgaaacgatctgtcagcacaaagtaaaccgtggcgttatgccagtcgaaaggggcggatgtgtcagtttctgcccgttccagcaggagtaaaccgttgctggtggcagcgggttgtaacattatttgaccgttcttcactatcgcaatttgctggctgtaataatcccgtacggcggctccttccgggaaagtggcgctgacatccactgtgagcggtaatccatcccatttcgggcattcacggaccaggcttgctaccggttcggcggcgttctggatggaaatcatcaatgttggcgtaccggagcgggtgtctatttgcagcgtatattcgccgtccctgaacaatcgccattgaggcggcgtgttgctacaaggttgcagggaaagcatctgattgagtt

SEQ ID NO: 405 - DNA, 726 bp, Arabidopsis thaliana
tgacaagaaccggcttgaaccggtttatatcaatactcacgttctgttgtaccaaataaaccgatttgaacatttcccacccgtgttttgcaaccgccgatggatctctcacgatttcgtggtcgcgtccgtacttcttcaccagcgtgctctcctccaccgcgatcttgtactccaagtacctcagattcattccctccgaaggtttctcaaaatccgttttcgcaagccactcgaatccaccgatcggaagaatctgaatcacgatcgcgttatcaggtaagaacaccatgttcgtcatccccgcgccgtgaacgccgagcatcacgtcacaggagttcacagttattgcgaaactcgcgatttccgtgtttgcttccgccaccacgactttaaatccgatttgtctcgccgctctagcgatttcacccgcgttcacaaacgctcgcgatctgctcctagacaaaatcagaatccgtggcttccgcctcgtagtcacggcggagtttctcaatgagtatgtgtctctgaggaatttccggaaatcggacattgaatactccgaattcgaaggatcagtcgttagctctttgtcataatcacggtggcgattgagaccaacgatgacgctgctgaaacaatgcgtttcgtcttcttcgtcgatgtaaatcacttcgtaattagagagtttctcactaattccttaaatttgttgatcacaaaaga

SEQ ID NO: 406 - DNA, 548 bp, Arabidopsis thaliana
cttccggccgcgattgcctcgtcgtcatgcccactggtggcggaaaatccctttgctatcaaatccctgccttattgctaaacggccttaccgtggttgtttcaccgctgatttcgttgatgaaagatcaggtggatcaactgcaagccaacggcgtggcggcggcgtgccttaactcgacgcaaacccgcgaacagcaacttgaagtgatgacaggctgccgcaccgggcaaattcctctgctttatatcgccccggaacgcctgatgctggataactttcttgagcatctggcgcactggaatccggtgttattagccgttgatgaagcgcactgtatctcccaatggggccacgatttccgcccggaatatgccgcgctcggtcagttgcgccacgggttcccgacgctgccgtttatggcgctgaccgccacagccgacgacaccacgcgccaggatatcgtgcgcctgctggggctgaacgatccgctgattcaaatcagcagttttgaccgtccgaatattcgctacatgctgatggagaag

SEQ ID NO: 407 - DNA, 558 bp, Arabidopsis thaliana
tgcataaattcgactcctatggaatttaaaatagtgagtggttcgaactgctacggtttttgcattttaacagtttctcagacagatcaatggaaaaggttcttaagaaagtatgctgaagattagaagatataaatgaactggttacatgaattttgatatgattaaatataggacaggaaaatgaaaaattcattatagctattacttgtaatttctattccgattgtgcgcttgacttctgtttttgcttctcctaagagttctcaaacatgtaaaacatttacagggggaggtgacacctttcaggaattaccttcagcgttacactacgccttacttagcctcaaaaagtagcagtcctctttggtacgctgttaggcgtgcatctgctcatatcattgtcctctccagctattcgccttttggtaataccttaactgctcacaacatccctgcttctaacttttttgttctttactttataagtaaaagatttcccaaatgagtggttaagcatgactctttcttataagtaaaagatttacccaaatgagt

SEQ ID NO: 408 - DNA, 568 bp, Arabidopsis thaliana
actgctgcctgcaaaatatgatcatgtattattgtaattaaattgttggagtaggaaatagaagatgttaaagaagcaattcacttcacagacctcattagagaaaacatcccacagtccatcacttgctagaatcaaaaactcaagagtatcatcaatcttttcttcctgtattcaatgacaaaagtttgagaaatttgtcagctggagacaaaaggggacaaaaagattatgcaatgtgattcttagagaagtgatgaaaagacctggatttctggatcagcaacaacatattgcttcagaagccgatcaccaaacgcacgagaaactgcaagaactcctcctaccctccaagttcctatttagtttatgaatgaacacacccctataattaggactatatgttgaaaaaagcatgaagcagcagaaaatatagtcctatagtttcttgctacttacctgcccacatcacaaatccaccagcattctcaatccgttcacggtcatcactttggtccggtttatggtcccttgacacagcaatggctgcaaggtacagatttatgaa

SEQ ID NO: 409 - DNA, 503 bp, Arabidopsis thaliana
ctagtaacgtgcgccagtgtgctctaaagtggtcatccataaaacggcgcaccaggctggtgattttagcgcgggttttcaggcgctgagcatttccggacgacgcaggtcgaggtagcggtatttcagacgcgcttcttcggtgttgacgtggttagagtcaagcggcagaacatctgcgcggttgatgatagtcagcgaggacgccagcacttcgatttcgccggtcgccatatcgcggttaatatttttttcgtcacgcgcacgtacggttgccgtgacctgaatgcagaactcattacgcagttcagaggccagctttaacgcgtccgcacgatccggatcgaaaaatacctgcacgataccttcgcggtcgcgcatatcgatgaagatcaggctaccaagatcacgacgacggttgacccaaccacacagagtcacctgctgccccacgtgggacaaacggagctgtccacaatattctgtacgcatgagatatcctt

SEQ ID NO: 410 - DNA, 714 bp, Arabidopsis thaliana
gttcatttttgccagaccaattagaagacccagcactggataacttgatccaagacttacacgggttaagcttgttaaaggttattgggatgtgaagacgagtgagaagaagaagaaactcttaaaagataaaagcagaggtgtctgaatctcccgctaagaagcaaaaggtctctcacagtgagcatgttgattctcttgagaaagatgcagaaaagaagaagaagaagaagaataagaagaaggaagtagctgtcgaatctgatgaggacgaggatgttcgttctcgtgagcaggatggtcagggagacgagcagtcgctcgtggatgtggtgtccaacttgatctctcccttaaactctcgatttgacaccgttgatactagcataaaagaaatgtcctcccgtctggatgtgattggatgtcaaatcgaatcgagtgttgaagcaaagtttgaaggaaggtttggatcgattgagaacgatgtcaaacagattaaagagcagctgaaggccatagctgactcaaaatcaagcagttatattagagatatgtttttagccaaaccacagccccaaacgcaggaagacaatcctaaggcccaaactcaaaagacaccagacgttccaaagaaaattcaaataaccaatctactgctcctagtcatctccggtaaacttttagttggttatgactgagttaatatctgaatat

SEQ ID NO: 411 - DNA, 633 bp, Arabidopsis thaliana
tatgtcaagagaggatgcagaatatgattcaggcaccgaagattcaaccactgaagatgaggacttctctgttccgctcttcaaccttttttctaactaagctctgtaagagttaaactcagtgactttaaacaagctcaattgggaggaagtcccatgtttatccatgtatataactttctattttccttgttattttttatgtttttgtttaaaagtgtttcaggtttatttcattgaccctgaggaagtcaacagtcgagtaaattcaaacaaagtcaagaatcatctcaaccgttgatcgagtgaaatgaagaagaatgttctagccattggattgaatgaccaaatgagggaagcatcaccaccgtttgatcgagtgaccgaaagcaaagcgatctccaccgtttgatcgagttttgcgcatttcaagaggatgctcgaccatctactcgagcttgaattatttggagaccaaggcataagttgtgtgatcccacttgttcccccaacactccattactcgatgggaaatacatttacccataccatcactatttccaactcgcttttctatccattccaaaagaaaccaaagaccatccccctccacccattgaaatcgccaaacca

SEQ ID NO: 412 - DNA, 1143 bp, Arabidopsis thaliana
accggacttctctaaatttcaccggcgaccttaaacacatttctagctctgttcaggtgttttcattagagcatttgttctcattccaatccaagtctcttttttttttctttttttttttccattttttttatttgtttaccaaactatgaattaacgattttatgaaaataaaacgggaaacgttcaacattaaaaaaaactcagcattaccaaacagaaggaaaaatccagagttcaagagatcacaaaagccttgcctcccattgaaaattcattccaggacaagaagttactttaatctctaaaccaaaacgataattatcatccaatcacatacatttgcagtggtgacatttgcatgtggtgaagagtgattgaaatgacggaacgaaatgagcagagcaactcgttgggaagtagagtgctgctgagtgctgacagatactcatgatacagataaacaaatttacatttacttataatatagatttatacaaaatatgaattgttgtaaactgaagttttttaccaaacaaaaaactgaaaaacaaagaattgaatgtaatcaaaattcaggctgatgagagggagtttgtttagttctaattatgaagcgaatatgtatgtcagtaacatctatgagattccttctgtgagctacaacttaggttataattccaaatgtcttgtctacctgaaaatagtaaaatattgatatctcacacattcattatattaaaggatttgagagaggcttttttatattcaactatgagctaatatctataggtaataggtgtaatcatgaacttaattaattagctttgttcagttccaatatgctttttacttacgtcatttcatgtcaaacgtctgcttctgtagtatagtgctcataaacacaaagcccttcaaatatctcagtatatatatttgcatatctctttgataaatctcaactacgcttatctcacttacttctattctctatctcattctattctactcttgtattgtctcctcaagcaacaaaatgggacgtagtaacaagcatgatgtcactagtaccactccttctctggcaattgtccaggcgaatcctacccccacaaagatgttgtcccacagaagcacaattgt

SEQ ID NO: 413 - DNA, 2199 bp, Arabidopsis thaliana
aaaaaaaaaaaaaaactcaaaaaaaaaacttacgagtttggcgagtctctggaaacgaaccggtcggccaatgcaaagcacccaactctctgattctcgcaatattatcgagaaacccgggaggataatcgcgaactcgaaaaaccggttctgcaaaagaaacaaaaacaagttagaacgatggagaaaactaacccgcaaagtcacaacaaaacaaagtctaccaggagacatggtccaatcatcaacaaagaccgtatcaagattctcgaccgagaactcgctcaacttcacaaaaaagtaacgacgcttccaaccgtgaattttactgacagcaccagaaacaatcttatgcttggccttagcactagcatagtacgagcccgggctctcttttactctagagaaagtagtcgcctcctcaaaaaaatcagtgtcaatctcgataccgcattcagctcccaatattgctagtccgatagcattgcgaatcgcaccaacagtaagctgagatatcgcgatattccgtctagcacaatactccgtcagaaaatttggaagaggaaacagaagcccacaacgtgtaaagtacgcctcatacaaacatatgtatccttctggtggagtccaagggcgttgtagcgaatccggtttgaggagctctatttctctcggcgcattacagaggataagcatgtccgctaatgattgatcatcacatagcgaagaaccatgatctaacggagctacgaccctctcgaaataagaagcacgaagacctaaaacaatctgcctacctctgacagcagaacagtcaccggtgcgtcgctcctcaatcctgctaacaggccttgtaccaactgcaccccgagcacccgtgtcacgaccactgacaaccaaattatcaaacccgttctccatcataagacggcccaatccaccattctcaccaagctctccctcgggatcgctaatgtaatcttcatcgacattctcgcagtcgtagacatatgagacttcctctccgaaatcattaaaacctccaaagtcgcgatcatccatcgggtcaaacccaccaaactccgcattaagtatggcatcaaggttcttccccttaccaaatcgagcagggcttggtgcgctcgccaccctactagctccaagaacgtctctttgaagcggatcacccattttgctaagctctccttgaccgttgttaccacatttatctcgctctctacgtgtctcgtgcacgctcggctcgagaacgtcaccatttggtctctcgcgcgatgtttcaccgcttggccgcaccgctacatccactcttcttacgccgatctctccttcacaaccgacgagtccttctctctctccaccgagctcttctctctctccgttaatctctccgtcgccaccagagagctcacctccgttagaacacacgccgagctcttcccccactatgccgttctctcccgcaacgccaacaagctcatctccgtcaccatcgacgagctcgccagcgagaaaacgcacgtcgaactcgcctctactccgttcgaccgtctcgcaacttggaccaaactcggttctcgcaacttcaccctcaccaaaaccattgtgccgagctatatgcccgccgagctctccaactgcttcccgattaatcggactaatcccaacagtgggcgcttcttcagctcgctcgggtacgacgacctcctctaatccaaattcgagctcgccggttcgctcagccgccatatttggcggctccccttttcttaaaacaaaaccgacggctagggtttgcaagaaggagactccaattttaaagcataaagctagagagagaaagaagagagaagggggagaagaagaaatttaccttttcttgtgaagagaagaaactagaagaaaaatgaagaagaaaggtgtataaatagagagaaggaaacatcacaatattcagtggatatggaaacatgccaaaatccagcagattttaaggtgcaacagttaggggatatggaaacatgccaatatccagcagattttaagatgcaacagtatgaaaatatggaagctctaatatccagcagatatcgagatacagtaatatcaaacgaatatggcatataatattacaaaaattcgacttcccgcgtaacgaaaataattaatgcacctcaacgg

SEQ ID NO: 414 - DNA, 839 bp, Arabidopsis thaliana
gtacaaccacttttgctaggcacccccacacttttaggtatttgtacgaaggtactgtgcctttctaaagttcatgtggtgactttgtagtcactttatgtggtatcctgttgaggatgtagttagtggtaagcaaagcttccccccccccccccacacacacacatgttctgggctaatccagattcctgctgtcattacagacattttgaccagtccagccttaacaaaaccctttctcagatacaccccatgtttcttaatcactaccttatcagactcaaagttaacggtaaagccattgttgcttagcactgttccagagatgagattcttctgcatgtcaggtacatgcttcacgttttacagaataagctcacgtcctgaagtcagcttcaatcttcaacatcgccgtgttacccatgaagggtttacttgttcttcacataggtggagaacatggtcctatcagagtagatgtgtgcggttgcaccgatgtcctagtaccactccacttggttgtcttccactatgttatattttcagtgaccactgcaaccatatcttcttcagttaggtttgtctggctcttgatatccttggctttgctcttgcaaacatcagctttgtgtccaatcttgctacaatgatgacactttcctttgaacttccgctcatgtttgctcttcttgaaatttgttgtcgatgaaaccttcaagttcttctgaggaatagagaactcttacacctagatactttctgattttttgtgttagatctcttccctttgactaggcttaggagtctctatatatacttcactaatcactggcagctgt

SEQ ID NO: 415 - DNA, 536 bp, Arabidopsis thaliana
catcgaatctagagatcgtttcttcttctcttgcacttttacttcggttatctgggacatgcttgctagaggtttgttcaagcgggagtatacaagtgattggtctcagctcatcaatacagtcttagccccgtgaagtaatcgagttgacaggttcctcatgcgatacttatttcaagccaccgtctataaagtttggagagaaagaaacagaaggcttcatgatgaaaaaccaaattctggagctatgcttattcaatagatccataaggaaatatgaaatcaattatccaccattcgaaggatgagaccgacgatacgacactagctatcaaggctggctctaaagtcaagcttaatcacaatacatctcaaataattcctgtttttcaatttgtttctatcaaacacacgaagcactagagtaataactttataattttctagctatagaggaataactatcagcaaaattgaatatatgtgtttatatttcatataaaaataaatcacaaaacgatgtagcagaaaaaaaa

SEQ ID NO: 416 - DNA, 512 bp, Arabidopsis thaliana
  unsure (1)..(512): unsure at all n locations
nnnnnnnnnnnnnnnnnnnnnnctaaagctaagtggggcaatcataatagtttcataattgactttgacattattagctttgacatccgaaatcgtcacccaattagctgagtcattttttatcaccaaaccattgccactgcgatttaccagcaattttttaaatgtcgctttatttaccggagcaatacccgctggccggtaaaacaacttaattctgttttgcatcgcaaacttcagtgcattcttaccttcttgctctggactatttggtggaatatccagaacattcagataaaaaatgctttctttattagtgggcagtttattcggcataattttgatttttacttgctgcccggaatttgcccctatttttgccactggtggcgttaacatgaaaggaacctgaattttttctggtggtaatgacgtatcgccatcatcaatccacgcctgcagcagcgaagaacggtttccctggttcatcaactgcgacatcacttctttat

SEQ ID NO: 417 - DNA, 586 bp, Arabidopsis thaliana
  unsure (1)..(586): unsure at all n locations
nnnnnnnnnnnnnnnnnnnnctaaaggatcaaacctttgggtcgctggtcgttaatcatggaaatcgatgaaggctttgcggtaggcatgtcgccagccgaactcagcgctgagcagctcttaagcaagctgtggctatgggaaggcaaagcagaaagatatggctgggggagtaattcaacacaggaagcgcagttctccgtaatcgatgccatcaccgccagcgagctaattaacgatattgaagccctgtttgaataaggaaagagcatggacaaggaattaccgtggctggcggataacgcccaactggaactgaaatataaaaaaggcaaaacgccgctcagtcatcgtcgctggccgggcgaaccagtgtccgttatcactggaagtctcatccagacattgggtgatgaattgctacaaaaagctgagaagaaaaaaaacattgtctggcgttatgagaatttttcactggagtggcagtccgccatcacgcaggccatcaacttgatcggcgaacacaaacctcaatcccggccggacaatggcggcctactgctatcgcgcaaaatgacagctacag

SEQ ID NO: 418 - DNA, 391 bp, Arabidopsis thaliana
acgtccgccagtgtgctctagaaaaaataacgtttttacgattaattcttcatgaatttgatagaaaaaattaaaaaaaaaatttatttgagatgtattgttattaagcttgactttggagccagccttgatagctagcatcgcatcgtcggtctttcatcattcgaatgatggataattgatttcgtatttgcttatcgatccactgaatatacatagctgcagaatttggtttttcatcatgacgccttccgtttctttctctccaaactgtatagagtatgacttgaaataagtatcacatcaggaacctctcaagtcaattacttcgcggggcatgagactgtattgatgagctgagaccaatcacttgtatactcccgcttgaaca

SEQ ID NO: 419 - DNA, 473 bp, Arabidopsis thaliana
gggtacgagctggtctaaagtcaggaaccggattccggttttaaccccttccagatggctccgcgtctgatgatgaatctggcggatgtcgataaaaccggagccgtgcagccggggagtcgggtcacctggcgttataaattcggcggcaacgagaaccagctcgacggctatgagaaatggttgttacctcagcttaaacccgaacaacgctggtacggtctggaacaggacgaaggcgcgctggggcgatcgatggaacgctcgcaacagttcctgctgctttcggcgcttctgaccttgctgctggcagtggcagcggtggcggtacggatgaatcattactgtcgcagtcgctacgatctggtggcgatcctcaaaacgctgggggcagggcgagcgcaactgcgtaacgtaatcgtcggtcagtggttgatggtgctgacgctttcagccgttacaggtggggccat

SEQ ID NO: 420 - DNA, 449 bp, Arabidopsis thaliana
agagcaagagcgatagtagaacatcaagagaaaatctctatgtaacctagaattaaattttaaaaaaaaatattcagaaaagatatgtaacctaaagtatttattcttctttttttctatatatatagggaatccgtattatattttgttgcagcaacctcgtatagtctaataatttaatctttgcgaattagtacttgccaaaagtgtaattagagaggtagtaacgagtggattatataaaacacagggatatggtatgacggaggcaggaccagtgttgtcaatgagccttgggttcgctaaagaaccgataccgacaaaatcaggttcatgtgggactgtggtccgaaacgcagagcttaaagtggttcaccttgagacacgtctctctcttggatacaaccaacctggtgagatttgtatccgcggtcgacagatcatgaaag

SEQ ID NO: 421 - DNA, 657 bp, Arabidopsis thaliana
  unsure (1)..(657): unsure at all n locations
gggtcaagaagtattaaacatgtttcaacctaaagtcaatcaattttagcgttttcttttgaaagttccaaactttatcaaaactctgtactaaacaaacctgtagctgctccggcggtgagagtcataatatctccggcagaacgaacattgacggcggacgtaacaacagaagccaaatactctctctcagctcccataacttcagcagcttccacacactgagcagccacaagggtcgcagcagaagcaacggccatgtcagttttagccatctgctcatccttaccacagctagaagacgcagcggtggctgctgcaatagcagcaacagctgcagcaacgccggcgacagagacagcagcgtgaatctgagcgttatgagcccgagtctcctctttctttttctctctccggtccttaagccaccgtcccaccgtcttggactgtgtagctgtagcggttataggtcccggagttgccgccgttgaacggaactgagaatttacactgttcaatgaatttttgttcgctctgcaaaattgctgcattttaagattaaaaatttgagttttagtatcagagattcgccagaaccagaagagtgaagcaaaacctanagacaggaatgattttggaagacgagtgatgacaaga

SEQ ID NO: 422 - DNA, 924 bp, Arabidopsis thaliana
  unsure (1)..(924): unsure at all n locations
tcgatggtcaacgtgccgaaatgcagggctttgtagggagtcagagacgtttcctgaagacctttggtcagtgtggcttgctcattctgacgcaaatgcaaacgtaaacgcgctagcaaaacagcagggggcgtcgttttgagaatatagtcgcaggcacccatttccagtgccaggatgtggttcatatcgctatcgagagaggttagaagaacaatcggtccagaccactttgcgcgtaaatcacgacaaatggtcatgccgtccttgcctggtagcatgatgtcgagtaacaccaaatccggattttctcgcaaaatggtttcttcggcctggtcgcgcgcggctctacggtaacctgcatatcatgttttgccaggtacgcggcaatcagtgaaccgacttccgcatcatcttccacaaatacgatagtgttcataacattcacggtagatataaaaacgtcacaatacaccgcgctgtttttacttactatcaatcgtttctaaacaagttttcatcaggtattctactgatgacttgttatggaagtgttaaggtaaaaagatggggctggtaatcaaagccgcgctcggtgcgctggtagtgctgttgattggtgttttagcaaaaacgaaaaattattatatcgccgggctgattccacttttcccgacctttgcgcttatcgcgcattatattgttgccagcgaacgcggcattgaagccttacgcgcaaccatcatttttagtatgtggtcgattattcctattttgtttactggtgtcgctgtggtatttcacggaatgatgcgcttgccgccgcttttgttggttctgttgcgtgttgggggataagcgcatgggtgttgantatatgctggataaagctgcattaacgcagatgacgactgcatcaagtgg

SEQ ID NO: 423 - DNA, 358 bp, Arabidopsis thaliana
catacccaattaaaaagaatcataacttgtttttctaacaaagacgagaacttacaagtcatccatgaacttagcagagaccaagacgctggtgatgatgagtctatggacattagaggaatcaatgggcaacaatggctgcttttgtatgaaccgatccaaatatatatacgcgactatgtaacacgagtcgctgcaatctgcgtacttgaatatcctctccatatagcttctgattgatatagaaggtttggtcactgcattgaaagctgagatcctcttgtgctccctgaacggacggctcagatcgtcgttcgtctccgacaccctttgtagaagagatgacatcgccgttatg

SEQ ID NO: 424 - DNA, 526 bp, Arabidopsis thaliana columbia
tcattacttatgatcttttttgtctattgctttctgctgctattgatgcagggatggtggaagctttgaccgccaaagtcactgcttgggagaatgaaagaggaaatgaattcttatatgatggggtaagtggttttttactgatcaatgatctgttctacacaattatcaaatcagcatctttacacaaaagcacgtaaatatttcaggtccgagtcttatcgatgcttggtcagtacaagactgtatgggaagagaaagagcatgaaaaacagagacagagagtaaggaaaactgttttttactaggaaccaaggtcactatgagccaaaagcatcattggcaatttgacattgttactttcatctcaggatatgaagaaacttcatggacaactcataacagagcaagaagctctttatgggtctaaaccaagcccaaataaaagcggaaagaaccactgagaacaccagtaaatgctgccatgaacagaaaactctcccttggtggtgccatgcttcatcaa

SEQ ID NO: 425 - DNA, 960 bp, Arabidopsis thaliana
tgtacatccttaataaaatcgatatgattttctaaaacactcacctttcatgggaccctataacataatcacaaaaaaagtttggagttttcttcaagtcaaaaagctaacaatttcactgttctttctttgtcttctttcttaattcttttgccataactttaaattatgttattgcagcaggaagtgtcgccacgaacatctggtcggctttctcatagcagcggtcctctcaatggttctttaaccgacagtcctccgatttcgccgcatcaagtcgacgacattaaggtctaaaacattctcataatgtttggttctttaatctcgcttgctaatgtgtgactctgtgtttaattagtatagtaatatttttgatatcttcgatgaagattcatggattgttggctgttgcttattaaattattgaagtgtattttaatataaagcattaatctttactcgatttggtttcttcttttgttttatccgttttgttgtgaattaacacagaatctgattttgttgtgttttatttgctctatgcagcaattttgccgatcaaacaacaatttcaactctcaataccgttcaacgggaacaactccgggacctatcactgcaacaactacacagtccaagacagttggacggtggttgaaagacaggagggagaaaaagaaggaagagatgagagcacacaatgctcagatacatgctgctgtatcagtagctggtgtggcagccgcggtggctgctatcgcggctgcaactgctgcttcgtcgagtgctggaaaagatgagaatatggctaagacggatatggctgtggcttctgctgcaacacttgtggctgctcaatgtgtggaagctgctgaagttatgggagctgagagggatcatttagcttccgttgttagttctgctgttaatgttcgatctgcgggagatatcatgaca

SEQ ID NO: 426 - DNA, 547 bp, Arabidopsis thaliana
  unsure (1)..(547): unsure at all n locations
tnnnnnnnnnnnnnnnnnnnnnnnctaaagtcccacggtaggcagccagcccagttcaacggagaatacctgaattaaaagcatccccagagcaaatgccggaaacgagatccccgacaccgcaatggtcatactcaatcgatccggccaacggttacgccagacggcggcgataattcccgccgccataccaaatataaccgcccagaccatactggttatggtcagccacagcgttggcataaagcggctggcaatctcatcggcaaccggacgacgcgacaccatcgacaggccaaaatccccctgcacagcattgctgatatagtgccagaactggtgatacagcggctgatccaaccccagctgctgacgcaccagttctataacctgcgcatcagcttcgggcccggcaatcaatcgcgccggatcgccgggcagcatatggacaaataaaaacaccagcaccgagacgataaacagcgtcggaatcaccccagtaagcgtttgataacgtaattaagcattccactccctgcgttgctta

SEQ ID NO: 427 - DNA, 584 bp, Arabidopsis thaliana columbia
gacttaatcaattagtaatcaaaataatgttcgtatcattcgacctcttggttttggtttgttatgtaaaactaatgtcctaaaattatctataactaatgttcgtattatcttataagtagtattttgctttatatgtttgattttgttaacaaataaagtaaacctagatctaaatattatatgacatatccttttgaggaggtgttattaagaacatttgtttaaaaaaagtttcttcgaatttcataaaatgtggtatgcttaatctttttttattttgatttcaaacaaaattgcttggccgcgcaaccagcgtgtgactcccctagttaaatacttattcaaatagatcaacaacggaccagacaaagttgtcttcattgttgagcttgttaagcaaactacaggtggtgaatctgaaactcctgggcaagaataaggttcagctgggaagaagaagaatgagatcaaagattggtttgattgcaggttagcttattactctgttttttacttaataatttggtttggtgtgatagttaacaataattcatgtcaatcatgatgaattgtttgcagat

SEQ ID NO: 428 - DNA, 877 bp, Arabidopsis thaliana columbia
ttacttttgtcttcccaaaacaattagaagagcaaacttgaacatctaaccaaaaaaaagaaaaggaatatgtgtcaagaaaacgtgcctgaaatctagaagcaggtccatagtcctggtcggattccgtcgcagaggaatctggggagatgatttcagcatctccaaaattaccattttctgctaaaactgcttcctctagtgccttgttaaattcacttgccttgtaattgaacaagtttgtctgatcctgaaatctgaagagatgaaagactagtaaggaacaagaaacaaacacacaagtatgaaagatttccagaaagagcgtctcatgtacttacttgtccataaattccgtaaatggatacaccatcccttgtcttacccatgcatagtcctgttaatgaccacaagttttcagaaaaaaagatagtaaaaataaacgccagcttgaagacagattaggattaaagagattaccctctgagttccatccttggagtacccaaaaaacatgacacaaattgcgccagggacgcaatgtttcaagaccccatcaggcgcttgtgatatcggatcgatcaccacagccggccatgctgggaatcttttcccacacttggcccacacaagatcgccaaccgtaaattcctctggtttgtacacgcccttacgcgaggcgtcggactttttcggcataccaaagttagcatcgtcgtaggaaatttgaacatcccagtaatcgcaatctacttcactgctgtctccgttatccttacgtggaaacaccttcgagtctttgctgcgatgcaatttcgagcttccactgaaacctttgaccttcttcccagagatacgtcgtcgtcatcatgactag

SEQ ID NO: 429 - DNA, 552 bp, Arabidopsis thaliana
ctgtacatttgtaatttgtgaatacactatgtaatatttatgaatatagtgatcagactttcgtgaataaatagctagtatcgtaatatacacgcaatgcttcaaaaaaataaactagtcacatggacaatttatcaccacaataaatataaaagtatgtactatatgaaagtagtcgtcacgagtaatgaataaataataaatttgttagttgacaaaccaaagatttggtaatggtccaaccgtcgacgacattccggttaccggtaaccaccgtacggtttattccgtcaccaatcatcattagatatcttttgtttttggcaatcactacgttttcctcataaacacctgacgtcacgtagataacgaaataaccggcggtaccgtcagttttattcggcgccgaattaacagcttccgttatggtcgtgaaattccccgttccgttttggttcaccgttacgatgtcgcttacaagcaccgtgtttacgtcattatcgtcgtcagcgagtttcctctgcttaaagactcgtaaacggcgcgtgtgtg

SEQ ID NO: 430 - DNA, 1037 bp, Arabidopsis thaliana
aatttcgaggtgatacatccaaataatatattaatacacttatatatttacttttaagaaagaaaatcttgagaagaaatctagaattataatttcgtctgctttgttaaaaggtttttcttaattagagtccaacgttcgaatttgaacttgtgacaatagtacattatcttttatagagcataatttttaaaaataatatatttccttgaccacatgtatatatctccaaaacaatagtaaaaaaaagagagacgaaaagaaagaaagagagagagccccacaaacaaacaaaatggatttgaaccaaatcttgatcctctcatttctctctctttttaccttagccatattcttgctcacaagatccaaacggaaactaaaccttcctccgtcgccggcgatctccttgccggtgatcggacacctccatctcctcaagccaccgcttcaccgtaccttcctttccctttccaaatccatcggaaatgctccggtcttccatctccgactcggaaatcgcctcgtttatgtcatctcttcacgttccatcgctgaagaatgtttcacaaagaacgatgtcgttctcgcgaaccgccccaagttcaccataagtaagcacctcggctacaacgccacctacttactctcggcatcttacggcgatcattggaggaacctccgccgcatagccgccgtcgagatattctccactcatagactcaattcgtttctgtatattcgtaaggacgagatccgacggctcatttcacatctctctcgtgattccttacacgtatgatctccttcaattctttttatttattatttgttctgtattcattactttatctttggtttgtcaactaacaaatttattatttattcattactcgtgacgactactttcatatagtacatacttttatatttattgtggtgataaattgtccatgtgactagtttatttttttgaagcattgcgtgtatattacgatactagctatttattcacgaaagtctgatcactatattca

SEQ ID NO: 431 - DNA, 561 bp, Arabidopsis thaliana
tagtaacgtccgccagtgtgctctaaagtaaccgcctcctggaagaccttccactcgggcgtctggtcccgaaaagatcccagcgacagatttgccgttttgtctagagcttctactctcctccgcggccgcatcaatgacttcgttgccctcgaaaccgtccaaaccggccgtcccattcgcgaaatgcgtacccaactggcccgcgtgcctgagtggctcgactactttgcgtctctcgctcgcgtccacgaaggccgtgtgaccccattcaagggcgccgtcacaaacacccttacccgcatcccgctcggcgtcgtcgtcctgataacgccctacaaccacccgctgcttatcgcaatgaagaagatcgctgccgcgctcgccgaggcgaacagtagtaattgtcaagccgtctgagctcgcaccgctctccgtcttgaagcttggtgctctattcaaggaggctggcttaccgacggcgtgctgcagattgtatccgggtacggacgagaaaccggaaagtactctgcgagcaccctaagatctcgaaaattgacc

SEQ ID NO: 432 - DNA, 488 bp, Arabidopsis thaliana
tggctctataccggaaaatctcttcaacaaacaattagacgcgattctcctcaacaacaatcaattcaccggagaaatccctgggaatctcggttactctacagcttcggtgattaatctcgctaacaacaaattatccggcgaaatcccgacgagtttcggtatcaccggttcgaaattgaaagaggttttgttcttgaataaccagttaaccggttgtataccggaatcagttggtttattctccgacattgaagtgtttgatgttagtttcaattcattgatgggtcatgtccctgacacgatctcttgcttatcggagattgaagttttgaatctcggacacaacaaattctccggtgatcttcctgatttggtctgtactttgaggaatctgataaatctgacggtttctttcaacttcttctctgggtttagctctcagtgctcgagccttagcgttgggtttgatttcaccggaaattgta

SEQ ID NO: 433 - DNA, 579 bp, Arabidopsis thaliana
ctataatttatgctgacattattttgttgatctgtttccgcagatcgcccgatcaggtttctcgaaccgtgtcctgacgatctcatttcctgtcatcgagagctatcggcctgcaagtgtcactcgatgaagcacttctcccgagatcgagtcaaaagaacgctcaggctatttcattgcatttcctgtccatccagcttagaatccgccgatcaccgaacgcaatttttcgtcgatatgcagacttttaaacccaccatccgagaagtttacgagaagaagaggcttgccactgagaggaaacgtgcggccgtggaaagacgcgtcgtggaagagagcggcgctgctgaaccttcctgggctcgggaggttgttccagaggttgctacacccgccgcaccggatgttgtcgaccaagtcctagccgatcctccggccaaagcccccagaacacagaaccaacaacccaatccacaatggtcaacaatcagatccccggtaacacagttgacacagagggaaacccgatccctccaaacaagaacaggcaaatcgatctttggcacaacaactcgaagc

SEQ ID NO: 434 - DNA, 595 bp, Arabidopsis thaliana
acatgaaagacaacacatgtgacctgtggataaagcgcagaggtaggtagatgatctaccttaataccagtagcgagaatctcttgaccggtggccaaatcaaccaaagctggagcgtctctgtgaatgggtaagtaatgctcggtctctgttggagcaatcaaaagccacaaagagcaagaattaattgtcctgataggtccatcgaacgtgagacattgtttaagtatggcttagactgcttactaatttcgcctctctcgtcaataggttctccaagaacgttcatgatacgtccaagggtggcccttccaacaggaacctgagtagatagacaaattcaccacaacataacataaaatcaatcggaaagaaagagactttcagaggaaaggaaactttgaacaaagtcaacgataagaaactagagaaaccaaacgaattgagttgccataaacggatcctcagatctagaccaatatatcaaatggcgaaaatgtcccaacttgtgacatgatctcggatctacttacagtgattggagcaccagtgttgagaaccttccttccacggacgagaccctcagtaccatcca

SEQ ID NO: 435 - DNA, 426 bp, Arabidopsis thaliana columbia
caatacacacacatttccttccacaatgtcttctcaatccatggtggaagctcattggtttgttttgcgcaactcttagaaaccatgtccttcatacgcagctgacatattttgtagaatttttctacaattacaccagtcagtgatggatgccaagtgtgtgttttctataaaacaagaggagaatttgacgttagtgatcagacaaccaaaccaaaccaaatggatacaaacaatagaagagattactaggagataaaagttaatttacggcgaattcgaggaagtatttgtgtctttttctgtaggtacatagctccaactgtaatatggcccatcaaacttgtttttaaatacctttgtgatcgtctgggtcatcgtaccattttcgtgaccaaacctacaattacataaaccaattagcat

SEQ ID NO: 436 - DNA, 615 bp, Arabidopsis thaliana
caagtctggttggaaggacttcaagcccatgactgcaagtaccactttcgcctctgcgattcagatcggtgaccctgtctccatcgatagagctgtgtacgctctcaagaagtgcaatggtattgtagaagaagccacagaggaggagctgatggatgcgatggctcaagcggattcgacaggaatgtttatctgtcctcatacaggtgttgctctaactgctctgttcaagctgaggaatcaaggagtgattgcaccgactgatcgaactgtggtagtgagtactgctcatgggttgaagtttactcagtctaagatagattatcactccaatgccatccctgacatggcttgcagattctccaatcctcctgttgatgtgaaagcagatttcggagctgtcatggatgttctcaagagttacttaggaagtaatacacttacgtcataagagacaagaccataatctttagctgttttgttttttgaaaacttttagacgtttgtttgcgttactcttcaactcatctctctgtgatctttatctgtttctcagttttccaataaagttctatcgcaaagtttgaatcattttatcttctttgttttttgtgt

SEQ ID NO: 437 - DNA, 478 bp, Arabidopsis thaliana
cctttgcatacattgttatcaatgcattgctgacagaaactgaataaatttcccctgactttacagcactcccatggatttgcttgccatggctcaatgatgccaaacttgaagctacacttaacattgctgcaagagtgtaactgtttggtctctgccctcctccaaccattgatctgaaaaggtttatagcttcaccatacgaaccgtgttgctcatatcctacaatcatggcggtccatgcgactacatcacgatctttcaacgaaacaaatatattcttagcttgattcatatctccaagcttaatgtacccatcaagtaaagctgtaaaaccttcaatcttgagatctttggttcctctttgttctatcagtctccgggcagtctcgacccctccacacctcgaatacatcgagatcaatgcatttaacacgattccggaaatatcaaaccctgtagtaacaatgtgcgaatg

SEQ ID NO: 438 - DNA, 510 bp, Arabidopsis thaliana
agtttctcatgttgagataatcattgaagtcttgaagaaaactggtgatgaagacctcattcgtcgtttctcaacggattaattcgacaattcatataggtatgtatatatcaatatatcaataataaggattcttgttctacaaagtcatcactaggctttttcgatattgcatgaacaagtataacaatttttttttgctaagtataagtataacaattgaggtttttgctctgttttaaggatgcaagggctccttggtcttgcggttgaagctttgtgcggcaggctgttggttctggagataaggtacaacgtatttgacgacatcttcttctgccattctgacatgtccaccgggtacactcgcaaacttcacttttccagcatcatccaatgttttcagaccgatccaatcctctgtatagagctttgtcatggttagcagagagaagagtttcgaactcaccatccaggataaaacccaaaccgaagttgaatcatttggag

SEQ ID NO: 439 - DNA, 650 bp, Arabidopsis thaliana
ctactattttgaactgtaggatctttgagttgcaccaacaacgaagaagatgttctctttcttgagagactcaccaattcctgctgagcaaaatccaaagctcaagcctcacgcaatgtctgtttttgtcatggtaataatcaatatcaaataacatgattttgcttatatattcgaatcaaagattgttgagttttggggtttattatcagtgttgtgaatcagcagtacaactgaggaaaacagggaaagttacggtgagggagactactttgaagagacttggagccagccattctaaatacggtgtcgttgacgaacactttgaggttagtagttatttgtcatatctcaaaatgttctttatcatacaaatatgttaacttgattttttttggttgatgtaaaaatgatttataactgcaggtggccaagtatgcattgttggagacgataaaggaggcagtgccggagatgtggtcaccggagatgaaggtggcttggggtcaggcttatgatcaccttgttgctgccattaaagctgaaatgaatctttccaactaaaaaatcatatactattatatagttgtaacttgtaataaatatttcattttgaattgttctcatgactgttgttctatttggtttgg

SEQ ID NO: 440 - DNA, 572 bp, Arabidopsis thaliana
gttatgtgctttagtaggggtagaatcgaaattaggaaaccacctgagaccgagaagaaacacacaattgctttgctctctcgtccgcagccacagaggttgaaccctagatttactcaccaatctctcattctctcaatcaatccggtaaaacaatgtctgatattttccccggcgacttcgcaggtaaaatctctctctgtctcgttttcttccccatttggtaattcatttaagtttttttttttttttttccttttgatggcagcggctgagacaggcatcttctgggacatagaagattgcaagatccctgatgatctcaatgctggtgatgctttgaagaacattaaatcggccctttcgagtgatggtcatcatggtacggtctcagtaagggcttatggtgatacgaccggtcttgactttccttctgagggcattaagctcaatcacttccccgcaggtaatgtgtaatgtgtaatcttactgattttgtgtacatgatgatcagatatatctctatatttttgtgtgtttgtttcaggagagagatcgcgagacagacaaga

SEQ ID NO: 441 - DNA, 489 bp, Arabidopsis thaliana columbia
tcctgataattgtctctgaaatttttattttgtatgagtgttgttttaaaggtgaatactttctacattttcactactcagttatgtaatcaatacggtttcggttcagatgtttgcagacttgagatgttctccttcatgtgcacgcgctggtgttgaaggtactgtttctatttgcccaccggattgtttccagtacaaaggaacatttgatgtcttcaccaagatcatacgacaggtgagcatctcttttcatcttgttgaatgtctcgcagtgttaagaagatgatgataagtagttgtttgagaggttttgttttttgtatgtggcatgctttttagctagaagcttactatttctctatatcctaacgcaagaactgatgcaggagggtctgggacgcctttggagagggactaatgctggtcttgccctagctgtgcccatggtatgctcttttgcttacatttacgggattcttttgtttg

SEQ ID NO: 442 - DNA, 594 bp, Arabidopsis thaliana columbia
atgcataacccattttgaattccccgtaaaatattccgttaaccattaccgaagttaccttgaaagtaagagtcaaatgacacttaattattaaaattatatttaatttggtcataactccatccttgataaagaaaaaaaaaaatcacaaccaaaccattagtataactgctgatatttctttggtttaagaatttacaacagtacatgagaaccagaaatttcgaaaccggaacatacaccaatagccaatgggtaaaaaatttcccttgtattattactttgagctcatagatgatatgaaaaacataaccaaactgtaactgatatcttacattgaaacataaacagactatacaaaataaaatcggatttactgaacaaaaccggaaattgaaacaacattgaagagcacgttcttgtaaagaatttatttctatgaaataaacttttcaccactcacccaaccagccaaaaggacacatcactatgattaatgtttaataggaggtttctctctttgatgagaaccagcacccaccgttgggccaccagtttttggaactggtcttttgcgaggtgatgtcagataag

SEQ ID NO: 443 - DNA, 1050 bp, Arabidopsis thaliana
ctgtttcgcaagcccatagtctaatattccaatcacctagataaatccagaacagtcaaatgccaaaaagtgtaatctaacaaatgacttaacacagaaataaaaataaaaattgatacagaagtcaaatcatatatccatacctccattgcctctagaacagtactaagagcgattccagcagtctcaccaacgcttagctgatacttaatccggattctactcgagtctagctcaaaacgcactgcattctccatgaactttgcaagcacctcttgaatctgcaaaacacatacacgattctttgaaatgtggatgcaaattcgaagattaaagacactaagctagccattggcactgagtttaactaaggttgcacctcgtcaaagcaattagaccattccttcctaagtaaagcgtaagccacaggttctccatcttcctcttcaccaattctcaatacaactttaagttctctgattctctcagcggcgaatctgaaacgtccatttttcaaagcttccttcgtttcctgcaatgcctcacaaattcccacgatcgcattcactaaatcaagagattctcttttcaatttcacttccttagtcttttccgttatctcatctaccacactgcgtatctcaacatcaatcggacggtcagaaaccaattgtaggacatcggagacgtcatcggagatcagacgagtcctcgagacggtgtcttgacaaagagaaaatagctccgagaaatcagagtgatgagcgacgagataagactgaactttggacttgatccgcagagaatgagactctaagcggtttatgaggagacggagatccggtgcagataacggagttgtgggatcgtttagatcgtgtccggcgagaaggtcccgaacattgatcgattcaacaacgcgtctatctccggcatgacggagggacggtggtcgttgtcgtcggggctctttccgattagagagtaattggcggtgatagatttggcggtgacgatggaccttattgacacggacgttttaatttactt

SEQ ID NO: 444 - DNA, 965 bp, Arabidopsis thaliana
atcttttgttgactcgatataagaagggggtttgtggaagaaattgtagtattatatatcaagaatggctctccaaaccatgttgctggccacttagctattatcgaagcgtttgttgcaacatcaatatcatatcttcagctattctgttttagagaggttgagactgaatctatatgatctgaaggacggagatactgctatgcatttggccttgacaggtcgccatgtggagatagctgcatgtctggtaaatgtgaaccaatgtgcttcatttcttgcgagtaaagttggaatatctcccttgtatttggcagtggaagctggcaatgtcccactcgtggtatcaaagttgagaactacaagcaatgaaggaagaaagacgaactttgattttgtacacgtggctttgaaggccaagagtagaagtttgttttgcttcttaccaattagtagctctgtttagtttgtttgactagtttgggacagaagactaaatatttgcatgtgggctaatttatacagatccaagtcttggggatgagtgatgtgaagaagggataaattctctttcaattggagcatccatagggttttataaaggagtatgtaacctgttagtacgattaacgaagagtgtttacgtgtgaaacaatgatggaccctttccactcatttggcagcaacgaatggccatatcagaattgtcaaagagactctaaaacattgtccagattcaaaacacctgcttaacaagcttggttagaacgttctttgcattgcaacaaatagtgggaaatgtaagtgtttgattccgttgttgttatatatgcaattctgtttcattttatttccgcactttgggttgaattgtcctgtttctctatttaaagaaaaaagtgcttcattttgatgctttgtcgatcaaactgaggtttgattcccaagagacacatacagattgt

SEQ ID NO: 445 - DNA, 528 bp, Arabidopsis thaliana
tccatcagcaccagatgttatgattgtcctgtcatccgtaaaaggtatgaacttagtctgaaacacattttcacaatggccagagggatacgacaacttcctgcttccactcaaccagttccagagcatgatttgtcgatcatcggacccggaaacaagaacatcgccagtcgaattgaactccactgcattcacacatccctcatgaccatttaacttcccgtaaagatctagtttcttcactctcccctgaagtaacaaaagacaaacaacaatacagttcaatccaaagaacttaaaatttgagtgttttaagtgatataagtctttggattggttcagattttctcaacatcctacaaaacactgataagccataacacttcgtctttggaacactaagatccatgattcgaaactgaaatctagaacaggagaagactttctgataactatgacataactatccaaaacccatatttctataccaattttgagcaagaaattgggaagcttcacaagttgaaa

SEQ ID NO: 446 - DNA, 594 bp, Arabidopsis thaliana
ttgttgcctaattacatggcgagtacagagtcagctaaagcgaggatccggtctcatagtgcaccgaggcaacggccctcaactcccgagaggaccgtgcgggtttggtcaagaaacggctctcgtatccggtaccaccgccagcggagtatgaggacaataatagcttaaggagtccaagctttaagagtgtggctggttcacattttggtggaatgttagagcagcaatcgaattactcttcatgttgcactgagtctaacggtgttgagatctctccagcttctactagtgactttaggaattggcttagatgattggtggtgatgccaaatcaactgtcaagatctttcatcatcctccaggaaaagaacgttttaaaattttatattccagaagaaaacaaacacttttatattgtgtcgttgaggttgagttgtgtttggaagataagtttattgacctattgatctgtaacttcataagattttgaaacgttagaagattcaaaagaatgtttgttttgcattttttttaaaaatattcaaaagaatatatagattcgtatttagatacgtacatcaaatagtttta

SEQ ID NO: 447 - DNA, 422 bp, Arabidopsis thaliana
  unsure (1)..(422): unsure at all n locations
tnnnnnnnnnnnnnnnnnnnnnnnctaaagtttgtgctatattctaaaccaccgggcagaatcatacggggcaattatggccgcattaccatacatgcaactgtacatagctgattacctggctgacaccatgcattagtcagcagaggagcatggtgcgtatttgttgctgatgttcaatgactggcaaacaggatagcgaatacctaccaacaggctggcaaaaattgcccgtctgagtatcgagagatgggctgatattgaaccatccttgcaggaatttttttgcgataacggcgaggaatgggtgcatcttcggattgaggaagatctgacatcagtcagggataaattatccaaaaaatcagccgcaggacaagcatctgttcaggccagaagacgcatgaaggaagcagatgttc

SEQ ID NO: 448 - DNA, 547 bp, Arabidopsis thaliana
gtcaattgatccactacaatgcttaatagcaaggtcgatgaaaagtcagagaacaacgtagcaaaactcactagtgtatatatgcacagaaatttcaagtacagacgtatgttaagtcatgtaagttccaacaataatacttacgatccatccggatttacttgcaccttgccgaaaaatctgacagggaataccacgtcgtgcctcacaatttcccatgggctgaatttctgcaaattcccattaatagaggatgagttacagttctcagaaaaccataagttgaaatcaccacactgacaatcatcacctcaagccagtcctctggaatctcttcttgacctttctttgtgattatttgcttaaacaacccatgtctgtacctcaaaccataaccccaagcaggcagatttagggtggccatcgaatccaagaaacacgaggcaagtctccctaacccaccatttcctagagctgcatctttctcctacaagcaaacatggagagatcaaaaaataatttatttaggtcccaagtcttcaaagag

SEQ ID NO: 449 - DNA, 514 bp, Arabidopsis thaliana
gtttatcttcttctttgtatacttcagaatttgggagacaaaataaggatgatagttttctgggagacttgtttcagaatgcggtgcctctcactccttccaatggacagcttgttggattcggtcgtgcttattctgattatggcttgaccgcttctatccatgatctaatggtacttttacctatagcacaagtttaacaggttatatagtggaattcgcttcattacctggtctagtcgagctgtaatagcttctgtttggtgctaagatatgtgatttggtctcagtgttttccaggttttaccttcactacaaaggatggggattggtaaactgatagtaaacagaattgtcaggtctgatggtatttccactatgattttgctttacttaaaacccttaaacttctcttaaaggttagatcctcattcatcaaaaactgttacaataggctactcacaagcagagacatttacgacatagcagctctctgcttcgaggatgaaaggta

SEQ ID NO: 450 - DNA, 523 bp, Arabidopsis thaliana
cgccactctgctttaaagtttatccggaacatctatcaggagcaataactgtgggtctgggtaacaagggtcatgaaggaaaggtcaccctgccaagtttgactgcaataggcaattatgttgctgaataagtgatctgtggcctttttctatttgccaaacacagtttttaaacttcattataagcggccttggtagacgatgattggcagccaagctccgattgtcacatcatcacgacatgcattcaagtattttcccagtgactgcatgaggggagttcttgtcagtttccggccggtataaaccccagttatatcgaccctataattcaatccttgccccctcatacttatcttgtcatttcttttttccttcggtagttttccgttcggattagttcactggcgcggcgacctctgatatcccccttacctccatacctccctacttgcacatcaaatcttctattgaacgcttcttactacaaaaggccgatatcaagccgtataagctcacatgg

SEQ ID NO: 451 - DNA, 501 bp, Arabidopsis thaliana
ccgaatgaggatacgcctctaaagtatcgcaggcgtattacgtacagcattagccaataaacgcattcagcgcagtgagctggaaaagcaggcgatggaaaccgtcattaacgcactggtaaaatgaccattcaggatgaggcggtaagcttcatcctgatattcttgcttcagttgcggtccagttaatcattctaaataacaactgctgaaattatacgaatttcggtatgtattttaatttatagcgataatgttatttttattttctgcaatgaaagtcacaaataattgtcgcttaagttaaatttatttcaaatgataataaatatcagttcacttataatttcttgctttgtaattttaattgataacgatcaatgttaagggctcagaataatcacattattttttctcctaaccataaaggattagtttatcggcgttaatcttttctcatacactatcggggttagggaaaatatctggtgttggggacag

SEQ ID NO: 452 - DNA, 555 bp, Arabidopsis thaliana columbia
tagaggatcccctgtttaaggaacacgcgttttgttatgtacatgaactgcgctgtgccttgatcccgtaataggtacataggcagctcggaaaagagtttagctacgaataaaatttgttttattcattaaaagggaaaggagttcaactgtgtgaacaaacaaagcaaggaaaagtttgactgtgcgaacatgcaaatacaggaaacaaaactacacttatttaattagtaagcaaagaagacgaagctcaacacgcacacacttcgagttaagaaactcttctcgatttgcaaaacacttggactccttgaccagcgaggtcgaggttcgacatcatacagtccggtatgcgagcgaacttggagattccaagttcgatccaatctccagggtgggaattcaggttgtgaagttcccttgttatcgcggtgactctgagtaacattcggttaatctttttgcgaatatttcttctcgccatcgtacgcttctggtgctgaacagcaagagctttgatgaatgccacgcgatttcttgatctctatccaaaag

SEQ ID NO: 453 - DNA, 719 bp, Arabidopsis thaliana
ttccttcctccctccctgcattccttccttccttttagagtcagggtctcactctgtcactcaggctggagtgcagtggcatgatcatagctcattgtaagcccgaaatcctgagttcaagtgatcctcccaccttggcctccagagtagcataggactgcaggtgtacaccaccatgcccagttaatttttttatcttttgtagagaagggtcttgccatgttgtccaggtctcaaactcctggcctcaagtgatcctttggcctcagccttccaaagtgctggtattacaggtgtgagctactgtgcctggccctttctttcttttttaagtcaactttttttgtttgtttgtttgagacggagtttcactcttgttgcccagtctggagtgcagtggcgtgatctcagctcaccgaaacctccacctcccgggttcaagccattctcctgccctagcctcccgagtagctgggattacaggtgcccgccgccatgcccggctaatttttgtatttttagtagagatggggtttcagcatgttggccaggctggtcttgaactcctgacctcaagtaatctgcccacctcagcctcccaaagtactgggattacagctatgagccacgcaccagctattccactttaaaaagacctgggtctacaaaaggtatgtgattgccctaagttgcatagtaagtggtaacccgagtgaagt

SEQ ID NO: 454 - DNA, 588 bp, Arabidopsis thaliana
tgtaaatttggaggtaagagagtgaccttgatgttcagtgagtcggtcaaaagcatagagagtctgtctattcctaatccccagccacctgtaggagccaacccatattctaaagcattacaaaatgtttcatctaaagccatcgcttcatcgtctccagactgtcgatccttgagctgatcagcaaaacgctggcgctgtaccacaggatcgtttagctccgtgtaggcattgcagagctacagtccagttataacatgttagtcaagcaactctaaagaaaggacaaggtcatcatcagctttttattttttgcttacttcatgtttgttgatgaacagctcgaatctctctgtcaatccactcttcgatctgtgccatttagccaaaggactcatgatctcgggctggttgatgatgaaagttgggttcacacatgtcggttccagaaattctccacaagctgcaaaataaaataaaaagggacaaaattcagatttaaatttcttaaaccaaatatgctagaaaggcaggagggagacagaagattttactttatctaacagacgagctgttgtctgaggagga

SEQ ID NO: 455 - DNA, 615 bp, Arabidopsis thaliana
ctagtaacggtccgccagtgtgctctaaagatgtattccgttgggtatgccggatactacggtatttcgctgatggcggcaactataaagtgctgttcatctctattatcgcccatgcagcccaattcgcgttcctcgtgttggttgagaacccacatattgacaaaacgtacaatcctcctccacctcggaaacgtactatcacagagcatgacgcagcgtctcagcgatcgcagtctccggatactccaaacgcgccatccgtgtccgaagaaaatgtccccaacgcgacaacattcagcagcccacctccggcagttcacaacctactcgggttccacaatctagacctgcatagaatcacggatacttcttctatcctcgtccagttcctcatgttttctctgactgttctgacgccttcgacgccctggtatcagttccttttcgtggctaatgcggccatctggaggctctggtactcagtcggcatcggctatcttctcaacagacagtccaattgtaaatcgtggaccggcactttgtcaagtacggcgatacgcgtcatgaggcatggaaccaatggaaaggcacgtatcacctaagtatggttat

SEQ ID NO: 456 - DNA, 813 bp, Arabidopsis thaliana
aatgaatttgaaatcacagcggaaaattagccagcaatacgaaggtaggttaaagatattggtttagtgaagtctatatataggatataaactgtaacataacctaatattacctttaaaaatttcttttttaaaatggaagactcccaagaaaagcctaactatgtgagctgtagtagaaagttatgaagaaagcgagagttcaaatgtcatagatgtattttaaaatttttattaggaataaagctaatgatagaatgatatgttttaaaaaaatctgtttttattttgtaggtgattccgatgagggaattttacattcctcagccgttgatggagatcattgtaagtaaggttggtgaagatggtgttgatgctttgaagaactagttgctcgctaggagagaggggaaggatactgttccgtcaaagaaaacattagcatccgtacgaattgacaaagaccatcatttcatgtggtggtcaatgactcattcaaagtattacacattcttcaaaaagtgtcttgccgcaaataatccgtatgcgaagtttgtagagaatcacaaaggactggcttatgagttgactatagggtacttccagatgagatttcgttggaaggtgtgccatggtaaacgcattggtggtttactcaacttgaatggcatgaaagtatgcgtagtacagccaccttatcaaccgaaaagagttggtaggccaaggtgatgtaggtgtaagaaagttgagtacaagttgagcacgtgtaaggattaaggatttgaggatgttgcaggatgatggggaagagtc

SEQ ID NO: 457 - DNA, 745 bp, Arabidopsis thaliana
tagtaacgtgccgccagtgtgctctaaagcgcggcgtagtttccggcagtgataagtgctggtggtcggtctggggccagtcggatgatggcgatgatgctggcgaaaggtcgcggtgcaaaacggatcatcggcgttgatatgctgccggaacgtctggcgatggcaaaacagttaggggtgatggatcacggctatttagcaaccaccgaagtctgccgcagattatcgccgaactcacccacggtggcgcggatgttgcgctcgattgttccggtaatgccgcagtcgcttgctggcactgcaatccaccgctgactggggacgggtggtttacattggtgaaccggaaaagtggaattcgaggtcagcgccgatctgatgcaccatcaacggcggattatcggctcctgggtgaccagtctgttccatatggaaaaatgcgcccatgatctgacggactggaagctgtggccgcgtaacgccattacccatcgcttctcgctggaacaggcaggtgatgcctatgcgctgatggcgagcggcaaatgcgggaaagttgtgattaacttcccggattaaggagttagcggatgaccatctataccttatcccacgggtcgctaaagctggacgtttctgaccagggcggcgtaatcgaaggcttctggcgcgatacgacgccgctcttacgtcctggtaaaaaaagcggtgtggcaaccgatgcctcatgttttccgctggt

SEQ ID NO: 458 - DNA, 810 bp, Arabidopsis thaliana
cgcggcgctttcggttttgcagcgtccgctttcggctggggtgcagtgctttgaacgggttcgacaggggatctgcttaacatggaacagccgcttagcatgagtgctactaaacagatcggtaaagcacgcatagtatttcctcaatgtatgatcaaaacgtcaatattgaatcaggagcttgtaaaaatgacaagacgggcaagcgcccgtcctgaatgatattacaaattgtggaaacagcctaaaaattaccagcctttaacagctccgccgttaaacactttgtttgctgcttcgtaaacttcgtcagactgataagcctggacgaatttcttcacgttctcggcgtctttgttatcttcacgcgtcacgatcaggtttacgtacggggactctttatcttcaacaaagataccgtctttcgccggagtcaggccaatctggctggcataggtggtattgataactgccagagcgatttgcgcgtcgtccagagaacgcggcagttgcggtgcttccagttcaacaattttcagatttttggggttctcaacaacatcaagaacggtcggcagcaggccaacgccatctttcagtttgatcaagcccactttttgcagcagcagcagtgaacgaccaaggttagttgggtcgtttggcacggcaacctgcgaaccatcctgcagttcatccagtgatttgattttcttggagtaaccagcaatcggataaacaaaagtgttgcctactgcgaccagtttgtaccacgatctttcagttgctgatcaaggtacggtttatgctgga

SEQ ID NO: 459 - DNA, 516 bp, Arabidopsis thaliana
aaaaggaaaatttagatggttaatattacaaaaagcagagatggttaagatggttaatattacaaaaagcagagaaagtgatcacttgttactaaagtcagatgcatagagtgggcagacaaactcctcataaatgtccatggcatatttacgactaaaagagtctacgtgtttatctgttattttcgccatgttctctgggggattatcacttgccagaatctcaagaaacttcattgtcaccgggccacagtcaccatatcgcaaattcttatataagccatctaatcgcttccaataaaaaggctgaagaccatgattctaagaacattcaggcttacagtacctttggatgaggtatggcaagattgtaacaacaggttcaatgaaacgtcaaacctcgtcttcctcgtaaagatctgtatttggatcgagaatttcaacggaccagactcccagatttattgcaagtcctacccagtgttttgaatcccatatcatgggcaagtaaatggt

SEQ ID NO: 460 - DNA, 766 bp, Arabidopsis thaliana
tgagaaaggcgttgatttggttcggattggcttcctttcctctttttgtcacaatgtaacctaggaattctccggacgggactccgaaagtgcacttcgcagggttcagcttcatttggtattgattgagaatttcgaaacattcttctaaatgcttaacgtgatcctctttcttcagcgacttgaccaacatatcgtctatgtaaacttccattgtctttccaagatgctcgtggaacatcttattgaccaatcgctgataagtagctcctgtatttttaaaaccaaaaggcattaccttgtaacaacaaatacccctatctgtgataaatgacgtcttctcctggtcttcgggattcatcattatttgattataactcgagaaggcgtccatgaaagttagtaactcgttcccagcggtagactccacgagacaatctatatgcggaagcgggaaactgtcattcgggcaagctttattaaggtatgtgaagtcgatccacaccctgtcttttccattcttctttttgaccacgacggtgtctgccaccaaatccgggtattgcaccttgtaacacctgtcccgccatataggccaaaacggcatgttattcatctgatcttgctaaaatgttttctttaaacttcacacacgaacaaaatattgcacataactcctcacgcttactaacctgaggaaaaagggaaaaaagggtgagtaaagaatacttagtgaggggaatcaaatctgcccaatgaaacatag

SEQ ID NO: 461 - DNA, 548 bp, Arabidopsis thaliana
ctaaagaaagagaatccctctccctttgtggaaatactgaaaaatctggatgtgccggtggcgagaaaaccgtaagacacaggtggcgtttgccacctgtgcaatattacttcagacggtccgcgagataacgctgataatcggggatcagaatatcgaccgcgtcgttgaaatgcggcgactggattatgaagtctgccgttgccacgttggtggcgaccggaatgttccataccgtcgccagacgcagcaaggctttcacgtcaggatcgtgcggcacggcatttagtggatcccagaagaaaatcaatacatcaattttcccttctgagatcaatgcgccaacctgctggtcaccccccattgggccactcaacatcgcgttgacgttcatgccggtcgcgcgggaaattaagttaccggtagtgcctgttgcatacagtacgtgttgttccagtaacggttgatgccgttccaccagctcatcagcatttgtttgcagtgatcgtgtgccacagcgcaatatgtttcgcgcaggtaaagtgcga

SEQ ID NO: 462 - DNA, 707 bp, Arabidopsis thaliana
gatgttgcaattatggcaagggatcaagtctcatgaggtttccagagctttcggcgacttcaagtagggagtcagatactgagaactgcaatcgcatctgcaatccccacaaagagctttaaaaatccttattggaatgaggatttgatgtttgtagttgcagagccgtttgaggattgcgttacagttgttgtagaggatcgtcttaatggtggtgcaataggaggacaaaacgatgtggctgttgggagggttcagattccgatttccgctgttgaaagacgaacaggagatacactggttggttcaagatggtttagcctagataacggcaacaataacaaccggtttggttctaggattcatcttagattgtcattagacggtggctaccatgttttggatgaggcaacaatgtataacagtgatgttagaccgactgcgaaagagctttggaaaccgcaagtagggcttttagagattgggattcttagtgcaactggtttgatgcctatgaaggttagggacgggaaatgcggtggaatcgcggactcgtactgcgtggctaagtatgggcctaaatgggtcagaacaagaactgttgtggacagtctttgtcctaagtggaacgagcagtacacttgggaagtgtatgacccgtgcacagttgttaccgtcggtgtattcgataatgcacgtgttaatga

SEQ ID NO: 463 - DNA, 578 bp, Arabidopsis thaliana
cgaaacctaaatctccaatatatcaattgaatcctcaccctgctgatatagcaccacgagctgttcttccctaacacatgggagggtcacagtctaggaagcaccggtacggggacgaagtaatcaagcttgatgatcaccagtaatctccacaggaacaacaaccatcttcaaaactgtgaaaccgaacagcatctctcacaacgtacgctatcttcgtgattttagacaaccccttgatgaactcatgacaatctacgcatactctcaagttcttgaacactcttattgtctttcctttctggtttaacccgcctgttgccaatgccagaccaatcgctagcttttcgctgtgagctctaaggttctcctcctttgactcatcgtctatatcatgcagctcatgtttcaggccgtaaacatatcccaattcttctctcagtcttctttcagcttctttcaaagtttcttggatcacaggtgtcagaggatgtgaatcctctccactacggaaaaaatgtacctctctctcaatctcgacccagctcataccagcttctttcttcaacccttttata

SEQ ID NO: 464 - DNA, 593 bp, Arabidopsis thaliana
tgtgtgtcagtatataatctccttttatatgattataaactcatttgtcccatgtcttcttcttcttcaatggacttactcatgtgtctgcttcttctaatctctccggttgttctggccaagtcttcttccaccgtccctgctatctttaccttcggtgactctatttttgacgccggaaacaaccattacaacaaaaactgtaccgctcaggctgattttcctccttatggttcttcctttttccaccgtcctactgggaggttcaccaacggaagaaccgtcgctgacttcatctgtaacaaattacctcccaactcgttaactaaaacatttcttcttctgcaaggaaccttacttttgtctcttttttcttttcttgacgcaataattgcagcggaatttgtaggccttccattacagaaaccattcttggaattgcagattcaaatcttgaatggaacttcaaacttttcaaatggcattaactttgctagtgctggtagtggtgtcttgcttgataccgagagatttatggtaaatatctaccttgaccaaataaaatgtttgtttcttgtgaatcactcattaag

SEQ ID NO: 465 - DNA, 532 bp, Arabidopsis thaliana
cccctaagatgagctcaacgatatgttgaccttccaacgataaccagctttcactcgatctcagaaagtgatggatcatttcaagaggtaaaagcgggcaactctcatactgccgtggataatccataaccgtcatatcgtattgggacaacacgtctgatatttgactccgctgttccccctctctaaagttaaacaccatgaaagacgcctctgggaaatgatcctgtagctgcgccacgatgccacccaagtatactttgtactcatcctcccccataacatcgctagagaaacagcagtcaaaaactgcaaagaagaagaaaaaacaagagaagttggatcagctctgaaaccttgaactactccagcaaaatataggttgctagaaaatggaaacacaaatctgcaagctctgaaattttaatcactatccccaagtgcaatccagaagctcaaataaacccttttccaaagaactatcattgtccaacattaaaggaaacaaaagaatatccacaaagctataaat

SEQ ID NO: 466 - DNA, 549 bp, Arabidopsis thaliana
tacaaagccaaaacatatcccatcttctcaagtgggcttttcatgggcaatggctcgtcctatgatgttttaagcatcattgataagaagtttcatctcgaccgagatatatatgcaaagactggtcctatcaatatgagcactttctttgcagtcacatatggtcttgggtttgctacttagtccgcaactattgtccatgtattactcttcaacggaaggtatttaactctatcaactcctcagaactacctaaattttactttttaatctttttagctgaactagatatccgagagtagtctttggtgcaagtttctaattagtttccttgcaactcgtcttttattttccagggatttatggacacatacaagaggtgcttttcagaggaacaagaaaatggatttccacacgagaatcatgacgatcgactatagggcagttcctatgtggtggtcttatgtgatcgtcgtactcaacattgcgctcatcatgttcatatcattctactactatgcagacgtgcagctaccttggtggggagtg

SEQ ID NO: 467 - DNA, 516 bp, Arabidopsis thaliana
ccaactgagcagcggctgtcatgaccttacttcctgtggcgaaacttccagtaaatgcaatctgcaacgaaatcataacttagcattgaagcgtttaagaaacgcagacgttaaactgaatgtttaatcatagcctttagagttaattttgttgggacttatgtttactgtattctcaaagaccaataccttgtccacgccaggatgtgatgccaaaggagcaccagcttccgaaccgaaaccagtcaaaacattgaggaccccaggaggaagaccaacttctcgacaaatatcagcaagctccaaacaagtactgaatttagaaccatgagacgtgttcaaataaggaccaatacagaagcataagagcaaaacagattatacacaattacgtacactgatgccagctctgatggcttgagaatcgcagtgcaccctgcagcaagggaaggagccccttccaaacagccatcaaaagggggtaattcctcaacatcaaccagatcatgagtcagt

SEQ ID NO: 468 - DNA, 485 bp, Arabidopsis thaliana
  unsure (1)..(485): unsure at all n locations
nnnnnnnnnnnnnnnnnnnnctaaagccctggatacgtgtagagtccgctggaagcttgattttcatccattccggcttgcgcacagggcttcgcgctctgttgccacgtttttaaccgggataagggccatcttatcggcatcgcggtatttaacaccgcgttccatcacaatgggtttactcatagcgtgcgtgttccagttgcgaattacgaaggaaagcgtttcaattcaatagattgttgtaattatcaactatttttgaattaacgactggcagtatatcattgaaacggacctgaaagcagccaaagcggtcgcgaaaatgtaaaattgttgttggattgtgccattttatcgttctgcgctgtgatctggctgtaacaatactttttcaaaatgcattacggataacatctattactccgtgcaggatgggatcacgcaggctgaatttgttgtagtggatagagaaatctatttgc

SEQ ID NO: 469 - DNA, 690 bp, Arabidopsis thaliana
tgacgtgaaccgtgaagagaattgagacgtcaccggagattgaagcacgtcgagtttaatgtcggtgcttctaaacccggcttcaccaaagacccgactcacaatcgggtcatctaaaatggatagtataaaatacttcaactcaactttcaaaaccgacgtcgtttccgtgttgttgtttccatggatttgatgaagatgataagtctctggatgacgtcgttgagtcgcttgagatcttttgatcgccgccatgagagagtttgagaccggaggatcttcttccaccgtcgtcgttggtgttgatttcgaagaaggtaatctgtctagagaaacgccgacgcagagctcaagcgcgcgaaactggagacgtgaagagtacggtgtgttgtgggcggcgcgtgagatacacacttctcggagaatcgatgaaggcattgttaaaagacctgaaacggcgtgaagtgacgtcgtttgtgcgtggcttcgacgacgcgcgacggagactgcgtcgtctaatgcacgcgctgtttcttccgttaaacattgtctcgccgtggttactggtgtcggcatcgtcgccggtttagttataaaaaattcgaaattaaaagtaaaccaaacctctacatataattatgacatatatactagaaagattattttctttaaaaaaaaactcatagagtc

SEQ ID NO: 470 - DNA, 353 bp, Arabidopsis thaliana
  unsure (1)..(353): unsure at all n locations
nnnnnnnnnnnnnnnnnnnnnnctaaagaactaaaacttagtgctatcgctgagtatagtaactatatggtattacgtagcgtaaattatgacgccatatggggaacaaatacacagaggacgtaaaagattagattggttttaagggatgtgtttatcataaatggcactgctagaattatgagattatcgaagatagaattcttgatcatacgtaataggcctcctgaattaaatcaagaggcgtatagttttgacattactgatgtatgtgttatgatctcactggtattcacgttcctgtcctgcgatcttgaaagagtggcagcatcagcagtaggagtctgccgaca

SEQ ID NO: 471 - DNA, 436 bp, Arabidopsis thaliana columbia
ggactgaaaccgaaagtcaaagtcaaaacatgtaacagcaatatttaatcacatcaccaaaagtcacgcaaagcagcgctgcatgatcaaaaagaacccccaaaactctctccaacagcatcactacagtctgacacctgcagactgacatgtgaggaaccaacaacacttctagttcatggaatctgggcttcagcaaatcgcattgtgactcttattcattcacatgcgcctctatcaaaccactgacgaagatgactagaagatagccacagccacgcattgtagagacagagacagctccaccaccatcgctactggtactccgcactctcaaaccacactatctttctttcattctctcatcaggaataactagactagttggttatgataggaggcacttgtggagtatcgagatcagacgcagagagct

SEQ ID NO: 472 - DNA, 528 bp, Arabidopsis thaliana
gttgtattccaatgtatggtcaagactaaaatagaatcacagtagcagggggaaaatcgtgctcttgatattataaccacaaaaattttcgttatataatttactgctgagagtagctcaaataatctgttatcctttatgatgaaaaaacagaacgcaatgtaaggaaaagcaattagccattcggaataccttaaaagatccaagcaatgcttatcagtacttggatgaagtttccctttagattggttatcaggtatgggcaacttcaactgtccaaacaacacatttgcaatatcagctgggttgtgcaatgaaaatgtcatgccagccaattcaaatgctttcttctcaagggaccgcagtttatcccgcaatatattccgtgccctaaggcatccttctatatcgatacctataccccaaagctccatgtctgcaaggacattaacctgaaacacagaaggaaagcattatgctgccgcaaaacaacaaacttagcagagttagaaatttctttaattgact

SEQ ID NO: 473 - DNA, 579 bp, Arabidopsis thaliana
cacatgatacttttagcccacataatgaagaaaaaaaaatcaacttataaactcagtatgtattcaactaggtacctgatgtggtacccattttacattgttgattgcatccattgtggctgtgcgaaacccttcaaccgatgcaaaccactgctcagtcgctctaaatatcgtcggtttcttagttcgccaatcatatgggtatttatgagctgcatgacaagaaggaaattaaatcatgagactctatagcaaatgtttcctcaaatggttcctcagaaagcatttgaatcaaactcaccataagattcttccatgaccagagacatattttcatgcaggtaactgacaacagcggtattcccttctccaaggacagagagccctctaaactgtccagcttcttcagtgaactttccttcatcatccatcggagagacaagaggcagcccgtacttcaggccagttgcataatcctcctgaccatgaccaggggcagtgtgaccaacctgttccagattctgtagttatgtaacaccccttatacgactggacagtctctgttgcaatgggatgagt

SEQ ID NO: 474 - DNA, 607 bp, Arabidopsis thaliana
gtgagtactcagcaatttctgcgaattacaaagttgttattgtcttgatcctaaattgaatgctcttgtgttttctatttctccaggaactggtgaagctcactggtgcaaaaacacatgaagccaagataaacattattaatgatgttaatggcattataaagccaggaaggttagtagttgtctcctaactagttttgatcaaagttttataccttcaagtgtgcttattcttcttgctgttgcaggttaacactgttgcttggtcctcctagctgcggaaaaacaactttgttaaaggccttgtctggaaatttagaaaacaatctaaaggttctaatgatgaaagcagttatatcattttcttgtgaagatttttttgctgcagctgtgtgaagtttgtaccttttctcttgtttttcctttttgtttccacagtgttcaggtgaaatatcttacaatggacacagactggatgagtttgttcccagaaaacttcagcgtacataagtcaatatgatctgcacattgcagagatgacagtgagggagacagttgacttctcagctcgttgtcagggcgttggtacccgacaggtagattttat

SEQ ID NO: 475 - DNA, 470 bp, Arabidopsis thaliana
  unsure (1)..(470): unsure at all n locations
acgttaacgtattccgctcgattcctttagttatggttttgctgtggttttacctgatcgtgccgggttttctgcaaaacgtgctgggattatcgccaaaaaatgatatccgtttaatttcggcgatggtggcgttttcgatgtttgaagcggcctactattcagagattatccgtgctggtattcaaagtatttctcgtggtcaatcgagcgccgcgctggcgttagggaatgactcactggcagtcgatgacgctgattattctgccgcacgtntcacgcgctgatggtgccgctgctgctcactcagggcatcgtactgttccaggatacctcactggtgtatgtgttatcctggccgatttcttccgtaccgcctcaaccattggtgagcgtgatggtacgcaggttgagatgatcctgtttgccggatttgtttatttcgttattagtcttagcgcgtcgttgtt

SEQ ID NO: 476 - DNA, 369 bp, Arabidopsis thaliana
gtgtgctctaaagattggcactttgactttgacttttgtatccgttctgcttattaatagaaatctgttttctcatctcttttcaattcatactaaaaagtttccattaaaagaaaacttcctacaatgtcatcacttctctatatcttcctcctcttggccgtcttcatcagccaccgtggagtcaccaccgaagcagccgtcgaaccagttaaggacatcaatggaaaatctctcctcacaggcgtcaactactacatcttgcctgtaattcgcggccgtggaggcggactaaccatgtcaaacttaaagaccgaaacctgtcccacaagtgtgatcgaagaccaatttgaagtctctcaaggccta

SEQ ID NO: 477 - DNA, 635 bp, Arabidopsis thaliana
cgttctcagtaatcagagcaacgtgtaacaggcagttggaatttcctttgaagatagcttgaccaaacaggagcgtgatgatatgagttcttccgaattgctccctcatatgttatatcagcaatatcacttgacttctcaattgcttgatattcgaacttagtgatcttgatacacatttttatgtgtgtgtgtgtgtatcaaatccattcagttggttgatcttctcagctctttgacctcctgttaaacgacaacgttttacgtctgatttgaaccggtatgacaggcagctattttcaacatgactttgctaagtgctgatcctctatgcatctttggatttccatgacctattcttgcttcatgtccctgttctagatcagcacaactcacaaccaattatagttcagacattccaatgaacattcgtagagtacaaaatttgttagatataagaggttaacaaacacttcagctaattgagctttagtacccacatgttcaatagctatcagtttctccttaaccaattcatgaatatagctatgttgatgatctatgtgtttagtacgaggttgtctacaggttctttgaacaatgtataacactatgattattgcagaatagtaatt

SEQ ID NO: 478 - DNA, 597 bp, Arabidopsis thaliana
ctatatcacacaaaatcaatcttaagtatatttcttttaaagttgttaacatatcacacagagttttgtctaggtttttcatgtttataagtgtttttttcctgttaggtctcgttgatcttaagaggtgcaaatgactacatgcttgatgagatggagagagcactgcatgacgctttatgtattgtcaagaggacccttgagtccaacacggtaacattcctttactttctgttagacatactccttgcatttagcaaagaacaaacattacatttcttgtttccttgtcaaacaggtggttgcgggtggaggtgcagttgaatcagcattgtctgtgtatctggagcaccttgctacaaccttgggctctcgcgaacaattggccatcgctgaatttgctgatgcgctattgattataccaaaggtgcgacctacaaacctatttcatcaataaaaatctgtcttttgttcttatcttataatccaacgtttatcatcctgttatcaggtgcttgcagtaaacgctgctaaggatgcaaccgaattggtagctaaactaagagcgtaccaccacactgcacaaaccaaggctga

SEQ ID NO: 479 - DNA, 637 bp, Arabidopsis thaliana
ggatcagtcgagattccaaccgactttgtggttctaaagatggatgaggaaccaaaagaccctctcatccttgggagaccatttctagcaactgcgtgcgctcttatcgacgtacaaatgggtaagatcgatttgaaccttggtaagaatctccatatgaattttgatattgctaagaagatgaagaagcccaccatagaagggcagcttttcttcaatgaagaagaaaatttagaagttgagttgttgagtgggttggaaaattatattccaaactccatttcgactcgccacctaggagagaccaagagcctcttatgatagaaggggaacctagctcagaggttgagactgagaggaactattttgatgttggtcctattgctagagagcttatggaactcagaaaacagtatggagctcaaggggtaaccattgaaaagttggacctcaagatggaagaattgaattatgctatcttgaagcttaaggagatgattaagggttaccccggtcctgagattgagaaatattttgaggaacctgatttgggagaagaggattataccactgatgaaaaggaggcttactttgaggaaagatccaatgaataccctacactccagctatctagaga

SEQ ID NO: 480 - DNA, 563 bp, Arabidopsis thaliana
gttcctagccgcaagtgtcgatgcccatggcgacactcacacctcgctcacactcgggacagcctaggcggatccatgctttccaacgaagcacgcccatccaacctaggcgggtggaatcgatgcccatggggacatctcggtatttcgtgcgcaagacgactataccgccacccaaacggcctaggagaatccatgtcagcccatgccatgacacgcccattctcttcggcgactaggatgcaaagattcccgtagcgacatctcgttaacatcgtcggaccgatttacattcagataagccatggacaccggcactccgagtttcgacaatgacgtcgccgagtatttgcagcgtaacggttttacccgtccccgttgcgctcggtaatcagcccatgacggttagccattcccggcagtaaaaacagttctgtgtccggcgtgcgggcaattaacaggggttcctcatgagatatctccagtttctgcctggagtataggcaacgtcggcaaagagaatcgtgtaatgaagagaaatacctaaagcgtgttccgtgata

SEQ ID NO: 481 - DNA, 812 bp, Arabidopsis thaliana columbia
tatttttcctttttatttattttattcatttgattcttaacttaggatttttattttataggactattcagattaaaaaaaataaaaaaaaaatatgtcgaccaaaaacgtgatggtgtcgatcgacacccgcattttccaagtaagtcgttttaacctaaaacttcatctttttcatttcatttctctctaaaaccgctgaattcactaaaactactctaatccttcgattcttcaccgtttcttgtgatttcaggctctaaactcattagaatatcatcctctatcttccccaagtgccaattccatcgaccgacaagatgacagggcagaaaagaaggcgaggaagagcgttggaccttcctcctcctctgccgcccctcaccaccgccagcgcttctccaccgccgcccctcaccaccgccagcgcttctccaccgccgcctgtctccgaccatcccaaccgcaatcccaagctgcagcccctcaaccacctttttatcgatttccatggccaaagcttccaaatgagagaataccttctcaaagggtttgggagaatgctgtgaacatgggcttcggtcgtcgctgaggacgctttctcactttttctctagattgggatgattatgatacttgttctataatacttgaatgagtgtagaaattttgcctactcggtttgcggaattcggtttgatgcagcgtttgtagatagagaaatttgttttaggactactagatgacataggtttgggaacatttgttgtaggcagtacgatttgtacctgagctggtgagcaattcatggg

SEQ ID NO: 482 - DNA, 672 bp, Arabidopsis thaliana
tgttccatacagagttttttaatatgttgctgaatatttgtttccacagagaagctgacatgacaaaagagcggatagagaaacttctcaaagctggggccaatgtaattctgaccacaaaggggattgacgacatggcacttaaagtgagaatgaaaaccaatgattttctctatcgtttacacataacttagtttttgaagtattcaagtttagttgcgtttatgtttggttcaccgtaatggattctcatttctcttgtttttatttcagtactttgtagaggcaggagctattgctgttaggcgtgtgcgcaaagaagacatgcgtcatgttgccaaggcgacaggagcgactctggtacttcctgcgctaggctttttcaatacccatgttgtcaaactaaaatttcaactaatatatttatcctttattttaggtcaccacttttgctgacatggagggcgaagaaacatttgatccagctcaccttggatctgctgatgaggttgttgaagagagaatcgcagatgatgatgttatattgataaagggaaccaaaacaagtagtgcggtatgccattctctcagcaatgaatcttacttgattgctgacagtactatatcacacaaaatcaatcttaagtatatttcttttaaagttgtttaaca

SEQ ID NO: 483 - DNA, 522 bp, Arabidopsis thaliana
aatagcccaagccatgaccaagttaactcggaaagaagcaaaattcactatgttcgaggaatgcgtaaaaagtttccccaagttaaaggatatgcgtactagtgcaccggttcttgtatagccggaagccgacgagcgctatggagtatatacggatgcttcaataaaaaggctgggttgtgtacttatgcaaaaagagaaggtgatcgcctatgcctgtcggtacttgcggaacatgcagggcaattacccaactcacgacttggagatggcagccttgattttcgcacttcagatatggagatcatatctctatggatctaacatgcaaataatcaccgaccacaagagtcttaactatatattcacacagccggaattgaacctctacaaaggagatggatgaaacttgtgacagcttacgatattaacatagtttacatccatgaaaggcaaacactttggccgactctctaagccgaagaagggcataggtaacacgataagaacaaagaaaaattg

SEQ ID NO: 484 - DNA, 917 bp, Arabidopsis thaliana
ttcagtacaagcgaaggtattaccaatttagtgaagtcgacttattcgcagataaactaatgttccatatcaccgaggttggtccacgtcgccaagggacatacaaaaatttctgggagttcgaggattacggtgagtgttggtcggaccatcagaacctcaatgagtactagggacaatggtgtagcacatgtatctactattacatgtcccaagaaattgcactcatttcataaataatactttcagaagtaccaatttcatttatggtcatcttatcgttcttctcaattgcagacaaaattatgaatcctagtttttattcttgatttaatgtattagtttgttttgcatttttcggcaactttatttaatatattgttcgagtcttcacctttaaggtgtaacaggtattatacacataattaactttgttcagaactatgaattgcatttttgtatatgaatttattaatggaatagaagtggtaacttttacattaatataaaactgcacctatacttcccactaagcttcatccctcatgattgtgaattattaagagaaattttcaataaattactctgtttttattactttgtttttaaccgttttgctcagtacaaatccttctctctccaacacatcttactctttcgttcttcgcaacagattgataaaatgagtacatcatccaaatgtctacactctatcacacaacctatcaacacacatgtttaattttacatccatagaaacaatttagttttcattcattccacaaagtatatgtaacttctctaacttttcatatgcgttgtcaacagaggaagatcgccagcttatacattccggaaccaattctcgcactaattgttagctacgtttcacaagaaggaattgaggctctgaaaaa

SEQ ID NO: 485 - DNA, 515 bp, Arabidopsis thaliana
ggtacctctctcccaaatgtgtgcgtctcgggttcttcgacacatactgctccatgtaactatacatctccctaatccacttcatatgcctttcctcgctcactttcccatcttgccacgtgcttagccactgaatcttgaacaatgtcccgttcctatgagggaaaggtatctctgactcggagatcctcgacatcattcctccgtaagggttccatatcgttaacggtgaatcttcttctagaaacctttcccataatccttctaaaccttctactggaattggctctttcacaaagtctgacttggctttgaagtgattcttgaacaatgattttccggctagtaaagcttccggtgctgcactgtttggaaaacctgcaatgtacatcactgatttgatccagctcatttctgtgcagtccttcttcgtcagtcctaactcagggaaactcttctgcatcacctgttggggttgaaattgacaaatttaaaagtttattgcttgaattgtt

SEQ ID NO: 486 - DNA, 691 bp, Arabidopsis thaliana
taactctagaccttttccaccttaactatatgttgttgatcatcttcaggaatgggaatcttggtgtgaaacaaaaggtgtaagcattatagatgaaccaatgtgttgttcgtattctttagaagaagcgatgcggtgcattcatatcgcacttctttgtgttcaagatcatcctaaagatagacccatgatttcacaaatcgtttatatgttgagcaacgataacactcttccgattccgaaacaaccaactttctcaaacgtgttgaacggggatcaacagctagactacgtattctccataaacgaagcaacgcaaacagaactggaagcgcgatgaacattaacaatactttggtaaaaatgttgctatatcccctgaattattattatttttaatttttttttattaccaggaggttctgggccgaaccctgtaatcttccaggcccgaaaccacaacatgtaatattagtttcgtcccaagtgtcactcgaaccggcgacctctaaatttcacctaggataattatcaattgagctaactacacttggtcaagaacatgtttaagtgtgtttctacaaaaaagaaaatttaaacagttgtccaaagaaaaaagaagcaaaaatctccaaaaatcattgatcaaaatgttcagcaccattcaccaattgggcattgcaagcttgaa

SEQ ID NO: 487 - DNA, 740 bp, Arabidopsis thaliana
gatttcaatgcagtttcttccaggcacagctaacaattcaggggtgtagagatcattaaaaccttatcactgagttttcaccgtcttttgtggttttcttatatccagggccttggtcagttgaggagactagatgttactggctctaagaatctgagagaaattccagatctctcgaggaccatgctgctcgaggagttgataatgaaaggctgcacaagattggagaaaactctagagtccattggacgcttatcttgcctgagaaaactcgatttatcaaactgtgatgccttaataaatcttcaaatccatatacagtatcagaaaaggctgtccttccagaacgtggactaaggcgacgccgacaaataatattgaggcttcccagaggagtaaagaagctgagttctcttgcaaacctatctatagaagggaagatacacatcggcttgtggcatctcacgggaaccgtagagcacctctcctttattccgagcaaaaaatccctgatgaattggtaatggtgccaaagaaaagatttccgatcatctcaagcttttatgatcttagatctctcagcatcatgcggtttaccacattgcagatggtaccccttccgttgcattagcttctcaggttccagtgcttggtagagttgaatctgatcaacttaacatccagaaaatccagacaacattggctaatgcagcactagagaagtggcctcacggaaatga

SEQ ID NO: 488 - DNA, 525 bp, Arabidopsis thaliana
  unsure (1)..(525): unsure at all n locations
cgccagtgtgctttaaagcgccacagcagcaatatcagcagccgcaacaaccggttgcgccgcagcagcagtatcagcagccacaacagccagttgcgccacaaccgcaggataccctgcttcatccgctgttgatgcgtaatggcgacacgtcgcgttgcataaaccgacgacgccgctgccttctctggatttgctgacaccgccgccgagcgaagtggagccggtagatacctttgcgcttgaacaaatggctcgcctggtggaagcgcgtctggctgatttccgtattaaagccgatgtcgtcaattactctccggggccggttatcactcgctttgaattgaacctggcaccgggcgtaaaagcggcgcgcatttctaacttgtcacgggaccttgcccgttcactttcgacggtggcggtgcgtgtcgttgaagttattcctggcaaaccctatgtaggtctggagttaccgaataaaaaacgacaaaccgtttatctgcgcctttagagnnnnnnnnn

SEQ ID NO: 489 - DNA, 608 bp, Arabidopsis thaliana columbia
  unsure (1)..(608): unsure at all n locations
gtccattcttttctcgtatggcaactggggagcccgacccaggatttgagaagccaacctctgctgctggtaagcaatttcagcctcatcatctcctcgtgctgcctaacaaagttctccattttcctaggcgagtcagcgacaatgccattaccatccatattatccggatatccaccgtggataaacttgcagctttctccattcttgcacaaacctctactaaaatacacacatggtttgcatccaccaccaaatccatcatctccggacacaaaagacgcatcacaagagaaactcctcctgtgcagatgggtttcacatcaccatctacagagtaatccaaaggaatgctaggatccacaagatcctcggttttagaacaagaatcgtcgagaaacgaaaggcaatcattaagctgctgatcatcaagtaaatcagcaccaccagcagcgtcagacntaccagaatgtgtagcagaaagtccattgctttggtgagagctaaagggtttcgagatcggagtgtgtttaggggaaatgtgggggttatcccattattacggttgatacagttgttgaatgaccaaggagaggtagaagaaggag

SEQ ID NO: 490 - DNA, 576 bp, Arabidopsis thaliana
ttaaaaactagctatgacggtttagacgaggaagagcaagctgcgttccttcatgttgcatgtctattcaatggagactctgtccaccgggtaaatgcccttatcgatgatggtgacatgaggataaaagctttagaagtgaagtctctcatagacatatcacttgatggatgcattacattgcatgtcttgatagaacaagcggcaagagaaattgtacgtcaagaatccgggttcatgccttggagacagagaattttgtggaaaattaatcctatcatctttttgctgcaaaaaaacacagtaagtgttattaaaacctttgcatgacgttctttcttgttcgaatctccatggttttggccatgcttatattgttttcatgtcaactgactctgacgattctcacatcaggatacagcaatggttgaaggtgtagcacttcacatgtgtgagatgatacacgtgttgcctatcgacggaaatattcttaacactatcaacaatctcaaattcttcaaggctttcacgcatatagaggttatgaattccaaattgcagtttcttccaggcaca

SEQ ID NO: 491 - DNA, 548 bp, Arabidopsis thaliana
gttgatgaataaatcagtcaagctcatcgacgaacgtggcatgatctcgtaatagacattcgtcacgtggcgtttactatttgatcaaaacatgtcagacaaagtgggtcctgcattttgtacgattcatctcaaaaggtgatatcgagtctcacatctccaatcctgaccgttggtttataactcttattagacgactttcaataaaaactttaggtgggtcctcgtttttagggttgtactgtcaccacctttcagtttcagtgaacgctgcacgaattttaactacaattagacgactatttacatttcgatccataactattttattatcatattttagacactcaagtttttaaattgccaattattcgctctttcggattttttgtggatttgagatgatcctgcttcaatggaggaagctcaccagctggagtcgagatccgatgacctaagtcaacggagaagctactggagatggaggaagcaggattttttcccggaattctcttttcagagcttctctacctacaaatcagctctct

SEQ ID NO: 492 - DNA, 567 bp, Arabidopsis thaliana
caaacctgttctcatcaatgacttctgttctttcgcgatagtttcgcagaaactttagctttcaagtttttctcagtagactgttttactcttttttctccgtgttcaatgtcataagcttcagagttagtgcattcatcttcagtaggctcttccctgttgctgatctttcttttgatggtgacactatccgaacgggtggacgaagaagtttccttttgatctgaaacagaaatttcatctgacattgataaacaggaaaggacttggttttcacttcaagagaaaatgtaaaacagacgcagctccgaaccaaaattctttactgctttcaccaaataatcagaagctatagcagttttgagacttttattctaattcaaatggaacaagcttagacaactactaaatgcaaacaagttcatgcctttttctcgatatgattatatgaaatagaaaagtgtgtgttcttggtgtgcagttacataccaggtaaattgctgtccatatgaagtcgtaaagttgagataagttcttgtttgcgtcctttcacagggtccccaagtt

SEQ ID NO: 493 - DNA, 596 bp, Arabidopsis thaliana
caacaaattctgttcaagggatgtgtggcatgaattttgtttaaaatatttagtatttttaggccaaatacgtcaacatatatagatgaccatatcattttttatcatttagaacgttttaccaaaaaagtaaaattaatttaagaccagtatttggctgcattaccatgattccggagttgaataacactttgtcgttgcctgaagctgagagttgtggatagtagaagagatgatcaagtttcttgaggatgatgaaatctgcgtctatgaacacaagtttatcgtagtcagttacttgccacacacgtaatttgctatagttccactcattataagagtctttttgcgaaaaaggactgcggatcctgtcgattagccggagattccatcccgcagcgctgagaccaataagagacttgttggttatggtatgatcatggaggagaatcatgtccttatgcgatcctgattgtcttatactttgcgctaaagctattgccccacaaacataggcttctgacgagtgtagtactgtcacgtaggcaacccgtaagcgacggggtaaggctgtgactgcctttgatgcaagatta

SEQ ID NO: 494 - DNA, 513 bp, Arabidopsis thaliana columbia
tagtaacggccgctaatgagctctatagcacctctcttgccccggatagactagcgacaccgccatatttaaaacccatagagcaagaggcatgatcaatagaatttcaaccggagcactctgagcaaccaccaactgatctgataatgacatcgtgttctcacctttgtatcttgaaacaatatctaacgttcccgaagtagtcatatcagtttctttattaccaaagtcaaaaaccaaccctttacctttattcacttcagttgtgactattgtagcaggctccaaccttaggagagtcttcctacctttaggatccccttctagatcccaaagtaacttacaaaccctatcaatgcggacttatttttcagtagcatctaccactgacaaatagcttctcatctcatcaagcacctctttagatatcttaggtcttcatgtgacaacatcaatgcccacatcgtcgtttgttaaaacacatagagtggatcactgggctgatttatgaag

SEQ ID NO: 495 - DNA, 499 bp, Arabidopsis thaliana
ccaaccacattgacgtgaacaggtcttggaactaaatcccaaacttcatgacgacagaactgatttagttcttcatggcaaacatggtaccagaattcatcctctaaggcaatttcaatgttggtaggctcaatgcttgacacaaaacaagtaaacagaatcatatctctgtagttcatctttatccccctggtagttctgtctccatccaactttccaataacatcagtctctgaatgactttttggaacagtaaggcgagaagatgatgtatgaggttctgtagtcatcattgtctgttcagatccttttgaggtcctgattcaacttcaggcgttgactgtcttgtttcttctacatgcttatcatcatcttgttccacagggaatagtctagtagggcgtttgtcatcaaacacaacattgactaattcttcaactctcttcaacctcttattgtaaactttgtacgctatactgtttgtggcatccccagaaat

SEQ ID NO: 496 - DNA, 788 bp, Arabidopsis thaliana
gatctatggcgaattttataacttatttatttgataggtttgctaccattagtgcagctgtcccaacgtcaagaactgagagccagaagatcttatgccctggctcgatgaaatcatggatacggttaatagtgccgaatgcccatgatcctattagaatgagtggatagtatccccatctgttcaacacctgtggtttcaggaaacaagcagtgaggttttaatgatgaaatccagccacatgatacagaactagtattggcaataaagacagacctttaactctgctctattatcaaattgatcgactcggtctgacattccaactgccatctgaaattaacattgccatttcagcacacagccaagtgtatcagtaacgtttgtgaactactttcagaagacaatgttattagagatgagagagttacatacacgtctagcatttcttagcatccgtatcacttggaagtaagtaaacccattgtaaagaatggctccccaaagaggagcgtagaaagttaaaaaatgaacagcctgcaaaattcaagaggtgatatgagttccagtaacgaagaataaaatactagtctacattcatctggcccagcgttgcaacaaaaaagttcaaatgccttttgataggcattgaaatctttatgctcaactaagcattctcacttgcctttcccttaagaccagtttgcgtccagcaccatggccccaaatgtgagtggttgttacaaaagaacgtatgacagtcacaaccaaggaagccctgagaaaag

SEQ ID NO: 497 - DNA, 554 bp, Arabidopsis thaliana
gtgtggtgatttgagaatggcaagctatatgctggagcagattagggaacctgatgaccattctctatctgccttaatttcaggttatgcaaattgtgggagagtgaatgagtctagaggacttttcgataggaaaagtaacagatgtgtaattctatggaactctatgatttcaggctatattgctaacaatatgaaaatggaggcattggttcttttcaatgagatgaggaatgaaacccgggaagattctcgtacgctggcagcggttataaatgcttgcatcggtttgggcttcctagagactggtaaacaaatgcattgtcatgcttgtaaatttgggttaattgatgacattgttgtagctagcactttgcttgacatgtactccaagtgtggaagcccaatggaagcttgcaaacttttcagtgaggtcgaatcctatgacactatcttacttaacagtatgatcaaggtatatttcagctgcggaagaatcgatgatgcaaaacgggtatttgagagaatgaaaataagagcttgatttcttggac

SEQ ID NO: 498 - DNA, 817 bp, Arabidopsis thaliana
tgtttcgtgcttgttttcttacttcgttttctgtttaggtctttgattgtttcttactaggttttctatgtttgctttgggctgttgaatttggttttctatctctctagctaatcactggttttcgtgcttctgagtcgtttgtttttgaagctagttagggttttcttctgttgcttctatatttcgatagttttgtgcttgttttcaatgtttgcttcttattttcaaggataattttaaaatgacccactgtttttgggtggttgtgttattttcacaggaatcatcatggtgagaaagagaagaacggatgctccatctgaaggaggtgaaggctctgggtctcgtgaagctggtccagtctcaggtggtggacgtggttcacagcgaggtggtttccagcagggaggaggacaacaccaaggtggaaggggttatactcctcaacctcaacagggaggtcgtggtggtcgtggatatgggcaccaccacaacagcaacaacagtatggaggaccacaagagtaccaaggaagaggaagaggaggacctcctcatcaaggaggtcgaggagggtatggcggtggccgtggaggtggaccttcttctggaccaccgcagagacaatcagttcccgagctgcatcaagctacctcacctacttatcaagcggtgtcttctcagcctacactgtctgaggtgagtcctacccaggtaccagaacctactgttctggctcagcaatttgaacaactctctgttgaacaaggagctcccagtcaggcaatccagcctataccttcttctagcaaggc

SEQ ID NO: 499 - DNA, 963 bp, Arabidopsis thaliana
tgatgaagaaggcaatgtgacacgtaacagaacaagacttgttgctcaaggatactctcaggttgaaggaattgattttgatgagacattcgcccctgtagcacgtctggaatctatccgtcttcttcttggaatctcgtgcttgttgaaaagtaaactgtttcatatggatgtcaagagtgcgtttctgaatggagttattcaggaagaagtgtttgtgtctcaacctaaaggatttgaagattctgcttttccggatcatgtttacaagcttaaaaaggctctttatggttcgaagcaagcaccaagggcttggtatgagcgtctcactctgttcttaatagaaaagggtttcaaacgtggaagtgtggacaaaactttgttcatctttatagatgaaaaagacatcctcattgtgcaaatttatgtggatgatattgtgtttggaagcacaaaatagaagcttgtcacggactttgtggaatccatgaccaaaaagtttgagatgagtatggttggagagatgaactactttcttggtctacagatcaaacagactgatgaaggagttcatatctctcagtctacttatgccaaggggttgattcagagatttggaatgcagacagctaagacctcgaaaactcccatgagtgttactgccaaactgtctacagatgaagctggtctgagtgttgatgagaattgtatcgtgggatgattggcagtcttctgtacttgacaacaagtaggcctgatctgtgtttcagtgggggggggggggtgtccagatatcaggctaatccaaagaagtcacatctgaatgctgtgaaacggattctcaaatatgtgaaaggtacaatcgaggttggatcgttttattctaaacaaactaatcagaatcttgttggattctgtgatgttgattgggcaggaaatctggatgttcgtagaagtcaacag

SEQ ID NO: 500 - DNA, 683 bp, Arabidopsis thaliana
catcaaacgaataaaacgcatcgggatcatatgagaggccaaattttcaaaaggtgaaatttgtggataaagcaatccagacataagtctttacaaaaaccaaaaaggataaagccatcaaggcgctaatctttacgtacacaaaaataaaaggaaagctggttcgggtcactggtcaagtccttcatttcgcgaggcatcgccacggaagttcgaaccggcttggttggcaataccgatctcatccacctcgcattccaccgatctgttgcctccaggactctggggatccaaggtagaaggaacatgaggaatggccaactcttccttaacttctttaaggagactggtatatgtcgcctcggcgactgcataatccttctaccagctccttctcgtcctccaaatgcttcccaccctcaagcgcatcaatcagctaggcatttgctttagcctgagccaagtacatccagcggttgctggcttgatcaaccatagtcaacttcgcctcggcggccttcatcctctcaacaaacaaagctgcagaccgacaagcctgagcaacttcattatctcggagacctctctcctcagtcaacatgcgtttgtatctctcgactgttgacgatatcgtaacattggcctcggcaacacggacatcgttctccttatgagtgaaagcg

SEQ ID NO: 501 - DNA, 651 bp, Arabidopsis thaliana
acagagtctacaataagagattgaagagagttgaagaatcagttaatgtttttttttatgacaagcatcctacaagactcttcacggtggaacaagatgatgatgagcaagtagaggaaataagacattcaacatctcttgttgaatctggaacttcaaaagatgttgaacagactactgaaccacgtacatcatcatctcgcctcacagttcctaaaagtcactcagaaactgacgttattggagagttggatggagacagagttaccagggggataaagatgaactacagagatatgattctgtttacctgttttgtgtcaagcattgagcctaaaaacattgaaattgccttagaagatgaattctggtaccaagcttgccatgaagaacttaatcatttcagtcgtcatgaagtatgggatttagttccaagacaggttcatgtcaatgtggttggtactaaatggatttttaagaataaaactgatgaagaaggcaatgtgacacgtaacagagctcgactggttgctcagggatactctcaggttgaaggaattgattttgatgagacttttgctccagtagctcggctggaatctattcgtcttcttcttcccgtgtatctctctagtacgttctagatcgact

SEQ ID NO: 502 - DNA, 598 bp, Arabidopsis thaliana
tagtaacggtcgccagtgtgctctaaagacgttgcattcacctgcaagagagatattgccctgaatgggtagagagtttattgacttcgctcaaactttgcggcgtttttgtatacagacagccggaaaaattgcttttgttacaaccatttactacgatgcaaccataaagcaacaccaccaataagaacaactaacagaatacaaaaaattgaaaatccgaattgccacccgccgccagggatcccaccaaggttgacgccaaataacccggtcagaaaggtactgggtaaaaagaccattgccatcaacgacattgtataggtacgacgagctaaattttcctgcatcacctgagcgatttcatccgccatcacgccagtccgtgctatacaggcgtcgatttcgtcaaggccgcgctcaaggcgatcggcaatatcctgcatccgacggcgttggtcatcgctcatccacggcaaacgttcactggcaagacgagcataaacatcacgttgcggtgccatatagcgacgcatcacaattaattgtttgcgccgagagccaggaaccacgcggtggaatttgctgataaggagat

SEQ ID NO: 503 - DNA, 1064 bp, Arabidopsis thaliana columbia
ggtatcgtgcagaaataagtgttaccttccctgcccagaaattggtacagtcaacttcctggcttggtgaaactagtatgaatcaggtatgtcaagtccattcgctctcgtttaatggatgactcagccctagagaggtctagattgcagccgaggaacaatggagaagtgcagtacaagctaaaatgctctgcacggctgatgtaggaacattattcttaatcttcaccaatgtgtcacacaaaaccgcagctacattagtgttgggagttggaagatcgagtagacgcctagtcgatgtttgaccccatagaaaagtagtggtaactcggtctcaggcacagctgtgatcaccggtttgaagtacagaacgctaccgaggagcttcaaaaacatatcgcacaataggactcctaatatatgttatcttcgatgtgcgcgacttatatgtttctgtagctatcgtgtccaaaagtcatcagcaaccgcaggagacaacttcgggaactcaacgcttctcctttcgtaaatccatacatgtcgcagatctcaaacaatgtcttgctgtaatgctgtttgttgagaaagaatgtgagttttcctttactcgctttcgggttctctggattcgcgtacgtgaggcgacatgtggcaatgaactccttcacaagtttaggatatacatcctcatccatttcccaataccgtcccataccaagtgtttgaaacaccgttacaacatcatcgtacaggctaagcacatgtagagaaggtctggaagcgactcgtgttggccgcacatcaatatgcttcaaagctgccagtagctttgtgtcttccctatctcatatgccggtaacaggacgcttgttaggatcttcttttgtcggtgctccggaagtgctcgtgcgtgctcgagaagtgcctgcagcgtcgtttgtctttcccatacctttgcaaaagacaaagtgaagtcaagaaatcactcaaaaacaaatcaaataacttaaacattgtattttagttactaaactaaacaatgcatcatgaataatcaagtctaa

SEQ ID NO: 504 - DNA, 746 bp, Arabidopsis thaliana
aaggatttctcctgcctcctcccaacctcactccatctagagttgtgatagaggattacgagtttgaggagtatgaggtacatccatatgtttttgctctaatttgcataagtggtctatgccgattaagaatcttattctcttttcgtttctttaggatttggctgtagtttctcaagtttcttctggaatacaagattatttcatgatattaaaaataacctgttgttcatatacacattgggtgctagaagttgtttgtctctagcttttaaaatattgtgtggttaatcggcttagagtgctcttacctaaaacagttgataccattgatgtgccgtgttattttgttatcaaccatcgttttttttttttttttttttgagtttttcaaatcctgttttacttgttttggaacatatcaattcactgagttatttctttaatgcttctggtgtcaaaataggaggctccaatcatcgggaagcctactgatgttgcagggtaaaccacacatctttgcttttattggcttttctctttgcttttaggtgtttgaaatggtgaatcttatcgtagataatggcggtagaatcaaattagggtactggtactattcattgtccgagagtgtgttgccaagtgttgaaaagctcattgattttctgctgcgtcttgtttttctctctaggatcgtgttgtctccagtttcagatcaacgtgcactgaagttgaaggactgttga

SEQ ID NO: 505 - DNA, 597 bp, Arabidopsis thaliana
cagatgaagctggtctgagtgttgatgagaagctgtatcgtggaatgattgggagccttctgtacttaacaacaagtagaccagatctgtgtttcagtgtgggtgtgtgtgcacgttatcaggcaaatccaaagcagtctcatctgaatgctgtgaaacgtattctcaaatatgttaaaggtacaaccgatgttggtctgttttactctaaacaaactaatcaaaatcttgttggattctgtgatgctgattgggcaggaaacctggatgatcgaagaagcacaacaggagggtgtttctttttgggaaacaacttagtttcatggcacagcaagaaacaaagctgtgtatccttatccactgcagaagctgagtacatttcactagggagctgctgtactcacttgctatggatgaaacagatgcttctggattacggtatgacctctaacaccctgcttgtatactgtgataatatgagtgcaattaacatatcaaagaatcttgtgcaacattctcgaataaagcatattgacatcagacaccatttcattcgtgagcttgttgaaacaagattgttgaaacaagattgttgag

SEQ ID NO: 506 - DNA, 589 bp, Arabidopsis thaliana
gtctagacaagtccttggagtaggatcgagatgaagtctagacagacggtacctgtcagatcaatggggacctgggcaggaatcctagtttcgcggggggaaatttccttacccgcagtatcgcgctctacctcatgtgccaagcgagtggagtcccgtctctgctgacccacaattacggcgaggttgcgatgcacaatttcttggtttttggttaagttgatcatgttcatgatcattgcgcggacttggccaattctctggcaggtcgcggagggacctgattagacgggttggccgggttatctccatttggaggctgtatcgtgacgttttgttctctgccccttgtttgcggagggggagtgatttggtcagattcagaagaattcgagttttgggagatgtcctccgcatcagcgttatggacagcatcaaccctggttccgagagggagatccgttgggaggtgccggtccgtaacgtcatcgtttgggatctgaactggtaagccagatcccgataaattggatgaattgggatccatgatcattggtcacaattgatgtgttagtttcggtgttggaat

SEQ ID NO: 507 - DNA, 955 bp, Arabidopsis thaliana
tgattttgtaaatatatcagctaactgtttttcagaggaaacatgagagatctcaacaatcttgttttcaacaagctcacgaatgaaatggtgtctgatgtcaatatgctttgttcgagagtgttgcacaggattctttgatatgttaattgcactcatattatcacagtacacaagcagggtgttagaagtcataccgtaatccagaagcatctgtttcatccatagcaactgagtacagcagctccccagtgcaatgtactcagcttctgcagtggacaaggatacacagctttgtttcttgctgtgccatgaaactaagttgtttctcaaaaagaaacaccctccgtgttgtgcttcttcgatcatccaggtttcctgcccaatcagcatcacagaatccaacaagattttgattagtttgtttagagtaaaacagaccaacatcggttgtacctttaacatatttgagaatccatttcatagcattcagatgagactgctttggattagcctgataacgggcacacacacccacactgaaacacagatctggtctacttgctgttaagtaccgataactcccatcaattcacgatacatcttctccaccacccttagaccagctcatccgcagacagtttagcagtagcctcataggagtttttgaggtcttagctgtctgcatcccaaatctctgaatcaacccttgggcatacatagactgagagatatgaactccttcatcagtctgtttaatctgtagacccaggaagtggttcatctctccaaccatgctcatctcaaactctttggtcatggattccacaaagtcagagacaagtttctgttttgtgcttcaaaacacaatatcatcctcataaatttgcacaatgaggatgtccttttcatcaacaaggatgagcaagtcttgtcacactccacgtttgaactt

SEQ ID NO: 508 - DNA, 797 bp, Arabidopsis thaliana
accacactcatccttttaggaaattttattgaggaagatcatgaagagcagctattttcctgaaatgaagtgccagaaagacagacacaatatatatatatacatatgcaaatacaaagctgctgcaactctggacaacggaacgtgttgcaatagctttaacaccaagacacattagtattcactcagactaatagattttttcagattcaagaaactgtttaaatccaatggtttagtaaatatatcagctaattgtttttcagaggaaacatgagagatctcaacaatcttgttttcaacaagctcatgaatgaaatggtgtctaatgtcaatgtgcttcgtacgagagtgttgaataggattctcagatatgttaattgaactcatattatcacagtacacaagcagggtgttagatgtcatactttagtcaagaagcatctatttcatccatagcaactgagtgcaacatctcccaagagcaatttactcagcttctacagtggacagagatacacagctttgtttcttgctatgccatgagactatgttgtttcccaaaaagaaacaccctcctgttatacttcttcgatcatccagatttcctgtccaatcaacatcacagaatccaacaagattttggttagtttgtttagaataaaagaatccaacatcagttgtacctttcacatatttgagaatccatttcacagcattcagatttgactgctttggattagcttgatatgtggcacacacacccacactgaaacacagatcatgcctacttgctg

SEQ ID NO: 509 - DNA, 830 bp, Arabidopsis thaliana
gctcaccttgattacatctacacccaaacacatcctccaaaaccgcatgcatttaaagttaatccctgattatattcaatcagcattccatatttaatgttggaaatccttctttaggaatgttctaattaccaataaagacttaattaatgaaataaatatgattaattagtagattgtgtttttgaccacactatgtaggctatgtagcttatccttttgtgctagttaagtagtgatcattatttttgttggggtcggattcccccacaagcaagaccgagccaaacagtctaagaataacaatcacctcatggttaaacatatgattggcccctagcctagaacaaagcaccttgggaccttattcgatcaaccgtcctggagagacttcgtaaaatggctcggatgttaatcctatgaacacagcccgagccaatcgtgaaaacggtgcgggaaacatatatatcggctttggagacagccaactgagcttaatggacagtcatcaagcgcgccccgaaccggtacataccgtttgctcgaagccacctctcaaacgaccaccgagccgtgaagaacacctgaggcaaagacttgtaaaaaccattcattctcaaaggatcatttccggtaaaataagatcttttatgggactttcggaaatgataaaggagaatgtttgaagataatgtcggatcaagaaatccttctgaagcctccgaagaataaagaaaatatctttaatacgattatcctccagaaccgacttaaggataaatggaaatcttacgagaatatcgctagggaggcggtttacggcctatata

SEQ ID NO: 510 - DNA, 1072 bp, Arabidopsis thaliana
tcaattctctgcacctagacaccacaacagaatggtgttgttgagagaaagaacagaactttacaagaaatggctagagctatgattcatgggaacaatgtgtcaccaagattctgggctgaagttgtcaacactgcttgctacatcgtgaatagggtgtacgtaagaccttggacaagtacaactccttatgagatatggaaggggaggtcaccaaatctgtgctacttccatacttttggttgtgtgtgctatgttctgaacgataaggatcatcttggaaagtttgatgcaagaagtgatgaagggatatttcttggttatgccacaaacagtatggcgtacagagtctacaacaagagattgaagagagttgaagaatcagttaaagttgtgtttgatgacaagcatcctacaagactcttcacggtggaacaagatgatgatgagcaagtagaggaaacaagacattcaacatctcttgttgaatctagaacttcaaaagatgttgaacagactactgaaccacgtacatcatcatctagcctcacagtccccaaaagtcactcagaaactgacgttattggagagttggatggagacagagttaccagggggataaagatgaattacagagatatgattctgtttacctgttttatgtcaagcattgagcctaacaacattgaaactgccttagaagatgaattctagtaccaagcttgccatgaagaactaaatcagttcagtcgtcatgaagtatgggatttagttccaagaccggttcatgtcaatgtggttggtactaaatggatttttaagaataaaactgatgaagaaggcaatgtgacacgtaacagagctcgactggttgctcagggatactctcaggttgaaggaattgatattgatgagacttttgctccggtagctaggctggaatctattcgtcttcttcttggaatatcgtgcttgttgaaaatcaaactgtttcagatggatgtcaagagtgcttttctgaatggggttattcaagaagaagtgtttgtacccaacctaaaggctttgaaga

SEQ ID NO: 511 - DNA, 510 bp, Arabidopsis thaliana
gacttctcacaatctccgaaccgtctatatgcggaggcaccataactgctgtcactgtgttacttatccattcctccttctgtgtgcagtttttcagcccccatgcttccaccgcaagcctatgtacatgatcattaacaatccaactccaagcaaaaatgtttcccaaagccatgtactagtaggatccagaatatcgagaaggcctagttgaatccatttaaaaggatccattaaccgggtggccttccccaaacgagaatgccggccaagaaggtctccaggtccttctcaaaggtaaggtctcagaggaggtcttagagccgggagaaatttaaatgaaagtgtgtaattgccatagggtcccagcctgtaaaacctaagggagtcacatcagtccaagaatactttgagagatttagaagttttggtagcttccaaagctttaggactggcgcagacaataccaagtcctgttggaagagataaggctttctgagacccagtcaa

SEQ ID NO: 512 - DNA, 662 bp, Arabidopsis thaliana
tcagagacattttaggtgtatcttggaagaatcttcacgaatctccgagttccctcctacctccttcgaaataaaaaccatacacttggttagtaattgttctttatgtacgtacaaatacgcaaaactgtaacataaataatacacgagtgagttacctggtgaggtggtgatgctccacccaaataaatgttttccattacatagtcagagacagtatggtgttttttggctgaaacttcaccatccccatcattgcctggtacgttctatgaaatagaaaccactagaaggcattcctaagtatttatttgtacgtacacttaataaaaaccttttttttaattttatttacacgaggtactggctgagttggtgcaatgtctttcatttcatcgtcagaaaaacttcctttttggttggaaggatcttcgacattgtcatcgctggatgataattcctttaaacaaacaacaaccaaacacgtaatcagtctattatatacgtacactgcataattattctacgtactagccaaagactgtttgtagtagacgtacctcaataggaagactaatagtttcagccttcttattagtattgttcagcctggaagatcttcttggtacaaaattaatttgtttggtggtttttttaagcga

SEQ ID NO: 513 - DNA, 863 bp, Arabidopsis thaliana
ctcattcagcccatccttatcagtcactaaaggattttccttttgtaaaagatcctcctcagcttgttggtctactacaggctcagtttgaggctcagtttgcttagccgaactgcagtttgctcagctgctgtatcttggggctcaatggtgcctatatactctggctcatcatctgcaactttcttctttcttttctgtccacctttcttctttggtctacccatttcagttcacctgcatttcacagaaagaattccatgtcagtcatacttcaaaaaacaaaaatgacaacaaaaactatcatgagtaaacatagagcatgcaaggcataaaacaataacacataaaatgaataagaatctacatttggcacataaatgccttcacaatcagatctagcatattcagcttcatccatttcagcgtccatgtcaatatctgctggtaatggaccaatctctgcgtttccttcctgagcatcttctttactatatcttcttgatgaacctttcattgcaacataccaactagatgaatcatctacccttgaatagaagacttgcttcgcctgagatgctaatataaatggatcctttaaaaagctgacttgactgtgattcaagttgaccaatgtgaacccatcttctaccttaaccccattacctctaacagcccattgacacctaaatataggaacatagaacacattgtagtccagcaatatgatatcagttactgtcccatagtacgataccaagtcaacaacttgtgctgtatctttagcattggatctacacatagctgttgcttcataataaactccactattctgactttgcctttcaagtgacagtgtgtga

SEQ ID NO: 514 - DNA, 811 bp, Arabidopsis thaliana columbia
ggatcgatcccgcattattggaaattagctgacatgcatacaatttctgacaggaaaatggtatggcaaatacagtatccatttactctgcaggcctggtattacttctctatgtatctggcgtcttgctgagtcagtctgagatcccactctctatgaatggagtgttaactcggttaaatggagagagcgcattcgcactgatgggtcttcttggcgcaacgatcgtccctcacaatttttatatccattcttattttgctggggtaccttttttctctttatatgtatctctcttttctgttaagaagcaataattatactaagcagtgaacgctctattacaggaaagtacatcttcgtctgatgtcgacaagagcagcttgtgtcaagaccatttgttcgccatctttggtgtcttcagcggactgtcacttgtaaattatgtattgatgaatgcagcagctaatgtgtttcacagtactggccttgtggtactgacttttcacgatgccttgtcactaatggagcaggtttgttctgacggttttatgttcgtattagtctataagtcatttttagggaaaatgttcagaaatctctcgtgattattaattatcttgttcttgattgttgatcacaggtatttatgagtccgctcattccagtggtctttttgatgctcttgttcttctctagtcaaattaccgcactagcttgggctttcggtggagaggtcgtcctgcatgacttcctgaagatagaaatacccgcttggcttcatcgtgctacaatcagaattcttgcagtt

SEQ ID NO: 515 - DNA, 509 bp, Arabidopsis thaliana
aaaacgttagcaatcttcgtaaaccgtttgcacttccgcagaagttcaccaaagtatttgagcgtcaccctggtattttctacatttctatgaaatgtgatacacagacagtgatccttagagaagcatatgataggcggcatctcatcgaaaagcaccctcttgttgaagtcagggaaaagttcgcaaacatgatgaatgaagggtttctggatagaagtcggggactgtatcaaaaatctgttgaggctgatttggagaagaacaatatcaagacaagttatccggtttggtcagacgaagaagaagagttggacaataatttgatatctggatacgactctgattgtcctgtggttgaagaacataaacgggtgttttagttgtgagttgagtacaagttttgttacaatggaaccaaatcaagacgttgcagacggcgttgagagtgaaagattacattctgcatctaactgtagcagcctgagcttccggcatcatatggggtt

SEQ ID NO: 516 - DNA, 479 bp, Arabidopsis thaliana columbia
gttgattggatattttatcaaaaacttataatttcacaaatcgttaaagtgtaggaaaaaaaaataattagttgcgtcacgcattaggattccttggaacacgtaaagtttactaacataaaactgtgatatctgtacttttttatatctatctgctgctgcatctgtgttctgttcgtccttgaagcagtcaaattcttctctgaactccaaacatcgccatgtccgagattctctcttcgttgaggtcactaatggcctctcactctcctcctcttgatgctttggttgttccttccgaagactatcaccaggtttgatttattttcaattgaattacccttttttgattcatgatccgatctcagattacttgattatacgtctactattacttaatcatgtattgttcattgatttgagtgaaagtttcgatttttaaattgtatgtagagcgagtatgtttctgcacgagacaa

SEQ ID NO: 517 - DNA, 547 bp, Arabidopsis thaliana columbia
  unsure (1)..(547): unsure at all n locations
tnnnnnnnnnnnnnnnnnnnnnnnctaaagttggctgttaacggctgacgcgcctctttcttcaccggcgcatcaccatccaccagaccgccgccatcacgaatgtaatccagttcagctttgctgatacctttggtcaggcgcggcggctgataaaccttaaaccaaatcagcgaccagataatgccgataccaccagtgacaatgaacacccagtgccagctcaacatctcctgaatccagatcagcagcggcgtcagaaacgccagaccgacaaactgaccagacgtataaaaaccaacggcagaagcgcgttcatgttccgggaaccagctggtcaccatccggttattggtcgggaaagcaggcgcttcgaaaataccggttatcgcgcgcagaccaattaatgacattaagcccgtggcaaagcgctggaataaagtcgccactgaccagccaaatatcgcaataaaataagtcacgcgagaacctacgcgatctaagaccaaccgccggggatctgacatagcgtataaagccaggcgaa

SEQ ID NO: 518 - DNA, 428 bp, Arabidopsis thaliana columbia
tacacgccattggggaatcttgtgatgggctaaaagtttccaagaggtcggtcatggaagttatgtgatcaggtctgtagacgcacataagacattggagagccgcaccgtctttcaagatgcccaaattcctttttcggtagcatctgaatcttttggttgggtcatgcacgagctccaagagcattggtataaagatagagttcaagagggtgtaggcagctaggattgtgaaaacctctggccttattagctgtgaaacatgtccaaagatttgattaattattatgaaaatgaactaattcttctgactttacatatatatagaagagtgtaattgtacgcacctttaatacaaccgcgtacgtgtagtaggcgagctcgtagatccccgttattacgaagcacaagggctaaagcgaaagagt

SEQ ID NO: 519 - DNA, 598 bp, Arabidopsis thaliana columbia
gggaattcaatccaatgaagcagagaaattatgtatgcaacatcttcgattctgtctccaacaccacaaagtttcttcctttcgcatcatcttcctccaatttcgttcctttatcggataaattttctgggttttcctgtaacaagttgctgctatggtggagacattggtctcgcttcgttatataaacgacggagtagtatacaaagacggagaaatcgaatcttcgtaaccagagctagatcctctccttacgagattcttggtgtgtctccatcagcgactcctcaagatataaaaagagcttatcgtaaacttgctctgaaatatcacccagatgtcaataaagaggtactttttttatggtttctatttcattggagtttaaggaattggagctttgtatggttgattataggtttgtttgtgtctaactcatggaattggaactatgtatggatgctttaatgcttacatgtttgtctttactaattcacggaattgagactttgtatgttgctttcatatgtatgtgtatctctgtagactactgatggacttggtttacttagtctctatccttgtggaagaaagttta

SEQ ID NO: 520 - DNA, 772 bp, Arabidopsis thaliana
ggtggactcaggtttggtcagaagatctacttcgaggatggatccggatccagaagcaagaaccgggtcaataccgttcgtaagtcgtctaccacggcgaggtgccaagtggaaggttgtagaatggatctaagcaatgttaaagcttattactcgagacacaaagtttgttgcattcactctaaatcatctaaagtcattgtctctggtcttcatcaaaggttttgtcaacaatgtagcaggtttcccccttttttcttcttccttttatttactcattttgccatttccggtgatcggaatagttctaagggaaccatagctttacgcttttttcaggttttatgttccttttgagctttttgagttttggctcttaacgtcattgaagagtcttatcaaaacttaaactttacagctagttattatgtggtcttgtctcttgtcttatgcattatttaggttgcttttctttgaagctttcttttctttatatcaaatcaggtttcaccagctttctgagtttgacttggagaaaagaagttgtcgcagaagactcgcttgtcataacgaacgacgaagaaaaccacaacccacaacggctcttttcacttctcattactctcgaatcgctccatctctttacggttagatccaatatacacagcccttttcagctcaatgagtctcaaaaacaagttattgaatttcctgtgtgtcaggaaccccaatgctgcaatgattaaaagcgttttgggagatctactgcgtg

SEQ ID NO: 521 - DNA, 578 bp, Arabidopsis thaliana
cctctttgcctgaaagaagaagaaaacagagaattaattcattttgcacatctagtcctttcacaaacttattctcgtcgtggccccaataattccaaattctaacaaaattcaccacataatactaatcgtaccttagtggcagaggatgaataagtgacagattctgaatttgccgtcgttgtcgacattgtagagaatcccaaattgtaagctaatgatccatctggttggaatataccgtagtttttctccgaagtaggacctggtttcatatcttcattgaacaacgcaaatatataaacatcgagtcttgcattccgtctcgctggagttccttctccggcgaattgcctcatcataagattccggttatacgtggcagcatatcacaggagacgctccaatctctccgacatctccgtttgaaggacacctgattccgcaaccgctagctccagcggtacggtatggcggcttgtagacagcgaaacgaattgcgtcaacttgagcatacatcatgttgtcgtagtgtagtcttgtgttgggatcggcatgccgatgttaaggttgaatag

SEQ ID NO: 522 - DNA, 528 bp, Arabidopsis thaliana columbia
gcttcttcctctaatccatttctcctcttctccgtttctgggttattcaaagtttcgatttttattaacaaaccatgattgatcgatccacatcataaagtttcctaatttatctcaaagatcgtaactttcgttgacttttccgatcgaaatatgaatgccgtcggtaggatcggaagctatatctaccgtggtgtaggtacggtttcaggtccgtttcatccatttggtggtgcgatagacattatcgttgttgaacaacctgatggaacgtttaaatcgtctccttggtatgttagatttgggaaatttcaaggggttttgaagaatggtaggaatttgatcagaattgatgttaatggtgttgattctggtttcaatatgtatttagctcatactggacaagcttattttcttagagaagttgaagatgttgttggtgaatctgagagtggtgaagtttatactttgtcttctggtgatgaagctgagactactagtagggatgatgttgttgataaggttaag

SEQ ID NO: 523 - DNA, 565 bp, Arabidopsis thaliana
tggggttattcataggctttgcttttatcatttgtgtaaaataagattggttttgtggttgctgcaggcaaaactattcagagcattgccttcttggcctctttgttcgaggaaaacttatctcctcatctagttgttgctcctctctcaaccatccgtaactgggagagggaatttgccacctgggcaccacatatgaatgtggtatgtatcatgtttcgtatatatatgtcacatatacggtattagttatttattaatgttttcatcgtatgatatatgcaggttatgtacactggggattcggaagcacgtgatgttatatgggaacatgagttctacttctctgaagggcgtaaaagtaagtttgatgtcttgctcacgacgtatgagatggttcacccagggatatcagttctgagtccaatcaagtggacgtgcatggtatttctgtattaattatctgaatgatactatatactttgtatgtctttcttttagatctgatattttgcttagaatatcattctcttggttagattattgatgaaggcatcggttgaaa

SEQ ID NO: 524 - DNA, 508 bp, Arabidopsis thaliana columbia
  unsure (1)..(508): unsure at all n locations
gaggatccccctaatcaccagtaactatcaggagcaacaaagagattagtaaccttcgtgacatgagcctctctaccattgagcgatttgctcttaggagactttacaggctttacgtttggagcaacagaaccatttgatgccaccactttcccatcttttttcttcttcaccaagactgatggaatattcttgcctccagaggtcttctcatgcttgacccttccttgcaccttttgtcctctcatctgttttgaatcatccacttgttcattctgtgtgccctggaaaaagcgaaaaaactgcaaagtcaataacaattatttgtgcagaaaaggcaaaaaaaaaaaaacgttaaaattctttgtcaccaacctcagatgccgccataggatgctgagtagaacaacattccaaattctctgaagtaccaccatttccattactactgtctccttccattgtcacttcancatttgcaatagcacaatccgcaccgtcagcagct

SEQ ID NO: 525 - DNA, 484 bp, Arabidopsis thaliana
tatccataaacacacacacacacccttaaaaaggcaaaaatcagggaaaggaaaaaactaacaagaaatttgtattttatatgctcacttgtgtctttatgttgtaatgtttttgatccaatgtttgaaactttctgatatagtttcattgtgcaagaagagaaatgtggatcaaccaaattctcagaatctctgctgcttctgctccataaactggttatgcatttttggaggaaccaatatcatatccattctatgatatgatggatagattcaggatcatcatctctatctgttgtcttcttagtttactctgtctcgggttatccaaacagcagacgtgtgtgcttacataaacacagatcaacagaaccaaaagctctaaacaagaccggctcttcaacaagagacataaccaccaagtagacagagtctcccttgcactgcattagtaatcccaaaagtctattcctgttttgcttct

SEQ ID NO: 526 - DNA, 450 bp, Arabidopsis thaliana columbia
tagaggatgatcccgagacaggatctgtcggcatttcacccgctgactcacggagtatcgcgttgaacattgctacatcaagtctactgattaactgttccattacctgaatacagaagaaaatgaagcagctataacaatgtagttcaacattcttgattctggctctgctaagtgttttaagtaactaaatgctaatctcttaccagttttgcaagcataggtagacaaccacattcttgtcttgaacctcttagtggacaaagtctttcacaggcagctctaaaggcatttttccatagctctatagcatagagtccctggttccggtgacctaaccgcctttttcccgaaactttcctcgcgatagatcctttaaccgctggagattgcatatgcggcgtcatactctgcaacaagattaatttcacattaatggtttagatgaaa

SEQ ID NO: 527 - DNA, 536 bp, Arabidopsis thaliana
  unsure (1)..(536): unsure at all n locations
nnnnnnnnnnnnnnnnnnnnnnnctaaagacattaacccagttggtgaaagggttctatagccgtcgttacggctggcaataaagaataaactgggcacgatagccccgattcagattgtagacaaagtgagttttgttcatgccggatgcggcgtaaatgccttatccggccaacaaattcaataaattgcaggaatcacgtaggcctgataagcgtagcattcaggcgattttgcgtttgtcatcagacttaatccgggcatgatagcccggatttccatcaagattagcgacgaacagcgatcgcttcgatctcaatcttcacgtctttcggcagacgggcaacttcaacgcaagaacgtgccgggaaggtggcgttgtgttcggtgaagaaggcttcgtaagtggcgtttacggttgcgaagtcgttcagatcttttacaaacacggtagttttaacgatgtcgcccactttcaggccagcgcgttcgacgatcgcttttacgttaccagcgactgacgtgcctgtgcagcg

SEQ ID NO: 528 - DNA, 908 bp, Arabidopsis thaliana
tttattatatttatattttatacctgtggaagaatttgatgttggacttattgcggtagtgttggatcaaagacatcaagttatcaatctcaatcttaataataacaacaaattgttagaatcgataattgtatgagaatgtaagctacatactttttccaaaatgtcacaccttgtctcttccccaattctctgtggagaaagcaaaagctgagactgtatgaacccccaactcgaagcagagctcggcgatatctataagccgtttagctcccgcctcgtggccttgtgacgtcgtcaatccggcccgtttggcccatctccggttcccatccagtatgaatgccacgtgtctcggcattagttctctttgtaacccatcctcgcggacaacataagttccctcatcacttcacaaacacaaaaagccaatgttaagtcatgatccaaccaaaactgtcttgtttcaaaataccactcttcaaacaccaaattttgtttttgtccatattcaaaaataccacaaactagattttcagacttttataaatatggtatagaaagtgtttataagggttttataacatgtgtggctagaaattgcttataaagtttacagcgtggatataacttaaaagattgacattttgtatgaaaaaatgtatatgtgtaacacacagcagattaagttattgctaattggctaaatgcatgccaaattttatttgaaggttgtaggtttttaatgacaagtttgaaaattttagttaagagagtactaaaacatataactactactaaaactaaaagtatgattagaaaacgcgaactataccgtttctcgttgtctcgagcagctttgattttgatgagtccgatgagttttagcaagaacacagggaagccta

SEQ ID NO: 529 - DNA, 787 bp, Arabidopsis thaliana
tattattttattatttaatatattaagtattttagtttgttagatattcagtaacaaaatttccgcaaatgcattaattttcaaccgctaaattaatcgttcaaattgtttaataacgcttgagacgcaaccgcctacttccgcaaattcatatagtcataatcggattttagcgtttaaaccacgagtctggccttagatcaaagaaaaccctacttatagtcaaccctaatccatgataccaaatggagaaaaaaaaagaaagaaaaaatggaaatttcccaaattaacacacccataactcaaacttgtctcaaacctcagattatataattaggctaaaatctgataaaccaaaaaatgtatcagagtgagtgctaaagagaactttgtgttgacctctctttccctcctaattccttagggttcctcgatttttctttttcaccgaaacaaaaaccttattcctccttctctttctctgtctatctttctctgtacgttttattcactttcctccacgtggatttgcataaaagcatgaaaatttgttgatgggtttctcttcgacatccagattctagcttccaattccgtaattctccgttaaaaaaccctaatttctcgaatttactctgatctgtgtagaaattagggagtgaagtgtccgcaagtgtttggcaatgtcggatgacatggttttgcatttctcctcgaattcttctaatcagtcggatcactctttacccgacaaaatcgccaagcttgagggccgcttgactggtaa

SEQ ID NO: 530 - DNA, 619 bp, Arabidopsis thaliana
  unsure (1)..(619): unsure at all n locations
ccccctaagattctgtagtccccaccacaaacagaagaagtacttagagacaaagttcttagacgagacgatgccagaggagagtgctcttaagtagattccaaaatcaaaaggaggttcttcatcttcggggacattgacagggcactttagttgaagatacgaaactttaatattgtcccaagcagcataacctttcatattttggttaccacaaaacaagaagtttctagtacagttctggttattgtggcaagccttactccaacagtcgttattgcgttctaaagcaagcaaataccacaaagccccaacaatctgcatacacatgaacttatgagaacataaaaacggatacagtatggtacaagaaaattggatgctaacatgacttgcgagcatgtaaagcaacaagtagtacgctgcacccagccacgcagtttcagcgaataccccggcagttctcttcagttctgaacttaaaggatacattcgaagaaaccgcggaatatactgaactaaaacgatatatctaagtgcttgtnttgtcgcagtacattcgcaccctcgaagtatagaggaatctccaactataatctgaataaatagccaaaatgaa

SEQ ID NO: 531 - DNA, 932 bp, Arabidopsis thaliana
tgcgatattttatttaagggtttgtggccttatccttctgttacaccctttcattgccttaacaattgcattgctttctttgtgacgctaatccaatttctacaccaaaatctgaagcttcacatgagactcgtaagtaccttaagtattagtaggttcaactttatgtattctcatataggccttgaatttgacattgatcagtttctctatgttcttcaaggatggtgattttatatttctcttctatagttctgaaccaccaagcccgaggttctcactgcttgtccatccttgttgcacttgaattgtgtactgcagattccatacaacatcctctatcgatggccgcttcctctgatcttcacaaagacagttaatggcaaactctactgtggttctcaatgactcgtatgcatatgtcctctcacacacggatctgccaagctacgcaacaccggatggttcgtctctcaaactgttctccagctgaagcttcaagctccccaactctgaagatgcagctgctattactttgcatgtgatgatctgaattagtatcactccaaactggtacacatcttctttctctccatcttcattactagggctctccgctccaacctgaaattcccccagaaggttatatatttcatgagggggttaactgaagatttggagctatatcctgattatattatatctggtttgtttatataccttggatggtaaaggaatactataaccactgagttttacagtgagtgtttcatcaagtaaaacattctctatttccaaattgttcccaaatattcctggtgccactcctgtgtgcaagaactgtattcctcgagcaactccaatcgctatcgacattctctgaggccatttcaacacctctttctttctccaatctgccaaaaacaggggat

SEQ ID NO: 532 - DNA, 615 bp, Arabidopsis thaliana
  unsure (1)..(615): unsure at all n locations
nnnnnnnnnnnnnnnnnnnnnnntaaagtgaaccattaacttctccagccgcgaagacgatcacgctattttgatttataagctggaacccacaaccgggatgctgcgaacccgtgcctatattggccagcatatgccgctctactgttccgcaatgggcaagatctacatggcgtttggtcacccggactacgtgaagtcatactgggaaagccatcagcatgagatccagccgttaacccgcaataccattaccgagctgcccgcgatgttcgacgaactggcgcacattcgtgaaagcggacgccngatggacagagaagaaaacgaactcggcgtctcctgtattgctgttccggtgtttgatattcatgggcgggtgccgtacgccgtgtcgatttcgctttcgacatcacgtctgaaacaggtgggagagaaaaatctcctgaaaccactgcgtgaaaccgcgcaggctatttctaatgaactgggatttactgtcagggatgacctgggcgcgatcacataacgctttggacaagtgccaaaactttaacatttccttcgttggatcaagcagtagggacgcgctctctggcactctgctgttttagt

SEQ ID NO: 533 - DNA, 911 bp, Arabidopsis thaliana
ccaatgtatcacctggtaagaagagctcaagttcattcccaagaggaataagatccaaattctgatcaaaacagtaaacatgtacacggctaccagaacttccagcatcataaatcacagcgtaattcttcggacctctcgaattaggacctcctttgcgattatgcacagaatactcttcaacgacggaatcagaaatcgatctcccaggcattagcagaagaacgagaccgatcaacacaatgggaaccgaaatcacaagtataatcccacgatggcgttggatcttgtcagcaagagattcgtgccgtccaatcccgacgttcgccgtcatcttacctccgtcaacagagtcggatgtaggagaatggttaccagactccaggagctcagtggaagaaggcgaacggtagcgtatcttaccgttgccgttgccggtaccggaggacgccgtggtctgcggcggatcctgtaacggctccagatcgacggtgaatttgggaaagcggcttgaatcgccggatttgatctggaatccgaagcttgtgtgtgcttcagatctgaattttgtatgagagagcgatggatgcaaacaaaagacgttatgggttacgattgcgggagatgggtaactccaactatgtttaactctcacaatgagcttacgcataaattagttaaagttgatttttttttatattgaaattaaacagtagtaataaataccaaaatatttaattaagtacttcctctgttttaatttatttgtattttaaagtttttgttgaaaaataaatgctattcattaatatttttttgcaaaaatttatgattatttatttcttttgattatattggtattatgcagaatattttgttattggttgcatatattattttaaataaaaaat

SEQ ID NO: 534 - DNA, 522 bp, Arabidopsis thaliana columbia
ccattgtgaaccaagggaatcgtacgatccccaatctctatcgttgtacttagaccagtggggttggttggttgtatggctaagtaacgatagggattggttcatcaattcacgaccgatgacgagtcgttgaacgaatggagtaaggcgacaaacgggctaaggaatcaaatccgcatattggccaaggtatgtaacgatctagcttcttagttaagatagacttttggtaattgaccttgaaagtaggataaaggaatatgcgattgtttggcttagaatggttagcgaacatatgcatgtcttgaccgagtaaaggatcaattctatgttgaatcgcgaaaaattaagaggttcggccggggagaggcgcgaacttgagtacactgtcgccggacgccgagacgtccgggactgggtctcacaatatcttgttcccaaaatagatttcttttgagagccttgtagtagtctccggagtcagcttgtcttctttcattagggacttggtcgtcttgcggg

SEQ ID NO: 535 - DNA, 735 bp, Arabidopsis thaliana columbia
agtctgtcctgagaagttgagagtctctcttggatcttgtcgtacctttggtactgctcctgcagctcgccgttggacttcattatttcggtggagaggttgtccaattgatcctccaatttcagcctggtatcatttgaagagcggagatcagactcaagagatgaagacttatccttccacgccataacatctttttctctgtcaagcagtagcctttcatagtactcaatcatgtcattgagttcggtgttcgcctggatcagataataacgagaaggggttagcgatagagtaaaggagcaaagattaaaagatctattgtggggaaaaggaactaacccgagatgagtgatgggcgtggagtaggaatcgctcgcgaattgcaggatgccatttatcgaaggctggcaggatggtgtctcttcgggttttgaaacatcgaaagacgtttccctccgtttccatcgctgttaaaaaaggtcggaccgatcgaagaatgccgagtaaaaaaatggtaaaaatgtgataacaaaaaatgggaggaatgatttgttcacttcgcaagcctccacaatcgacttggacattgtcttgcgtcgagctgcgatggcccgagcagaagtccctttaggtaaaggagggggcagtggcagctggaggagatgtcatgggggatatcataagcttgtggttggcttctatgaaccggtcgagagtgacgagtccaaaggg

SEQ ID NO: 536 - DNA, 736 bp, Arabidopsis thaliana columbia
gatctggagactaaaacaaaagtcttgctccaattgttctccgttaacaggtaatcatgtcccctaatgcattatatattacattgtcccccgctatcaggtaatcatgtctcctaatgtattatatattacgttgccccccctagaattttggataaccaatatgtttaaacaagtcatttttaaatacccaataacaacagtagaagccagctgttctccactattctttcccctaatcctttatgcttccaccatgatttttcgtcctgtatcatcacatcagccaaaagctgatatgtcaccatcttcgtcagagcgctgacccaccttaagggtaatttcgtccactgaattccacgtagaccaaaatgtggcaaattttgaaaggaatttcagaatatagcagaaattgaaagaaatagagtgaaatatggcagattttgcaagattccctttaaaaattggtttgaatgataaaatattgagaacaattttagctaacaaaatgaaattaagctgtcatgatgtgatatacaatatttgggtccacgaaaaaaaacatccaaaggagtagcttccggcattggcattaatgtatagtctcgaccagtccattagaagagtgagtgtcggcccaaactttttagcaagtaaaaaaaaaaaaaaaattagctagcccatcaattcttttaaattatcaacagtcgccgaagtaatatgtcacctgacaaaa

SEQ ID NO: 537 - DNA, 541 bp, Arabidopsis thaliana
gttactcattcataagttttcttaacttgcaaaagcataagaatcaaaagacaggacatgactcacaagtttgtctaaatacttggaagaagacccatctttacttaagcaaaaatcagctctctctttcaacttcaaactcctttccctcaatccatctcccttctccatcattacacttcttagcaccttttcaatctccttcttttccatcttacttctctctaacaacatcccgactcgccatacatcaacgatgtatctcgcgttcacatgctggtccgtgaaacatgacgtacatatcataggaacaccttcacatatgctctctagtgtcgagttccatccacaatgtgtccaaaacgctccaatggcaggatgcgccaatacctctaactgattcgcccatttcacgatttttcccttatctccaatgttttccataaaccctaaaggcaatgactcgagccactcggtccccctgacagaccccggcctaaccacccacaaaaacggtcgttcactgtttcttagacccaag

SEQ ID NO: 538 - DNA, 945 bp, Arabidopsis thaliana
actctagaggttgtaacgagcgccagtgtgctctaaaggctccacacgtaacggtcgcgattcagaagctaaacgcctgggcgtaagcgtttcggtggcgaatccgttctggcgggtacatcatcgttcgtcaacgtggtaccaaattccacgctggcgctaacgtaggttgcggtcgtgaccacactctgtttgctaaagcagacggtaaagtgaaattcgaagttaaaggcccgaaaaaccgtaaatttatcagcatcgaagctgaataagtttttcgcgtcccggtaacggatgaaagccccgcaacacgttgcggggctttttacattcgataaccggtaaaaatgcgcatggtgcgacgttaatccgcaaatgcgctttgcagggaatacggtatgaagcagcaggcaggcattggcattcttttggcgctcaccacagcaatttgctggggggcgttgccaatcgcaatgaagcaggtgctggaggtgatggaacctccgacaatcgtgttttaccgtttcttgatggcgagtattggcctgggtgccattcttgcggtgaagaagaggttgccgccattacgcgtgtttcgtaagccacgctggttgattttgttggcagtggcgaccgccgggctgtttgggaacttcatcctgttcagctcatccttgcaatacctgagtccgaccgcttcgcaggtgattgggcaactctcgccagttggcatgatggttgccagcgtatttatcctcaaagagaaaatgcgcagacgtcaggttgtaggggcattgatgctcctgagcggcctggtgatgttttttaacaccagtctggtcgagatatttacaaagctcaccgattacacctggggagttatctttggggtcggtgcggcgacggtttgggtgagttatggcgtggcgcaaaaggttttattgc

SEQ ID NO: 539 - DNA, 951 bp, Arabidopsis thaliana
cggacaagctactccttgtgcaaaagaagcacattcattttctgggtgatgatgagacgttccaagttcaggatggggagactctactatgtgcagaaccaaggaggtcaagaggtcagctatgtgcagaaccaaggaggttacaacaaaggtttcaacaacttcaagtagaaccatcccaatctgtcttacagaagtacaaacgttgcaaacccgcaggaccaagtttacccttcacagcagcagaatcaacccaagccctttgttccatacaaccaaggtcaagggtatgttcctaagcagtagtatcagggcaactatcagcagcaacttccaccacctgggttcacacagcagcaacaacaaccagcttcaacaactccagattcagacttgaagaacatgttacagcagattctctagggacaagctgcaggagcaatggatctcgccaaaaagatggcagaaatccacaacaaggttggttgtactttcaacgatctgaatatcaaacttgaggcacttacctctaaggtcagatacatggaaggacaaacagcgtcaacttctgctccaaaagtaacaggacttccaggaaagtccatacaaaacccaaaggaatatgccaccgctcacgctatcaccatctgtcatgatcgagagctgcctactcgacatgtctccacatcaatcaccgaggatagtgatgttcaggacggggaggcttctactcagattgaaatttcagtggttggactcgaccattcagcaggatcccgttttcaaacccagtccaacctagacgagaaagcagccatcattgagaggatggtaaaaagattcaagccagcaccattaccttcacgcgctctaccatggaaactcaggaaagcatggatagaaagatcaattatcttgcagagaagcagcttgatgagatggaagcggtga

SEQ ID NO: 540 - DNA, 530 bp, Arabidopsis thaliana
attgatcctgatgcagaaatccaacctgagaagtcaaagcaacgaaattctttaaaaacatcccgatatccaaaacacaaaccaaagcaatccttacttggttgacgaagttctgacactccgtggtatcagcatcagtagcagccggcccaaggtagaatagagaaggcgtcctgggaatgaagtccccatcagcaatgattgttggatgcttctcctttgagacggcagcggcgtctcgatcacagtcctcacaatacgacaaaagaatgcccggcatcggagccagaagctgaaaaccattcttaagccaatggcgaggatgtgactccagcatagccatttttcgagcgatgtcggaccttcgttcgtcatagtaccttagcatctcgcggtattccttatgcctagactcgacgcatgacaagaaaccctcggcttcacgtctttcctccgagctcgcctgaaataggagagtccagggaactcgaaggttattgaaaaacggcatccctcgttcaatcgcctca

SEQ ID NO: 541 - DNA, 276 bp, Arabidopsis thaliana
gaccgtatagaaataaggatgttaacgaggtacggcgaaaacaggaggcgcgataagagcgttccgatcgagtgtgattgcaatgctaaggttgtcgttgccacttctcttgatcctgttacaaccggaaaacttttttcagctgtccgtaagaaatatcagatgtatccctatgaattaacctcctggtttttttataagggtcccggtcaaggatgcggtttcaagagatggtggactgttgcattttgtgacgagtttgacatgataaaagag

SEQ ID NO: 542 - DNA, 691 bp, Arabidopsis thaliana
tcacaatattccctgcgacatccaaacagagagaggtatggttgaagagttttgtatctagcctatgaaaacagttgcatcgtaaaaactctctaatgtttccacgttttaaaggtactaaggtgtgcatctattctaacagaacttatttcaaatatcccaccaaatattcaagatcaatatcatggcttctatatcgaaaactttaacctaacaccttaaatatcatcaagatttgtagttgaaaaccatgttgagatttattctttgttaatttttcatgtgatgtatggggaagaggacaaaaacctaatgcttaagtctctagaggctcgtttagctataatgaacatcaaaacggtaacagaaagtgaacgagaagtgagattacttaccgatccagtcaattccatagaccttgaacccattagcattaagctgctttgcaaaatcactatacctgccactgtcaaaattttgaaaaaaataaaccaatgttaagattcctaaggccaaggaaattagaataaactcaaatggtgcataactaggttcaaacctatgctcgtttaatccatgtagcagaacaataagtcccctgcaagaacatatagaaaacaaataagaaaccagacaagaaaatgattgaaagtttaccactttcttgacttgtatttaaacagagctcaga

SEQ ID NO: 543 - DNA, 216 bp, Arabidopsis thaliana columbia
cttaggccctttgggtgtcaaagttttggttgacaatgctacggtacaagacacatatctgttggagacctgcgattaacatgtgcacaattgaatctgccatcggacagatgattgcttggctgcctctaagtgtgttaacctagaaaatgagcatgaaacagaagacattgcacaactggtaaagtttattattcaccctcataagtataagaa

SEQ ID NO: 544 - DNA, 590 bp, Arabidopsis thaliana columbia
gttcaatacaatgcataaaccatttacttacagcgttcagtatatgcagttggttacagatccaaaaaaaaaggcggatcgttttgaaggcacctcatcacaagtaaactgatgggtcgatcacagatgagatcagacgcctctccattagcgatacgattgatgtaaggcttaatatcttcataggtcacaatgggtacgttcttcttgaaggtttgcttatcaacttgaccgttgaggaaacctttaagatactcggtatgagcattacgtgaaagtactgcttccaagatggaatcttgaatctgcgttacgttggtggtcacatcctcaagaagagacaggctagcttttgggtctgttagatcaaactttggcaacatgcttgcttttgattgtctgccaacaacaaaaaaaaaaaaccttctaagtcgtatcacgaaattgtttacaaaagagtgaagagcaagcaaacctttgttctggcgaggtggatggatgagctttggcctgtgtctttctatgcttgaaagctttgtaaggagagattagaaaaagcagtcagtcaaatggtgtggtgtgacgatatg

SEQ ID NO: 545 - DNA, 520 bp, Arabidopsis thaliana columbia
gattaaacgtaagtagatcaaaccggccaacttactaaataacaagatagaaattcatgaatctatgaacgtaaatggctcttagtgcctaatcttacatgaattataataatatggagtttaatgcatcctcttgagcataagaaatcaatctttcaaagccgccacacgtcactatgcactaatcattctcttaatagcccactggcagaagcacaattaaacccttgatatcgatcgttactatctagttttctctataaatagaactccaattctttctaagtaataataaactatctctttagtaagtcttttaaacaagctatctagataatgaaaacacaaaccaaagtgatgggaggacatgtcttgcttactgttttcactctttgtatgctttgttcaggggttagggcacagctaagccctgacatttatgctaaatcgtgccccaatctagttcaaattgtccgtaaacaagttgccatcgccctgaaggccgagatacggatggctg

SEQ ID NO: 546 - DNA, 543 bp, Arabidopsis thaliana columbia
tgagccctggtttataactttcaaacatgaacaagcagacacagcactcataatagtgactgcatttggcactacacccgctaaaaacatcttcctaaacatatctaatgcctgatatctcatcccattatgaatcaaacccgaaatcatagctgtccacgtaaacacatcagcagttataccaaaagtctccatcttctgcatcaaatccattgcagcatcacatttccctagctggttataacccccaatcagtatgttccaagtaactaacccaggagaaattccttccttttccatctctttaaccaattctacagcttcttcatgtttaccattttggcagtaagctaacagtactgagttccaagcaatcacatctctctccctcatacgtctaaaaaacttggtagcgaaatccaattcaccacatttcgcatacacagctaaaatcgagttactaacacgaagacacgaactcatcccgagttttataccaccgaatgaatcacctcccagcctcaacatctccacaattagcac

SEQ ID NO: 547 - DNA, 508 bp, Arabidopsis thaliana columbia
tcatgctctcagatttcgatctctgtttcaaagccgatgtagttccaactttccgatctcgacgattccggagaacttcgtcttctccgaggaagactcgtcgtggtggcggttgtttctccacggaggtagagttcgagagagaagagatagtagcggaattcgcggcggacatgtgacggcgttttcgaaatcgtgtgtaggaactcacgagtatttagcgccggagctagtcgccggaaacggacacggaagcggtgtagattggtgggcgtttgggatatttctatacgaaatgttatacggaacgacgccgtttaaaggtggtacaaaagaacaaaccctgcgcaatatagtatcaaacgatgacgtggcgtttacgttagaggaagaaggtatggttgaagccaaggatttgatagagaaactgttagtgaaagatccgaggaagaggctaggatgcgccaggggtgcgcaagatatcaagaggcatgagtttttcgaagga

SEQ ID NO: 548 - DNA, 619 bp, Arabidopsis thaliana columbia
ccgtccataccaattatcatatccttgagtacatcctataaaacctttgtgctctttaaaagaagcgatagacgcgcctcgatgatgaaccctaatcgggtattttggaccgtacccgactagataacttgtttccattggatttgatcctaaaatgtaatcgatttgagatttcgcaaagccaagcatctcgtcaggagttacggttccttcgtgacactcgagatcggtgtttgattttcggagatgatcagaatatacggttaggaggaaagatgctgtggatacgtattgcatattgttccattgtcggacgtagagtaaaccggcaggagttcgctggacgtttgtgccgttgatgttcttgttgagaattgagcataggtaatgatccgcctttgatttgtattgttgtaggactttagaatgttgcttgtgcttttcttcttttagcaactgaaaaatgaggcaagtgttgttagtgcttaaaactcaagtaaatttcgtagactagttcatacataagaatatagcttcttctttttttgtcaatcagaatatagctaatttatcaagtaggtttagaatcacgtgccataaaaacagaccatttaaagag

SEQ ID NO: 549 - DNA, 594 bp, Arabidopsis thaliana columbia
ttgcagtttatagaggcaatgtcgattgagcctggttcttctgtgtgggaaacattgctaggagcttgtaggattcacaaagacacaaaccttgcccgaacagtctctgagaagctctttgagctagatccagacaatgtaggataccatgttttgctgtcgaatattcactcagctgatagaaactatccacaggctgctacggttagacaaactgcaaagaagaggaaactagccaaagctcctggatataccttaatagaaataggtgaaacgcctcatgtctttacctcaggtgatcagtcacatccacaggtaaaggaaatctatgagaagctggagaagcttgaagggaagatgagggaagctgggtaccaacccgagactgagttggtcctgcatgatgtggaggaggaagaaagggagctgatggtgaaggttccagcgagaggctagccattgcctttggactcatagctactgagccaggaactgaaatccggatcataaagaatcttcgagtctgtttagactgtcacaccgtaaccatactcatctcaaagatcacagagagagtgattgttgtaagagatg

SEQ ID NO: 550 - DNA, 475 bp, Arabidopsis thaliana columbia
cgggggctcaagctggattatcgacagcggatgcacaaaccacatgacgggggagaagaatatgttcacctcctacgtcaagaacaaagattcccaagattcaatcatatttggtgacgggaatcaaggcaaggataaatcggatacccaagggacccttaagcgcttcctaagaagagctcaaaacgaatttgagcttaaggtgaaaaagataagaagcgacaacgggtccgaattcaagaatcttcaagtggaggagtaccttgaggaggaaggagtcaagcacgagttctccgctccctacacaccacaacaaaacagtgtggtagagaggaagaacaggacgcttttagatatggcaaggacgatgctcgatgaattcaagacgcccgaacggttttggacggaagctgtgaacacggcttgcatgccataaacagggtctacattcatcgcctcctcaagaagacgtcgt

SEQ ID NO: 551 - DNA, 318 bp, Arabidopsis thaliana
agtgtgctctaaagagctcctcagggagccttcagctgtgtctttcatctacttttccctgtacctcaaagagatgcaagggtaacgcaaaatcgtgacaaataaaaaacccggtcgcgagaaaccaccgggtttgataatgatactgcgggaaatcagcgtttgctgatctgatcgaacgtaccgccgttagcaaaatgctctttttgcgctttcgtccagacgccgaactcttcatcaatggtgaataacttcagctttggcaacgcatattcgtactttttcgtaacatcaacgtcgcgcgtacggtagtagttt

SEQ ID NO: 552 - DNA, 536 bp, Arabidopsis thaliana
gaaggaagataccttcatgatttctgcataaggatggttgctttgttgttgagcatggtgacactcatcaaatattagaagggagatacactccatcttgatgaaacagtgctgtaagttatgcagaagtatttgtggagtcataacaagaacctgcaggaaaattcagtcccaagaacaaaacaaacaattgaaagaagatcgcatataataaagtgatggttcctacataattgtaaaatggaaataacaatcaacttaaatgagtctcataggctaaaaatagaatgagaaaacaggaaatcacctcattcgctgcaatctctctctcccactccgagtggctcttcacaatcctcttgcctccacaatgtattgcaactttgaagttgacagagtccgctatgaccttggcttgctgtaaacaacaacaaactcaagacagttagaactaatcaatccgcattaaacaccgacatataatcaagatgaacagcctcgacacctgttcgaccaaagccacggtgggagcaaga

SEQ ID NO: 553 - DNA, 542 bp, Arabidopsis thaliana
ctgcgtaaatcatagcccagaaacgtcatcaaacccgtttcttcccagccacaaataatgatggaagtgataagggcaatgtgccttcaggtacggttgttgatactaaagttattcacccgtatgagtatgatttctacctctgcagtcaccacggagggatagggacaagcaaaccgactcattactacactctttgggacgaacttggattcacttcggatcaggtgcagaagctcatcttcgagatgtgcttcactttcactcgctgcaccaaacccgtctctcttgttccgccggtgtattatgctgacatggttgcttttagaggaaggatgtaccacgaggcaagctctcgtgagaagaactttaagcagccgcggggagcgtcaacctctgctgcttcgcttgcctcttcattatcttctcttacaattgaggacaaagcgattttcaagctgcatgcagagcttgagaatgttatgttcttcgtctgaagaagagagtgagtttcttttgtgttttgggtctcaagctgactt

SEQ ID NO: 554 - DNA, 521 bp, Arabidopsis thaliana
cgaagataatcacatcaacaaacataatttcaaaatcccttttgtttgtggatgtaggaatctcggtgaagctttaaggcggatccgtgaaggagccgcatgataagaaccaaaggtgaggctggaactggtaacgttgttgaagccgttacactgtgaggagtgtgaacggagctattcggttacttagaagcatggacgatgacgaggttttcacttacgcgaaaaagatcgctgcgccgtatgatttggttgtgcagactaaggagcttgggaggttaccggtggttcagttcgctgctggaggagtggcgacgcggcggatgcggcgttgatgatgcagttgggatgtgatggagtgtttgttgggtcgggtgttttcaagagcggagatccggtgaagagggctaaggctattgttcaggcggttacgaattatagagacgcggcggtgttggcggaggtgagctgtggtttaggtgaagccatggttggtcttaatttggatgataaggttgaga

SEQ ID NO: 555 - DNA, 569 bp, Arabidopsis thaliana
tccttcgtatagtatttttttcaatggagagctgattgggttctttcaagggaagaaaggtatatgacaaggtgatcaaatgtcttctcacctttttgtgttggttatggacattattgcgaaatctcctgataaggttgcaatcaatggtcgttttgatctccatcctcagtgttctgctccgttaataacacatcttagatttgcggatgacgttttagttttcttcaatgggtctttaaattcaattgatgggattctgaatattcttgaggagtttaaacaagggtctggattgggaataaacaggtccaaaactactctggttttggatggtggagactttagcaggtcttcctctatttcggctacttttggtattaagcaaggttctctaccggtcagatatttaggagtcctctaatggctcagaagatgaagaaacatgattatcagccacttttggatagaatcaaatataagttctctacgtggactgctaggcatttatctttcgccggcagattacagttgctgaagtctgtaatttatcaaccattaatttttgg

SEQ ID NO: 556 - DNA, 659 bp, Arabidopsis thaliana
tcgcggaattctctgcgagaaggaggtaacatgatgtgtttaatctccacaacatcaggatgacgaagcaaccgaagcaatttgatctctctgagaatcctagtagcatcggagacatgctcaaacacatcgttgatcttcttgatcgcaactctctctccagtgtgtgagtcaacagcagaaagccacaacaccataacttcctttgccaacaacctcttgaatctgatacctgttagcttctccatactccgtgaagaattcagtttcaccctgaagaattttattcatgattcatacttaaaattgaccaaaatgatggatcaagacaataagatcaatcaaacgaaacacaaaactgaaactttatccttttgtggaagcaaatgcaataacacagaacattaagagaacaaaacaagtctcttcaatctcaatcaaaagacaacatctaagagcaaatagcataaaagggtagagaaggagaagaagaaaggtaccttcttgtgaggatccataggtaaatgattacgtttaggaacgttaataagcggtagaccagagaaatcgagatcttcttcaataataagctctccagagttagcggaatgattggggttagaggaagaagagaaagaagaagaattggaaatggggtt

SEQ ID NO: 557 - DNA, 768 bp, Arabidopsis thaliana
gttctcttttcatctcctactactaaattaggcaaccgcgtttgaacatccatctcaaaaccgtaacctttgtaaacgcttaagcatttagcaacacaagcggcttctcttatcaaggaatgtagctggaaccgtttaacctctaatgcagatttcccgttatctttaggcgaaatgtcaatcacgtcgttgattaaagctgagagaactgtgcttgttttcatgagcgcatcaacgatgattttctggtcaagactcatactttcggactgaaacatggagagtagaccaagaattgtgtgcattggtctcctcattccatgactcatcactttctggcaagtgttcctcgcttgacttgccatcatcgcgttctgttttgctcgaagtaaagctcggttttgaataccgagtttttctctcattaactgtgattcttcaagaactgaggcatgagagatagcaaccgctacttgatcagcaacaacttccgctatctcgatctctttatcggtccaaacccgtgaattcgcactcggaagtaccaaaaccattatagcataaggagtatccacaaactcgggagtgcctcctttgaaattcaatccgtgaagcatcggcatccgaattgcagcaaccggtccaaactcttccgaaccgccacaaccactgctctcaaccgcaagaacagagtttttcctcaaaattgtcactactttggtctcctaacctgaacaacatcgggatcattaatcgggattacctgaa

SEQ ID NO: 558 - DNA, 663 bp, Arabidopsis thaliana
tgatggagaatggagctttctttgtggcctctggtgaaggaatgagctcaatgtactctaaagcttctagtgttgaccctaaagctgcttctctcgtagaccagctcactcgaaacgctggcgtttttggcggtcccaggtactatttctttttccctttttacccttctttattttctaattagatttttatttaaccaatttaaaagtatactcccttattagaaaaatcttttaaaaactgaagcatgatctctcatttcggtgtttaatgtataataaaattagctgtgaaagcgcgtgattagagcgcatgatttgttattgtcgttattcgttaagtcaagaacagataacaaccgtactattttactattttagttgtgtttagtcttttactttggagtctagttaacttgtgattagaaaaagaaaactctaaactgacgaatttgtaatttcttattggaaaataggataaataggttctttcttgtttgaggttcttaatcacattctatattcattcattcaattattcttgaaatggtgatatatagaagaggaactatggtaagtctgaataattagaatctgtataaacaattaaagtgacacattattggtttatttgaaaaagtagctcattgagaatatcagacg

SEQ ID NO: 559 - DNA, 592 bp, Arabidopsis thaliana columbia
tcgaccgacaggatcccccatctatatatacatcagggcaaaggcagattcgtaatgcaatgcacatttaccgtttcatggataacccgctgaatcctgtgatcaatcagtgccaatgctattggattgtccttgtgagtttgcatttggaaataaacatggtgtctgaataatgtagactacaaagcttaagtagctctgctgaccgctgcttcaacgctgcatcacacccgctctggatcacgagtaacagctttgcagcaagaccaacctcaacagcaagtggtgaacattcttctggagctaatttgcagacagaccaaagaatcgacagcgcgtagttagtgcaattctcagacaccctcatcagcaccctaactgtataaggtattgtgtttgcagagtctttgacagcaactcttccttccacgtctgtacacaaagcatcaagaacaaacagagctaactccaaacattccgggtctaaagacggtaagatatcaactaattgaggcactgctccaatgctaaccatcaagcttcgaacttgtttatgaactgaaatcggtttaagcaaccgaagtgcaggaga

SEQ ID NO: 560 - DNA, 360 bp, Arabidopsis thaliana columbia
ttttatatgctgtttgagatttgaaaacacttagatggaaagcaagattgtagagaataataactcggcacgagttcttagtcatgtatagacattgaagatagattgatagtgttggttgcttcagaatagtattgttctactacagtttgggctggatgtacggaacgtgttcgggatggaagcaaatagttagtggctgatagatccgtgagacaagtaagacgaaatttctgcgccggcacaggtgaatccgtcattgaagatcggaagttgaggaaataaagtgcagaagatggggttagcgatcacaatggaaatgaaaatggaagttcatcatccgaccttatggactgtttg

SEQ ID NO: 561 - DNA, 587 bp, Arabidopsis thaliana columbia
tgcgaaggtgcatttatgcgcacattgagacaacgagacttaatggcttcggtaaccttcgaagagctgttgcagcataagatgagacggcaagatgagctgtatttctccattgttctccgcagagaatgttgagcttctcgtgagagcttgtcaacctcatttaataccaacactgccgaaacaaaaaaaaaaaatctgcatgtatcagacatcttccaacatccatatgtgaaaagaagttgaactactttggcaggtcataaagggatgttagagaccagtgataagttgataatcaaaaacagagaaccatctaaatgtataaagaagcactcagctgaacaagaactcttaaaactagatatacgaggcaaccatctaattgaacatgaaaaagtaaacgaaaactatattacgaaccataaaatgtagacccagtctaccacagcagtatacggattgaagatggcatcaaatgcccttataaaagcctcactcttcatagatgcttcaaataactactataagccattgtaatccaaattgtctacctaatgatactattatatagacaaggggacagg

SEQ ID NO: 562 - DNA, 495 bp, Arabidopsis thaliana
tgccttaattttgtgatgggtttggattttaatgtggagatgcagtgagtggtgccattgacaatttggtgagtgtaataggtactactcaatgtatggtcatgtggagaaattagctcaagagattaggaaaggtgctgcttctgttgatggtgttgaagccatactctggcaggtcagtgcttggtttactgctctttattgagctttcttactcattgtcaattttcatcagcacatctgattctaggatacaatgagagacagtttcaagtgactagatttctttgaaaatttaggtgttgaagttaaaaacttgttcttgtatctgaaagatagggaattacatttctagagttttctgttttacatggaatatcttttagctgccaccattcttatgctattttagtgattcaacactactgacggatgatgactacttattataggctagaacttttggaacaatgagaggcatttacgttaacctgc

SEQ ID NO: 563 - DNA, 569 bp, Arabidopsis thaliana columbia
gcatctattcccaaacacgtttttctttaacataaccaagatgtaagagtttaggttagacaaaactaaaagataataagagttgaatcaacaaaccttccaaaaagaatagctgccaaagcagtagttcctgaagcaaggctcccatccaatgaacacgcctctaagaaggcagtgtctgtttgaagaaatgctgaagataacaccttattgatttcactaggaaactcttgatcttcaacaatgtacctcggtatatggtgacatgcaaactcagcggcatgcttcccaccatgtccatcaaatacctaataacaaacaaaattcaataagagatccccatattttcactacattcacagttgtttgcttatgctacaaatctacaaaaaatcaggaaaactgaagaaagaacataccccatagaaggcacttggaccagcctcagaattcagaaggccaaagctatccatgaaattatcaacgcatagataagcatcttccatgcttgacctggagccaatatcagaccaagctccagaacgcgtcgaggaacaaactcagacttg

SEQ ID NO: 564 - DNA, 591 bp, Arabidopsis thaliana columbia
cagaatctatagtttcatttgattatataaaagccttatattaaaatgttaacaatttccattaaaatctttaaaaagatttgtagtgtaattattatggatcgaaaatatgagtatcaagtaaatgatatatttatgtatcgttaatacgagtaaacatagtacttaacaagaacatgttgttccggtctgttcatcatattgtggctaggttcagcaactccacgagcactccgattcatcgatttttctattctccttcccttcttcgtcgtcgttcgtcttttaatgcttctttgatatctcgttgttgttcttctgtgagcgatgttgatgtggctcgagacgcggtggtgaagatcttctccttttctagagagccaaatgttgttcaaccttggcaaacaactgagaaagaatactcaagctctggtattcataaacatctctctttctctctctctcgtgtgatttctttattagacttccaaattttaaaaaatcgtatggtattgttcggctttggaatatctatgttaggatttgcaatctcccgggagaggattcttacaaacgctcatgttgtgggtg

SEQ ID NO: 565 - DNA, 765 bp, Arabidopsis thaliana
gtgttcgataagtactctgtctcaaagagggagcttctcaagagctgttgggacaaagagtggctgcttatgcacgaaacgcgttcttctatgttttcaagactgtccagatcgtcatcattgctgcaatcacgtctacactcttcctgagaaccgaaatgaacacaagaaacgagggtgatgctaatctctacataggagcattgctatttggaatgatcatcaacatgtttaatgggtttgcggagatggctatgatggtttcaagactccctgtgttctacaaacagagggatctcttgttttatccatcctggaccttctcacttcccactttcttgcttgggattccaagctcaatattagaatcgacggcttggatggtggtgacttattactccattggttttgcacctgacgccagccgcttcttcaagcagtttcttctggtgtttctgattcaacaaatggctgcatccctctttaggttgattgcttctgtgtgcagaaccatgatgattgctaatactggtggtgctctcactctacttcttgtgttcttgctcggaggcttccttcttccgaaaggcaagattcctgactggtggggttgggcttactgggtatctcctctcacctatgctttcaacggtctagtagtcaatgaaatgtttgctcccagatggatgaacaaaatggtaagtggcttacttctttattctgcattttacaaacaaatatcatagtaaagccgactctgagtca

SEQ ID NO: 566 - DNA, 516 bp, Arabidopsis thaliana columbia
gtatgttaccttcatcgtttttaatgtcaatctttatcatcaagatctacattgtactagtgtatctttagatgaggaagtagatttattgttgatcaatgtcaagtaaatcttcgttgatgtcattgcagtgctcttttgcaaggcatatgtctggacagggatttgagacttggattctcgaggttcgtggagctggattgagtacacgagtatctgatcttaaggacgttgaggaatctgctcatgaattgtcgaatcagatagaatctactgctagagctgctgcaggtaaagaaacttgttctgatgaaaagcagactactgatattatggacagtagtgcacctgcaccagcgtcggatgtttcagttgttggcgaacgatcggcttgggacgagtcacagcttgtggcgagattgacatcaactttcatgagtttgtcagaaagactttctggctttctcagtgaaggtcagtctgtgttcatgtctgctaagttgtttgcaaaattgc

SEQ ID NO: 567 - DNA, 555 bp, Arabidopsis thaliana
gtaaaaatgattttattttacagctaatagccttgataataaaaaataaaagtaagtcaaaaatccaaaaatagaaagaaaaagagtgaagagtgttgttgttgttgtgtacacaaatgcaaaactcttcgttgcaaacactaaacagtcactgtgtgacttctttgctttaattgtctctctatctctctctcttaacacagagaaacccgaggcgtcacacttaaaactcttgagatttttatctctctctttcttattcccaaagccaaatcaaaattcacgttttagaaaaaaatattttcatcggaatctgaaattcgacgtgactagtttattttgatcttctcgtttaatttgttcatcgtctgtgagacaaaaatgggtgcaatgctaaatcttttgctcgtcgttactgtcattctctgttcaatcttatcacccacacgtaagtcttttagactctttttgttattcttatcacaaaacgaatctttgaaaattgttttgtagggtttatgattatgattgataaaatggttgcagatggatacg

SEQ ID NO: 568 - DNA, 630 bp, Arabidopsis thaliana
tcatgtaatatacagatacagtctactcactaattcttggtcttctggtatgaagatgaactctccgaggtgtttgtttggatccgcgagccttggagagattgctatattcgctggtggatgtgattcccagggaaagattcttgattttgcggaaatgtataattctgagcttcaaacttggataactcttccaaggatgaacaaaccgaggaagatgtgttcgggagtttttatggacgggaagttctatgtaattggaggaatcggtggtgctgattctaaaggcttgacctgcggtgaagaatatgatttggagaccaagaaatggactcaaatccctgacttgtcgcctccaagaagccgtgctgatcaagctgatatgtcaccagcagcggaacaccgcctcttgttgcggttgtgaataccaattatacgctgctgatcacgccgatatggaagtgaggaagtacgataaggagaataagaagtggttaactgttggaagattgcctgaaagagctggctcggtaaacggatggggacttgcttttagagcttgtggagagcggttaattgttattggtggacgaagtgctcaggaggtggttcatagagctaaatcttgga

SEQ ID NO: 569 - DNA, 575 bp, Arabidopsis thaliana columbia
aactagaattggtggaattcttaagaagaaatcatccaaaagcaaattcagacattccctgaagaggagagggagcagaagcattgaccggactctttcgcttacctttgaagacatacatgatgctgaagaattaagatatgtctctgaattccgacaatcacttatctctgatcatttactgcctccaaaccttgatgattatcacatcatgttgaggtcaatgtttataacaatcttgtgtactaattccatgtcttatgttttggagatcattcatatgtttcatcacatgctcaagtattattcgatatgaagtagagagagaacattgtttgtttcatgatttttcttctttatgcagattcctcttcgctaggaaatttgatctaggaaaagcaaagttaatgtggactaacatgatccaatggagaagggattttggcacagacacaatcttggaggtatacagttagttactttcgtgtgttgtgaaaatattatttgttacaacggccttagagagttgctgactgagttctcactccaggactttgagttcctgagttggatga

SEQ ID NO: 570 - DNA, 575 bp, Arabidopsis thaliana columbia
  unsure (1)..(575): unsure at all n locations
aatttaccctaactctgtaatgcaccaggtagctagagaactaaagactatatctataccttgtaaacttctccaaatccaccttgacctagcttgttagtctttgcaaaattttcagttgcaacttcaattgtcttaaaatcgagttgttggaagtgtagagtcgtaataccagctgcaaaatcaaaggatacactcttatattactaagaactttgaatcatctgctagtctaatcaatattcttagttcaatagactatatatatactaaaagcaaagaatttcccccttaacaacactcacactggtcaagatgaatttcttgataagattttctcctcagggcaaataggcgagacagaacaagaagtaccaagaagatgatagcgaccactataatgggagaaacaattgcaggaatagttntcgttgaaaagtttccgctatgtaaaaagtagaaaatgaaaagcataagatataagttttgaatgattttgacaggttgttgtgaattactgataaattttgcaaagaattgaggtttcttgattaatgaaggtggaggttgtgaaa

SEQ ID NO: 571 - DNA, 571 bp, Arabidopsis thaliana columbia
ttcagttaaaaagaaaattttagatacctctgcttcgagcttattgggaatagtctcgaatgcgattaggtcggctccagattttgctaagatttgaactcttcttctatggaaatcctttaaggtctccttactcacagaatctccatatatcccactgcagaacaattatgaggaataaaattaaatttctttaactgaccaaaacttttgttatgactatgatttttccaattttatacacaaatgtaacagacaaaaatgactaggatcgatcaaagaacctgtattcggagccgtcagcgagataagcgtcatagctaccaacggaagctgcgacaagaattgggctccgggaagcttttccagcgtaggcgaaatcccatgaacccttggtgcatctgttgtagaaaatctcacgtgcctcgtacgtgatttcaacgctccttctaagtaaattttctgcttcgtccaccgatagaccttttgccacaaaaccttgtatcgtcgcctgtataataaattaatttgtttaaggccttgatgcattttgaaactaatttcgtttttt

SEQ ID NO: 572 - DNA, 589 bp, Arabidopsis thaliana
tccatcaatctttaactttctgccatcagctactgaaacccgagccaaccctgaattctgaatctgacaacccaatttatctgccaccctggaatcaatgaagttgtgagtagaccccgaatcaaccaaaatgaacaacgtcttcttaccataagtacccttaacacgcatagtcctgtatcctgcaattccagacactgcattgactgaaatctgaggcatgattttgtcatcttcaccatgaatctcatccaacgcatcctcgaattcatcttccacatccatacaaaaaagttgctgcttcttatgtgacaagtagtgttccggagtaaatttctcatcacacaaatagcacaaacccttagctcgtctctcactcatctcctgctgagagagccgtcttgtgttacctgccttgaaatctggtttggagtagtgattctccttgttactgtgactctccatcttagaattttattccctgccagctttcgtgtgtcccacagtcttaggttgccacggtgttgaataaggcttcctagggtgtgccttctcatacaacttccccaaacgaaaacaatggcgcacg

SEQ ID NO: 573 - DNA, 567 bp, Arabidopsis thaliana
gacattagtggcgacccagttatcagcagcggcttgatcagcacctattgagatgatctggttgttagggaccatgatggtgacgtaaagattggtcgtagagaggagctttagggtttctggatcggcgtcatagagcttgacgtggcctgctttaatggttttgatgaggttgattgattggtaaggaaaaggaagaattgttgcctaattttccatagttgatcccaattctgcttgcaagtgctaacactgttctgttgttttgtggaccaatggcagagcaacatgaacctataaaaaaacataagtgagttataaaaagaaagattatggtttaagtaatcttaatgtatatataaggagacttacttgaaagggcaaggagagtgaagaggaacagagcaaaaggagtcattgttttttgtttttgttggagaaaaatgttgagaagagagagtggtgagtgtgatttgggataaaggagaagagagcttgttgaggagtatttaagaagagattaaggaagtgtgtttaaggagtagtataatatcgttcatgcaagaa

SEQ ID NO: 574 - DNA, 627 bp, Arabidopsis thaliana
tatttcataattattcactgaggctaattacgtatgtcatcaagagaacactgcctgaaaatatttcactttgttgaagtccaacgcaaaagctttagccaaaaccttgggatcaatcaaaggtttcgatccgaaaaccgcattacctattatgatcctaccggggttttggctcccagttgcagcaatcacaaccgcatttgtctttccaatattcgcatgaaattgtatcaaacctttgggaaacacaaatacatctcccggataaagaactttggtgaagagcgtgtagttgtattcgttcgacgacacaaatccaacgaaaagcttgcccttcatgactaagaagatctcgctgccacgtgggtgggtgtgaggtgggtatagaccgcccggggcgaagtcaatgcgggcaatgtcgaccccaagagtgttgagaccaggcattcttttgacatccacgacggtgattttgacgcccggaccggtgctggtatttccgggaacgtttaggccggaagtgtaaaaatcattcgccgttacacattttggatctttgcagaactttccatttacataaactgtgtaaaacgtcaaattaaatgttttgaggtttgaattatttaa

SEQ ID NO: 575 - DNA, 529 bp, Arabidopsis thaliana columbia
ctttatatgtcaatgaacaagcaccaggagataaaccagaggaatttgtcttgttaagattccaaagcttgagagagttatcagtggaagcagaaacaatggtttctgaatccataaatttaacataactcaccgctttctcatgaccagccaatgtgcaccaaggtgttttgacataccgaagtcatagcaatagaccttgtaatcagctgacccaaatgccaataagtgattggaataagaagagaattgcacgcaacacacatttgctggactccagattgtgcctaatgaacgtttctgcataccaaacagagaagaatataagtttcactagatttggaaattcacaagtataaacagagaatcatgccttatggagctataatctggagtaataaaaacaacggggacatgaaaattcttgcaatatcaggaggtaaaggaaagagaagtgcctcattgatgctccaaagcttcaccgagcagtcatcacttccactaacaaattttgtcgggtcagatggag

SEQ ID NO: 576 - DNA, 836 bp, Arabidopsis thaliana
ctaaaggttcctgactgatgaagaagaattcttatcttttaagctgcctggccattgccgtctccagtgcctgtcatgctgaagtattaacctacccggatccgctgggttcgtcgcaatcagactttggcggcacaggattgttgcagatgccaaatgcgcgcatcgcaccggaaggtgaattcagcgtcaactaccgggataacgatcaataccggttctactccacctccgtggcgctgttcccatggctggaaggcaccattcgttatacggatgtgcgcacacgcaaatatagccagtgggaagatttcagcggcgatcagtcatacaaagacaaatcattcgattttaaacttcgcctgtgggaagaaggttactggctaccgcaagtggcgtttggtaaacgtgatattgctggtacgggtctgtttgacggtgagtatctggtggccagcaagcaagcggggccatttgatttcaccctcgggatggcatggggctacgcggtaatgcgggcaatattaccaacccgttttgccgggtgagcgataaatattgtcatcgcgcagagtctcacgatgcgggcgatatcagctttagcgatatctttcgtggcccggcttccatctttggcggcattgagtatcaaacgccgtggaatcccctgcgtctgaaactcgaatacgatggaaacaattaccagaatgatttcgctggcaaactgcctcaggcaagccatttcaacgtcggcgcagtttatcgcgctgccagctgggcagatctcaacctgagttatgaacgcggtaacacgttgatgtttggcttcacgttac

SEQ ID NO: 577 - DNA, 831 bp, Arabidopsis thaliana
ttaactctaaaaaggggaaacgtatatgcaaacacaaactcaaatgattcggtcaaataagtttcagacgttaataaataacaagtaaaagcacgaacgtcccacaattttaaatcttcttgtattggaccttgattttccgtgtaaacttgatcaacctattaactattatctagagtagatttattttacttgtaaactaaaatcaaatgtttttggacgactccgtggttatatatcgcatgcatgtttctcatgcagcatcgcttaatccacaaaaaggggggaaaaaaacacacgaacatttctgtttgagagaaaaaaattaatggaaggtcttttgcagtttctattagccaaaatcattttgttggctttacatcttcgtttgtatattgttacgacccatctcctcttcaagactactgtgttgccaccaacgaaactaatggaggtaatctccctatgtgttgcacgtacatggctcctttgatattcttcaatctgggtattatgccaaaaatcatattgacataattatatcattcaaacctcaaaagatttgatttgacgttttacgcagtttatgtaaatggagagttctgcaaagatccaaaacgtgtaacaaccaatgatttttatacttccggcctaaacgtccccggaaacaccatcatcgggcccggcgctagaaacaccgtcgtggatgtcgaaagactgcctggtctcaacactcttggggtcgacattgcgcgctatgactttgccacgggggtctagacccactcacacacacccgcgtggcagctagatcttcttagtcatgaaggg

SEQ ID NO: 578 - DNA, 526 bp, Arabidopsis thaliana columbia
gatggcccggactgcccagactccctcaacacccaccgccgaagagaaagataaaccctagaagacgacgacgacgctcggcgaagaagacggagcttcgtattaatgacacaaaatcttataatgatgaaccgaaaagcgtgttattgacgctgttaccatgaagggcatatttgtcattccgttaaaattattaatccgcttaacgctatgggcttttgttttacaaccggcccaaaatgttcaattacaaagtgctcaaaactcagaatctcatactttggggactcaaaagcaaaatcttataaacttctgtacatcaactaaaacccaaaaacaataaaaacagagtaacaactttctctagtctacgctttttgtccagactctctctcaaccaataaaaccaacccacgtggctgctgacttttaaaaactttttaatcactagccgtccctcatctctcgagccacatcgaacgatccagattttctactacttttaattctcaacaacccatacaac

SEQ ID NO: 579 - DNA, 554 bp, Arabidopsis thaliana
tttttctttaaaaatctccttagcgagtttacatggattggttgatatttccatttgcattttcagccaattagtctctcgttactgattattttagtgaacttcaggtgcttcaatctgtggttccgataagcgatgacgaggtagttcttggacaatacgaaggatatagggatgatgatactgttccaaacgactcaaacactccaacatttgccacaacaatccttcgcatacacaacgaaagatgggaaggtaccatgtcccacttcactcttcatattttcatctatcagttcagaaacaatctggaaattgacataaaatatgaagattcaacagaggtttgatgggtcgacatgatcatagatagcatcaatcttttggttaaagcatgtggaaccacaatccgacatgtttgcatgcacattctaacggtcctggatatatctttcaggtgttccatttatattaaaggccggaaaagcgttgaattcaaggaaggcagaaattcgcattcaattcaaggatgcctaggcgacatattcagatgt

SEQ ID NO: 580 - DNA, 562 bp, Arabidopsis thaliana
ctactaagaaatgtctgcacgatcaagcatatcaatcaaagtcattttccttggaaacctaggaggaagcctcaagatcatagcatcttcaatgtctatcggaagatgagtcgcgacaatcacaatccctccttttttcctatgctctgcgataatatactcgagcaatctaacaccttcatcatccaaagcaacggatggttcatccaaaagccatatcggtctatcgatagcgaggagcctcgcaagttgcaatcttttcctctgacccatcgataacattctcgatttctctttcaccagtctccctaaccccattagctccaacgcgggttgagctttgccgattttattctcgagaagctcaaaccattggacattatcgagtactgtgaatctctctttgatggcgtcttttaaagagatccagttgagttggagtttgtattgttgaaagattcctgactgtgtgatgtcgtgaccattccaaaggatttctcctgcagagggttttgagaaccagctaacattctcaagaaagttgatttaccggatccgtttg

SEQ ID NO: 581 - DNA, 628 bp, Arabidopsis thaliana
caaactcttcttacatcgcaaaggagtgcacgctccttggtcagttagattttgcaacataggtggtgagaaacgattttctaaagtcaactgatttgggtatcgatataattaatacatacatttatgtgtgtatgttgtaaatgatcattaagtatgaaactatgaatgatgaaactatgattagggtttataatatatagtatgaatgggttaaagcttgtggttgactaattttaatatcataaaatgaagattgaggaagaaaagtgaatatttattaaagtaccagaaactcgatggaggcggagatgaggaaaatgacgaatgtggagaagaaggcgtcacgaaggaagccgaccgaggagagcgagaaggaaggctgtggccatgaaagtggtcacttcactcgacgatctggctagagacatgtgcatgaagttcttgagatacaacaccaagttgcttgcgttcgctaaaaacgctagattctccaatatcgtccacgcttgaaaacacatgcacatacacaagaaaaagcaaaataaaagaaatcaatcacatgattccaaaagattaatcgagactagagaagtaaggaaaaggggtaatttggaattttgagctg

SEQ ID NO: 582 - DNA, 911 bp, Arabidopsis thaliana
tcataaagatggaagtagtgaagccatttcctctgaaactgagtcctttggaaggaaaaagagtgtttttggctgcagctactttgaggcctgagaccatgtatggacaaacaaacgcttgggtactacctgatgggaaatatggagcttatgaaatcagtgaaactgatgtcttcatccttactgagagatctgcactcaaccgtgcctaccagaacttctcaaagaaccctaagaaaccatcttgcttggtcgagttgaccggttatgatctgattggactccctctgaagtctcctctgtcagtgaacgagatcatctatgctcatgcccatgtcaacgatgtctaaccaacaaaggtactggtatcgtcaccaacgtacggcgaatcagaatggcggaaaatggctgaagaatgcttatcaaaaatgaatctctactctgaggaaacaaggcatggctttgagcacactttgagctggctcattcagtgggcttgctcacggtcttttggtctaggaactcgtattccttgggataatgaacggttccttgtggaatccttatctgattcatctctttatatggcctattatacagttgcccatatctttcacgacggagacatgtataaaggaagcaagtctttgatccgtcctcagcagatgaatgatgaagtttgggagtatctcttctgtgatggtccgtatccaaaatcaactgatattccatcagctgttttaagtaagatgaagcaggaatttgactactggtacccgctagatcttcgagtttccggaaaggatcttattcagaatcatttgacatttttcatctataaccacactgcactaatggagaagcgtaactggccacggtttatcagatgtaatggcacattatgctcaatt

SEQ ID NO: 583 - DNA, 454 bp, Arabidopsis thaliana
atctggactaaataaaagcacaaatacttcagctacaaaactatcgtcattctgcacgacgagagctataacattgacagaatcaaatcgtggatcaggtcgcaggtcccctctagactctgcatgaacctataagtttatagatattaacatgtatcaatgaaccttttcgcagaagacatcatcttaaattaagaaagttcatttgtactacagagggccgtttggtaacagcattaacaaaatataatatactaagacgagcttgtaaaggtcaaaactcattttaacgagctgcacgttttgacttcctaagtccactgtttgtaaaccattccaagtgtccattactaatctatacgtgcaaaggccatttgaggactcttagtaattgaagctgtagcttcacaaagacgagggttaagttaaagcacctctatactcagaattgtaa

SEQ ID NO: 584 - DNA, 583 bp, Arabidopsis thaliana
tctcttgaagaaccttgtcgtgagactcagagagattgttaagcttatcaagcaactgatgattctcgatccttaaccacatcacttgtgaccaaagctcgtcaaggtgtctttgcttcctcatacgcgatctccttgcggattctcggtttgaaatcatccttctctgcttccgctcgttgattatattgttgttcgtctgctgctcttctgcttcatctgatgttgagttgttgctgcttaggctcatggattgtggattgtttgtagggctttggaatccgtagaggaggtacgggttttgaccgttggttggaaatggcgtagatatcgggaaattagaaggatacggagactgcagtatcgatgagtttaggtagttatggaggctgaaaacgtctgtttgcggctgcattttgaagtttacttgggaagaaagttaggttttttttttattacttgatgaaaacaaatgtaggtcaagatattaaaaaaaaaagttttgtaagttctgatggagtttttggtgtgtgaagagagaagatggattttatagagagtgagagcagaggttggggaatgg

SEQ ID NO: 585 - DNA, 892 bp, Arabidopsis thaliana
ctctgtttgtgattgattataatctagcaagcatgagatgtaactaacttcagggttatgaaattttcaggagtgaacagaacaggacagcaagaaggaagctaggattcttctcatgtggaactggtaatccaattgatgactgttggcgttgtgaccgtaactggcacaagaaccgtaaacgccttgcggattgtggcattggttttggaagaaacgcaattggtggtcgtgatggacgcttctacattgttactgacccgactgatgaggacgttgttaatcccaaacctggtactctacgccatgctgtcatccaggaggagcctctgtggattgtgttcaaaagggatatggtgatagagctgaaacaggagctgatcatgaatagtttcaagaccattgatgcccgtggctccaacgtccatatagccaatggtgcttgcatcaccatccaagtttatcaccaatgtcatcattcatggtcttcacattcatgattgcaagcctactggaaatgcaatggttagaagctcgccatctcactttggttggaggacaatggctgatggtgatgctgtctctatttttggatcatctcatatctggattgatcataactctctctctcactgtgctgatggccttgtcgatgctgtcatgggttctactgctattaccgtttccaataaccactttacccaccacaatgaggtctcaattgttctctgccctcctccaaaccactaacctatttgctgattctgttttcataacactgtatgttcgtatgtttgcaggtgatgttgcttgggcatagtgactcgtacacaaaggacaagctgatgcaagtaccattgcttacaccattttggagaaggactggtcagag

SEQ ID NO: 586 - DNA, 1590 bp, Arabidopsis thaliana
catatgtctcaacatcgaagaacacatcgtccacctgaaaaccaagcaaatcatttgcctctcactcatgaaaccgaagcgatattcaagttaagaattacattctgattgttaccttacgatcgacgaaaaggagaagcttgaaaggaacgtcgtggaatttttcgtataatggagcaagcacggttcgaacgcaatcttcaatgttctcgacgccgagtttgagtggaccagcgttgtctttagccaactcgtagagggtcgagaaacaggcggcgaagtaaaccgccgcgacttgaatgaattccaagtgcttgagcttcatctcatcgtcgtcttccaccactaacgaaggcgaagacgaagaagatggtggaactggagtaatctcctgtggctgtgattgctcttcttcgactactatttcatcttcagccattgtcaaagacttggtgccgttgcagacaaacgaaccgctctctctctctttaaaaagacttatatcacaccggacggctcagatttgaaactggtgagccacgtggcatgttgctgccatgctccattttagttttaatttaagcgaaagggattggattgtgagagacgagtgacctctaggacagctgtcctattgacagatgtcttactcttaatggaccgttttcaacacgtgtcgaggtatgggtcgagactgttgcacgaaagccacggccactccgtcggcacgagtctcgagggtaaatcaaaaaagcacaaggacctctcgttcgctatcattcatccactttttgtatattccctccaaaccttacatgatatcatcacgtgttaaaatggattgggccctaatcctcgagttcctatattaatttccggtttaccactgactgagaagcccacaaaacagtgtcaacggcccaacccaaaactgatcacagtatagttggctttaccgtttgactttgttccgtttcggcgacatacaagtaaaacgatcgccttttaagaatctcacagtttgatttcagaccaacgcttaacacttctacaatatcacattatttctcaagtatatcatgttcatgtctattactccacaatgaccagaccattggatcgcaaagacatctttcatggtatatatcacacaacacaaaaacaacaagacacactcatatgactcagactctacaaacatcatcgtatagcgtttacagatctcacgcgactgcaagctttacattaacagcggctacaaaggcagcccaagccaaacacggctttaccagattaccagcgaccggacttatctcattaaaggccttgtagcatccgaataacgcagccgattgacccaaccacaccgcaagccccgctactcccgacccgacgcggaacgtaaccggatcccaaaccaaacagagcaaaaactgagctaagtaaagatacagagcattgggcttcttgtggaagccaccgtcaacccatacaagccacgcagccaaacccatcagaccactagaagcgagacacgttgtgtgtaggagccacagaggtgggatccacgacgaggacttagcatggacg

SEQ ID NO: 587 - DNA, 572 bp, Arabidopsis thaliana columbia
aactacgcttaccacaaggttaaggtggataggtgtacactcactaggaacattcgacccttcaatcaaattttgggtaacatctttcgaagtagagtatctgcacaccaaattcaaattcccccaaaaaataattagacctcgctaaagagaacaacacaaatttccacctttttctgacaaagtggtatcaatgttgtcaagcaatcggaccaattagacccagatgataaagtgttgttcttaattcaacttcctcgggaaccacgaaataagaaggattgagaaagaacctggtgacggtggagaggtgatgacgaacatcgaaaccctgatctgcctgggaaacaacaaatagacacaacagtatgatccaaacagtcttcgtcgccatctctcacgctttctaaattccttcaggaggaagctttcaagtttccgattaatcaagccacaagccactgttccactgcttcgattcacacgagtttgctcctttcacgccacgtgttgacccttcacacgtcttttggtttaagtcttttggatctcaagatttttgtaattttttg

SEQ ID NO: 588 - DNA, 952 bp, Arabidopsis thaliana
tttctccggattctccaaaagccctaaaaatcaaaatttgaaaaaaaaacgaacctcacggcgagagagctcagctttccaggcagcttctcgctcagcgacttcacgctcacgctcttctatataactctgcatctctctctccttcatgatccgatcttgtatatcagcgtcaagtgcttgcttaagctcctccacaaacttatccaccactaatttaattctcagcgacatcgtcttcgaagcaaattctaactatatacaaaatctcctccttcctcacactaaacgctgctacacataaatacaatctcctccttcttctggttttccgtcttttacttacggcggcgctttaccgacggcgagattccgatcttttctcgttgaagcttgcgtgagaactgaggaagaaagggacagagacattcacgaccttttgtttttttttccgctttctaatcttcttcagagtgggaaaaataaataaaagcgggctcttattgggcctatattgggcctgtacttaacataagtcacacgtgtggcagcggatttttggattacacatgttaaaaacttaaaattagggctttgtgtttcgcttcttctcaaaccctagaagatataattgagactggcttgcttagccgcggagaactcagaactcattcgctgcaaacatggttcgtaatcttcgtctctttctctaagtctcgtattcacaagcgtattgcgtcatgtgtttgttttggttttggatagtttgtctccatctgtgaattcattttgtgcgggattataaaatctctctttgtaatctagatagcatttccatgtaattatgggtaattgttaatgtttataaagtgaattcctttgtgcgatctgtaaaatgggttagggattgatattgagatctcaaagataggactcaattagtcagatatga

SEQ ID NO: 589 - DNA, 516 bp, Arabidopsis thaliana columbia
gatctgaatcggttaaatcaatcatcactgagcttgagattgagagagggacattaaaggtgagagctttgaagctcaaggaagattccgatgttttgacgacatgggtagagatgaactatttgaaattgacgtcgatggatatgggaagaattgaagaaatgttcgaaattgaatcggaagtggagggattggcgggagatgacgccattgaagatgtgttgagagtattggaagaagctgcggagagaggagagttggagattggttcgtatctaaagcaagtgagagtgttggctagagaacaattcttccttaagcatttatcatcgtttaaaactcagaattttcatatttgagtatgttgtgattttttttgtgtttttttcgtattgatggattgatttggttattaaaattcgtctaaagttgatgaaattgatggtttataagagaaaaatcatataacaaagttgtttaactgacatttatttggataagctatataaaaataag

SEQ ID NO: 590 - DNA, 484 bp, Arabidopsis thaliana
gatgtggtttatgtgcaggctgcttcagccaaagtaacggtagggtctcatgtctgggtggaggatccagatgatgcctggatagatggggaagtagaagaagttaacagtgaagaaatcacagttaactgctctggaaagacggtaagaaagtataaaacttgttagataatctgccgaaggagtatatgatttcttgatatggagacatttgttattgtggaaaacgtttagcttttgatcttctgagttctgtgaccatggaactagttccttaatggtcatgcattatctgagatttgtttatgacatgagcattgagaaaaaaagctctcgtttctgatgcatttgtttcttaggttgtggcaaagttaaataatgtctaccccaaggaccccgagttccctgaacttggagtagacgacatgacaaagcttgcatatttgcatgaaccaggggtcctgctcaatcttaagtgccgtta

SEQ ID NO: 591 - DNA, 549 bp, Arabidopsis thaliana columbia
  unsure (1)..(549): unsure at all n locations
ccctgatatcgtgttttatgatgagtttatgcattatctggaggagaagcaacgggcagctgtttctaaattggatgacacaacaacgttgtttctggtgcctccatctgatttctccgagaaagtacttaaagttcctgggaaactaagcatctctggagttattctacgtttagaatgtggtggttctggctccggtgggcctgttcaacagcaaggtgagagaaaagatacagacttgctaacttattatggtgaaacatcatattcagaagctagtggagcgtttcctgatgtgggaaaccacgtattccgggtccaacagcttttctgcgtagtgcgggtcgtgacaatcaaagtgcatcaatggatccatacgtcgaggacaagcatgatcagttgagtcaccggtattctggatcggactggccgcctcgtgggaagtacccccagaagttcacccttcatagatcatactgttcaaaanacacagcgggtttgttcctgggaaacagcaaaatgcagatctaagtcgttatcatgatacgg

SEQ ID NO: 592 - DNA, 447 bp, Arabidopsis thaliana columbia
gtcatcaaagggaacatgtacgaaaaatttcacaactcgcaaagagaaacataaagcaaatattaatttcgctgagactattccatacccttggccgcgcaacaggatgcggaatcctagaagatttgactgtttgcattgcttgctccacggctttagttcccccgataaaatttgggtgtgaggtgtttatataatccatctgcaaatggtaaacttaaatattttaaactaaatttaaaagaggcactaatcaataaaattgagagtaatcaattttcttgaacttagaacatggtcctactccaccagtgtgacaaaaaaaaaaatcagtacgcaatctaagtaaatttaataatactggccattagattcatgattgtgtggatcttaaattatccatacatacctccatttcaataagatctcggatcattgcctgcgaag

SEQ ID NO: 593 - DNA, 594 bp, Arabidopsis thaliana columbia
tgatccttcgtttgcgccactgaagctatgttacccaaagagtttggtttctaaagttcccttgttctagggtctacgtgcagattctggtgaagaaagtactggtgattcttccaaacatatacgcaaaacgcagcttcagtaagtacatggctcgtgcctttcacaacatcaagtttcaccattctcattcctgcaccctccgtatgggagctttcactcatggtgttaaatgagccactcgcgccactctcttgagtggctgggaaccttgagccacacacacacaccttattccatccttttttcttctcattggaactgaaaacgttttagagctcagaaacaaaaacataatgtaacatgaaggaaaacaatatgttaacatgaaaaaagcttttttgcttagtggagaaatcaaacattacatgccgtttttctgtcacaactcacaagacgtacacaacatgccggtttcgagttgttggttgtttagagaagacatgtctaacattgtattataactttaattgtgtgtatatacagatcaaagtatgcggttctaattatttaatcagtacataccatttttag

SEQ ID NO: 594 - DNA, 589 bp, Arabidopsis thaliana columbia
gatctgtgtcgtcttggcctgcaaccttcccaagcttctgctactgttttgtgcttacttattccaagatcgatttgccccctatcacctgcaatatcaatcaatggacccatattggaccagttatcaaaccaaaacgacgttcgaccaccatttcgaatatcaactttgcagaattgttttgctgtgtctcggtacttgaggagttttcgctacatccaagaaccgttatattgcatgttgagcgaccagaaagacttggttttgagaagataggtctctatccattttacccacaaggagtctccacgtgagacccatctccaaattaactttagacagctaacgtcatttgcctctttcagcgatcgtagaccaagccctccttctcgctttggtttacatattgcttcccagttaacctttgctcttttagagttcagctctgggccagaccagagaaacgctgaacatagcttgtctatctctctgatacattctcgaggaagcctgaaagctgcaatccaaaaattgcaaatactccaaatgacagaactgatcaagtttaggcgacctgcatatgagagat

SEQ ID NO: 595 - DNA, 562 bp, Arabidopsis thaliana columbia
aagcaactttcatactaatatattgcatattttcgtgcctctgtagtattaatatagcgtgggactaaatctattgaaaatagtggattggttgaaagaatgagttcttccactttgtgcatcttaaagtgttttcttatcacaagatttctttttcatccagcggagagagtggagcaggaaagactgagacaacaaagatagcgatgcaatacttggctgctcttggaggtggaagtgggatcgagtatgagatactaaagactaatcccatcttggaagcatttggaaatgcaaaaacattgagaaacgataattctagtcgttttgtaagcgtccaaactccttgtttactcttatttcttttactctgtgtctttaaaacttctgggtctttatttatctcttaatctttctctgatgttaaatttgacagggtaagttgatagaaattcattttagtgaaacagggaagatttcgggtgctcaaattcaaacatgtaagcataaaccttagtgctgcttcacacatttttttcaattttcctttacaaaatctaac

SEQ ID NO: 596 - DNA, 607 bp, Arabidopsis thaliana
  unsure (1)..(607): unsure at all n locations
gccagtgtgctctaaaggcgggcatcgcacattgcctatctcggcgcacgtctcgacgaacgtactatcatcaaacagaagggatacgaacaggcgatgctggatgcaggcctggtgccatatagcgtgatggttgagcaatcttcttcttactcttccggtattgaactgattcgccaggcgcggcgggaatatccgcagctggatggcgtgttctgtacgaatgatgacctggcggtcggcgcggcgtttgaatgtcagcgtctggggttaaaagttcctgacgatatggcgattgccggtttccacggtcatgacattggtcaggtgatggagccacgacttgcgagcgtgctgacgccgcgtgaganatgggcagtattggcgctgaacgcctgctggcgcgtattcgtggcgaatctgtgacaccgaaaatgttagatttaggtttcaccttgtcaccgggcggatctatttaagcccacaaatttgaagtagctcacacttatacacttaaggcatggatggatattgcttctgatattgtcggctggacaatgttaccgataacagttacccgtaacatttttaattcttgtattgtggg

SEQ ID NO: 597 - DNA, 948 bp, Arabidopsis thaliana
catccatcacacaacgaagcataatggcaaagtgtgaaatagattagctcctaatcaatgaaaaggaaattcaagaaaagaatgaattcatgcaaccaagaggattgaccaaaaatataatcatgaagaaaatgcaatgcaaacaaggaaaaggggaaattgtcacaatgtgaattagcaagttactatttttgtgttagaatgataactctataaattaggttgcttgtgttagagttcaatcatagatacagagaaatcccaacacaaagccgtactaacataataccaatgacgaccaaagagtgcggaaaccacggtggtggcggtggaggagcggaaccgcttgtagaatctgtggtgcaatcatcggcttcatcatcatcgtcttgatgacaatcttcctcgtttcgataatcctccaaccgacaaaaccaagattcatcctccaagacgccaccgtctacgcctttaatctctcgcagcctaacctcctcacctcaaactttcagatcacgatcgcttcacgtaaccgaaactcaagaatcggaatctactacgaccgtcttcacgtctacgctacttaccggaaccaacaaatcactctacgtacagcaattcctccgacgtaccaaggccataaagaagacaacgtttggtctcctttcgtttatggaaactccgtccctatcgctcctttcaacgccgtggctctcggcgacgagcagaatcgtgggtttgtcacgttgattatacgcgccgatggacgcgtgaggtggaaggtcgggactcttattacagggaagtatcatctccatgttcgttgtcaggcgttcataaatctggctgataaagctgccggagttcatgtcggcgaaaacgccgtcaagtacatgttgatcaataagtgcagtgtcaatgtttagtaggtaaaatgacacaactttg

SEQ ID NO: 598 - DNA, 1173 bp, Arabidopsis thaliana columbia
caggcgttcataaaccaggctgataaagcagccggagttcatgtcggcgaaaacaccgttaagtacacgttgatcaataagtgcagtgtcaatttttaggaggtaaaaggacacaactttgacgccgtcaatgtttgcttttactctttcttcttcttttcatttttcttctactcggataatgtttttgcttctatatcgtttaattttctacctttttctgctgatcatataacatacataaaatcaaaaaatttaatatgataaattcatgttaaaagaacttgccaaataaaaaccgatacagaattttcttgtaaaacattcttcaatcttttttatttatttttttaactttaaatttccacttaaattaaaataaagaggattacaaggttaaaaaccccaacatggccgcactgaaaaaagaaagataaattcttcaaatttatatttacgtaaaccttcaaatttaataaattttaaaaaaccagacataattatgttgagagcatcagcaacggtaatttctcaacttccgtttctcaatatatgtgtaaacataaataaaagtgtgaacacaaatattattaatatttaattgaaaagtattttaattaaaccaatgattgaatgacaactgtgagaaacgttgtcgataagtttctcttggtttctctaaagagaaactttcccttacctctctcctcctttggacatttcttttcttattttattggtgagagattttatgagaaactcccgttggagttggtctgacacaggcggccctaggttctagaacggtataacgagaaaccaacgtacgacgagagaccaaaaagtaatattaacatatacgatcttacaaaaagtactcattattggaagtttggggcaacatcacaagcctacaattgcataatattctttggtcaattattcaatcaaatcaccgcgtaacgtgaccttaccttaatctaataagttgaccaacgcataaatgaaagtgtatataaagatgacttacataaacctcttagccatatatccattcattccaatataattctccacaaaattactatcatggctgctgaacaacctctcaatggcgccttctacggtccgatcagtcccacaccagctcccaaaggctactaccgacgtggg

SEQ ID NO: 599 - DNA, 567 bp, Arabidopsis thaliana columbia
ttacttcagattccaaggtaatatcggagttgactccagatttagacatttcactgatctattccgatgtgtccgcgtggagacacttaggccaaagatgccaaagaataaattcagatatttagttggtctgttccgatttgtccatttgggaacacacgggtcaagagaattagaaaagagtcgtcctcaagaacataaagctcttcgcatggagaagacacatgggtcaggagaaccaacaaagagcacattcagatatatagctgatcttttccggtgtgttccgatggagacactaggttcgaaaagagaagaaaagagtcgtcttgaacgactcaaaactcatcgcatggaggagacgtcacatggtcatggctcaaaaaaaacaaaagagctaccgatcatcaaacacatgtataacgcggcaaagctacaaagtgcaggagtgaagttcaaggccgtgacagatgagttctcgatagatgtgacatttgagaatggttgtttgaagataccttgtttgtggggtcctgatgatgcagagatcacactgagaaatataat

SEQ ID NO: 600 - DNA, 1090 bp, Arabidopsis thaliana columbia
gataaaatgagcatgcacattctactttgatccgccatatgatgatttctagaaccaaacccaattccaaatctctccttgtttccagacgaagtgatacataaatcctagactacctaaagttctttactttgcctactttggaaagtctctccacataaagtttcaaaatttgcaaagcaaaacagtaacaaatgtaaaacgaaatcaatattttgcatttagtctcaaccaaaaacaggaagaagaagaagaacgaacgaaccgcaatgattaggcaccacatgaacattactgtcacgagatctaattgcttcaaaatcagcttcgatcttagcctccaaagcctcccactcacggatcgccttattcctctcttcctcctccttgggcttctctccatccgcacccaccgctacattcaaaacctccgacttaaccccatccgccgccgagggcataatactcggcgcctgacgagctctagttaaaggcccattatgtaccggagaaaaagaagcaagcatcgccttctcacgcgtcaacatcctcttcgacggcgcagaagagaagaaattagaacccccaagagcattcgctttccttttcaaacctccgctcgcgtcgccgtggcgccggcatcggctcagatgccggagaatctccagagctaccagcaaaagctagggttccagcagaatcgcgtcgtttttcctccatctctcaaaggtcacacacacactctctctctctctcagtgttctttgcaattgcagctacaaagaagagaccatttgcaaaacgttgctattcccaatcccccaatttcgcttctcttccccttcaccgtttttgcatttttaactctcttttctttttgggactggaatctgcaatgtgttggaaactcggtcacgcggcttgagtggttttgtccggtttaaatcaatcaatctcgaattagccttccggtttttaccggtttggtgttattgatgttgaattgaacaaaataaatcaaactaaatcgctctggtttctttcggtttcactataattttgtgattcttctgcttttaagaaatttaga

SEQ ID NO: 601 - DNA, 926 bp, Arabidopsis thaliana
gaaagtgaaattataactagctagttgaattgcttattatggttggaggggagccgatgaaaaattcttcgaccacacataaagtcacctttctaaagaacacttgcaccgaccacatcaatcacgcattcataaattttcaacatttatataaatgtaggaaaaaaacaaaatgaattatagagaatacaaaatgacagttaacaataaatatatcacaacataaattttatgtaagaaggttagcatgatttttaaaaatatattgttgtgattaaatggaaaataaaaatgtagaatacttgtttctttaaaagggtctttgttttgattacaatttttttttttaaagaatacctttaatattagggagaattattatagtttataatatgagaatacctttatttccctatcacactcctataaatcctacatataattagcccattatttagagccatcactaaaacaaaaaatctcttaacaacttctccaccttctccccaccaccaccactcaccgtcggagaaagaaaaaaaacaaccaccatgaaagactgtgaaaaccacggccactctcgccggaaactaataaggcgaatattttggtcaataatcttcgtcctcttcatcatcttcctaacaatcctcctcatttgggcaattctccaaccatcaaagccacgcttcatcctccaagacgccaccgtctacgccttcaacgtctccggcaatccaccgaacctcctcacctccaacttccaaatcactctctcttcccggaaccctaacaacaaaatcggcatttactacgaccggcttgacgtctacgctacttacctggagccaacaaatcactttcccaacatcaatccctcccacgtatcagggacacaaagatgtcgacatatggtcgccgtttgt

SEQ ID NO: 602 - DNA, 1547 bp, Arabidopsis thaliana
agaggatagaggatcccccagcggcaacaggttcattgtcttggttcctatgccatgtgtagtatgcgtgagttctattgtaaatctccaaaactgcatgaccaaaactagcttctctatacgccgaatagctcggttgcggatcagtaaaactgcaaaattagatcaaagccacaacaagatcttagtatcatatcaacaatatgacaacaaagcaatcaaataaaatgtttttcttttttacctatttgcgattccttcaatgtttcctccatctccgatagtgatgtagattggagcagaagggtctttcacaggatagctcaagccattggtgatgttgtatttaatattggagacacgttcggatctctcataggaatggacgtggacaggacaaaaccaaatcaagccttgcttgttaacgaaccacgactcaaacattgctctcatgctctcaccttccatgtaatggtagttattactgttgtaccacggcgagtgaaccatgacaataagccatggagtctcttctctgttcaccttcttcaactcttgctcgagccacacgtattgaggtgtgtattttcctgaaatatgaataacacgttattcaaaaaaaaaacaagaaacaataatcttaaagatgttacgtgtttactaattaccgtaggcagaataagaggagaggacgatgatgtgagcagatgcacgtctaatagagtaccaaagaggagatatgctcttcgaggccttgtaggcgttatgataacggtgaatgtagggcttgaaggcatgaggctccccctaattaagattcatatggttattaaagttgaaactactgatcagaaaaaaagcaataaattgagagaattataatgtgaacttacaatgtttgggacaaaatcaatttcgtgattcccggcagcatagatgaaggtttggtaagcagcacaaggctccacgaatcttccccacgaatcccactttctctgatcatggtttggatggtcatctgcgtaagataagtctccagcaaagagaacagcttggcctttagggtttgacatgtaatgatacaatgtctcattagaagcataagtctgtccaagatcacctacataacaaaatatataagaacaatttaaaatctcaaatatcatatataatttttgaaaggtctataaaacaaaaaaaatgtaccaatgatgccgaatgtgtatggaacatcgggtccgatctttggaggagtagtgaaggagaattgtctaacggatttatcggtaccaacctcatagatgtacttggtatcgtactgccatgtagataaaagtatagaaactttagaaaaatatttcttaaataaatgtgatgtgttaattaaataacaaatgtaaggtatagaaagtacaaacctcgagtcccttaattgtggcgtgatggagaaatcctgaactatagtcatagaatctgtaagatttagtggaggcatgagctctctttttcgctggctttacgtcactaccattagtagcgatccagta

SEQ ID NO: 603 - DNA, 1265 bp, Arabidopsis thaliana
taggttaatctgctaattagttgcgctaatttaagatttgcaccaattgcagttttttttctcaaaacagtaaaaaaaaacttctttgcagctctcagatttggtaaagttaccaacttcaaagaactcgaagagaccgtctctatagaaaaagctgaaatctttggcttcgttttcatcaattcgaaactcaaagttgtgaaaatccaaatgggtaatcattttttaacgttatctctgcttctcgtaacagtctgcgtttgcgtttctttcatcaccacgaagctaaaccctaaagaagcaatcgtatctgtctcttccgattctgagattcctactgaaattcatggtgtcaagatcttgcgtcaagcttcagataccaaacttgctcaattaggcgttgcctcttggcccaagtcagtaactttctcatatctctctgcttctttgctttaatggcgcagatacagaactagggcttagggttttcctcaatggctttacttgttagtgttgatccaacctgaggatttgtatcatcaattttacagaatctcaccactgttagctcaggacatttcctgctgcaagaatctgtttacatatacttgtgtctgagactctgaaacagacaagttcacttgtgtctgaatcatgtaatttttgtgttagtctctctacaaatgattgattcttaaattagacgaataaaccagagaaaaatgttatacattgcatttatggactgagttgtgatgtacattgagtaggtgggaaggtgctccaagcaagtttccatgggagtttaagaagacagagacaatatatttcatggaagggaaagtgaaagtgaatgtagacggatacgacgaagaagaagaaacctttgagatagggaaaggagatgttgttgttttccctaaagatatgaaagttgtttgggagataactgaagctgtgaagaagcaatatagcttagaggagtagtgactttgtagagagaatttgagtcacattgatgtttgtttgttgtacttggttactactttgaactaataatatctatggaattgcaatgttgattaggattctgattatagaagtaagaaaactatatattatatacaatttaattaggacccaacagctcaagtacatgactgttctaagagattcttcagccttcttagccttctcgctctcaccagaggaggtaacggctgcggagacagaagacgaagagacccttttccccttgagaacag

SEQ ID NO: 604 - DNA, 528 bp, Arabidopsis thaliana columbia
gttgctgtgggtgttggaacagcgtctggctatatatctccatggactggtcgattttactcgttgcttgacccgacttacgcaaaggatcatattcctattattgcatctgtttctgagcatcagcctactgcctggtcgtcattcatgtttgactaccatattctgctctttcttttccctgcgggtctttacttctgtttcaagcgtttgacggatgctacgatatttattgtcatgtatggtctcactagcttgtactttgctggtgttatggttcggcttattctcgtcgctactccagcagtttgtcttatcagtgccatagctgtctctgccactatcaagaatttaacttctctgttaaggacaaaacaaaaggtttctcagactggttccacgaaaggagctggtagttcaaaagcttcttcaaaggtgaatcttttagtgtccatttttttatattcgtttgtttacttgccacctactttgaactgtagcaagcttctctggagaaggagaaaattt

SEQ ID NO: 605 - DNA, 904 bp, Arabidopsis thaliana
aactgaacaggctgcaacctaagcctagcctgcacaatgttccagattgaagaactgaatccacaagtgagaataagatggtcccgggtctcaacagactgagagcataaacaacagagaggtgagatctgcagaccccaagaaaccaacctcgcacgagtaggcagactatcgagatttgaaatccacatatgaaatgagtttctaggcgttgcacctttaaaccagataagaggagcccaatcctttttgtcttctcttctcctcaggacctcccatgttttagaggaagaaaaaccattacaatccacattttgaacaacccaaccataggaatctgccgagtccgtttgcaatggaagggcaatagttgataagtaagtgtgtaattgaagctcaacatcagaacgtggtgatggcaaaatccaactattttccacaatagctttagaaacagaggacaccacagggatccgcaatctccttggaccctcttcacctagaaacttaatcagtggcccaaaaggagaccaattgtccctccagaaacttgcattcaacccattaccaagataacacttaataaaacgttctgcgagtggtcttaggcgtatgaggcacttccaattccaagtatcctgcaatcttttctttatgaaccagtaatgtctatgccaagcgacccaaagagagttactattagagaataagagccagatgagctttagactaagtgtaacattccactctgtgaatcttcgaaggcctagccccccttcggattttggcaagcagacaacagaccaagccacttttgctttattgtaatataattacaacaattttgactttttgttttttttgtatgttttggaaagtacaaaagatgtcaaagctttactta

SEQ ID NO: 606 - DNA, 1095 bp, Arabidopsis thaliana
taaacaaaatcaacaaatttgcatttttcctcattttttttaaggaaaacagagcaagagttgctcacaagttcagagagtagataaatatgcaattgtacatgtatatgtgtttctatgcacttacatatatgatgagataaaccgacaaaagagaagatttggagttaaagaaacataaagagacaagaatcatatgctcagtcttgtctgcttattcttcaatccttttctctttgaatcctaatcagtagggacaagtcattacaaaaacaaaaagcatgtcacttatgccacacgcaactctaacatctctacacaaaaattacaacaacaacgaaaaagaactctgacaaatttatcttaccataatttacaaaactgaagtttattcagatttaacaaaaaagaaaaaagtatagtcaaacgatataaaccataccaacttctaaagtagaagcgtgaggagtagagagaccataacaaggaccccttgagtttcttctaagaaaatcgtagccaaagttaatagcgatcttcttcatcacactcgatcccgattttgctctcacatatgaatgtcccattataaacgccattcctgcctcacgagcctcagtgagctctgttagctcctcctccgccgatctatcgatcctcgcactttctggtaacacaaaccgtacccttttcttgaatctcggagaaggagccaccatgattacctccgaagaagaagatggttcttgtttgtcagaaccatcgtcttcatagatttgtacgccttcaagattggaagaggaagccgcgacgacagttagcctctcatttattccagattcattttccgggtccggggagtaattcaatggtttatctgaacggataaactccgcgatactgcaaatgaggtcattctcaaactcgacatcgtctttgtgtacatcgcggtatcataccgggctatacaccggtagagccggtactccttcggtccaacccttccactagaaacagtcctccggtttcacatcgggacggggacagatttccgcagaggaagacaagacttggtgaacgcagggagttagtgat

SEQ ID NO: 607 - DNA, 680 bp, Arabidopsis thaliana
caatatgcttgcttagctatctgcgtgatgattaacgagaccatgcatatgacacagagcaataataaaaagagaatgcataaacttcgtacaaacgcttaagcatgctgagtcgagatgatgcacaatgtaattgaagaaaatctaaaggtatgagtaaaatgacgaaacaatatcagcccaatgaaattaaaacctgtgagagttgtgaggctgttcgctctccttcaaattcttccttagagataagggcccagctgccttcaccatgtcgcttaacagcagcaatcagctcctcatcctcctcagctgaccatttttttcttctcttccgaggagccaagctactggctaacccattcccattatgtccttcagctgctttcggaagaaaaacaggaaaggtgatattcatccctcttgatgaccaatatgagtctgatggttcctgaggccccctatgcaggctgtaaggtatgttaatggtcaagggagcctcaaccgttgagtcttcgggaatatcggactcacttggcacataggaagcagccatcgcctaataaaggaaagaaaagcaggaaacttagcatcatggtcattaggaactcgtaataagaaacatcaataccaagaatagtactagtaacaccacttaagaatcgctatacactgacggagat

SEQ ID NO: 608 - DNA, 517 bp, Arabidopsis thaliana columbia
tatatttccttgttctctaagctattctattagtttatctttcatattctttctcaaaacaaatatgatcagaccaagaagagaacaagtacctgacaaaagcttcttaaaatcatctcgccgtgaccttaaaaccggggcaactatgtatgtcgggtctgaaaacgaaaacaagaatcagaaagaatgtaatcaactaagacactaggcaattaacagatcaagtacatgatcaaatcctaaccttttggagacgcagcaagaaagtagagagagcctgtgagagtcgcggtgattacagctgcaaagacttcagcaaatgggacaaatggaggaaacactccggtctagaggtaacaacaacaaacaatatcaagtctatgagaagatatgggagaatctaaacatagaataaatgtgaagggtagagattaaatttaccagagatgccatgcctctagaatctgtcatcaactgtgttcctttcaagaatatatcagacagagcaccctgtgag

SEQ ID NO: 609 - DNA, 578 bp, Arabidopsis thaliana columbia
tgatgtacgccagtgtgctttaaagagagtagatcgacattctcaataaattaacctgtgatagtgggtgtcggtggtagaccaattatatcactcttcaaagatcaagttgaagaagagaagggtggtttgaaggtttgtgacttgcatactccattttcttctgtatctgagatatagttcttattattattgtttactcatgagatctttctttgattgcagactgatgggttcttcaaaacaagccttccagatgtatacgccattggtgatgtagccaccttcccaatgaaactctacaatgaaatgagacgcgttgaacacgttgaccatgctcgcaaatccgctgaacaagccgtaaaggtaataattataatgcttcttcaacctgtcttaatgaaggagctgtataaaatcatcctaattgaatcgattgatataatgattttgtaggcaatcaaggcggctgaggaagggactcaattccggaatatgactatcttccatacttttactctcgagcctttgatctctcatggcaattctacggtgacacagttggagaaagcgtattg

SEQ ID NO: 610 - DNA, 617 bp, Arabidopsis thaliana columbia
catattctcccgcttgatccatcaagtaatggttaaacacaagcgttttttgctgagttccaactgtgcttggtttgttcaaggttactgactgtttgagtcacttttggcagaggactctggtcaagcaaaaaaggcaaaaactgaggtggagactaagactgagaccaccgagcctattagttcaactgctattagttcaactgttacattatctgagccacttggtaagttctttggcactggtgagacggagatggcagacgaagagattattcgccgtgtttgggaatacataaaactcaacaatttagaggtaatgattttaatcttgaaatcctctggtttctccttattgcttcgaatttttttcctgtttgctgctaactaaagctggtattgtggtttactctataagataatttacagtataggatttcacataactttatgttatagagcatagtgaatggccataaacaagaaaattaagatttgtttattctgcttttcaattttctttcaggacccagtaaatccaatggctattcagtgtgatgaaaacgccagagatcttcttggatgtgaaagcatttcagctgtggggatacatgaga

SEQ ID NO: 611 - DNA, 618 bp, Arabidopsis thaliana columbia
atttcgcccgacacgtatctaagaagatcgttctattgaggaaccatgccacgtgggattttcatgcatcgagagagcttggacttaacgtgtaaggaagcaattgtggtcggctcccttacttctaaattgtgtagtacgagtattaaaaattgggcgtttcttgtttctttctttcttgtttttggtcgaaggctatggaagagaccattattgtctccaatttattggaaaaaagtaagaaaataaactgcagtccaacatctcctggataagtagcttcatcggtatttaagaacaaaatcaaatgaacaagttcggaaatagactcaaacgaataaaaatccaacatatataaatgaaaacacatagttatcgatttaactttttatacacatgagttatgtgcattatctaatcttttgatataaaattatcgcaaaaacgtatcaaagatgacagtggatgaaaattaatgatcgctatcttataaaccagtcactatttttgaatccacttcaatttccagtctcgtaagccttccagaacaacacgataaattgtcgacgaagcattttttcttctcattaattgcgatacttcattttgaaatatagt

SEQ ID NO: 612 - DNA, 750 bp, Arabidopsis thaliana
aatggtaagaaaaccatttaataattaacaatttataacattggattttaacaaaaacaaaaaaaaagaatcctttagctaaacaaatcaactacaaaaaaaaaaagaaaaaaaaagagaatcctcacaataaaaatacaaagaattgaaagaacaaaagaagaagaggaagatttaatgtaatactcaacacctaatgattctctaatgtcttcaaaatcttctgctcttcctcaacttacttttcctctgtttcaagagttttttgcccattcacactacaaatacaaaataatacaaacacaatcaattctcatctaacttttaatccctccaattgattgctctcttccttcatctcttctaaagctaaaaacttttcttctcactgactctttcctactcctggcatatctaatcacttcaacgcatggaaatcgaatcatcttctctatgttttagtctacgccaatgtaggcattgttcggaatcagcccttgcagatcattctcttcggttatgtagctaccatcactgcatctcttgtttctcatttcagccactttcttgtgtgagtttgagtgaagagctggagtaaatgttggactagcagctggacggtactccgggaaaagcctccctgatttgtaacgtacaccgcacgcattgcaaagtgtctttggacccattggaccaagcctccactgtggagtcttggtgactcacagtgcatacattcctaagcggata

SEQ ID NO: 613 - DNA, 552 bp, Arabidopsis thaliana
ccccgaacccaaacggagtaaacaaatcaggcaaaactgttaatcccaataatgacaagaaattaccaaataatttggaaactttagtgagaagcaaatagctcaaaggagctctctcgatccttagtttgaagactttgctactatcccaaacactaagcattgcccagcttctggtgttgtcgacattattgtagtaagccacccatgtcccgatacttaacttgttccgcaagattttgttaatgtcgtccgggaaaaattctgtcgtagctgccacatttctccggtacaatgactcggcttctttcacctgtcatttaatttttttggttagtgttagtgtgttaattttatgcaatagaaaaatgtttgtagtgttccttatctattctacattttaaaagagactcaaaatataacacattacgcaattttaaccgaattgaaacgttccaaattttaccaactccattttaactttcttattgtggtatggttgacttttaacatatatatcacgcaatgagagtttaatactaatgcaatgtg

SEQ ID NO: 614 - DNA, 753 bp, Arabidopsis thaliana
tgtaagagtttttcccctaataagaatatcttaattatttctctctaacatctaagttctataaattaagccacctataaagataacaatgcttactatgtttctacattaaaatatataaccaaaaatatgtcgaactatatagtcggaaatactaaccaagtatttttaagctcaaactcgagaaattgagaaagtcgaggttttcggaatattgaggaacataatctggtcttgttatattcccaactcgcacgacaacaccataagcatctacaaaacattttcagaaatttgagagaggtatgatattcctttgtaataaccacctctatcatctctcaacatgtttttattttttttcaagttaataggtcagaagaaagatgaagaaggtaagtaatggatataaagaagggaggaggttactttttttttatgggttaggatatgtgtaggcgtatagcttagaatattttagtgtatattacttttacaaaataatttaaattattacaataatttatatgccatacaaatcttgtcagtcgaatttggaatatcgatggtaagttataatgctttttatggttacttgcaaaaagtaattaattttgaaaggaacaaaatatgacataagttgtcatatctcttggatgagttgtcaaattttgttaaagttgtcaacaatatatttcattgagacaggaagatatgtaaataaattgaattcaatataaaagtcaatatttt

SEQ ID NO: 615 - DNA, 873 bp, Arabidopsis thaliana columbia
cggcaattcaaacagggagttttgatatgacgttttgaaaatgtcctgaaaacatataaataaaataaaagacccgagttatataatgttagtatataactaacgactttgaattgctgttagttataatgttagttataactaacgactttgactttgaagtcgtcgtccctaataaaatataatctaagttcaacgggagaaagtgacaacctgcagtttgacggagacgatgccggtttaagcggagaagcttctggcgtggcacggagcaagatgtgaacgaaccattcctttggaagaaaagataggagcgagtggcatcgttggtagactatttgttgcaagatggtggtttagggttcacattcgatcagcatggtattaccattgaaatccttccctcccagcaaaagagtcgattcagattcatacttaggatctgagttagtatactcttttcgtccattttataaaaccaaagtcagtgtagaaacagagtgaaggtaatttgtttattatattatgacaagcataatgatttatcgaaattgcattgacttatgtaaatcaagccaccatcttcttgttttgccgtctaattttatttgtattaaaaccaatgtctgaactctgaaagtcaagaaacaaaacagaacaacaaaacctcaaaaatcaagccaccatctaccgaatctatatacaaactcatgaacgttaagcaactccgatttgtttctaacacaaaatgtatgtttctttgtttatgttttctcacatatgaaaaactgaacagtagcaccaagctggcgataagaaatcccaaaacaagagaagacacagagccaaactcttagtcggtttctatcaacc

SEQ ID NO: 616 - DNA, 791 bp, Arabidopsis thaliana
agagctactctctcgtggtaagagcaatggaagaaactttccttttcggtaatcctcgtcgccgctagaatctttaattgtacttgaattctctcaaatgatattaaatttattatttgggtttccttttttaaaaaaatgaatccaccattgatacacctttacagtggaaaataaaaaaattgtgtttttttcttttggttttggctacacacacaaactcatctagaactatcacagaaaggaatggcgccaaaatcacatcttcgatgttgctcctccgtcgcaacagtcccacggcggaacacggaggcgcaatcaggtaaatcaccgagatcaccgaacaaagactcatcttcctcttggcctactgaaaaacctctctctagagttacgtcgaggaaattcgaagaaccagatgatgatgagatcgacgcgtcgtagaaccacccgaactctccgatttcgctgtagcagccgcctaatagcaacggtgagtctacgtggcttagatcaagtcccgccggtggttcctctgcggcggtgacggttagttcttcttcctcctcttcgtattcttcctctttctttgcggttttgaggacgacggaggagcggtggtgggatttggtgttagcggaggaggaagggaaagggtgattgtggtcgcaggcgtaagtaatcataagcttagaagggtccacacggcttctctccacctgcttcctcgccggacatccttttgagctactacatctgtaatatccctgcaaagagaaaaaagagattga

SEQ ID NO: 617 - DNA, 519 bp, Arabidopsis thaliana columbia
ggtttattattccttctactagttccgagtccagaacctcgagactagtgaggttaggagcgaacaacaaccacgtcaaatccttcagaccatcacagctacttatatgcacagtggagaggttatggaggaattgagttttgggacttctgttcgatgataatgataaagttttcctctctatctttatctcacacattccacacttccttatgatgactttattgagattatccatatctggcaaagtcaatactccggatgattcttcctgaactcctctaagtactaagatttgaagacatttcaccaacctgggagcatttaacaacttctccactaccaagcttgacttgatacttatgtttagaacttctaaatgttctaatagctgcaactcctccactaagctcatgtctagcgacattttagactgtaaaagttgcaatttcctcaaacttgatatatttgatatccctgaaatactcttaagtctcttcatgtaatccaatctcaaat

SEQ ID NO: 618 - DNA, 645 bp, Arabidopsis thaliana
taagttgcctaggctaatcattgcaaagtacctgaggcatgttatcgcaagctggttgaatttgtgttgcatgtgtctcatccaatgtcatatcagccacttgatcaatcacagtgggtgtagccaacatttgtgttggactaactcggtgcatggatgctatatgagatgtatcagatgtcatgttaacagattgatttagtttcgtgggcattacacgggctggagaagtccttaatggacgtactgatgttacaggacactcatgagatgttgcctgactgagtaacacaggccttactcgtgctgcagaattcctgcgttggcgccttaatgttacagaagcctcctcagatgtaatatttgtcgcctgattgaatgtcacaggcaatatacgggcatgagaagttctagattcttgtgttaacgctacagaaggctcatcatatgtgacattagaagcttgattgagtatcacaggcatcactggaaatgaagaagtcctagctggttgtgttaaaggaggctcatcagatgtcacgttactatcccgattgagaacaataggcatcactctggctggagtactcctagctcgtcgtgttgatatgacaggagtttcacctgtctgtcttgatgtcttac

SEQ ID NO: 619 - DNA, 539 bp, Arabidopsis thaliana columbia
cggtcgtgattttttcattctcaggcattattctactccgctctccgttgtgctcgagagatgcttattgtgaatgatggaaccaagagcttagttactgcagtcaacaatcgcctaagtgctttatcattccatatcagagagtactattgggtggatattaagaaaatcaacgagatataccgttacaacacagaggagtattcagcagatgcaacaaacaagtttaacatatatccagaacagatccctacttggcttgtcgactggattcctgataaaggcggttacttcataggaaatctccagcctgctcacatggatttcagattcttcacacttggaaacctctgggccgttatttcgtctttgggaaaccaagaacagaatgaaggagtcatgacattgattgaagagaaatgggatgatcttgttgcaaacatgcctctcaagatctgttttccggctctggagaaagatgaatggcgaataatcactggatctgatccaaagaatacgtgagtccattcaaaataaca

SEQ ID NO: 620 - DNA, 494 bp, Arabidopsis thaliana
gcaacctgatccagaaggcaagctacctccagaaaccctgagtgcctcgggattgaaagaatgcttcaaaagaaaaggattttcgtgagtccttagctgagaattgtttcacaatgtatgtgtatgagtaacttaacatcactgggtttgtgtgccattccaggacccaggagcttgttgccttatctggggcacatacgattgggagtaaaggctttggagatccgacagtttttgacaatgcatactacaaaatccttcttgaaaaaccatggacgtcaacttgtaagtctcataagtcataacaaggttcttaagttcttttactcatagagtttcagttttctaccattcctccctatgttctgaagattgattgtaagactgagattgtatatttacttagttttcttacaatgctgtagctaagatgacgagcatggtcgggcttccttcggatcatgctttagtgcaggatgatgagtgcttaaggt

SEQ ID NO: 621 - DNA, 779 bp, Arabidopsis thaliana
gaatgagagcataaagttatacaagtaaagagcaaatcccaagtttggttcaaaaatgtaattgataagaagaactcaaggaggaatcaagcacttgctttgttgcctattaagtgatgaagaaacaaaccagctgcaacactcacgttcaagctctccacagcaagaaatgatctgaaaccttcaccttccgcatcatcagactctgttactgcaacttcgttgggcatattaccactaatcctcactaaatcggtacatgatcgctctactaatggccttaaacccgttccttcattacccaagacaagaattgttgggctgccaggtaaaacctcgttcaaagcaacagcctttggtgataccgaaccaccaaccacacgccagccgttctcagcagaagcttccaaaaactgcatcatgtttttgcagtacctgagttccattacttcgagtgatccagcgcttgctttactcacaactgcacttaatggagctgagtttttagcgcataccacaacacccgtggctccaaaaaagtaagcagatcttatgatcgcgcctaagttctgtggatcagtgacctcatcaagagctacccagagagaatatttctcttcctctgatgaaatcggatctagttctttcactttcaccaattctaatggagaagcatcaagcaccaatccttgatgtggtctgttatcagcgaccatgttaagatcatgcttcgaagtttccttgatgtttaacccaagtttttcagagattttcaaaac

SEQ ID NO: 622 - DNA, 586 bp, Arabidopsis thaliana columbia
  unsure (1)..(586): unsure at all n locations
tnnnnnnnnnnnnnnnnnnnnnnnctaaagtgcccttgcatttggagcagtgatattcagctacgccggatacgccggaaatcatcgccaccattcacggtgaaggttatcgcttctgcggtgatctggaagattaatcggctttaccaccgtcaaaaaaaacggcgctttttagcgccgtttttatttttcaaccttatttccagatacgtaactcatcgtccgttgtaacttctttactggctttcattttcggcagtgaaaacgcataccagtcgatattacgggtcacaaacatcatgccggccagcgccaccaccagcacactggttcccaacaacagcgcgctatcggcagagttgagcagtccccacatcacaccatccagcaacaacagcgcgagggtaaacaacatgctgttgcaccaacctttcaataccgcttgcaaataaataccgttcattatcgccccaatcagactggcgattaccatgccacggtaaaaccggtatgttcagaaagcgccacgaagagcagataaaccatcaccaatgaaagcccaccagcaaatattgcattgggtgta

SEQ ID NO: 623 - DNA, 611 bp, Arabidopsis thaliana
  unsure (1)..(611): unsure at all n locations
cttcccggaccaagcagagaagctctttcctccaacaagctaagacaagacaaagaaaacaattgaggcagacatgttttcacattttctgcctgttttgaatgtgatgcttaagagaaaattcaaaatatttaaaattcccaagtagtagttactaaaagatttatatatatggtattgagaaaagttgttataacaattgaaagaaatcaacaacaagacaagatggcttaatgtttttcaaggacaaaaacgtggatatttaagactaataaatacgataaaagcagagagaaacctacacacaaaaaaacagagctttaggagttagagagcgtgctgtgcagttaaattctgatgtcaaacgtgctagcaaatctctgagaaggaacggatcaagagaactctacagtgactctgacattttcaatcgccattggtcttaatcgccttgtaggcagtaaagttgccgaatatttcncgtcgctgtcaccaaaagaaagagatacatatagatcattggctggcaaaggagtaaatgaactagaatggggattttatttgattactgtatagccagtctttgaaatacatgtggnaagctgtagtga

SEQ ID NO: 624 - DNA, 571 bp, Arabidopsis thaliana columbia
tagaggtttaacatatgttggaattgtagtggactatcattgctgatgttcttggtgcgaattctcggcatctatttgagctttatgcgcttaaacaaagtaatcattaccagaggtaatggtttcctgttctttcgtttgctctaatctcaaaatgtgtcaaccctctattttttcgtttctcaaatgtgacctagtgccgttgtgttttatcagtttgatggggagtaaagcaggtacatttgaagatattgtggatgcatacttggcatatttacaagtaagctcatttaaagtgattgctttcaaattacgcacgaaagtcatcgttaattttatagtctatttccttgtttaggttgctgtggttaatcctgcaatggacaaagcgttgttgcggcttcaacggtatgccactgatgtacgaaaaggaagcattccgtatgaaaaattacgttttggtgcttcatggaggcatcctccgcaaactgaggatcctacacagaactctgagtgggctaaaattcagctgatggattttgtcaagctcttgtcaatacagaattcgcgg

SEQ ID NO: 625 - DNA, 453 bp, Arabidopsis thaliana
aagaaattgaagatcgggatttactttgctacttggtgggctttgaacgttgtgttcaatatctacaacaagaaggtcttgaacgcttatccttacccatggcttacctcgacgctttctcttgccgctggttcgttgatgatgcttatctcttgggctgttgggatcgttgagactcccaagacggagtttgatttctggaaaactctatttccggtaagtgaattggtggcgaaattgagtctggtgggttggagagaaaaattaggggaaaaaggttaaaactctaggtttgatttcgatgtttacgatgatgtgtatttaggtttaatgtcaaattgatgcagatcttgcatgaatatttgatgtttcattgttacgtgagtgacttgcatagttttgtatgcttcctaagataataccgatgtagagatgagagagtagaaagtgatg

SEQ ID NO: 626 - DNA, 932 bp, Arabidopsis thaliana
tcaaaaaaattttgatgttattttcaagatattataattattttttacttgtaattggttttagaacaatattttctataattaaaaagttactaaattataaaaatctctatatatataatattaatttatcgatatattaatacctcttcaaattaataaaatttcacggtccttacattactcatttatagagattttactgaactttgtatccatgtaatttcacattttttaactatctctctttttgtttgaacttagcacaacgacctcgaagttagatagtccaccacagtatcttaattcactcaaacaactctgcaattatatatagtcccgtgagagtaatgaatcaatagtaatttggtttagataaaactttcatataaccaaaatatggtacacataagcacattcaactcctcaaacgtgtaaaattctcttggaattaccactaaaccagactaaaccaaagacttttacacaaaaacaaaaacaagaaacgtaacctacattgatcttaattaccagctttaggcaaagctgccatgaaagagttgtatgatgactcgagatcaaagtgaagttgccttgactgttgttccgtaagctcatcggctgctcccatcttagacaacctcgaaagccattctttcatcttcgtcttcccttcgaaatcgggcggtagaatactcagtttgttgagagatgcagatagttcagacaagagaggataaacctgatcgacagccaccatgtttagtttcaaagaatccattgaagtgatgaaattctgtacacattcagcaacaatggatgcagagttcgacgtagatgctgcaacggtagctcagtgttccactgtggcaggaagacctgatgtcaccaggcggtatagagcagctggacagtccattttgtatgtcgag

SEQ ID NO: 627 - DNA, 528 bp, Arabidopsis thaliana columbia
taaagttttcatgtaaaaggtagactgaaaaccccataagtacactgtattcgtgtaagtggcaatgtcagtgttaaagaccttcaggttatgtagaaatattgccatagataggtagagacattaaaacgtaacaagaaatcacttagttacttgcattgacatgatacatgtagtttcttgtgaactgtggattggacaagaaataacatccagggtaagtgggcaaaccacctgacgattcatatctttaatcagattaggaccatggtcatagtggcaagttttcgtaatgtgagatgggttgattgaatgtaaattaaagatgtatgaggggcttgcaggcttggaaccacgagttcttctgggagtctatccaacctggaggtggaggaaagccaactggagagctcctcagattaatagaaagagattttgggtctttcgaagagtttttggaaaggttcaagtcggctgcagcttcgaattttggttcgggttggacatggcttgcatgtgagtgttttt

SEQ ID NO: 628 - DNA, 1086 bp, Arabidopsis thaliana
tctctcaccacgtcattgtacgaatataaaaaccaaaggggtaaagaagtgcatcatcataacaaccatttgacttcttaattctaagaggtagacactcaagttttattcaaagctacaacagcagcagagcagagagggagagagagatcattacttgacatgcttagtgagattaggttgtaaggattggaggcaggtagtctgatttggtgccgaggatacgggcctttgtgtccgggaagaattcaaatcctggaagctcagtgatgtcgccttcgctggctacaccgatcgggtagcggacatagtgaccaggaaggtcatgttcgagtgactcacttgagtaaaagtcccaatacttgtcagaaatgcggttaactttctcaatgcattccaagcttgatggatcgaggaaggtttcatcgagcattcccaggtgttcgtaccagagtgacatacgaaacccatggatctggccacgagctggttgtctatgggacaagtgatgtggttgataacctcccattgctatctcagagtctcttgcaccgtccattgacctctggttgatgttagcagacccaatgataatgtattcatcgtcaactgcaaaatggatttcatcaaatgaatcaggcacaacatttatgtatacttctcaagtttttttccgttgaaatgtgaacttaccgatcatcattttggtgtggacgtaaatcatgaaacggcgtgcttcttgcgccctcatgtaatcagtgtcggggtctggtttctcagcaggctcatactctccatctttcttgacctcacggtttccaagacagaagaatgtcagatagtttcttggatcttcctcaagaccctgggccctgagagcctgaatcacatccttgtacatcatctccatggtcctcctctgccagtctaatatagcttgcactgatccactctctgggagaccttctggccacattggaaccacaacatagaccctgaacttctctcctttctcaatcttgctaactatcttcagcgacaactcttttgggattaagtgcaggtcattgatgtcctcaggagtaa

SEQ ID NO: 629 - DNA, 424 bp, Arabidopsis thaliana
tgtatgcttcctaagataatactgagggagagagagagagtagaaagtgatgttttttggctgctaaattctgacaattcaagtgtcaaccaaatcagcttgtcattatatagcttctagtatttcattctagtttgaagtattgaactttttgatattttgttgtactgacagtggtttatgttgaattgcatataggttgctgtggcacacacaattggtcatgtggctgcaacggtgagtatgtcaaaggttgccgtttctttcactcacatcatcaagagtggtgaacctgcgtttagtgtgcttgtctcgaggtttattttgggtgaaacttccctacttcggtttacgtgtcgctcactccaatcattggtggttgcgctctgtctgcccttactgagcttaacttcaacatgattgg

SEQ ID NO: 630 - DNA, 417 bp, Arabidopsis thaliana columbia
gaatgtttgtagtcttgacatcccggtgtatgatatccgaagcatgaaggtaagccaatgcactcgctgtttctatggcgatgctcaggcgcattgaccatgttaaaaagccttggtgtggcgtgttttcgccatagagatgatctgcaactgtgccatttggaataaactcatagacaaggagaagctctcggctgcggcgtgaagtgcatccatagagggagactagattcttgtgatggagacgtgtgaggatttctatctcgttcatgaattgctcaagtcttctgtaattgtgctcatagagacgcttcactgcaacttctcgcccatcacgcacttttcctgagatcaaaaaggaagaaaagattagcttaacagagatttcacacttttctaaaagtgttcgtgctctga

SEQ ID NO: 631 - DNA, 533 bp, Arabidopsis thaliana columbia
tttttcttcaatccttcaatttctctcaccaaccctaatttccccaaatttggtaatacgatttcgtcaatttacttcgcaatcgattcaattcaattatgtctctattactggaagagatcattagatcagtagaggctttgctgaagctcagaaatcggaatcaggaaccctatgttgacccgaatctaaacccggttcttctagttccaggaatcgctggatcaattctaaacgccgttgatcatgagaacgggaacgaagaacgtgtttgggttaggatctttggtgctgatcatgagtttcgaacaaagatgtggtctcgatttgatccttcaactggtaaaaaaagtctttactttcttttctcataaatacttcaatttgtgcaaattcagaaagtgatatagaaagtcatcagctttgcatgttaagctcttagcatttttatatctgaaacaggtaaaacgatatctcttgatccaaaaacgagtattgttgttctcaagacagagctggctacatgcaattga

SEQ ID NO: 632 - DNA, 543 bp, Arabidopsis thaliana columbia
agagaattaagtcttatgacccatctgatgccattgggacatcatctgaggaaggatatgctggtgcctccaagaagaatatattccttggccggtattctgggggttctattgacagtgatagtggcaggaagtggagttcttcccaggagccaacaatgatcactggtggtgttggtcaaaatgtttccagtggaacccaggaaaagctgtatcagaacgttagaactgggatcagttcagctagtgatctgttgaaccccaaggattctgattacacatttgcttcagctggtcagaattcgatatcaagaactagccccaatggaagctcagaaaacatcgaaatcttggatgacttatctccaccacatttggagaaaaatggtctaaatctgacaagcgttgattccttggaaggaagacatgaaaatgagggctcccgcgaattagatttaggtcactacatgctcacatctattaaggtcaacacaacaccgtgaatctggacctagcattcgtcagattctacatatggttagt

SEQ ID NO: 633 - DNA, 557 bp, Arabidopsis thaliana columbia
tgaatttcattctggaaggttgagatgtctgattctgactcccaataacattcatcataggatagctctttatatttgacaagatattccagctccccatcttcctctctatatcataaaagaaaccaatgcaactgtcacaattcctgatttacgaaacaactaagaaaatggtaacttaaaaagaagaaaaaaaaggtaagcaggtcatttatcatgtttcagagacccaaaatcgtgataacagtaaatttaggttaagcagcactctatcaaagatacgtgtttattagagaatggattatgctgaaaacaaggatattaaaaaaaaagttggcagatagataaataaaggaattaattccattctctagacctgcaggcaagaatccgatcaacagtggtccactcaggacgtatggcaacaaaatcatcttcgctgttattgaatgactccatttgacggtgaaaattgttcactctggtttttaaacgatgatttgacttataagccttctggaactccttctcaggcaccctatgattagtaaaaggaa

SEQ ID NO: 634 - DNA, 591 bp, Arabidopsis thaliana columbia
atttatcttgaaagttctttgaccaacttagcttttttttttgaactgcagatactcgtgtagtttacttcggcaaggcatgaaacagatatgcataactgtggtgaactcagaaggagcatctcaagatgcaaaagtaatataaagctaaaatcatttccctttcttaatcacaaggacctacattgtgaagtttcaaattgatatatctgttgatgtaatcaggctgtgaaggacaatattttgaatcaaatcacaaaagctgtgcaaatggtgaagctggagaaagatccacacgcggcatttgctttgatcattgacgggaaaaccctaacgtatgcattggaggatgagatgaagtatcagtttcttgctttggcggtcgattgtgcctcagtcatttgctgtcgtgtgtcccaaagcagaaagctttggtatttcccctcttcccttatgcccatgtatatgaacacgttggcatcatgagcatccttttatttattttgttcaaaaatggtccaaaccaggtaacgaggttagttaagagggaacgggataatccattgcaataggtgatggtcgaatgatgtg

SEQ ID NO: 635 - DNA, 830 bp, Arabidopsis thaliana
ccacaacctcctccactgcctaaaattgctcgtcctacacctgcacctcctaaaggtgcggctccaatacgtcaaggaaacacttcctctggagatgcatctgatgttgattctgagactggagctccaaaaacaaaactaaagcctttctttagggataaaatgctaaccctgatcaaaaaatggtttggcatgagattagcgccggttcattccagtaaggagttgaatcttgtacttctttaaaattgtttccggacttggttaacttaacgttctgctttcaggttcaacgaagaggcgatggagtcgcttttcggttacaacgatgggaacaaaaacaagaatggtcagaagagtactgattcgtcgttacgcgaatctcctctacaatatatacagatcattgacactaggaaagctcaaaacttatctattcttcttcgagctctgaatgtaacaacagaggaagtcgttgatgccatcaaagaaggtaaattcaccatctctttcaccatttttgtttaaggacttaaagtttctttcttctctgtgtcataaggtaatgagctcccagtggagcttctacaaacattgctgaagatggctccaacttcagaagaagaactcaaacttagactatactcgggagatcttcacttacttggccccgcggacgttcgttgaaaattcttgttgatataccttttgcatttaaacgtatagagtcacttctatttatgatctcacttcaagaagaagtctctggactcaaagaagctctcggaactctcgaggtaagtcactgaccaaacatacttgaaaacaag

SEQ ID NO: 636 - DNA, 615 bp, Arabidopsis thaliana columbia
ccaaatattcatcgtcctctcgcgaatataatgtgaatagaaaatgttgcaatatagataactcatggtttagtacttattgatatgaatattttacttaatatgattgtaagtacattctattaattttaaaagacatatattaatcgtgcagcatccataaactaagccgtacaaatagctcaatgtacacccaataacccatctctccaaagaggccataggcttcttagttcccttcgaaacaatctccaagacgatctattttcttattcatatcttatgataaaaaaaacaaatactagtatttaaatatctatcaaagattcaaaacccttaaccctgtctcccccaagaagcaacagtgagtgcacccttacgaggcatttgctcccccaaacttcatccactctctagcctccacgcgtctcaaactctccacatgcacaaactctcacccacacattcatgcatgcgtatataatacattcgtattccgatagactaaagatgagcgagagagatatggagagagcagaggccttgacatcatcgttgatatggcggccaaacgcaaccgcaaacgcggagatccgccgagttgtcaagatgtgg

SEQ ID NO: 637 - DNA, 611 bp, Arabidopsis thaliana
ctcgtgactgggaattaccgtattctcaaggcgtgtctctcaagggaaacacttactggtttgctagagagataaatataagaggagaaagaatagatgatcctcctgacttcttgatctgttttgactttacaacagagagatttggaccgcgtcttcacctgccctttcactctcattctgatgatactgtgattctctctagtgttagagaagaacagcttgcggtgttgattaagcgcttcgatttatggaggatggagatttgggttacgactaagattgagcctaaggaggtctcatggaacaagttgttcttagcggttgatatgataccactgatcactgcttttcagttttgtaatgtgagttttttcattgacgagaagaagaatgtcgtcgtggttcttggtaaagatgtgttgaatacacgaaacatagctaatattattggaaatgatggatactttaaacaagtggatcttggagaatctacaaacaaatattgttacccacttgtgtgctcttatgtccaagttcagtgcaaatcaagcaagctacacgagtgatgcatcacatcacattgtcttggtgggaaaggatggcaggat

SEQ ID NO: 638 - DNA, 582 bp, Arabidopsis thaliana columbia
taaaacctgatggagtgactttgaccggtgttatttcagcttgcagtagggcaggattagtggagaaaggacaaagatattttaagttaatgacaagtgaatatggaatagtgccaagtattggtcattattcttgcatgatcgatctcttcagtcgatctggaaggttagaggaagccatgcgttttataaatgggatgccttttcctccagatgcaattggttggactactttactcagcgcatgtagaaataaaggtaacttggaaataggtaaatgggcggctgaatcactcatagaattagatcctcatcatcccgctggttatacgctattatcaagcatatacgcttcaaaagggaaatgggatagtgtggcccagttaagacggggaatgagagagaagaacgtgaagaaagaacccggacagagttggatcaaatggaaaggaaaattgcacagtttctcagctgatgacgagtcaagtccatatttagatcagatatatgctaagcttgaggaattgaacaataaaatgatagataatggttataaccagataccagttttgtccacatgat

SEQ ID NO: 639 - DNA, 576 bp, Arabidopsis thaliana
gtgtatcaaaaccagaagagattaccatataaccgacaattacgctcttggacacgagaagatgaagaacagcccacttcgtaactacaaaatcttggtgtttcatgataaatccttcctccaaaattcttggtttgaaatctacaattttaactctgattcatggaaggttttatatttcacttgtgactggaaattaccgttttctcaacttgttgtgtctctcaagggaaatacttactggtttgctcgagagatgtatatacacggaccaagaatagatctccctgatttcttgatttgttttgattttacaacagagagatttggaccgcgtcttcatctgccgtttcactctcgttgtgttgatactgtgactctcgctagtgttagagaagagcagcttgcggtgttatttcaggactcaaaaacgttgatcctagaggtatggataacgactaagattgagcctaatgcggtctcatggagcagcaaggtgttcttagaagtgaatatgagtcactcactggtttcagtttaatcgtactttgggagttcttcattgttgaggagaaa

SEQ ID NO: 640 - DNA, 735 bp, Arabidopsis thaliana
aaccacaaaatcttgaggtttgtgaatgattacctcactttcgaaacaaagtttttgggtttgaaatctaccatcttagctctgattcatggagtgttcttgatgtcactcccgactggagatagtgtttaatcaacgcggcgtatctttgaagggaaatacttacttttacgctcaagaaaaagcaacggtggaaggagaaggaatggaagaggtcgacgtagatacaacgtatcttccagtttttctactctgttttgattttacagcagagagatttggaccgcgtcttcctcttccgtttcactctcatgataactctcatgatgaagagattgtgtctctattctgtgtcaaagaggagcagctcgctgtgttacatcaaaactttgctagatgcttggagatttggattaccaccaagatcgagcctagtgcggtgtcttggagcatgtttttgaaagtggatatgagaccactcactggctttaagtgtcatgttgaagctgggagtttctttgttgacgaggagaagaaagtcgccatggttttcgatctagacggacgtaaaaagaccgagacttgccgctaccagacagctcacatcattggacaagatggatacttcaaatctgtgaatatccgagaagcacagaatctcgggaaacctgacatatttggatacactccttccatttattgtgtcccacttggatatacataatgtgtgtgatg

SEQ ID NO: 641 - DNA, 650 bp, Arabidopsis thaliana
cgcgtcttcctctgccttttcactcttattacgcagagactgtgactctctcttgtgttaaagaagaccagctctccgtcttgtgccagcgccagccctcggaaccatctgagatcttggagatttggtttccactaatatccagcccaatgcagtgtcgtggagcatttttttgaaagtggatatgagaccactcactggttttcagtttaacgatatggctgggagtttcttcattgaccaggagaacaaagtcgccgtggtttttgatcttgacccatcccagatttgtcgctaccaaacagcttacatcattggacaagaatatggaggatacttcaactctgttaatatcggagaagttccaaatctctggatacctggcagcgttggatatgctgacaccacgtcttgtatcccgcctgtgtgctcctcttatgttccaagtttagtgcagataggttagctagtttcaaagttttcataattatgtttcttgcatctctttttacttccagttcgtttttcaaatttcaagactgatgtctgctgctctgcttatcatgtgtaaaagcatttcatcatgtcatccatgataggaggcaaattgattttacagagaattttaatcatatcaaaattacaaacat

SEQ ID NO: 642 - DNA, 524 bp, Arabidopsis thaliana
gctcctactaagaaccgtttggcttcaagagacaattaagtttgtcattattttaccttttgaagaaactcatggatccgtttggcttctcctgtatcactaggtttattaaaaagttgcgttcttgaataggagaagccagttccaacgggctggtccaagaatatcatgctcgaagtctgagagaagtgatcaagaaatgatcattgggttttgctgatggttatatcaagactacacacttttttgtattacctttgtccaagaatatgtagtagagaccaaagaagggagagttccattgtaaacatcgagcttcatagccagaggccgtggttatattttacatatatagggttacagacagtaaccagagacgcagaagaaggagtttatccatgttttcgatctcaccattctgataaagaaggccagagatggcagagcagccaggtcctccagttagccagagaagaagagggtcttcttttgggttctctcagacttgatgaagtggtgaacag

SEQ ID NO: 643 - DNA, 574 bp, Arabidopsis thaliana
ggatccccagaggatcgtatctattatttaagaatcacaaaatcttgagattcgtgaatgagtacttggagaccagtagggaccgaattcgtgagcttcagatttacagtttatactccaattcatgggaggtcattgatgatttcactccagactggtatattttgtacaaacacagtggcgtgtctctaaagggaaacacttactggtatgccctagaagagatcccatttcatggtctaccatcactagatcaccctgattttctactatcctttgatttcaagatttgaaccgcgtctgcctctgcctttccgagccgtatttggagatactgtgacgcttgctagtgttagagaagagcagcttgcggtgctgtttcaccgggcatccgtcgtcgagatatggattactaataagattgagcctaatgcagtgtcgtggagcaacttgttatttgctgttgatatgaaaccagtcgctggtttttggtttcctaatgtcggtaggagtttcttcgttgacgaggagaagaaggtcgcggttgtcttgataaagagataatagacaaatg

SEQ ID NO: 644 - DNA, 479 bp, Arabidopsis thaliana
aagcaccatctccagcagaacttccgataggacggagaggtggctgctctgaagaacatactacagctgcaaggcaagcactcagtgctcgaaggtccatggcctgaacgcaaaccgtgactgctttggcaagattagatattgtctctgctgctagagtatctgaaggtaggccgccgaacagaaatctcaagtggcggaatatagccatacagacaactcgagcattctcagtacctggaactagaagttgtagatactttgtaagcaatttccgacccttggggagagtcgctatacgtagaaagacaatatcatccttagcagtcatcccagatttctgaccggttttgctgaacggatcagcaagttgaagtgctgtcgctaatccttctagcaggatctgccgctttctcttgagttgggcacctccgtcctggggtcttgtgttttggagagtcctgtcaatgtcaactatg

SEQ ID NO: 645 - DNA, 917 bp, Arabidopsis thaliana
gatctagtaaagataactaacacaatatgtaaccacgtcttatctctatgctctcataccaacttatatttttcactgcaatggtttattgttattgttatacatcgccaacgatgacatcaagcttgcggttacgaacccttattttgggcaaacaaaggtggatcaaacctagaaatttttatcagttttgtgacaagtacgctatcggatacgagaacaagaagaacaactcacttcgtaaccacaagatcttgagatttaatgatggatccgtcgcgaactaccgaatttatgagtttgaaatctacaattttaactctgattcatggaaggtttttgacttcactcccgactgggatatctcttttactgaccttagcgtgtctctcaaggggtatacttactggctgatccgttccaacgggctgatccaagaatattatgctcgaagtctgaggaaaatgatgatcaagaattattgatcattgggttttgctgatcgtcatatcaagaatacacacttttgtattacctttgtccatgaatatgtagtagagaccaaaaaaggaagagttccattgtaaacatcaagcttcatagccagaggcctgcttatatagacatgtatcgagttacaacgagtaatcagagacgcaaaagaacaagtttattcgatgttttcgatttcaccattctcaaaaagaaggccagagatggcagagcagccaggtcctccagttagccagagaataagagggtcttcttttggattcctatcagacttgatgaagtagtagaacagttgcacttcctcttcctcattagcaccaatataccttcatccacaagaaacaatatcctatgtcttttagattatgccaaacacagaacacagatttaacacacaaagagat

SEQ ID NO: 646 - DNA, 650 bp, Arabidopsis thaliana
gcctttgaaaataatccttagagcaagagcaaaaaaaagaagaagattaccattctcgaaaagaaggccagtgatagaagaacacccaggtcctccacttaaccagagaagaagagggtcttcttttggatttctctcagactttataaagtagtagaacaattgcacatcctcttcctcaccaataccaatgtaccttcattcagaagaaggactaaatacttataactccaaactcaaaacacattatttttaaaagagagatttaacaaacccggtttcgagttcgaaaggaagagggccttcaaagccgggaagaaacttgacgatagagcccgaatcaacatgatgatttatgataaacagaagtaaaagcagcaattttggtgttgatttcattttttttttgtaggaattttagtgttagtttcattctctcttagtttctaaagatcgagtcatcttaggaaacaaggatctttaatttttacccaaaaaaaagaagttaattacttaattaattcccaataatagacgtttgatggcgttttattgtactatagtcatatgtaggacgatatattatcaataatagaggtttcctgacgtcaaatgtaggagtaggttatatttcgacaaagaaaggagta

SEQ ID NO: 647 - DNA, 947 bp, Arabidopsis thaliana
tgctcttcctcttccttgattttcactaaacttagcttggaacataagagctggagcacacaattgggcaagaaaatgttctaacttctccaagatccaattttttcaagcatatattctctccaatgatgtaagcatatttgtaggcttgagattcatctaactcaaaaaccacgaagactttcttctcttcatcaatgaagaaaccgcaagtctcttcataaaactgaaaatcttgaatagtgagtggtactttgggatcattgtatgatccaaatactatcgtatatatatgacaattcttggtataaccagctagaatttgtttttgtctttttcataaagtaatcaaatttacaatcttggttggtatagtggccctaccaaaaattcatttgccaaagcataagttttactattggatgtcagattataacctcggtatcaataaaatgaatatttcttcctcaaaaacaagacaactaaaattaacattaaccaaattaatctaacaaagtagagctagtgacaagtgagtgagtttaaataacctagggacattgcagttgaaaggtttccaccggaacttgagatagtcggagtcaggtctgccgtaagtctggcagtcgaatcccggatctatgattcctcggccgcattctttagaccggtaaagtgggtaagtctcatcccgcacccactcgccggcgaacagatcacaactactatgattcaccgggaaaaccacctgacttcggcgaggatgcttcacgaagttgctgtggttgctttggatcggccgccggaagagagggagaggtgaagctgacgtcgcgttttggagaagaaaccaagaagaggaaagtgagacattgaacagccgcgattaaagaagcgcttgaagaaaagaaaagaaaagagagagagagaacgagttaaagagagaa

SEQ ID NO: 648 - DNA, 457 bp, Arabidopsis thaliana columbia
tttagggttcttactcgataatattttgggagtgtcgtatttgaggagtcctttagtagattcttggagggtatcaactacgaccttagggagaggaaacttcttaaagatgtcatcttgaaaccctaacttgagtaacaagccttctttataaagacgatcgatctcgccgaagtctgcaaagtcctcagctacaatactggctttgagcgacggaattaggtggtgtaagactgcttatagcctccctgcagcaaaagtgtcctgcttcgacacttcaaattgctcgtctcgtggcacatacataggtaatggcttctctactcggctctccgcgtctttatctgtcaacagtacagatcaatatgagagacgtttcataagacctagacagaaagtgttgttattcttgatgaatgccaatcgtactagagatgtttcatagagatattgagct

SEQ ID NO: 649 - DNA, 828 bp, Arabidopsis thaliana
ctttcttctatctcttattgatcacaggtcctcctccttggcgaaccatcttctctcatactttcatttgtgcaatgtgtaatctttgatttaacaactaaagatcacttcttttttttctgatcagcggaggcaatacttttggggtttcagcatcacttagcgatgcttggaacaactgttctcatcccaacatatttagttccacagatgggtggtggaaatgcaagttatcttcttagaccagtcatttccatgaacatatatagaaactctgtttttttatcggatttgtattcatttgttgtaggaagagaaggcaaagatggttcagacattactttttgtttctggacttaatactttattgcaaagtttctttgggactagacttccagcggtcattggaggctcttacacctatgtaccaaccacgctttccatcatcttggctggtcggtacagcgacattttggatcctcaggaggttagttaaagaaaaacagagcatctatctgtttctgtatcatattttctcattcatagagtgaaaatatgcagaaatttaagaggatcatgcgaggaatccagggtgctcttatcgttgcctcgattcttcagatcgttgttggcttcagcgggctttggcgcaatgtagttaggttagctaagaacactcaatcatatacaaaacacaactaacagattctcttctgctattttctgatgattgttcttactttctttaggctcctgagtcctctctctgcagttcctctagtagcactagctggttttggactttatgagcacggtttcctctggtgt

SEQ ID NO: 650 - DNA, 654 bp, Arabidopsis thaliana
caccttatatcaagaccaaacactcacattcacccaagaaaaataaagaccaaacactcacaagttttattaagacagcaacaaagccaacattacaaagtcataaaagtcacaaatactacattgtcattacaagcttggcgaagacaacaagataaatagacttacactattaagcaacaccaaattcatttctttttgccttaccaagcatcatgtaaagaatgaaaatgctgatcaaacaaagccacaaaaaacatattttcaaacacactttccacttgcagatttcttgtttactcaacattgcttcttcttttagttcatgtatcatcacaattagctcatttgcctcggatttggctttgttaagctcatttgcaatgatcacaaattttggtaaaacatcttcaacctcttcgtatacagcatcctcaacccatttaaacaaatgactctgttacacaatcaaaccaaatccgatatgattagctgctaagttacataacataaacacaaactcaaactcaaactcaaactcaaactcaaactcaaactcaaacttacatcttttttgtttgtccacgtctttggatctcttttcgttcacaacgaaaaaaaggtctgcccggattatcaacactcttcgggatc

SEQ ID NO: 651 - DNA, 824 bp, Arabidopsis thaliana
tgcttggacaaataaccaatcattcaagtctacaaaatagaaattaaactcgggaaataacaaacaacagttgcacagcgattagatgtgtaaggcaaatcataagatttggtatctggatcatgtgttaggaatgcatccccgtgtgtactatcataaaacaataacttgtccttgtccaaaactgctagtggggtgaatgcgaatatggcactaaagaacaaagaagaggtgataatgaggtctatggaatatatttgcttccatgtcttgtggtctgaatcatccaacgaccatatgacttggttgggccacttttgctcggatacgcacaaacgatcaccgaggttgcacatgacgatataatattcatcagagacattgagaaagggagctttagagatgacttggaacgtttcggagtgaagatccaaagacaaaaccatggtttcgccctcgtgtgacaaggcagtgaaccagtgaagtgacccgtctacataaacaggatcttgggtgtgaagaatcagatgaggggacgcggggaaaacgtacctccaagcgttggtggcaaaatcgaaaacttcacaagtagtaggcttgtcatttaggtctaactcagcggaattatataaccaaactggcttgtaagtgccactgattttgtctttgccaaatccaggagtagggcatgcgactttaaagcactcgtgtctctcacccttgtcggcagcgactagttgatagttgcatttagggaaagttcgatgccatcgagtggtgggattgacgacaatactcggcagttcatagaactaaagaggcat

SEQ ID NO: 652 - DNA, 593 bp, Arabidopsis thaliana columbia
agccccaaggccaagagaatcgaaatagttgtgaagaaggtgttgagcagaattccatcggagggaagccataacgcttctgtagatccattagaaaatagtgacactcgactaacttcctcgggcgaagaaaataggacttttggaatcaaagaaagactgaaagaatttaaagacaagttggatctcaataaaatgagaagtcagctaggaatggtaataggttgtcttttggttctcttttttgttctgaaacaaagtgcttatacgagcacacgtttaatgtaagtattattttctgcaaaattcatttgctcctaaaatttattgctggaatagagaactttatgttttctctcactttcttactagaggtgagggcggtccatcggtgccatcagtgccatcgatagaattgcggacaatgtaccaaaaatacgggagtacgttcctgaagagggaacagagaaaccaagagacacatatactgaatttcatactggtaaatatggaacaaagcccgagagatcttcttctgacgttaaaacaaatgccgatctccttgataggtacttatggagacactttggttt

SEQ ID NO: 653 - DNA, 339 bp, Arabidopsis thaliana columbia
cctgaccttatggtaagacagtatagtagatattttctaaattatattgtttttacaagatgatggacccaagtgaaacatcacgtagtataattaagcaaatgagaaagaaaaatcaaaatgctgattgaattttaaagtttttttttttgtgaccgtctatagctgaagatagtggattatggaccatgatcgccatgatccaatgcatcgacgtcgccgttggatccgtagctgcgttaagaaactccgaacacagactcacgatctccgagtcactcagtttcctcttcttccctccttcgttctcctccgtcgggatctcaagattcagcagcg

SEQ ID NO: 654 - DNA, 548 bp, Arabidopsis thaliana columbia
catccatggtctcagaaccagtctcaaccagttgttccagtatttcaacagcctgcataatcaaaatccaatagcattcgtcaaatactcaagacaaacaaattgaaaagcacaaaacagtaattcaggtattcaccaaccttgctgacagctttagtatatccactaatgatctcactcggatgaagtcccatcctgataagctcctcagcgttttgaagaagttcaccagcaaaggagattgtcagattagctccatctccgatttcttcttgctgagccttagcagctaaaaccagaagtttagcagccgggtgctgaatctcgagctcattcactatagtagcagcgtcatttgtgacaaacagtttgtccaaatgattgataaccattttattcattcctgaaacattataaacagaagaactcagttctaatccgaatctgaatccctagaaaaagacttcacctttacagtaacagatcaagcttgcttaaactatacacaagcgagatcctacttacaacactcaagtagaagtaaaacg

SEQ ID NO: 655 - DNA, 590 bp, Arabidopsis thaliana columbia
tcaaagttatacggtccataaacaagtatcgtgaagctgccatgatcgaaattgacgtgctgcagaggcttacaaggcatgatgtcggtggttctcggtaagaatatttctttcctcttactatttcttcgctagttttaattttattacatttggtataagcttttcaattccttgcagttgtgtgcaaatacggaattggtttgactatcgtaatcatatttgtattgtaagtgctgttacctttatttgacaagtttgaggggaaaatgcaatttcttcacgcccaaatgttatgtgagttaaaagaacttgcgcatgggtttaaatggtttcaacaggtatttgagaagcttggaccaagcttatatgattttctccgcaaaaacagctaccgttcatttcccattgatcttgttcgggagcttggcagacaacttttggagtctgttgcatgtgtgtggaatattcttgacccattcttctatatagtagtccattagtgccacaaatcatttatctaactttttgatcaagacttaggcgttaatagctatacttaatgtctttcgataatgcaatttcatgga

SEQ ID NO: 656 - DNA, 1158 bp, Arabidopsis thaliana
tctgtgggaaacaaggtgcgtattcatcagattagagctcagctttcgtcatgtcgtcaagatggacaagctgtcattgaatactatgggcgtttgtctaatctgtgggaagagtacaatatctacaagcctgttacggtgtgcacttgtggattgtgtaggtgtggagcaacctctgaaccgacaaaagagagagaggaggagaaaatccatcagttcgtgcttggtcttgatgaatccagatttggtgggttgtgtgctacgcttatcaatatggatccactcccttctcttggtgaaatttactcaagagttattcgtgaagaacagaggttggcttcagttcatgtgcgtgaacaaaaggaagaggcagtggggttcttggctcgacgtgagcagctcgatcatcactcccgtgttgatgcttcttctagtcgatctgaacacactggtggaagtagatcaaattccataatcaagggccgtgtcacgtgctcaaactgtggacgtacgggacatgagaaaaaggaatgttggcagatcgtgggttttccagactggtggtcggagaggaatggtggtcgtggttcaaatgggcgaggtcgtggtggtcgtggctctaatggcggtcgtggacaaggtcaagtcatggcagctcacgctactagctccaattcctctgtttttccagaatttacagaggaacatatgagggttctcagtcaacttgtcaaagaaaagtcaaacagtggatccacttcaaacaacaattctgatcgcttgtctggtaagactaaacttggagatattattttggattctggtgcttctcaccacatgactggcacgctttctagcttaaccaatgtggtaccggttccaccatgtcctgtgggattcgccgatggaagtaaagcgtttgctttaagcgtgggagttttgacactttcgaacacagtctcgttgactaatgttctttttgtgccttctttgaactgcactttgatttcagtttctaaacttttgaaacaaacacaatgtctcgccactttcactgatacactttgcttcttacaggaccgttcttcgaagactttgattggaagcggtgaagagcgtggtggtgtgtactatcttacggacgtgactccagcgaag

SEQ ID NO: 657 - DNA, 564 bp, Arabidopsis thaliana columbia
ctcttcctagagctaactactgtcaaaaatcgtttatttttacccatttttctttttgcaggttgatccgtctccaactcatcttctccctgagattttccctccatttcctcctcatgtgcttgctcatttgggacattctccgaaacagaaaccatattaacattcatctcagagaccgtgttgattgggagcagaaccacctcaagtttgtccccatcaaaattctcttcatttgcagcgaaaaactctccatcctcatgggttagctccacaccactactttttttatcctccattttggtatccataaattgcaaagaagggtctccttcaagaggagaactttgagcaagcaactgacttaaatcatcagagaatagatcatgttgctcagccaactcgagagcattctctgccttgttttgaatagtaacttcttctggacccgaaaaaaatttcttacgtaccaccttacttggcatcgtgccactaagaataccttccatattagcacctagagtaccaaatctgtcaccgtcttcccgcttcaggagcaagaaa

SEQ ID NO: 658 - DNA, 727 bp, Arabidopsis thaliana
tatcgttaacagacgaaaattatttttcaaaacttaaaacgttaataattatcaccattaacttacattaattcagtttcattcatatttttatatataacaaagaaaaaaagattacgaacataaccgagattttatgtcaccggtatacaaaactttctccggttccgtttagtaacggccggtataactatttatttatttaaaatattattaaacagctaaaagaggatccgacccgaatagatccccgatatcttgaaaatggtcctccatgtgccagctggataatccggatccgaaatcgaatccgaagttcatatccgtacacatatccgccgtgaatagatcttccccaaataaatcgccgccgagatagtcgggaaccactgagctccggaaatcgaacacgtcatcatctgagaacaagggcgccgagaaatcagagaaagtttcagataccgttgtcatggatggctcttccttgactacaacggccgcgactggtgatgaagaaatgccggagaattcgtcgacggcgaaaggagatcggagaacagacaccggagagcagagacaatcgttgctgctgcttctgctgatggaggaagaagcagtaacggattttttgcttttgttgtttttcttcttcttcttcttcaccggagacggtggtggggctttcttctccgtcgctgttgtcggagtgactgagaaattagtcaga

SEQ ID NO: 659 - DNA, 1161 bp, Arabidopsis thaliana
tcgtttctcatgatcaatagacaatagattctccaatagattaatcgcggttttcggaaactcatcaaatctttctctcaaacaaccttcatattgatgttgtggtctaaacatcttagtttgaggatgaagcttgttcttttcccagaattcttcatctggtgatccagagagtttataaatcttgtgaagttgttcaatctacagagaatttcacaaaaacaaaacattcagaaacataatcttttctccggaatcggtttggtccctaattcctcacctctgttcttcctttaagaagtggtcttccggtaagaatctcggcgaagacacaaccaacactccaaagatcgaccgatacgctataacttgttgaacccattagaagttctggtgcacggtaccataatgtcacgacccgactggtcaactgattcttgtttcttggtgttacaatgttggctaatccaaaatcagctagctttaaaactcctttgttattcaccagaatgtttgcggcttttatgtctctgtgcataatccctcgtagatgacaatgttctactccccatagcagttgcttcatgtaacatttgatctggaaacgaaattagggttgtcagagtaaagaaagaaacagagtcacttgcagaagagattagggttttgtgtgtgcgtgtctctctcttgcctgtgcctcggtgaatttgatgtcgggagatgaacataagccttcgaggtcgtgttccatataatcaaacacaaagtacatgctgtttgaattccttgatgcgatgatcccttcgagtttcataatgttgggatgatctaatcttctcaagatcatgatttctctcgcaatgaatcttatattttctgtttcaaaattttggatccgtattttctttaaagccataactcgtcccgtcgatacctcacaagcccggaacacgttgctatacgtcccttgcccgatctaagatttttagagaaaattattcgttgaaatcattgatagggttgtttcttgtcttgcaagaaaatgtaataatctatgcctctatggataggattattttaccttctctcttttctcgaagtcctcggcgcgtaatggaaccacccatgaacgtgctcgggagcggcagacgtgagccagga

SEQ ID NO: 660 - DNA, 620 bp, Arabidopsis thaliana
ttacggtattcttcggttacaagcacatcaatagttctgtagccaacaacttcctcagcataccaatggtacagattctcagcagaacgactcctgaataataataaaagaatctctccactcagaaacaaatagtaaatgtccacttgcatatacaatgaatcgctatatataactttgtttaactacttaaacacacaattcaatgaaacagtacttagaagaactataagctcctgatctacaaacaccatagatgaagaagaagaacttatcaagctcaccagaatgtaatttctccagacgcagctgatgttacatgaatcgcgtgtcccattgaatccatcaaagtccgatacgcactatcagcgaaatagaatcctgaaacagctctctcccaagtcgccgtcggattatcccaggaatccgccgcctccgcttccacctctacctcagcctctttctccgtgtccgtctccaatcccgtcgccgattccttaccggttcgactctcctcctgaagcaataagtcatcaacatcctcccttagtctcgcttgactcgtctccatcctctgacaccactccaccaaaacctggtagagactcgattccgagttg

SEQ ID NO: 661 - DNA, 578 bp, Arabidopsis thaliana
tatcagctatttgttattggtcctgcaaaatttacttaatctgactttcccacttcccaaataatgtagggtgttatgatgacgcatggtaatgtcctagctacagtttcggcagtgatgacaattgttcctgaccttggaaagagggatatatacatggcatatttacctttggctcacatccttgagttagcagctgaggtatcttaaaagttcattactcaatgcgtttatatagcagttccacacttcagagtatttgaatgcggcctaattccattgttgtagagcgtaatggctactattgggagtgctattggatatgggtctcccttgacgctaacggatacttcaaacaagataaaaaagggtacaaaaggagatgtcacagcactaaagcccactataatgacagctgttccagccattcttgatcgtgtcagggatggtgtcgcaaaaaggtttgtgcatgttagatacacatcgaaattctttggttggctacctctgttaaagcagttgagctcgtgctctcctagctgtttaaataattccggctatctccagcaaccaagatg

SEQ ID NO: 662 - DNA, 481 bp, Arabidopsis thaliana columbia
cccatgtcttctctcactcctcgctttgagttttctaatgttagacattgctttagttcattagtaacttgagacatggttggtcttttctccgaagaaggattcacgcaagacattgctatctcaagagccttccaaacagaagtaggctcataatctctattgagtcttggatccacaacgttctcaatatctcccttagtaagcatgtatcccacccatgctgctatgtgcggcttctctcgggtttgctgaatcacaggtcgacttgtgatgatctccaataatacaatcccaaagctatatacatcactcttttcgttcaagctatttgttcgataatatctacaaacaaaacatgaagtatattttctttcagatgaatgaggaacaacaatttgaatcaaactagtttggtgatgctaaacttactcgggatccaaatatccaggagttccagcaacagctgttgaaacatgag

SEQ ID NO: 663 - DNA, 442 bp, Arabidopsis thaliana columbia
cttattcctgtaagaaaatgaaattaatattagtgagcaaaaacgatcataacgttcaagctataagcaaaagaaaagaatatataggtaaataacctcatcgtcgtcatcatcatcttccttcttcagacgggtctctccaccttccttgataataggaagcttcatagctccaaatggtgtatcaacatcaatattacctttgattgtgtaccctgttcctttaccacgaatcatatcccaaagcgcagaaccaaagtcctttggtcggaatgtcatcggcacattaatcaatccgcttccgtgtttgtcaagcttgatcgagtccgcgatctctgctttcccaatgcttagatcacacagccaaacttcacagtccaagtcattgagccccaagtcgaaatcattcatgttctgaagcctcacatggagaatcgcacgg

SEQ ID NO: 664 - DNA, 669 bp, Arabidopsis thaliana columbia
tgcatttgggatcaagtgatagagatgaagaagagggaatgtgacggatcagaaacgaagaggacaatggtgatgacgagacaaagaggttggtgatgtcttgaagaggcttcctagatttttttcttcttattctgatttgggttttgcctttatcaatggatgaggaatccagagatttgacagcaatcgtgaccatctctgagggtgagacattctctttgttgttttcttgaggctttgaatctagaaccgccattgatggagtagatagagaaagggagaaagagagagagagagagagggagagatgtatggatttgaggatggaaggaggaactgagaagatgtatatgaagtgtgtgaataggagggactttgaagcagatttggaaatgacggatctgagatttggtttttgatgttttttgtgttttcatgttgtggagggattttgagaatggttctaaaattctgaaacttaaaaaagggctctgtgttgtggagggaactaaagaagattctctgtttctatgttggttcgaaaattttgttttgtttttactaaaagaagatttgactttcgactttgagacgaggcagagtaggttttacgcgccatttgttttagtattgcgccaagaagagggaacgaaccaccgggttttg

SEQ ID NO: 665 - DNA, 392 bp, Arabidopsis thaliana columbia
agaagaagttgtcttgaattggtattacaatcgtagttggatcaaattgtaataacgctgtctgaatttggagtcttaaccccctatgaaatgagaaaccaatggaacctaactgtcaaaaatctcattccttgttatcaagagataaaactcagctgcatattcatctacagaacgagttcttgacgcaaattctacaatctcgtatacatggtacgatcataattatgtgggagaaacatatgcttcaagtgcttctacaataattcccaagaatctatttgtgcctttccagtgcatgcccgtgtcgctttcagctgcacccaccaagaggcggcacgaccacgagatttagtagccagcaacgctacctgtctcgcatcgggtacctg

SEQ ID NO: 666 - DNA, 618 bp, Arabidopsis thaliana columbia
cacctacaacgtttgtacctttttcccttgcttttgttttaaatttctcccttttcttcttgtcctgcttaggaaaattttgattgccttcatcatgttccacgggctctcatgttttattattattgtcacatcacaggccctctcaagtaaatctgctttccaaagacataaacagtggttgcaacatgccaaaacaaggagtgcaagacacaagattatgagggtatgttatttttaattctttacttcatgctaattggctcactatttactaattcatgtctctcatcttgttccagttcctaagggagcaagctgcacaatgtgctgccgaaattacccaggatcaagtgaatgactttgtggcggactctgatagtgatgtggaagatctcacagaagattcaagaaagagcctacaatggtgggagaaaatcctcgtcaatgttaagcaattccagtcacaagacaaaagtagagatacaacacccgctcctcaaaacggaagcgtttggccccaaaggtgaatggaaaacacaacaaagccataaagaactcgagttctgatgaccagagtcctcctacgtggagatggaattccaggattttactgct

SEQ ID NO: 667 - DNA, 575 bp, Arabidopsis thaliana
  unsure (1)..(575): unsure at all n locations
aagaagttgtcctcggttcttgcaccactcgaccaactggatgtggatatcacacatctcagcaaagtatacatttgctgtaggacatttgtttgctgaaaagtcagaggcaatatcgaatacaagtttaagataaccagtaacgtatcttgtccattcccactcctcgtcggttagagatgaatcaaagctgtgatcgtgatcacgcagatggcaaaacgcacccttgtactccaatacggtttcaagcatcacgaacgtagagttcgagttaacaatagaatcaagaaccaagatcttctgggagttgattccggcgagttgagcaatttcgttgaaccttacttgtgttgattgcgagctcttgacatatctcacacttcctcgaatcttttggatcacatctctcatagcctccaagcaatcttcgacaagagaattcagaagatgagcggcagatttcaactcaaataacttgcnccgttgattaatatctggctgctctgagacatatggtctttaattcgcaggacaatctcttcattaacagaaacactgtcgaacgtaacagcgaa

SEQ ID NO: 668 - DNA, 303 bp, Arabidopsis thaliana columbia
  unsure (1)..(303): unsure at all n locations
tctggcccaaaccatccataacaacaccacaagcagcgtggtccgagaaaacaggatctacaaaaaaagcaaaaacagaaggaaaaaaagaaagcaaataataattgactaaaaacctgtaaatatttttcgccacaggtctagaatcacttttataccgccaagtgaaagtacttccattgtagagtagatcctgcagctcnaagtcaagtaaacaatttctgaaatcacggtttcttctatcagctttctgactagcttcgtttgaatgatccccagtatttaaggtttggttgaagtccc

SEQ ID NO: 669 - DNA, 1058 bp, Arabidopsis thaliana
aaatgctcacatcaagacagtgtacaagtttctatgaagcacacgatctcttggacagtaaagacagtaagatgatggttgtaaacgttaccaagttctgtaacagttcataaacgttagattttggagtacttaccgtggctaggtgttgcatctctctctccaactttgaagtcttccaaacaatggttgcagcagcagcacttttattttgaaggcaccggttgcatagttgagcagattcttgaacaacttccccacacaagatgcaatgtttcgatagataaaaataatcaatccttgttttgtgtgagtttttagagtttaagggacgttgaccaagggagcttctggtgagacggggcatctccaaaaaccactggtttaagtctgcacccacgagtccaaataccctttgcaaagctggtataatttgtttgttgatgtagtataagtcattcagtcggtagggtgtatcgacgtccaaaagaaccagtggatcaacaaccatatcaacaagtcgagctcctggctccccatgaatcacaacataaggcactcgttcagcatagcgtggctctgtccgagggtctgctttcattgatttggttgccacaatagctgctggaggaaggagtgaagagtctcttgtgctgtaagtacccaaccgaacttcttttgcaaagataaaatcttgaagagacactctccctgatagtatccgcttccactgtctatacaagtacgacttaacctgcacaatgaatagagaaaagcagatgtacgacactgcagtttcagctgataattcgaaagagtgcaagaaatcaaatttgtaccttagagatgttcttctgttcaaaaaagagtctcaacgattgctccatagttttcgcaacagcttcacaagtgtctcttcgaacagtttcaataccttttgcatcaaatataggctctctctgattgggactttcataactggtcccaacataacgcttcttcgtaagaaggaaacaagggtgatagacttctccatctttaaagtgactgggtgtggg

SEQ ID NO: 670 - DNA, 630 bp, Arabidopsis thaliana
tacaggatcacggaagttcccagggattggagccttccagtgctatgataaggtatttaccacaaatcacacatgaatagtctctgattcatcttgcaacgaatgtcatactaaactgttttccttgctatgattgatgcagtactcgttaagcagcttgaaagcagcagctgagacttatgggaagccagagtggggcagtactggcccaaccgatgctggtcactacaataactggccagaagacacccagttcttcaaaaaagaaggtggtggttggaactcagagtatggagatttcttcctctcatggtactcccagatgctgttggatcacggcgagcggatcctatcctcagccaaatcaatattcgaaaacatgggtgtcaaaatatcggtcaaaatcgctggaatccactggcactacgggacccgctctcacgcgcctgagctcacagcagggtactacaacacaaggttcagagacgggtacctcccgatcgcccaaatgttagccagacacaatgccatattcaacttcacatgtatcgagatgagggatcacgaacagcctcaagaccactttgtgcaccagagaagctagttaaccaagttgctctagccactcta

SEQ ID NO: 671 - DNA, 1102 bp, Arabidopsis thaliana
tccaatacacagtcaagcaactccaatcagtgtgtcaaactaacacagagatgtgacctcttaccggttaaagatgagagcagttcaactatcaagtgaccatagcacaagtgtggaagaggtatatctctgactaattcatctgaatagtagtgaaagtgcaagactatggctctggtttgccaaaaagcaagtttctttacgtgtttcaggaaatttggcggattagatctgaacatccggaagatgaccagtcgatacttaaagatagagtcaaaggccaactaaaagtcactcgagctttcggtgctggatttctcaaaaaggtacaaacaaactttgataaccaaatcacattaagactagttcatcttctaacgattccatgcttgcagccaaatttcaatgaagctttgcttgagatgttccaagtagagtacattggaacagacccgtacatcacatgcgaaccgtgtaccgtccatcacagactgacttcaagcgatcgtttcatggttttatcctcggatggattgtatgaatacttcagcaacgaagaggttgttgctcacgtgacttggttcatcgaaaacgttcctgaaggcgatcctgctcaatacctcattgcagagcttctctctcgtgctgccaccaagaacggtacagttttaacaactaatcaatgattggtttagtacggttaagcagccggttaatgtgaaaataaaaccaacatatttggcaggaatggagtttcatgatctgttggatattcctcaaggagatagaaggaagtaccatgatgatgtctctgtcatggttgtgtcacttgaaggaaggatttggcgctcgtctggacaatattatccagagagaaaacaaaaattcaatagataaattaaccaaacacaaaaaaaaaaaaattaggttttggcttattgttttcaaacaatctttcaatttcccggaagttcaaaaaaagaaggcctaattctgttttccttctcccaatccaaaattgatcaaaatagctatttatgaaaatgttagttcaactagaatcagaacctctgaatgagctagaaggtcttctacctgaaaa

SEQ ID NO: 672 - DNA, 397 bp, Arabidopsis thaliana columbia
tagtaacggccgccactgtgctctacagcaacggatcctggaaaatcatctgactatcactgcgaacggcacgccattcatcgggtttcatgcccagcaactctttacctaaccaggcaacatgaccgtcggtcgccttgaccaaaccgatgatggcgcgacacaaggtggacttaccgcatcccgattcccctaccacacctaatgtttccccttcatacaggcgaagagtgacaccatcgacggctttgagcgttttccgcggttgtcagaaccactgtttgccatatttgatttcaaagtgcactttaagatcggcgatttcaaggaggacttttcttccttcagttacaggattcataacagtctcctccacggtttaaagcaagcacgcaga

SEQ ID NO: 673 - DNA, 1007 bp, Arabidopsis thaliana
  unsure (1)..(1007): unsure at all n locations
tccggtcggattaggttgctgttttagacgtaagcgggagacattccggtgggaaattggagatgttgaaacaaacgatgaggattgtgctttcgaatctccgggagatggatcgtttatcgattattgcgttttcgtccagctcgaaacggttatcgccggtacggaggatgacggcgaacgggaggagatcagcgcgaagaatcgtagatatcatcaccgttcctggttctgtctccggcgtcggaattgatttctccggtgaagggatgagtgtgaacgacgcgttgaagaaagcggttaaggtgttagacgatcgccggcagaaaaaccctttcaccgccgtgttcgttttaacggaccgtcaagcccatcaagtggcccaattagcccattcgagaatccctatacacaccatatggcttagccacgcgattcccgaagacgcgtttgcgaggaccatcaacggttatttgagtttgtcggttcaggatctcggtttacagctcgggatagtttccgggttgggtcaaggagagataacttctgtttactctctttccggtcgacccgcttggcttggaaccggttcaatccggttaggtgatatgtatgcggaggaagaaagagcgttgctggttgaaatcaaatcaccggttaacaattccttaaccggtagtagatctcacaaaatcatgaccgttagatctcgttacgtggatccaacaactcaggaattaagaaaccccgaagatcgcgcgcttttaatacctactcctctaactgtccgatcatcatcaaatcccaacatctcacggctcagaaacctccacgtcagcactcgagccgtcgcggagtctcggcggctaatagagcgtaaccattactccggagctcatagattgctgacgtcagctagagcattgcttgtgcagcacggtttgagctcgagcgatgcgtgtatacgtggactggacgcagagatagntgatcttaatagtgtgaaa

SEQ ID NO: 674 - DNA, 838 bp, Arabidopsis thaliana
gagccaatccagagattgggagcttatatgttagaagggcttgttgctaggcttgctgcttctggtagttcgatatataagtctctccagtccagagaaccagagagttatgaatttttatcttatgtgtatgttctgcatgaggtttgtccatatttcaagtttggatacatgtcagcgaatggtgcgattgcagaagcaatgaaggatgaagagaggattcacattattgacttccaaattggacaagggagccagtggatagcacttatccaggcttttgcagctaggcctggtggggctccaaatattcgaattaccggagttggtgatggatctgtcttggttacagtcaagaagagactagagaaacttgcaaagaagtttgatgttccattcaggttcaatgcggtttcaaggccaagttgtgaagttgaagtggaaaatcttgatgtccgagatggcgaacgcttggagtgaactttgcttacatgctgcatcatttgccagatgagagtgtaagcatggaaaaccacagggaccggttgctgaggatggtgaagagtctatcacctaaagtagtcactcttgtggaacaagaatgcaacacgaacacttcccctttccttcctaggttccttgagacattaagttattacacggcaatgttcgaatctatcgatgttatgcttccgagaaatcacaaggaaaggatcaatatcgagcagcactgcatggcaagggatgtcgtcaacatcatagcttgtgaaggagccgagaggatcgaaagacacgagcttctcgggaaatggaagtcaaggttttccatggcgggttt

SEQ ID NO: 675 - DNA, 1133 bp, Arabidopsis thaliana
ccaaacctaatacattagtttcactctctcaattttattcttcttcgccttcgtgctttctcttaactttgaacgtgaaaaaaacagagagtttgtcttcgaaaccaacaagaagatgactatgcgatcattacctttttcctcttcttcttattcactcgcttccacaagtttgagtaacagacttgagactatattcaagaaagcttcagagctttgcactctctgtgatatcgaagcgtgcgtcatctattacggaccagacggagaacttaagacatggcctaaggagaaagagaaagtgagagacattgctctgaggtatagtcaattaaacgaagccttgagaagcaagaaaagtgttactctttatgacttcctgaacaagaagaaggacaagacgaatttggagaagaaagcaatgataacggacaatgatgacttgaagacttgtttgaagaacgtgaatgttttaaagtctccaatcgctgatcattactttaatgaccaaatttctcaactgattcagtccttagaacctcatgtctctaaagtccaagaaaggattcgttttgttgagtcgcagaaacataaggagacaaaactggatcatcagagtttagcatcaatatattctctgaaccaatctttgaaccctagccagttcacgctgtttttgtacaaccatggagacaatactatgtctcagatcccagtgactgcataaaacttcaatcaggatttctcagagttactacaagaatctggtttgatgaagcaagagctttgtggttatgatcagaacatgtttatgaacaacaacaacttccaacattcttttgtctcaaacacacaagattactctgctctccaagaatcggtgaataacaactatgggttgatgccgaatgttctttgtggttatgatcagaacctgttcacgagtgatattaccaacaacaaccttcttatcgacaactcgatgtatctctgataacaaagatcatgtcaagagagtgtgtgaactgtttttcatcttcttgtaagactttaatatgttgttatagatgtatatcttctaagtattgcatacgcataatgtgttcttgtatcaagtgaaaatattttgtata

SEQ ID NO: 676 - DNA, 532 bp, Arabidopsis thaliana
atatcaaggagtcaagctcatctcctggaagctgatacttaattgaatgcaactgttggcatatagctgaggtcttcttcttgagttcttcccacgaaagattcttgcgtatcgaaataatatgcgtctctgctccaacgtatttcagtttttcatcagtggatcttggcataattctaccaccaaagctacaaagaaactttacttttccgaatctatcaaaatctcctcctcctccggtaaagttgttggactgagtacgctctggcaagaacacgcaaggcgcagacatccccgtgacatctcctcggttagaatttatttcaccaaaagctttcctagtaataacttctttatcacaacctacattgtggtaagcattaaaatgaggcatataaccgccattctcaagccgtatagtactcctcgggtctcgaccaaaatcatatgcatcagaaggacattcagattctatcctctcagttcatgaaaccgagcagcactatcataccctgtggttgattctgatagt

SEQ ID NO: 677 - DNA, 1009 bp, Arabidopsis thaliana
ctaaaggtagaggtcagaactgaatcctaactgcttcagaaccgcgaaaatgttctgttcttttaatgtgcgctgcggattatcttccgcgcccccctgacgtacaaacatgcaacgcagtgacgagtttggttgcggtatcacaggagtaaccacggaacgccgccagatttttctcctgggccagtttcggcgtggtattacgctcatagccgaaaatacccatatggtcccaacgcgtggtttcaccgatgataaacacgacataagtgtcatcaacgttttgcggtgcctgataagtgaatttcttcgccggattaagcaatgaattaggtagggaagattcatcgacccgcgcccaggcatacagccccaacgcagaaagccagtttgatggcagataagagttcgctacgacaccgccataactcggcaaatcaacgccggtcgccctctccactttcttctgctggatatccagcaaacgaatcggtgcccaaaccataatacccgccagtacgacgaccgccaggctgcgaatacgctgccctggggttcgcagttgtcggagcaaggtgtagcgacagcggttattccagataaggataagaggcaatgcactaacggcgattaaccagagaataaagttcagaccaacaacttcttttgacaggtcgatatcggtggtcatgacggaagcgatgatgccataaccaatgaccacattaaggaaggtcatgtaatagctggcacctgcggaaaagagcaccaccagcgatgccagaatacgccagctgcggcggccaaacagcgaaagaagacgtagtaaaaagaaggtcaccagtacggtggcggccagttcaacaacagcagaaatgcctttccagacggtaaaatcgtgcgcatagctgccgaagcggcggtaaaaaaccgcgccattcataaaaaggccaatatagattgcaagcaaaaagctactttagagcacactggcggacgatactagaga

SEQ ID NO: 678 - DNA, 854 bp, Arabidopsis thaliana columbia
ttcaatttcccagaaacggaaacgaatctctaagcttttcactcttcatctcaatctcatcgaagctgcttctgattccgctgaaaccgttagtgttatctccaaagatctaacagagtttctcagatccgattcagatcaaatcccaaatagtttgaagcagatttccaaaatcgcgaaatcagatgagcttaattcatccttgatccgattcactcaagctatgaccgttggattgatccgtggaattgatgatggatccgggtcgggttttactgatcgggttatggataagctctttacgaaatccgggtcgggttttgcttcggcgattgttggtagctttgcgaggaacttagtcgttgcgctttattcctccgccggcgatggatcgaattcgaaattgctcgacgcggttttctctgatgatgggaggagattgatcggcgattgcgttcagcgtttcgtgagtactgcggtttcggtttatctcgataagacgagcgatgttaacgtattcgacgatttattcgccggtttaaccaatccgaaacatgaaggaaaggttaagcaaacgcttgtaacgctatgtaacagcgcggttgagacgtttgtaagagcgtcgcggaaaccggttcaattgaaccggtcatcgtcatgtcaagattcgtctcaaacgctgaccgttggatcaacgaaacaagcgacgtggatcgatcgggtgtcgtcgtcgttatcggtaccgagtaaccggaaatatgtggtggatttaacagggcgggtaacgtttgagacggttagatcgttgttagaagtgttgattgagagagcaaatggtaaagtggagagttatg

SEQ ID NO: 679 - DNA, 566 bp, Arabidopsis thaliana
agggagtttcaaatgttactattcccataaattttggttcagtctcataatttaaaagaaggaaaaatgaactcaacatttttgcaatgttctatttagtttacaattaccgctgaaagtttggatgcgggtataacatcttcccaccttatgacgcgcccacactccccacagactgtgctgctgccgacttttaatccttggcttatgagtgtaagctggtgcgcgattctagtgcagttgcggtttacaaaacgactcctgttgaacccctttggctggggcaagggctctgtttgtgtggaaggagaaggttttggaaccactggagattcactgaatgggacccgttgaacttcctcccactcaagtgctctcctataaacttcccaggccatgtctttttcttcctttgtcagtctttcttcttcattctcttgtagcaatgtctcgtgctcatggaaactggcaatccagctagtgaaaaaggacatatagtgttacaaagcaagtagcatacaacaccatagattttaggtactgatgtgaatatggttacgcttgtg

SEQ ID NO: 680 - DNA, 995 bp, Arabidopsis thaliana
gtcagttgtcacaaagagtttttgggcttctagatgcatgtctttctcttttgcttaaaccagaaaaaaaaagggtacacaacctatttagagtgagtgaatgagtaacaaagagcgaaaaaattctcatgtttatgacattatcatactccataacataataagtacacaacccatctagtgtaagcttacgaaaacttatataattaatgtctgagaaaaaaagcacacacaaaagttaggggaagggagctgttctcttcatatctgtttcaacaacatcaagcgcaaagcctttcctaaacctaacccaataatcagcaaccaggttcttcttctctggtccacagatcccatctcttgacggcttcaacgattcagtcgagattccatgttcttcatctctctttttcaccaactccggtttgattctcccgagattcacgtcttgtggcgataccattagtgatggtaccctagtggtaatttatcccctataacaagacaacaaaaaacctaagttactaaactcatatcatctataatcatatcaaatatataaaaaaaatcatattaagatgagtttattacctcggtcaatctgccatgtacaccaaaatttcccgtaagatttggcaagatttttaagctccggtttcgcaacgagctcagggacccttggagttactagaagagccatttggatctaaaaacaactctcattcgatcattttcgtttttcagataaataataaacatatcggacaatgtatcgaaaatcatgaacctcgtaatcatgcgagtgccaaagcttttgttcctccggtgagagactttcgaataacttttccgacactatatattcgatccctatagattcaatacaataacaaacaaaattcagaagtcattagtctctagcaaaaagcttcaatgctcaaacttagaaaacatttatacgcataaaaaatatgcatggccattaatttaccgat

SEQ ID NO: 681 - DNA, 527 bp, Arabidopsis thaliana columbia
taactccaatatcaaaattcggagatttgaagtgggagagctcgttctatgaagcaacacgagagagctaaacgccaaaaaacagggaactaactgggaaggtccctatcgaatcaccgaggtggtacgtgacggcgtttataagctcgaaaaagttatcaacggagtacttgagttacgaccttggaatgccatgcatctcaagaaataccacgtataggtactccaaaacaatcgaactacgataaggcttgatcccttggcagagtacgtaggcagctccccccaagagcgcacgcaccatttcaattgtagtacgataaggcttgatcccctaaccaggtatgcgctcaccaaggaaaacgaacatcacattttccatcaaagaaggttagctgctcacctaacagttcaaccatccctcgataccaagcaggtcccttccaggtgaccagacaccagatcgtcgtttgctttacctcatttgtactcaacaatttcgagataagaataaaagaaaattttga

SEQ ID NO: 682 - DNA, 540 bp, Arabidopsis thaliana
catatactcgacctcgccatatgtagcttcagagtcttcattcagcataggaagtcgggttttaaacaagtatcggagttgtctccttccttctacagttcaagctttgatatgcgcgaggaattggctacgcaactttgaagagattggtatgcttctgacttcttttcttttgtccaaatttcaatcaatttgaatcttaatgcatattgagttcttcttttctgttgtacttagatgataatattgagttccttaatgaagacaaagatagcgagggagaacaagaagaagtttaattttgcttttaatttgtttttggatttgatactttgttgaatacttgaattgtgtttaaatttgcttttggatttgatacttaaatcatttaatactttgttgtttaaatttgcttttggatttgataattggattgattatgaagcaaatactattgggttaaaatttggttttgttatgcccattggacaactcatttgggcatggtctttaatgggcatgggcttcagtggacatgga

SEQ ID NO: 683 - DNA, 522 bp, Arabidopsis thaliana
gaagaatccgtggcgttttattttaatggctaaagcccttcccccagaatgattttcgcacgagccgccgtgaatttccttcatgatcttgcaaatcgcttctccttccacgcatgtcatcaagggcccgaataatcgccacttgtaaagtttttcatctactaagacaaaacgcgcagctgagctttgagtttacgagctttccatttgtccattgtattgggaggacgtgtttttcttcgccgagctcaatacttggcttctcaatgaattccactagggcgtcggccgatgtattttctcctcgtggaatccttgtcaactcgaattcgttaaaattcttcgctagcttttgaacatgaatcaggtaggcttccatattttcgtcccgagctgtgtattctccgttgaattgattcgcgacgagctggaaatcgcaaaaagcgcggatgtttcctatctttagtcccgagctagattaagtccggaacgagcgcttcgtaccgaggcacattgttggta

SEQ ID NO: 684 - DNA, 566 bp, Arabidopsis thaliana
gatccccttggatgatacaaaacaacatgaagagatggagaatgatatgcttggtgtgaaggaggacacaaatctatttgaggagatgatggagtcggtaaaagataggatgatccattcagtggaggaactcttaggaggagaattcccacacttggcttagtagcgttcttactagctacatcacatgtatcgacgaaattggtgaaggtgcctataaacgccgggtcgagccaaagcttgaaaacctcatttctagggcaagagtagttttggctctttttatctccatttcactgagagacaacaccgaacttatctcggtgatcccaatggcccttcttggttatccatgttgacaagaaagatctatatctcaatgctgaggtaataaaacagaacctttatattttgaagttataatttgataatcgtgaaaacccatattaaggatttacttgatactcaagtaacaaatatttaggatttttatatttacgttttattgtaattacttttaggtagataattccttttccttagagatcagcccttgtataaaaata

SEQ ID NO: 685 - DNA, 492 bp, Arabidopsis thaliana
caagagtagctaagttgacccagttagccgggacacccagagacagagtagctcgtcagctcttcaagctccttagctcgtcctcaagctcctcagttcgtcctcaaagctcctcagctcgtcttcaagctcttcccatcacagcgaccatctcctcgcctagctgtcagctagtcagctcgtccgactcctcgtctagctatcagctcatccctcaactacaaaactcatctacctcctcgcctagcggcagttcgtccattgactgcatagtccacctatctcgtcgcccagctcgtctataccttcagcagacaactcggtttgtccaattcgcctctctaccacggttcatccagctcgtccgagctcacttattctaatatgaactacgtgtggcttgatccatttttcgtacttgtgtgattcgtgcatcaacattttcgtacacataacttaaaatacaagagtagctaagttgtccacttggcc

SEQ ID NO: 686 - DNA, 552 bp, Arabidopsis thaliana
gaggtacttcgattggatgattgtttcagttgtatggatcatcgcttgaggattgcttagaaaatctctacaaagtattaacaagatgtgaggagaaacatctggttttgaattgggagaaatgtcacttcgtggtgtaggatgggatagttctcggtcacagaatttctgagcatggtatagaagtcgaccgctctacgctgcaaagaagtcaaattcgagtttacacaagagtgtcatgatgcctttcatgccatctactaggcaagtaggacacttgatgatgctcaaaggaattatgctactacggagaaggagttgttagctgtggtgtctgctttcgagaagttcctatcttatcttgttggatccaaggttattgttcacacatatcatgctgccttgatgtatttgatgcaaaagaaagatgctaagccaagacttttgagatggattttgcttcttcaggaatttgacatcgaggtaagagataagaaaggagttgagaatggtgtacagatcatttgtcacgcattagggatgatgatgatg

SEQ ID NO: 687 - DNA, 1960 bp, Arabidopsis thaliana
ttacatcaattagctcccaaaatcaacagtctgtttggttaactatagatagaagaagctaaaagaacataaaggtttcatctttggtatcaattgctatcagtagaggagaaacatacataacttagaaaaattcttggaaccacactcaggtatgataaaacttttctaacacttgagataatcaagctgtgaacagtccatcacattgatttcacaaatttcacgaaagtctcaatctttcacaaatcaaacctgagtttggagctctaacgttagtttcccggcgagactgaaacgcttggctaaagagctaacattgcgcctttgttgaaacccgaaaagcttcactgtcgaaatgcagaatagcatctccagccaaactggatggcgcgtgagcaaccaccgctcgtattatggactcgtgtttcgactgcggctagagcagagcggccaggaccagacgatattctgatgctgattcggtccggtttgtttcggttttaaatttcagataaatcggtttgtttttaattgattttgtagatagccttccaattttgactttttgataccttacaaagtgaaatggctttgagagttacttgcctctagcaacagtgtctgtgtctcctcatttttcttccacaatctcaatgcctctatttgaaatgttgcattaattttctgagtaaaagcgattcataggtgctttttgtatttccaatttcctaaagaatgatattttttttattgatggcaaaagtaatacaaatgttaaaaagaatacaattcaaatacacaatcaatctacgaattacaagtaatgaaaaagaattacaatatatgtttttggttttaggtatcatcagtagtttcagtttcacctcctcttgtttttgctcccaagcaacaaacacaagtaaaacaaaatcctaaataggaatccgaaacctaccgtgataagcaagcagttccatttactaagctgtgtcactccttgctgcttcagaacatcagcacccgtcgttaaacacgtagagctcgatatcctcatacctatcgaccggctcacagaatccaaaagcctcagcttcatcccatacgtcaattctcccaaaggcgagttgtcgaaaagctgaacacctctcacaaaacattctgtaggatccgagaactcgttctgaagaaccgcctcgtatggatacttaaccagagaaagataatgaaaccaaatccaatactgagggattcgatctctgttgatgaagaagccactgaaaagcaagaagtaagctaaaatagcaacaacgatcgtgtagcctaacatcacatgtggaacgacgccggataagaaagtcacgaaggagcttccggaccagaaagaggctaagatgattaagcagtagaataaaaagcccattaggcctccttcaagcccaacagcccaaaacgtcgtcactgcgaaacgtaaagagaggaagatgagcgaagggaaggtaacaatggcgtgagagaggacgtaggaggatctccggtaagcgttgtaagctgtttctctcatgaatatgtaacgttcttgtagaaagactgggattgcttctgcacatgtgtagaatgttgttgacattgcgaatgcgaagaatcctaaacgttcttgtgctccttttggggaattgtctaggttagtgaacattgtagctaggatgattccggtgaccattacagctcctagtctcattccgaggagttctggttgtcttcttgagtttaatatagcacgtttgcctattactatcatttcaatccagaaaggattggcgaatgtttggaatgatggtgttaggtttgatgagttgttgttcgttgctccagagacgagttccctcttgagatctcgcggttacgcttctttgagagaagaacgttggtgttctcttgttattgttgttgtacttgg

SEQ ID NO: 688 - DNA, 553 bp, Arabidopsis thaliana
ccccccccatcctcaccgcaagtatcagcagaggaaagctagtttccggcggtgaatccgtcgctcacggcggagaaccaccaacaccacaaccctagccgttcctgcattcgcgaatccaatgtggatcgaaatcaaaactctctcgaaacgatcaatgctcaattcacgaagacaaccagagctattcggaatcagaatcgcctctgttgttatcaccggattcattctcgccaccgtgttctggcgattagataattcgcctaaaggagttcaagagcggttagggttcttcgccttcgcgatgtcgacaatgttctacacttgcgccgatgcgttaccagtttttctccaggaacgttatatcttcatgagagaaactgcttacaacgcttaccggagatcctcatacgttctctctcacgccatcgtctcattcccgtcgctcatcttcctctctgtagctttcgcggcgacgacgtattgggcagtgggcttagatggaggctaacgggccttttgttctactgtctgatcattttagcctcgttct

SEQ ID NO: 689 - DNA, 715 bp, Arabidopsis thaliana
taatgtggaccataaacttcccatatatcctatgaagaatcgttttcaaatactccctctctcttgggtcctcagaatcaaacaaatcgagcaactttaacacaaaagaatggtcgatataccgtttggccacctttgtatcagtgtcagtcgaaacaacatatctcaggagcaactcgtaaactagctgtaagtgaggccaagaaggttccaaataaggttcttcttcctcaggatctgcaggctcttgacccgtattctcgtgtgatgctggtgggagagaccggaaaatattaacagaaatcatcttaatcatttcttcctgacacgactctgagatcttactagatccagactgtataaaatccaccagctccaacaacgtttgcctcttaatctccttgtctctagcattcttaatcgtgtcagtgaaatcgaaaaggaaacagcaattctgaagtttcctcaagaacaaagtttgcctctctgaaaccggcacatctctaaacaacgggagtggctccaccgagcccaaaggcggaggaggtggagttgcagtcactggcgacggagaagaattaaccaatgcaccacgagaagcgtgactaacgaccacattggagccaggacctgacctattatcaggtagaccaatcccataactagacggttcattagcttcggatttagagggctttcgatgccacctttcatg

SEQ ID NO: 690 - DNA, 914 bp, Arabidopsis thaliana
gttaagccaaagtggtagatacaagaggaataaccgattaatgagcgttgaaacatgaaactatgttcaatagaataaacattcatctactttctttgatgaaatcatcaagataatgtattaaaacgctccttcgagtattatcatcgagcaagatcaagttttgtctaagagtcaaaatctaacaatgcgaaatcatagaccaacagagcaatctttggtattatgaaccatgtcaatatttgcaataaccacatacagagacaccaacagcagttcaaaccgatcgtgaacttgcgaaagatcaagacttcacgtcaatatacattacagtttcttcgacttgagatcatacttccatcatcagtttaatggtctatagaagcagattttaacactttcatctacttaagattatacattctcagttattatacacaatgaaaaccttcacaaaaacaagagaacaatgaatctttaaaaactggacgagctaaagaagaaaggaacttacttccattgtaatggtggacaccaactttagcgagcattgcgtagtactcaatctctgatcttctcaacggtgggcaattggtggagattagaatcagtttccctgtgaacataagcaaaaaccagaatcaataacaaactacaaaaagctgaaacatttaggtatgcagaccaagtgttcgacgcaattacctttggagccacggagggatttgagaacagacttgtaaccaagagtgtatttaccactcttcataataagagccatcctactggtgataccctcatgagacttcttctgcgattaagccataaacccagagcacatattagtacattgagatcgttaacgatatctagatgctgaggcacagggatataacattgatgggagcgaatga

SEQ ID NO: 691 - DNA, 641 bp, Arabidopsis thaliana
caagaagttgttgatttcttgaagaatcctgataagtatactgcgttaggtgctaagattcctaaaggttgtttgttggttggtccaccgggtacggggaagacgcttttggctagagctgtggctggagaagctggagtgccgttcttttcgtgtgctgcttcggagtttgttgagctttttgttggtgtgggtgcttctagagttagggatttatttgagaaggcgaaatcgaaagctccttgtattgtgtttattgatgagattgatgctgttggtagacaaagaggagctgggatgggtggtggaaatgatgagagggaacagactattaatcagcttttgactgagatggatgggttttctggtaactctggtgtcattgtgttggctgccactaatagaccggatgttcttgactccgcgttgctgagacctggtagatttgaccggcaagtcacagtggataggcctgatgtagccggaagagttcagatccttaaggtttcttcttgctttcattttctgttagagtgaacaatggagacagtgtggtgaataatgttgtgtggtttattgcaggtgcattctagaggaaaagctattgggaaggatgttgattacgaaaaagttgcgaggag

SEQ ID NO: 692 - DNA, 785 bp, Arabidopsis thaliana
ccatctattggtggcaaggtggatcgatcagttaaaaagggacgtggtccatctatgtttgctctacaaggagaaaactatcacttgataggcgcgttgaaaccaaaacctggcgagtatgcaaaatttcaacagctttatttcatggacactgataatgaagttgacaattgaattgaagttatgaggtaagtgatagttttaaaaatgagttttatgaaaaaatttatattttaaaggcagctaatacattgtatttattatatgtgtttcgtaattatacaaaattgcagcaaaagtaataatggtgggatgaaatgtggaaaacaaaagttcaaaaaaaaacagtttcagctttgctaaagatgttggataagataaaccctcatgttgcaaattttaggattgcccatgatagattcaacatagagaaagaagaggcaaattttcatatgaggataatatctaaacgcgagacagatggcagagtgtataaccttccatctgtagctgaagttgctgcattgatacctggagattttgacgacaatttagataaaaaagatatagttctacagatgaagtctggaaagttaaggagaatacatgaatgtcacgtttcatatctagctctttagtatccattgttatttccaaaaggagaggatggttataggcttggaataaaaaaaactcctaccaaaataacaaaaggaaagaagaagcaggaagatgttagtatgaggcagtggtttgactaccgtttacaagcgagaaaagatgag

SEQ ID NO: 693 - DNA, 1073 bp, Arabidopsis thaliana
cctatttcatcatccttagcttcctcttcttccatggtacgtaatattcatatctatcatactttcatatcagtatgaatatttctatataaaatgtaaatattaacatatagctaaagcattgcatttggtaggaagtgatggtgctacaataaccatcgtaaatcgatgcagcttcaccgtgtggccgggaattttgtccaactccggaagcggcgatataggcaccaccggcttcgagctcgttcccggtggttcacgttcgttccaagctccagctagctggtcaggtcggttttgggcacgaaccggttgcaacttcaactcagacacaggacaaggcacctgcctaaccggggactgcggctctaaccaggtcgaatgtaacggtgcaggagcaaaaccgcccgctacactcgccgaattcacaatcgggtcaggtccagcagacccggcccgtaaacaagacttctacgacgtaagcctcgtggacggttacaacgttcccatgttggtggaagcaagtggcgggtcagaaggtacttgcttaaccacgggatgcgtaacggatctaaaccaaaaatgtccaacggagctccggttcgggtccgggtcagcatgcaaaagcgcgtgtgaggcttttggtagtccagaatattgttgtagtggcgcgtaccctcacccaccgagtgtaaaccatcgatgtactcggagatattcaaatctgcgtgtccaagatcatatagctacgcgttcgacgatgctacaagtacgttcacatgcactgatgctgattacaccatcactttttgcccttccttgcctaggtaggttaacttattttatttctgttatcattttatttgttcccacttgctttttggtaaatgcacacgacgagcttagctagcaaagtaaggtgattggcttgagccaggctaagaaaaagaagttgatactttctttatttttacacgtaataaaggagtgtataatagtcattccatcaaagaaaaggacaacaaaaaggttattacaacacgtaccataggcctaccattatgaaacgggga

SEQ ID NO: 694 - DNA, 523 bp, Arabidopsis thaliana
ctaaagtttgacggtgtttgatgccacctgtccgctggtgaccaaagtgcatatggaagtcgcccgcgccagtcgccgtggcgaagaatctattctcatcggtcacgccgggcacccggaagtggaagggacaatgggccagtacagtaacccggaagggggaatgtatctggtcgaatcgccggacgatgtgtggaaactgacggtcaaaaacgaagagaagctctcctttatgacccagaccacgctgtcggtggatgacacgtctgatgtgatcgacgcgctgcgtaaacgcttcccgaaaattgtcggtccgcgcaaagatgacatctgctacgccacgactaaccgtcaggaagcggtaccggccctggcagaacaggcggaagttgtgttggtggtcggttcgaaaaactcctctaactccaaccgtctggcggactggcccagcgtatggcaaacgcgcgtttttgattgacgatgcgaaagacatccaggaagagtgggtgaaagaggttaaatg

SEQ ID NO: 695 - DNA, 671 bp, Arabidopsis thaliana
tgtggttatgtgtttggcgaattggaaaaatgtcgggaaagagtaaagtttaccagagaattgggacaagaagtaagccgtgcacataactcacttcgggagagtataggtacgggtgtgagagttgagcgaatggtaacgtggagaccaccgcgggacgagtagttaaagctagatacgactggtcctttcacaagaatccagttttgactacagcggggggactcatacgggatgcaacaggtagttggtgtggaggatttgctctcaatatcggtgtttgttcagctcctttagcggaactgtggggagtttactatggactttacctaacttgggagagacatatcacaagattagaggtcgaggttgattcggagttggtggttggattcttaagcaaggggattagtgattctcatcccttgtctttcgtggtacatatgtgtcatgactttttatctaggaactagatagtctggacttcacatgtatatagggaggctaaccgcctagcggatgagttagaaaactatgcttttactttaccattaacctttcatatgttaaaggttgtccacatgttgagacgatttttcaggatgatgaccgcgaaattgcgtttctgaggcatgtccgtctttagttttttttgttttttgggggggggg

SEQ ID NO: 696 - DNA, 921 bp, Arabidopsis thaliana
gggacattgaaccggttttaactcctttctacatatgtcctcctccatttttccgacctcgcttttctggacaacctggaatgccaggtaaatttttgtaccatttcatttcgacacaacttctttgaatctcctcaaggacggaatttccggtgctcttgcagatgatgagactgacatggagtctgcactgaagagagcaatgccatggcttgataatagcttagagatgaaagacccttcgagtactatctttcctggtctgagtttagttcagtggatgaatatgcagcagcagaacggccagctaccctctgctgctgcacagccaggtttcttcccatcaatgctttcgccaaccgcggcgctgcacaacaatcttggcggcactgatgatccctccaagttactgagctttcagacgccgcacggggggatttcctcctcaaatctccaatttaacaaacagaatcagcaagccccaatgtctcagttgcctcagccaccaactacgttgtcccaacaacagcagctgcagcaattgttgcactcctctttgaaccatcaacaacagcaatcgcagtctcaacaacagcaacaacaacaacagttgctgcagcagcaacaacaattgcagtctcaacaacacagcaacaacaatcaatcgcagtctcagcaacaacaacaattgctccagcagcaacaacaacaacaactgcagcaacaacatcaacaaccgttacagcaacagactcagcagcagcagctaagaacacagccattgcaatctcactcgcatccacagccacaacagttacaacaacataagttgcagcaacttcaggttccacagaatcagctttacaatggtcaacaagcagcgcacgagcatcagtcgcaacaagcatctacacatcattt

SEQ ID NO: 697 - DNA, 947 bp, Arabidopsis thaliana columbia
ttgtatttgtaagctgtgcatcggatccaaagcttaagtttccagaaaggataggcagaactttggaatcaaggataggatcagagacaggatccgtgggaatctgatgctctgactcacgcagaattgctatgaacatggctacgtcaattcgagctatacacttctccattacctgttacgtagtatggagagaatgtatatataacatttaagatttcaatagcgtttacatactttaagctattggctttacgtttaaaatgtagaatctgaataccattttagccaagataggtaagcaaccgcactcgtgccgcgctcctcgcataggacagagccgcgatagtgtaactttgaaagcgtttttccataggctgattgaaaagcttccttgctcaatatctcccaagatatgctcctttgttttaccgccattttccggtgattgcatgtgaggagtgaaaacctgagagacagaagagaacatgaacaaattttgagatgtcttaaagaatgaatattttcttaaaatttcaatgaaagaaaaagtctttcttaaaattttacctgccaccaaacagattcaacaattctagagaaaatccagaattcgactttctctaatgcagcagtgaaggtttgtgattcctgccaatcttcgaaaacctgcttaaaaccatttgactgcttagtccattggttcttcttccttcttaccttccctaaaacattatgttcactcccatttgatgcagaggtctctgtgaaatgactaggaacactagttttaccaaaagcctgcaaaatgatctctctgagagaaatgatgttcgataaccagaaggtcaacctgaaacataaggaaccaagaaaaagctgagaagatcaagatcttaaaggctactacacgcacaatgttaaactgtgtttttgttacttgaaac

SEQ ID NO: 698 - DNA, 555 bp, Arabidopsis thaliana columbia
gttcataccaaaacttttgcttgcctcttttcccatcgagatctcgcctgaaacaggattcaaagacttatcagttagatgaaaattaaagaacaataggctacattgttgccaatttgtatgtgggaataaaaaatgactaagaacatttcagctttgatcagctaccgaaccgagcgggttttatttccttcttaccattctgaaaacatcaactgctcctgaccccattccagaaagcatcagagcaacctgatcaatcaatgacaattccaagagcttaaatgcagcagttcagcaacaaatatacaatcaagaaacctcagcaatgtcttctgtttctaatcaatgaacaacaagatagctacaagggaaatgctcgtcttacattcactctttcaacccttcgcatttcatcttcaagcaatgacaactgtgcagcagaagtctgatggatacaatcaaccgggctgaaaacaaaaccaaaagcatctcctaatcagttctctgaaattgcccaccagaagtaactataacaatcagttgcatctacag

SEQ ID NO: 699 - DNA, 549 bp, Arabidopsis thaliana
tctgcgaaacataaagtttctgttgagcacttgatgtccatcctgggaacatttggatcttttccacctcagcgtcttgaaatcgaggatccagttgagaactctgtctgtcaaggtgtctttctcttccaggtcctcctttagtttcctcagtctagcgatggtccagtcagaaacacagaacatgagaagagcaatggaatcaagagctattccacatatgagcaatgcgtaagtaaggacgacatcgaatccatcatattgatctttcttattcatcttgaagaggcagagagatgcaacaaggcaccccaaagctataaaccggaacacagctccagtccagttatgcagaatctctgctttggtgaacagacaatcatagatgagtccgagctcgacttcgatgatacgtaaagcttcttctgcagtcagcttgtcaaagaatttcctgctctcgtcgcgctcttgattggtgaagattagatcaacaataagacctttgaagatgttaaagtatttgtaagcatactgaataacttgtagtgc

SEQ ID NO: 700 - DNA, 477 bp, Arabidopsis thaliana
ggtccactcgttttaacttccggcgatcgattttcacggcgagaaatgttgtcggcgcttggctttgctttactcagcatcttcgcgatcctcttgtcgttatcaaccttgtctaatggattacttcaacctcgtaggatttctcatggcttgacggaaagtagcaagtacttgacgagggatgagctctggttcaatcaaaccctagatcattactctccttctgtaatcaatcttcccgacttcgtttcttcttcaatttgaattttcttcttgcattatcgaattgtttctaatttcgggattcgaattgtttctaattttatctcaggatcatcgcgaattcaaacagcgatactatgaatatctagaccatttacgagttcctgatggacctatctttatgatgatctgtggcgaaggaccttgcaatggaatcccaatgactatataactgtaagattttatttgattgat

SEQ ID NO: 701 - DNA, 420 bp, Arabidopsis thaliana
tccccaatgactcatataactgtaagattttatttgattgattaatctattctcatcgcatcgaaaaatttctaaatttgctctgtttttcttgataaacatgttcatcaggtgttagcaaagaagtttgatgcaggcattgtttcacttgagcatcgttattacggaaagagctcaccgtttaagtcattagccactgagaatctcaagtatctttcttctaaacaggctcttttcgatttagctgcattccgccaatattaccaggcaagtactagtcttatggtttttgtttctctaggatcatatgtttgagaagttgcgtttatagtagcatgttttgggattttttttgtggatgcaggactctttgaatgttaagtttagtagaagtggcgatgttgagaatccgtggttttt

SEQ ID NO: 702 - DNA, 646 bp, Arabidopsis thaliana
ctctccatgtatttcacatacgcctctgcacagttcatgtcgtcctacacaaatttcaaagaatgtttctaagatacactatgttacgataaagaagaaaccaaaggatattatctctatgtttattacatgtatatctgcaaaagcaatttcaggctcaaccatccagaactcagctaaatgccttgatagtgtgagagttctctgcccgaaaagtgggaccaaatgtatacacgctgctaagagcgcaacagtaggtctccacttgtaactgaccagaaactgtcaagaaagcttgacggccaaagaaatcattggaataatcaattttaccatcattcttaggtagtccaggcttaagccttaacctctcttcaacatgagctaaactcgcctttgctacacttagttgagcaacggaagcagtgatctcttccttgctcgccttggcaactttaagttgcgcaacagcttcacctctctccttgacaataagcctggccgcttcaacgtcagcctcagattggtggagggttatcaatgagatcctgctcaaccatcatcagtgtgattgatcaaggttgtcacttggaacatttcaccagcacatcacaatcacttgttgtgatgataggagtgtgaatgt

SEQ ID NO: 703 - DNA, 660 bp, Arabidopsis thaliana
tcgctcatctctcaacgcctctcactcactcaaccggagttcaccgtctctcatcacctccatccactcgacctcatcgttgccatctctcatcaaaaccaccaccgtcttctctccactccgatttctttcactcgacctcacgccgttcactcaccgtaaagctcaactcgaccgctcatcaaaccgccgctgtttcccggtgaagattactcgacctcgccggacacaccgccaccactcgaccgcaatccacctagaaacgaaaacccaaggcacaatttcacacgaccggttactcgaccggtttacacgacctggttattccacggtttactcgaccgagttactctatcggttcggtctattggtatactcgaccgcttgtgtttgttgggactaacatattgacgtttatctttgagttgtattttttctcaggaaatcaatatgagtaactacagtagcgaatcctctatggatgcggattacaacgtcgatgaagctgagtcttggtcaactagaccagagaaagagcaacaggcttgtgagagcttcagaggtgacacccaacgctcagtagctcgacacaatgagaggaaagctgagattgctagaggaaagagagcaatgacaagtagatgcgaattgatcgacgaa

SEQ ID NO: 704 - DNA, 814 bp, Arabidopsis thaliana
tggggaacctttcacaaagttcttttctggactttgctcccttcaggttgatgggtgtttacccatttgttttgaaagagtggcctcccacgccctctttttggttgtttaaccaaatctttgattagagtaaccacaagtgaagtgggactctttgagccaggggatgttgaagaagaaggggttgcaggtgcagaggctacaactgcttcaataattttatcagccttggtactcataaggttatttgcttcaccctgtagaactctttgtcttctagcagcactctcagttgggtctgcacaagtgatgtattgaactgtaacatctcttagttcaccaagtatctgatcttttgaggggattgcaggggttggtaggaagacttcctgggattcttgtctccctaaagggtctgggagctgactttggatctccaggggcacaggagatctttcaagaggaggtctccttggccgggaaatgtcagaaactgcagggactgttctgttctcaggtagagatttttctctccattggaaattttcaggtgtatgagccctatccctgtgggatcctgatctcgatggtgtttgagttctatgcactggtctgtcatactgacggggacgatcaaagtatcctctagtctccctatgcctctgagatctctctgcagactggtaaggccctccagtacttaagttttccctgttcctcttcaaattatttgtagcttcctgagataatcatgaacttgcagagatcaatgggacgtttctaggggcagtgaagttatccttagacgtgtagt

SEQ ID NO: 705 - DNA, 1086 bp, Arabidopsis thaliana
ggtagaaaatatactcacaagattactaaccctttaataatactggtgtagacatcaatgacaacaaaaaaccagcacaaagaaaagaaagcttgaggaaaggcttggctcgaggaaaacaatttcagagcaaaacccaaaaaaatgaaaagaaaagactctcaaagtttaagggacaagtcaaggttcttctgcttctcttcttcagctggcttcaacaattcctcgcctctctgccatagttcagaagttggaaactctactggaatccttcctacatcgaacctaccgatgttttcacatgtggaagtcaacggtggagcaatcatcatctgatgatgattataatgattctctgttgaagttagttttgctattgctggttgctgaactagtggtatccttgaccagttgatctgaccatactcaccaccgtaaacgttatatgaacttggcttatgactcattgagtgtgcctgaatacccaaggttctgttgctgtactgtccatggaacgggaccggagcaaaaccatatggatgcccgaaagctgcggcagatgccatccgttgccctcgctttgccaaagtcctttctcttttgtgggcgttttggtgaccaccaagcgcctgtgagctgtagaatgttctttgacagtagttgcatgagaagagcttctgttcagtggaagttgacccgttaaaactcggagtgactacacctgtctctaagcagtcgaggagattgagttcttgattgagctgtggttgactagaatcatatcctgctagcataaggtcaagctttataccttccactccttctttttggtcatgatcatcttcttcttgtgctgctactgtgtctatgttgtaattttctaggctcagctttggggaatctgaaaattgaagactggtggatgcagaaatgatgcatgaggaatcagatgatcttggttttccgctggaagaatccatgaggggcaaagagggtatataattttccaggtgatggttttgttcacttcaattgtctctctctctcaccttatggattaatagctatatagcctaagaaaaaaag

SEQ ID NO: 706 - DNA, 1173 bp, Arabidopsis thaliana
tcgactccaaatacaaagttctaaagaacactggtgaaaatcaataacaaggggacagagcggtttttcctaatcaaaactacaagaaagtaaccccaaacattttataatctaaagaagttgattccactcatttcaagttccaaattagaacagccaaatgaaaaatccatcaccagattttaccgatttcagaataaacgcagagaagcagacgcagaaaccacatagcagcaattgtgatttgagtaaacaactgtttttatgctcctccctcttccttctcctcccgttctctgttccattgctcaatccttgccctcctctcctcacttccttccctcccgccacccgggctccctcctcgtttagggcttgcttgtctcctaccccttgaaccgtccctctcttgcctctccgacctctcactgctcctttttccacttccatgacggtaaaactcgcgatctctgtcccgatgactgaattccctgtgagaaggatcacgtcggtcattatctctcttgttcctggggctaatactcctgcttctgctcctgcttctacttcctctgcggtatgatcgccgatatctcccaaagagttttctccttagttccctcgaaacaagcttcacatgcatgaaattacagtacccaccacggttgcagttgttttcttcatactgcctacacgtggcttcgcggaaatccgtcacaggagagaaatcagcaatgatgggacgtcctgaatagaacctaccttgcagagcctgcaaagcagctgcagcctgatcctcttccttaaactgaacatatacgttgccaatcatgtggtcagcaaggttgtcacaaatgttgaggctctctatctcgcgaaactttccaagctcctcaaaaagatcctcaaagaaatcctcaaagtgctcctgaatcttacgcgggtcgagtggttggccctgagcgtcaacaccaggggtaatcatgtcaggcctttggtacatgtttgaaagaaggagtgttggggagatggtaggacggttgtgaagacgcgagcaccggtcaccatgacggcaagcgccaatcttgaagtagaaagggcaattcactctgtctttctcagtaccaaagattgatccaaatgctcgccatggcagaatttcaccctgagttt

SEQ ID NO: 707 - DNA, 616 bp, Arabidopsis thaliana
gttgtgtgattggtttcatcttgataataagaagcattgttattgtctcttgttagaaactcaagtcacacaatgaatcaggccactggagaagacttttccgttgagccaactgattcaaggagacctttccgtgctcttcttgatgttggacttatcaggaccacaacaggaaaccgtgtgttcggtgctcttaaggtattaacttgtttctctttttttgttgtgagtgctcttatttgtcattcttcttgagcaaatgcttatactggcaattctttaatatccttttggttcgctgtttgaatctgtagggtgctttggatggtggtcttgatatccctcacagtgacaagagatttgctgggttccacaaggagaacaagcaacttgatgctgaaatccacaggaactacatctatggtggccatgtctcaaactacatgaagctgttgggagaagatgagccagagaagttacaaactcacttcagtgcttacatcaagaaaggagttgaagctgagagcattgaggagttgtcaagaaggtcacgcagctattcgtgctgacccacccaaagaaaccgtgaaacctgctccaagcacacaagaggtag

SEQ ID NO: 708 - DNA, 1499 bp, Arabidopsis thaliana
cccctatcactgctccttttcccatttccatgccggtcacggtccctaacgtcccctctctctcgctctcgcgaatgctctctcttacgtcgagggcttatactcctgcttcgacttctgcttccccgacggtatgaacgacgatacctcccaaacaatttcctcctaagctccctcgaaatctgcttcacatgcatgaaattacagtacccaccacggttacagctgttttcttcatactgcctacaagtagcttccctaaaatccgtcacaggagagaaatcagcaatgataggacgaccggaataaaatctcccctgcaaagcctgcaacgcagcagctgcgtgatcctcctccttaaacagaacatacacattcccaatcatatgatcagcaagattgtcacaaacattgagactctccacttcaccaaacttgttgagttcttcgaaaatatcttcgtagaaatcctcaaagtggtcttggatcttactcgggtctaacggctgtccctgaggatccacacctggagttatcatgtcaggtctctggtacatgttcgagaggagaagcgtcggcgagatggtgggacggttatgaagccgtgagcaccggtcaccgtgacgacaagcaccaatcttaaagtaaaacggacaattcactctatccttttcagtaccaaagattgaagctaaatgctctgccattctcacctaaacataacaaaaatcaaattcaactaaacacaaattgttcttctacgcttatatgataaatcaaatcactacaagaacgattcagaatcagagacgagaaccaaatctaagcttataaacgagagttaacacaaaatcaaagagaatcaaatcaatgaacgaatcagaatcatgaatcattgtcaaatctaaaacagatcgagacgtttctagtcatcgagtggagatgagaatccgaaacggagagagagattgattagaggaagaagaataccgaagaggattttcttttagtggaagagaacgtatcgccgacgaggaggtgccgttgccgatcacgatctagggtttaggtttatttgattagcgactcgtgtgagccggagagagagagagagtgtggtgaaaaaaagagaaagagatattaatatgggtttattttgcaaataaactattctacaaggaggaataataaaataaactatagaaagttacaatattggtcctcgtcaaaatcgtcataacataacgaggattttaagattgatccttttgttgctccggctcagaaccgaataaaccaaactaaactgaactggattggaaggaaacgaacagaactagataattaatatctgaatgatttttttaaaaaaatatgggaataaaaagagctaaagcttctctctctcttctctctcacaaaaccttcagagagggaaagctttttgtctccacctacaagaattttccgatgatagccgttccaaataatttgggctt

SEQ ID NO: 709 - DNA, 1213 bp, Arabidopsis thaliana
cgttcaaattttccttctcttggacatgggtttcatcagcttgttggaaccattttacacaaaccttcagcctcttgataatatccgtcatttgctcaatcttagcctgcagggacagagacaaaaaaaaactccttctgagtgaaaccataaatgaaaacatctacaatgcttagagcacagagcaagtgtaactcaatcaatataccttagtatcaaactttccagcttttgctctctcactgagcaacgccaatatttcatcttttgtaaagtcaactttaccacattcttcaatgctccctacatcgctgttcatcgtgacatcttgtttattcacagccgaaaaagcttgtcttctcccagtacctccttgcgtttccactttccttcgcttgtcaaatgaaatgccaccgagaccctcctttttctgaaattgaatcaaaagccacagatttttcatcagtttcataacaaaaccaatatccagctacaagaaatgtagaatcccagaacccacgaccactctaaattctattgataacacccatcagagtaagaaatgcaaagccgatgaagataacaccttaataaattcatctggtaagctcacaaacaaaacccaaaatgcgaaattaataattcgaccagtcctagggtttttctcaaacccatcctccagaacactcaaaagtgacgacgaaatgtagtggaaaagcatgaaaaagggagcttacggcgtttggactgcgaggaggacgattctggttgcgagaagccatctccgagactcaaaattgctacaaatttcttctcctttcgctcgtcaagtgcataaaaatcccaaaatggtagtcttctccctaaattcgggttaccgacaataaaatctccgattgattctcaagatcttagagaatcaaatcgaaaaccttctcaatcgaagtcgagaaactaggattcttactttttcctaatttggggatttttgtgtgtgtgtaagtgtgtgactgaagcaggagcctgtagtttcgaaattcgaacgattttgaaattagatgtggcggacttctggaattatcataacgttatcaatcaataaagtatttaaacatatgggctaactttgggcctacaattcggcctaaatgtttaaataatcttgccacgtggctttaaggcggacaaaaatgacacgtggttttatatgagt

SEQ ID NO: 710 - DNA, 1407 bp, Arabidopsis thaliana
tctactttcttctgctcagaacaatgaactcttcttttctgcataaagatgtgacatttgtaagctttttgtgatgaaaattatcccatttatcctttttatattccaacaagagtcatgacatgtatgtgaaattgctttaagaagagtgaagtatctcattgtacctaaaccaatggagattctgaccaaaactcaagaattctgtgagagcagaagccgctagaagaaagcttttggccgccattgaaatcaactacacacagacatagcctaaagatgttgcattgtaaaagttgaatcagtctaatttatcttcgattcgacagaagcatgaagaaacaacccgcaatcaaatacactgaaatcaaaacccgaaacacacattgaatctcacaaacaaagtaacgcttttcattttccgacgctgattcttccatggctggatcaatcttctcccttcgattcaattgcaatttcaatttttgggttttcgtttcttttttttcggattataatcttgttgggccactgagctccaaagaatttctatttagcccccgttataagaatacttactttatttgtttattttaatctagataatttgtaaaagacaaaatgattttggatttttgacatatttacgacccaaccttagtttggattaagatccaaaccttatttcggatctttatttccaaatctaaaattgaaatcccttactttttcaattttttgttttcttgttcacgatactcttctttcttttctcttcaacacccaacctccttctctcttctctcgtttctttcgatcctcctctttcttttcttgcttgtttatcttaatcctcctttttctactacacatcaaagtcttttacttatttgagttttaagtggatccttgcagaatgttgtcgacttttgaatttgtttgagaagagagaaacttcatgcaaacaggaggattaactgcggctacagcgagcactgagcttggcttagaccaagtgccatctctgcatatcaaacaagaagccaccgctgtcccaaaagcttcagccttggctgcatctactctttcccagataaaaagtatcaaacttcccacacacatttcaattgcaaagtaaagtcccaagaaaaacggtatagccattgccatggaaagtggaatgaaccttccccatttgctatggagactatcttttactatgtttacgagaatcgccacaccgaagaacacgtagcatagaacgagacattctcttggtactcctagtttagccatgcttcgatatacggtagcaaatggagtatggtattcagtgtttgggaggcctaaatcatcaaatgctttatagaatagccagaaaacgcaaggagatccacacaacccatt

SEQ ID NO: 711 - DNA, 476 bp, Arabidopsis thaliana
ggtgattcaaagattgaccaaacaaatataggctagaaaaatatatatttactttgtctattcaagaagttactgtttcttggttgcgggaagagaggaagataattggtaagaaagagtacgtatatctgtaacgaaaattacctgctaagtcttgccccatggtatgaagtataccatgaatctggaaattgagtataattacctgaaatccctcacatgcagctcataaatacttatatctgagaaggatcttaggcatggtttcttatctgctaagttgtcccatccttcaggttttagatcatcagaatcaagattaaccagaaaagttttcctcccatctgctgaaagcctgcttgagaaaatacaaatcacacgatgactcattttcaaaaaagttttatgggggatatccattcaagccacttgagaaatactattacccccgtgcataaggatcactagcatagcaa

SEQ ID NO: 712 - DNA, 847 bp, Arabidopsis thaliana
cggcgttgaatcagctcctccgccgcactcctgtgacccttcaaatccaaccacgaaactctaccagttctgccgcactgacctcccaattggcaagcgagcgcgtgatctcgtctcgaggctaaccatagacgagaagatctcgcagctggtgaatacagctccagggataccgcgtcttggagttccggcgtacgaatggtggtcagaagctttacacggcgtacgtacgccggtccaggaatccggtttaacggaacggttaaagctgctaccagctttcctcaagtcatcttgaccgctgcttcattcgactcctatgaatggttccgcattgctcaagttcgtttctttctttcactctcactctgttttttctcgtgtttgattaatttatttaataatctgtcttaaactgtcacaagtattgttcaaatttcgatgcttttttttaacaaatgtcatggtagtgttattaaaagttgttaaaatttatctaatatttgctaaactgttaaacctagtttatggtattttttggattaattgtgttaattttggaactaaacttgttttggtagtaaaataggtaggatatactctttttttatataaggaatattaaataagaatgtttttgcattgagattttcaggttataggaaaggaagcaagaggagtgtacaacgcagggcaagcgaatggaatgacattttgggcaccaaacattaacatatttagagatccacggtggggaagaggccaagaaactcccggcgaggatccgatgatgaccggaacttacgcggtggcttacgttagaggactacaaggtgactcttttgac

SEQ ID NO: 713 - DNA, 859 bp, Arabidopsis thaliana columbia
gattctacaccttaaaaccccagactcactcacatacattataaagataatttagtatctatgaatctatccaacaaacatgaatctacgtttaacaaccgacaattctcaaaattctcacacataaaaaaattagtacatgaagtacatgttaattgagttagttttcacttttcaccattcgctattgtttccacacaaaaaatagtattgtttgattgtttatattgttcacgttatcgtggtaattaattgcatgcatgcatgcgttaatggttacgtgaaggcatatgccgcaaggagcagaggcggtgcacgccgcaaaccctaaattactagtcatcctctcaggcattgacttcgatacaaacctctctttcctccgtgaccgttccgtgaacgtcagcttcacggacaaacttgtcttcgagctccattggtacagtttctccgacggccgagattcgtggagaaaacacaactctaatgatttctgcgtcaaaattatcgaaaaggttacacacaacggaggattcttgcttggaagaggctttcctttgatcttgagtgagtttgggacggaccagagaggcggtgacatgagcggaaaccggtatatgaattgtttggtggcttgggcggccgagaatgatttggattgggcggtttgggccttaaccggagattattatttgagaaccggtaaaacggatttagatgagtcttatggccttttgcaagccaattggaagacatcagaaactctacttacttgcaaaaactctccggaatccaacatgcctttaaaggtcagatcagttttttttcttcttaatcacttaaaagaaaaaaaaactca

SEQ ID NO: 714 - DNA, 609 bp, Arabidopsis thaliana columbia
caacgaaactcctgagctcagcttcactttgctcgacgttatcttcttcgttcagcgacaatggcgtcgattacgaacctcgcctcttctctctcttcactctcgttctcctcccaagtttctcaaagacctaacaccatttccttcccccgcgcgaattcagtattcgcattaccggcgaaatccgcacgccgcgcttctctatctatcaccgccacggtatctgctccaccggaggaggaggagatagttgaactgaagaaatacgtcaaatcgaggcttcccggaggatttgctgctcagaagattattggcactggacgacgtaagtgcgttatcgctagagttgttcttcaggaaggtactgggaaggttatcatcaactatcgtgatgccaaggtaaatttatttctaatttcattatcttattggcttttacactgttgcttagtcgcttgatgtgtttgcttaggccttgaatttggagtttatacagctgagaattgactactcatatgagattaagatttgaacttgaaattggtattttaacagctaaagctatgaaagcagtccacttaccccccgtttgaacatattcttggttta

SEQ ID NO: 715 - DNA, 985 bp, Arabidopsis thaliana
atattagttatataattaaattttaacaataaaataatatatgaccaatagatgatatacaagtgtttttgtaggtgtcttagagtttctcacttgagagactaattatactctctctcatactttttgattatattttatttttatattgaacagtttctcaatgagaaaccattgatggagatggtctaacaatcctaagtgacaatcctaagtgacagaccaacataacacctagactttgagagtctaacatgtagagccctaaactggaaaccaaaatacagaggatctacgagttcttcaaggaagaaatcacgtcaaagtgatattaaagtcatgagaatgcttgtgtcgtgaatcagaaggaaaagacggtgtccatgtactgatcgggagactagatgtcatgggacggatggttcgatgatcagctacattcgaagaagttggcattaatggagaagacatgaagttgtggttatgcggcttcggtgtctgttcttgctggtttgttccacctaagaaagttcctacaaccacttgaataggagtggctgcaaccagcaagccagcaacaccaccacctactacacgtccatcagggctagcaagcgacacgctcatcccgcctgttctgcttcgtgtcccgtctgagtcactaggcatgaatgttccagatagtgacaatatctcaaaccgaccctttaaaaagcataagcactcgtcatgatcaacaagaattacatgaaaaccaaaagcaagggataggcaactcggttttatattccgttctgattgtttacattgatggtttattaatacagtttggtaacagtgtttttcatctatgcaaatagtgattaagatggaaaccgtacctcataggtcaatgtaccaccagatgaatcaggctgacgaagtgtaacgctcgaaacgacaccgtttgcgcataaaacgcaaatagctagagacccttgttggg

SEQ ID NO: 716 - DNA, 961 bp, Arabidopsis thaliana
ggtcttcgacggctgtggggacacattgtttgtcactttgtatttttctgtagaaatttctttggtgtttcttactatagtgatagtgggaaacacagtgttatgtggtctttgatgactttggggacacatgtttgtttttttctcttatcttctcatttttcccttaatatatagcacattgtgataccttcttcttcaaatctcacttttactctatctcttatggctttttcatcaccgtctgacttcaagagataccatgtcttttcgagtttccatggaccagatgtccgtagtggatttctcagtcatttacacaatcacttcgaaagcaaagggatcactccgttcaaggatcaagagatcgagagaggccatacgatcggacctgagctcatacaagcgattagagaatctagagtctcgattgtggtgctttcagagaagtacgcttcttcgtgctggtgcttagatgagttggtggaaatcttgaagtgcaaagaagcttcggggcaagttgtgatgactattttttataaagttgatccgtccagtgtacggaaacagtggggagacttcggaagtactttcaagaaaacttgtgaagggaaaaccgaggaagtgaagcagagatggagcaaagctttggcctatatagcaaccgtagctggagaacactctctaaactggtttgttgattaaattataatgcttttatctttctaaatcgatgcttcaacggtggaatttctatgatttaattagacccaccaacttgattttgtttgcttttgttagggataatgaagcagagatgatccaaaagattgctatagatgtttcaaacaaacttaatgttacccttcaagggaatttgaagggatggtgggacttgaagctcacctggcgtaactggactctttgttatgccgcgagtgtgatgatgtgaagatgattg

SEQ ID NO: 717 - DNA, 970 bp, Arabidopsis thaliana
aatgtttaagcttctgccaaaagcacttcaagatacattgtcgggctgtctgaaattacaaaagagaagcaattttagaatagtgatgtcgcagtcaagcaagagcaaattctatatgatgacaacttgatggcattaggaacttaccatttggttttggttttgctccatttttcaatggctttataccaatcccattgaaagaagagagcgattaatcttataggccctgcggttataacttcaagaaaagcaagccaaaatgatctttgaggggacatgccggttgtcgcgagagacagtaagaatccctcaaagttgcatgagacggtgaagtttcctgcttttatgccatccatagccttttttgctacttcttctgtttccattgaaccagaggatgcagctattatggcagtgacttcaggtctgctcttctgttctgagagagcacccaaggaaaatcaatcaaactcataatatgaaccaaggaactcagaacatcagtccataatgtgtttacttcattagttatcaaaaaaaaaaaagtgcttacttcattctcagataggcaaaaagaagtcttttatgaaattttcagatgctattggaagataactacatcccattattctcttctaaacagtatcatgtgaaccacagtacgcagagacttcaagctaaacactatcacagtactcagtacttaactcaccagtctatcagtttctcctaactggcactctcatagaacatgtgaacatgaaatgctacgtgtttgatagagtacacaattattcgagaccagatatagggcacatatttgatctcataatgacatactagatgaataatagtttatgtctacatatgtcccaaccatatagtacagccttatttagtaatctgtctccaactcttttatacatttaattgcattagtatttagtagcagtacgtaatcctagct

SEQ ID NO: 718 - DNA, 767 bp, Arabidopsis thaliana
tggaatgagtacaatctaaatcccttaacgaggatccattggagggcaagtctggtgccagcagctgcatgacttcacacaagatgtttaaaagtcgatacttaaaagtccgaaaaccgaacctcgaaatcgttagagagctccttgtcaagagtcttgagaaggtcttcgccgtaggtttcgtggtatgcttgcctgatgactttcctctgttcagcacttctgtgagccaagattgatatgatcaagtcctcgttcgtaccccatcctgcgaaaaacacgaatcagattcactttacataaccatcaaagtcacatacttcagatccaagtcacacacacttcagatccataataacagaaccggtcaaacagattcacaaaatataaatcttaagatcttagtgttgtattacacgtaactacattatagatctagactaagaagacagatctgtgacagtgagaatcaaaacacaactcaatcaagatctcgtgtgaatgtaatcattgtcattatcaacatgatcagacaatcaaaacttcatcactaacacaaaagattgttatagatcacacaaagaaaggagatcattgtcactgatccgatccatgaaggaacaatctcgatctacatcatcgtacaaatgatcataaaacgctaccgacacaacattcatatcatcggaccaaaacaaagatcgatccacatgaaaaacaatcaaaacaaatgatcatacaataacccaccaaacgaaaaccaacag

SEQ ID NO: 719 - DNA, 481 bp, Arabidopsis thaliana
gccaccgcctcctcaacctcgaaagattcaccatcggaactcttcaacacaatcttcttcgcagacatggttatggaaacgaagagagaagagaaagattttagatttgggagatttgttctttgaagaaaattttggagaagcgatgaatgaaataaagagatgcgtctctctttatatataaaacaatccctaattttgataagtcggtcgattgttaaaaagtcgcaagtttagggaaattaggaaattgtttcaaattttgtttttctaaaagaaaaatagaaatcaatcctattgattttaaattttgttttcaatagttgaaattaatgaaattaggactctgttctatttttcttttggaaatattaactttgatccgtttaattcgttgtatttatctcattattaataatatatgattttatatatattacccgcgtcaccagctccataattgtcaaaaaaagtaaaagaa

SEQ ID NO: 720 - DNA, 910 bp, Arabidopsis thaliana
tcatctttgtcaatctcttcttctttgtattgtattgcagcaatcgctgagctacttgacaatgctgttgacgaggtatgtgtgaggattgaaatgctttcttaagttcattttttattatctttttcgtttttgattgttgcgagtgatctggttttttaaagcatcggtaccgtgtttggttaatttgaattacttatatctcagatacaaaatggtgctacgtttgttaagattgataagatcaatattgtcaaagataattccccagctttagttttccaaggtacatttcctttgaatgactgtggtgcttttgcctaaccaaggcttgggatgttgttattgatatggtttctctcctttctttttgaacttgaagatgatggtggtgggatggatcccgctgggctcagaaaatgcatgagcttaggctactcatcaaagaagtctaatacaacgattggacagtgtaattgttttacttagttaatatgatcttgagctcgtttctagtcgggtggtcttgctgtcttggtttccgacaggtggtctctaaccagagcttcccttttgtgtttagatggaaatggtttcaagacaagtaccatgagacttggagctgatgctatcgtttttagtcgctccactcgtggagggtattgatatatctggtcatattcactctgaatatgtcgtttgctcttgttttaacctttttattcttctctcttttagcacatctactcagagcgttggcattctgtcatacacattccttagaaaaactggtcaggatgatgtcactgttcctatggtaaaatcttcagcatttgtagattttgttcactcctgaaatgaatattcttggaactcgaaaatgtgcactcttctttggtctcaagtgata

SEQ ID NO: 721 - DNA, 934 bp, Arabidopsis thaliana
aagcttgctggcattgcgccgtcaccaagcttgaacttgtcgatcattttgtcttgtccctgaatatgaagtgtcttcaggagaaagttcttcacaatttcaggctctccattcatcagaaatgctagagcactcggtacaaaatcacgtacgaacaccttaaaagttacaatagacaagaaaaattgtaatgaggcagaacaatcatagtttgtaatttgcttaaatgttctagttgacgtgcgattcactctaattttgttcttctcttttatgtcttaagagttcatcaaattcaccaaaaccaaaacagcaaaaacaaactagaaagaaacaaaacacaaccatacctgatcatagttcaagacctcttctgaagcatggtcgtaggcggcgatggttcctaccggttttccccggaagtagacctgagactggcagagagcctcccaagcttctgtgaccatcgggttacgatccattgagtctttcatggagaaaaccggagtatcccaaccagacttaccgtctagtgaatgtgcactgtcgtaaaggcttaaagacatttcctcgtatgatattttccgttcaagtttgagtcttggacggtcaagcagccgagacagtaggtcttcatccgtcagttcggatatcgagcacatcgagtttactgctcgaattccttccttttttttgccattctcgcatagagagctcatcgaattcaccgctcgtagtacgtcccgtttctttggtcggtccatggagatagctaatttgttcaacaaagctctttttattgattcacgaaaaatagcaaactatacaaaaactttaacaacactcgagagaagaaaaaatgatgttaagagaaggaaccaatatttatagagagacctagcaagctggcaaaacatgttgattggagcgtttg

SEQ ID NO: 722 - DNA, 841 bp, Arabidopsis thaliana
cctcgggagcaatgctgatcttttcaaggagcattattatgttaagaaatcaggtaactgcgatctttcgagcaggagtgacccgcacaatgaatttgctgggaagaacgtgctgatcgaaagaaatgagacgtctgctatggcatcaaagtttagcctctctgttgagaagtatcaggagatattaggtgaatgccgaagaaagcttttcgatgtcagattgaagcgacctaagccgcatctagatgataaggtaatactcttcttggaattctcatgttgtcttctctactgtttcttcagatttgttaaccatttaagatttctttcatagataatcgtgtcttggaacggtcttgttatctcgtctttcgcaagagcttccaagattcttaaggctgagcctgaaagcaccaaatattatttccctgtggtgaatagtcaggtaatgaatgctacaccctttcctttaatttcttctttgaccgttttgtaattagaagactcatttttcagccagaggattacatagaggttgcagagaaagcagctttgtttatcagaggaaatctctatgatgagcagtctcgcagattacaacacagttacagacaggggccatccaaagctcctgccttcttagacgattatgctttcttgatctctggtttactcgatctttacgagaatggaggtgggatcgaatggcttaagtgggcgattaaacttcaagaaacacaggcaagtgagatctttactagctcgatttgttagagttcttgattttggctaaaaaagttaaaaacatcttaggatgagttatatctggaccgagaaggag

SEQ ID NO: 723 - DNA, 841 bp, Arabidopsis thaliana
caggtgatcggaatcgttactggaattttagttcatatatagacgatcaatcaaacctctttagttttccttaggttaatcgttatccaatgagttttttttgtgtgtgatcgcttctttgtttcgatctattgacgtttcgaatctcaattttgattttggtataggaaagaaataaatgagcagccgttcgagtagaacgatttacgtcgggaaccttcccggcgatatccgtgaaagagaagttgaagacttgttcagtaaggtaaattactcgtttctcctaatttaagaactcagaactcaggatcgaattttgtgttatgtgatgaatatgtctttacaagatttgcatgtgaaagaaattgaatgcatcttcggaattgttggattctgattttatttggaagaagtttccttaagaattgttcttccttattttttttgaagtatggacctgttgttcaaatcgatttgaagattccgccgaggcctccaggctatgcattcgtcgaggtcagattttttatgcaaccacatgttttataaaggcttgttgttgattttacagttaggctcttcgttgttgttgagtgttcatgagttttcaaatgttgggagatactaccactaatgttttgtgatatatgtgatttagtttgaggatgctcgtgatgctgatgatgcaatttatggccgtgatggttatgactttgatgggcatcatttacgggtttgttaatcacaaatttcagaattttacacaaactttgtattgttgactggtaccaaacataatttatgtgtgttggcattgcaggtggactagctcatggtggga

SEQ ID NO: 724 - DNA, 627 bp, Arabidopsis thaliana
tctagtagatcccggttacaaaactaagctgtaaagttttttaaaaaatgaaaataaaaagacgttaaagccaaaaaagcatatgacactgacaatcacaaaaagctaaagcctttagatttgattcacaacagtggaacaagcagagccttggccggactcgaatatctccggcaatggcaaaacatgttaataaagaatagaactaaagggtagaactgggaagaagaataaaagaacctgctgcactgttgacaaaacctctgttcgataccagccacagtgactttaggtgttttagagtgcactccacaaactcggtgtctcgagtaataaccttttgcattggttagatccatcccacaaccttccacttggcaccttggtatctgacccgactgacccgacccgcctccacggacacgtctgtttgaacgaccacctgaggaagaagacccggatccaccaccaccgtcctcgaagtagatcttctggccaaacatgagccctccactgaaagaggatgactcagtggaggaaccaccgactctgcctgacccggaccatgacccggacccgagttggacccatctccatgttggtttcccttactcagacagaaagggt

SEQ ID NO: 725 - DNA, 886 bp, Arabidopsis thaliana
gaggataaacgatagactccgaagctccataggagttagtgccgcaagatactgtaagttggcatttctctacttctcatcgtgaggctttttgttatatacaccactatgacctgcattcatttgtttctcgcctttcttctcattgtaacttctctggtcatgctagacacttgattttttttatgtgttttttcacttttcttctcttttacttttcatatgtatcagtggtagcttttgtgaaggtatagcactccaagttttgttgttctcaagggtaatctctactgcactgcaggttctcttcaatgacacaatatttcacaacatacattatggacgtctctcagctacagaagaagaggtaccagtcaacttatacttggtggaaatgtcaagtttaatatcaataatcctcatctaacataaattttcaatccaggtgtatgaggctgctcggcgtgctgcaattcatgaaacaatcagtaatttccctgataaatattccacgatcgttggggaaagggggctcaaggtcagtattttgatgttatatctggaatgcatgattgagttatggggagttagtcacccgtcgtttttgtcattgtcataatcaaagtcccacaagctaagtcaatcaggcttccaagtcaaagttcacctgttgaaaacttgatgaagaatatgatctaatgaactagtttcgcaggactgtaacaatcatgaagaataaaagatttaactgattgaggttttctatataaatggcaagagtagcattgatgagtgccatcgtgagtttgagtagagtcatatattgaaaggggttttgtattgtgataacaatggagtggtgttgtgtcagttgagtggtggagag

SEQ ID NO: 726 - DNA, 775 bp, Arabidopsis thaliana
aagacattctgaagaagaatatctttatttaaccgaaccaatccaactccactgaattctcactttaggaccagtaggcaagttcacaaaattcaccacagaagagtcgagagaaacaaacagatttctgtcatggcacacatggtgagtagcaccagaatcaatcacccatgtgttacgtgacagtgtgtgttgagagactgccagaatgccaacaaaagaataagtggagttagagaaagagataccagtatgatccagagctgactgagaagtgctagcaccaagaggagattgagttgtcagttgagatgtgaagtgagcaatgatattctggagctgatcattagataaagttccctgtaaacctgcaatgttgccttgaggagcaggtgaagcagacagggtaacttgagcagccactggagacggtttctgagctttatcagtgggtttccctttaggtgtgaagcccggaggaaatccatgtttcttgtaacacctttcagcaatatgatcaaccctgttgcagtaggaacaaattagccttcccttgttaggaccattttggacatacattacatcaggaaccacagaatcatcatgtgtaggtgttgcttgagagatctgaaaagttgagggtggagtagcaacagtgaatactttctgactgtcatcttgatccagaatattatagacttcaaccagtgatggcaaaactttcttagcaatgatctgacgacgaacaatcgcataagattcattcaagccagct

SEQ ID NO: 727 - DNA, 813 bp, Arabidopsis thaliana
caacatcttatcttttccaagctttctcaaatttttttgaaggaagaaaataagaaacctccttaaaacatatcccacaattgatattttgagatttctgggaggcacaatgagtacctgtggaagaatttacttgagctggaaaaaaagactgtataccgagagaatgaggaaaaaacaaaactcttagatttatgatcacaagtattgttcatgtatccttgccctgttctcttcccaccataatctcgcgtgcatctccccgaatctctctcggctgcaatgcaaaagaaaacacagtttgagtgatgtttagttcagaaccgatggataaacccgggttttgagacaatgtaaggaagtttaacagtacctgaatctgactcttcgaagctctcttttcccacctggtaaaactttaatggtgatataaacgccaggctcatcttgctccacccattcgttgtcaacatcactcgcattgcttaccgacatttcctctgaccggtctgcatctctcgacgagctgcttcttatggaagcatctatggaagaagtttctgtcttggctacactgatgcttgaaactttaggagttgagttgagtagaccagagtcatagaactgctggctctgcattgaattatggtcgagtgaatctgaggatgagtaagcagccaatccaggtggacgatggatagtacgaggcaaccgttctttgtttagaggcggtgttgcaggagtgtcttctggatggtagccacttttgcattctaacaaagatttcaagagggattagtactaacagggggg

SEQ ID NO: 728 - DNA, 936 bp, Arabidopsis thaliana
taactgcaatcttaataatctcgtaattcttctctatatattcaaccccaactgcgtccaatcaccaaacacattctcattccaccaattaaagaaagcatatcactaaaaaaactctgaggaccatggaacttcacggagctctagtggctagtccgggcatgggacatgcgtacccatcttagaactcggtaaacatctcctgaaccaccacgggttcgaccgtgtcactgtcttcctagtcacagacgatgtctcacgttcgaaatccctaattggaaaaacgttgatggaagaagatccaaaatttgtgatcaggtttattccactcgatgtttcgggtcaagatctgagtggttcactattgactaaactagcagagatgatgaggaaggcattaccagagatcaagtcttcagtcatggagttagaaccgcggcctagggttttcgtagttgacttgttgggcacggaagctttagaggtggctaaggagcttgggatcatgagaaaacatgttctggttactaccagtgcttggtttctagcttttacggtttatatggcgagtcttgacaaacaggagttgtataagcagttgagtagcataggagcattgcttatacccggatgcagcccggttaagtttgagcgggctcaagatccgagaaaatatattcgggaactcgctgagtctcagcgtattggggatgaggtgataacgcagatggggtgtttgtgaatacgtggcacagtctggagcaagtgaccatcgggtctttcttggatccagagaatctcggtcgggttatgagaggagtgccggtttatcctgttggaccgctggttagccagcagaaccaggtttgaaacatggcgtgctggactggcttgacttcaacccagagagtcagtggtttatgtttcttttgggag

SEQ ID NO: 729 - DNA, 610 bp, Arabidopsis thaliana
tagatgaactgattgtcgctgttgggggtgtaactgctctggcagctggaatctacacaacgaggtaaagactagagatgtagtccgaatgttgacaatattttttgccataatcgtgagttcttgttgaagggttgaggaagtgtttacgccattgactagcaaatttctcgtttttacatttcttgattctattacctgtcagtcattttttctacagtagtgaaatatagacttagccggttgctgaatgcttgttgcagagaaggtgcaaaggttatctggagctatgtggacagaatattaggacaaccatcgttaatccgagaatcatcaagaggcaagtacccttggtctggttcgctttctcgtgtaatgtccacattgcggggtaaggagtcagcttccaaaaatggaaaaaggttcggtgatgttattttgcatcctccgctagcaaagagaattgagcacctagctacctcaaccgccaacacaaaactccaccaggctcctttccgaaatattcttctccacggtcctccaggaacaggaaaaacaatggcggccagagagctggctcgtaaatctgtatgtattcttccatatatat

SEQ ID NO: 730 - DNA, 852 bp, Arabidopsis thaliana
cactgaatctgagagattgagatatcgatctgttgttatgttttgatggaataatgaagttatatatctactttgttgtgatgtttaaaatgtgttgaaactggaaggatgtgattagataagtggtggtgattttttcaaaacaattttgtgtgtgtgacagatttgtttgctgtggtggatgatatgttctgcatattccaaggacatatagagaacgttccaattcttaagcaacaatatggactaaccaaaacagctacagaggttaccattgtgattgaagcctacagaactctaagagatcgtggtccgtattcagctgaacaagttgttagagattttcaaggcaaattcgggtttatgctctatgactgctccacacaaaatgtcttccttgccggggtaagtttgaattctgcttctttactatttgacacttatttctgcatattgtaatgctgaggttattattattatacgcgtttcaggatgtagatgggagtgttcctctctactggggaaccgatgctgaaggacatcttgttgtttctgatgatgttgagactgtcaagaagggttgtggtaaatcctttgcgccattccctaaaggtatgtagcaagccgtttttcgggttttgaagacatctcactgttctttgatctagtgcaaatatgaattaggatgtggttgtgtgtatgcataatgcaggatgtttctttacctcatctggaggtttgaggagctatgagcatccatcaaatgagttaaagccggtaccaagggtagacagttcgggtgaggtttgcggtgtaacgtttaaagtggattctgaggccaagaaagaagcg

SEQ ID NO: 731 - DNA, 1207 bp, Arabidopsis thaliana
ccttggagagcttaagtctacggtggatcaattggtgaataagtataagggaatggctgtgaagagtgtgagtgttgctatggatatgaaagctattacttctggctcaggtggtggcttcgggcctggtgggattaggtctagcggatcaccgcatattggtggtggtgctaaagttagggaggcgttgtggcagaggatggctagttgtatggaacagttgtgttcacttgtagttgctgtgtggcatttgcagcgtgtactgtctaagaagagggatccatttactcatgtccttcttcttgacgaagtcatcaaggtgcggaatttaactggaattttaggctccctgagtttgtttattcgttagttaaagatattgtcaatgtcctgaggaataagctgcattagatcattgagaggatcagagtttcttgtcacttttagcgagctcgatgatgtttgaacaatttaagtagatgatccttcaatgtttttgcatcaaaaggaagttttgggatgggtttctgtggtgtcagggctgttgattagtttagattccaactttttaattggttttattgcttacatgaagtgtttatatgcacaggaaggcgattctatgttaaccgatagagtctgggatgcacttgtgaaggcttttactagccaaatgaagtctgcatacacagcttcgagttttgtaaaagaaatattcaccatgggatatccgaagcttgtgtctatgatagaaaatcttcttgaaaggatttctcgtgatacagatgttaaaggagtgttacctgccattaatttagaaaggaaagaacaaatggttgcatgcattgctatattccagactgctttcttatccctatgctttggccgcttgtcagaccttgtaaactcgatattccctatgtcgagccgtgggagtttaccttcgaaagaacagatttcacaggtattatcacacattcaagatgagattgaggctgttcatccagatgctcgtttgactcttctagttttgcgtgagataggcaaggcccttagtaacctagctcaacgagctgagtgccaggtatgatagacctcttgttggttattgcctcttgttatgtgcgatacgtcccttagtatggtatcaatttgtgcttgtattatatcgaaattcttaaagttgcatacagttgtataggagaga

SEQ ID NO: 732 - DNA, 589 bp, Arabidopsis thaliana columbia
gtagcagaagaaatcacaacaatttttcctttgctttttcgaagatgaggaatagcaaaataagtgatgtacgttgagccccaaaagttgatatccttaaaatacaaattagatgtacgtagtagtcaaatatagggtttgaattttgatcgatgtatcagattaacattaactacatcattaatacttgcgtttgaagcaatcaaaatttagcctacatgtctaaattctaaggtttcgaatgattacagcggtccaagcgaacaaaaccgtctacagtgcagacccaaaaaaataaaataaaaccgttgcgggctaattgtggaccgtctttaaactaactccgcagcggtttattgtccgccccaaaaacagtatagactagaccgctgagggattagtccacactaaccacaacatccattcaaaacctaagtttacaagttcattaatacttgcgtttgaagcaatcaaatcatgtttaagaagagctaagcatttttgtaaatatatggattattaatgaacttgtaaaagaatatcattaaaaactcaccattatagaattagcgtcttgaatttgtgtgaa

SEQ ID NO: 733 - DNA, 553 bp, Arabidopsis thaliana
cgccagtgtgctctaaaggaccgcaccacgctgtacaccgccaaccgtgatatcagctactacacggtgcatgaatccttcgttgccaccattccgctggtgttctgcgaacggagaaaatggaccccaatacccagttcctgaaagtgatgatgattgatgaacccgccatcctcgaccaggctatcgcgcgtattccgcaggaagtgaaagagaaatataccgtgctgaaaagtgcgccgtacttcctcgaaatcctcgataaacgcgttaacaaaggtacgggggtgaaatcactggccgacgtgttagcgtgctgaccggaagaaatcatggcgattggcgatcaggaaaacgatatcgcaatgattgaatatgcaggcgtcggtgtggcgatggataacgctattccttcagtgaaagaagtggcgaactttgtcaccaaatctaaccttgaagatggcgtggcgtttgctattgagaagtatgtgctgaattaatctgtgggcgggcaaacagcataaacgccgtttcccgcttactgattattggt

SEQ ID NO: 734 - DNA, 854 bp, Arabidopsis thaliana
tctagaatgcgaggtatgattgctaaaaacacgatcgacaaggaactcaagaacatcaacttgcatattgaacctacatacatgccgtatataggcatgtgcgaggagtattaaggatataggactggttaacttcggttatcactggtttggttgaatgtggtttactaaccacaataatcttatgtatataagtttaatctcgattactttgttagttaagtgggttgtaacaacactttaagctgaataagaaaagttgttatcttcttcttcgtctctcttctccgatcttgaatctccgatgtatcggattttatcatggtatcagagcacaatatattgattccgcgtttgttgtgttcatcgggagagagtttcattttcgatttcttcttttgattctttcgttcgcttatgccattcgttatttttccgattcaccggagtatttttcattctgtttcttttacttccttcaattgacctttagcgtgacgtgatctcgttttctatacatcaaattcgtctcgctttctttgtaatttttcattcttactctgagaatgggatcttatgtatctccatctgcgaatccggtgactcgtcctccgatcaacaatggtgatcaaattcgatatccagtagatcaatatgagaatccgtactatcttcatagtgcagatcacgctggattgattcttgtgtcagatcgacttacgacagcttcagattttcattcatggcgtcgatcgatcttgatggctttgaatgtcagaaacaaattgggatttataacggtacgattactaaccgactgaggatcatagagattttggtgcttggtctaggtg

SEQ ID NO: 735 - DNA, 588 bp, Arabidopsis thaliana
gactctagccaccatcgagtcatcgaagatacctgctctttaaaagactcaagagtttgtttccatgcttccttagatgtatcatcttcaacatctatatcactcttctccttccccacctcaacacctgattctccctatttgaacaatggcgataaagggtaataatcaaaacatgttctttagctaatcacagatcatttgataatttcaaaccccaaattgcacctcacttgaaattggcagattatattgcttaatcaaataaatttcaccaaagtccaatttttttctagcctcaagcaatttacaagataaagcatctgaatttcgagatacccaacagagaaattagaagttttgagcacaaccacactactcaccgaatcctcgtgggatgcagcgaaagatacgacggatcgattaagcaagacttccggcgaggtaaagccgaaacgtattcctggatacgaaacaacagctcgaggagcactgaaatggcgtcggctagggaggagagaacgaggtggagcacagagcttcacaggcggacgagagtgagctctatagagcaaggtggaattaggg

SEQ ID NO: 736 - DNA, 1064 bp, Arabidopsis thaliana
cctctaccctctatttcgtttttttaagagtcaataatctgtagctttagttattattattattttaactcataacctatgttaaaaacaatatatatataacatcaatattttaagccacaatttaccgctacaatctcaactaatcatcccgtaaaccacaattgaaaccatatggaaaattcttgaaccatgttctaaatccataaggtttttctaagctagtagttacaaggctgaatctacaagtttagtaacttatctttgtctaactggcttttagaggtatttcatctcaaaaactctttgacactctagttagaattgagataatgtgagttgccggaaattgagaaaactatgaggaaagaagatagatttagttttggacctaaggcaaatatctagttttcattagcttagaaaagatgttaatggaagagcatacaagaaaatatttgggagttggtactcttcagcagacgaatgtgactatgcagagattttgacgaagtatacgaacataaaagagattttgaatcaatgtaggcaggaccgactcaaaaatagcaaaaagacacaatggtctttgttcaaatttgaaatatggatcctaattacatagaaatgtttttttaagaaaaacatttggtcctttaatacgctaaatttcatgtttgtttgaacatggatctcgtgcaaatgtattccttgataacgtccgatacatcggagattcaagattggagaagagagacgaagaagaagataacaacttttcttattcagcttaaagtgttgttacaaccaacttaactaacaaagtaatcgagattaaacttatagacataagattatcgtggttagtaaactcattcaaccaaaccagtgataaccgaagttaaccggtcctatatccttaatatcccccctcaagtctctagcttcgaactggcttgttaggaagaaagagacttgacaatgacatttgtctgagaagatggtgaacggaccaggatgaagagctttggtaagtatacagcatgttggtttcagtaggacgt

SEQ ID NO: 737 - DNA, 547 bp, Arabidopsis thaliana
cgccagtgtgctctaaaggtttttctggcacctgtaccagcccgcctttgatctcaaacggttctttggtcaggcgctgattgccttcctgccaaatccagtgcgtatcaatagcagtaattttacccggtgcagcggcggcaacatgggtaaacatcgccagggaaatatcgaagtggttgttagagtgtgaaccccaggtcaggccaaattcatggcacatttgcgccacacgtaccgaaccttgcattgtccagaaatgcggatccgccagcgggatatcaacggattgcagggagagcgtatggcccatttgccgccagtcggtggcgatcatattggttgcagtcggtagacctgtcgcgcgacggaactctgccatcacttcacgcccggagaaaccttgctccgcaccacacggatcttctgcataagccagcgaacctttcaggtatttaccgattttaatcgcttcgttcagcgaccaggcaccgttaggatcgagcgtaatacgcgcctgcggaagcgttgcgccagtgcacaatag

SEQ ID NO: 738 - DNA, 862 bp, Arabidopsis thaliana
tgtcattatgcctgatgcagaatcagaaaatgattggatctaaaagagtagtttgcgaacctgaatagccagagaatcgaagaactctattaaaaacttgaaaggagcttaatttcttattgggtcctgaaccaacctgtagttcaatgctattcttaatccccagatgaatctaagtgataaaaagaacaatttggtgaagaagagggaaaaacctggataatggttttgatggtatctaaaggataagcgagagcagttcctaacgagacagaggccgaggcagcgatggcatgtgtcgcaaactgatgattctcaagaagcttatccatctttagcctcagcgaaaacaaatgtacatatacctatacgtttttgtcagcaacactacagactacagtatcagtattcaaacatactatgtcctttactcttatcatagtctccaaaattaagaggtttagaagtagatcaacaagttcttatcatccatttgatccaacacaaaataaacaataattagagtattatcatacctcaagtcaagaagagttttctctcacaggatattaagtaaacagaaacctcatcatcaacctcaaagatgtttcacgttgaagcaaaacccagatcagcgacagagagaagacgaagaagacgaccgacgctaatcggagaagaaaagacgacgtcgttcaatcagaaaatgccctaaaggaaatgacgtcgttttagttatcaagggtaaacaaaaaaaagttaaaaaacggaaaacaaattttagcaaaattgggttggtgacgtcacgatacagatttgccgatttataggtcataaaccagaaaaagctgccaaaccctat

SEQ ID NO: 739 - DNA, 809 bp, Arabidopsis thaliana
tgtatgtgttgatatgttcaaaatttgtttcagacaaggattaagaagattatgcaaactgatgaggaagttggcaaaatagcaatggcagtccctcttcttgtttgtaagtgatgtgatgtttttgattttcttactcaaacgttgttcatatgttagcttgtgtcacatgtagttgatctgttctggttttgaatttaacttttcagctaaagctttggagctgtttttacaagacttgtgtaatcaacgtatgatgtaactctaagccgaggtgctaaaactgtcaacgcctttcatttgtaagtgtgaatctcatctttggattttgcttatataaaccaattgttttcttgcttcttcaatacttttctattctttttccaggaagcagtgtgtgcaagcgactaatgtctttgattttctaagagacactgtcgctaaagttcctgatttgggtggctcagacactgaagaccaatcagctaccaaaagaaggttaggcccgcttcttctatagttctattctatgtcagcaatcaatctacctaattttgatatcggtatcgtgtctaacaacttgtttgttcgacttttcaggaaagttgttgatggaagtagttgcaacgatgaagatatgataaagaccactcaaatggtaactagccagacttattttgccaatagacaattgtatattacttaacgcatatgtttcgccttgttacagcatgaggtcaaacatactagctgtggcagaggaaggcgaggtagaggccgcggacgaagtagtggaagaccaggagtgg

SEQ ID NO: 740 - DNA, 559 bp, Arabidopsis thaliana
gtttctttgatcaaagtgttccaatctcgtaatctcttagcctctgtacatttgttgagatgtgtttgaaccattttagcctttgaaatgtcttcttggtcagcttctggacccgcatgcttgaaatgatatattgaattctccacctctcctaacctattggtttaaaatctgtggatttcagaaaaatgatgatagtacttgagtcacaaggtaaggttttgatgagattacctgaggtacaagttagccaaccgatggtgtgctctatggtaatgaggatcgattctgattgcttctctacactcaaataccgcctccagaattctccccaatgccgttaaagccgcgcttttgttgctacgataagaagccttttttggatcgatggatattgcagcttcatacaaggctaacgcctctgcgaaattcccgttcttataatcttcattacccattatctttaacgtttcgggatccattcgtgtggaaatcgctctacacaaagatcctgactggtcttggttatttgaagccggtatttgtgcaaccgatgttt

SEQ ID NO: 741 - DNA, 515 bp, Arabidopsis thaliana
tctaaaccaattgtaccggttcatacgtctataccggtcgtaacagaaccttctcgtgttgctgactcaagcgctgcttctccgttgtctgtgacaaggactccagctaaaactaagctcaaatttgttcccgtttccacaccagctcgggcaaccaatctgattgttcaatcagagacaccatcgccttcttcacgtcaaagtaagcgaaaacttatacaatcagttcgtttgcaagactatgtcctctacaatactacatgttctccgataaacccccacgctctccccgattctactcaacagtcctcgtcaacagtcctaggtaattcgttggattccctaacaaattttatttctgacgatcaattctcgtcaggtcatcgtgcctatttgacagctataacgagtactgttgagcccaaacattttaaggaagctgttcatattaaagtttggaatgatgctatggttaaggaagttgactctcttgagattacaaaacatgggatatt

SEQ ID NO: 742 - DNA, 735 bp, Arabidopsis thaliana
caacttacgaaaaaatgaaaaatgaaaaaaattttaaactcgaccaatcaatcgtccatggtatagttgtatcatcagacagcctttactaaggaaaaatgttataaattgggttcgtggccaaatttatgactttcaactgtcaccaaccttacattttgctatataaaccctaagaaactcattataaacttcaacaacataaaagacgatcaatataatctagaaaaaaaaaaagaagagagaagagagaaatgtcgagagctttgtcagtcgtttgtgtcttgctcgccatatccttcgtctgtgcacgtgctcgtcaggtgccgggagagtctgatgagggaaagacgacgggacatgacgatacaacaacaatgcccatgcatgcaaaagcagctgatcagttaccaccaaagagcgtcggcgacaaaaaatgcatcggaggagttgctggagtcggtggattcgccggagttggtggtgttgccggcgtgggaggtctagggatgccactcatcggtggtcttggcgggatcggtaagtatggtggcataggcggtgcagctggaatcggtggatttcatagtataggcggtgttggcggtctaggcggtgtcggaggaggtgttggcggtctaggcggtgttggagggggtgttggtggtctaggtggcgttggcggtctaggtggagctggtttaggcggtgtaggtggtgttggcggtggtattg

SEQ ID NO: 743 - DNA, 1179 bp, Arabidopsis thaliana
gtacatctatatcgagttgcctccaaagcactctcttcaatatgtctcccagtttcgtggaaaccaatgcctgagaatattatcaaaggtgccgctcttatgatcatacaaggactcgacgctcttcactcacatggttacgttcactgcgatctcaagccagccaacgtcctcgtcttcccttccaccacttttggagagccatgggatcttaagcttgctgatttcggttcatctaaagagccttctacggattctaggtcgttatttcctggtacgctgcagtacatgccaccataatctcttggacatgatggagtgatgggaccggccgttgatatatggtctctagggtgtgtggttattcagatgtttggaggttgtccagtgatgaccagagactgttacatgtgggggcttcccaaacttatatctccggtggccaacgacttcttgatgcggtgcttggcgttgcagccgtcacgtagggccaccgcagcccagctgttgagccatccttttgttgcggaaagagtcagtgttccattgccagagatgattccgtgtcattcttatttaaggtttccttccgccataattgacaacgtggtggaacaaggaggaatgatgctttgaagaccttaaagctttgatatgaagacataaacggtggagatgagcccccaaaagaaaggagtttcatgctaaggcggatgtttagggttcggtgtcaagagtcgtatgtttagggttcggtgtcaagagtcgtaagtttagggttcggtgtcaagagtcgtattaaggttttggttgagtttgggctttaacttgtttctcaaggaaagaagtaaaagttaggttctacttgctaatttttaggatttttgtgtgtgaatgtgctaaagtttcggcaccttaggtttgaagtcattgtaagacatatcttcatctttttatcgtagactatttttcagatttaatgtcttaacttcgatatttttctaatattacgttgtgattaaacactatcgttgttcgtatgtcattttaagcttgaacacaagtatactagctctccttgaaggaaaaattattgttgagacgaagtaaagattttgtttggttgttcttgatattgattttcgtaattaaatttttgtttgtaaatataagaaaagt

SEQ ID NO: 744 - DNA, 1019 bp, Arabidopsis thaliana
gtcaaaattagtgcttggaagcttgcaaaactgaattcaaatgaagctacaagagcagcagccagagccagagcatcctcatctgtcctaagaccaatagaaaatcgtcatttacatgatgatgaacttagttccagaagtggcaccatcagtgttgtaagcagtgtaagcacagaagcaaatggagctacgctgagtagagagataagaaacaatgatccaatgttgtctcattgtagaaactcttatgctccaagccaaggtagtcgggacgagtacgacacagggacccatagtatgagcagtctcagcagtccaagtcatgttcatgagaccgtcacacttagtcctctccctcagcatcatacagctggccaccgcttcactgcagcgtgcgcgtcgaattcttcccggccacctcttaatcaagcaactaatcacatgatccactcaacctttgatgaaaagataatgcagaaaggaaaccatgcagatccactgcttctccctgctcctgctgcttctcttctgagagatgtgagaagaacatcagttgtttgggaccaagaagcaggtagatatatatcagttcctgcaacaacatctgagccaagaaccagattctcctcacagaaccagccaattcctagctcacacatgggtaacactcagaatccaagacccgttggtcatccgcctcaagattcttcatctggaagggctccacctcctacgcagcagcagcaaggagagagactgatgtatacaggtgaatcaatattctttggaggccccctagtaaatatcccaaatagagatggcctaagacacgatggagactcggggaagagagggacaagaccgaatgacattaacactgcctcgggaagctagattcaaaagagacactacctcaaaccaacttccagtgtttgctcctgtaggtacccgcaagtaaaccatcagtctttgaaggctttgatctcgcagatctaagactgacatgacaaggacaggta

SEQ ID NO: 745 - DNA, 508 bp, Arabidopsis thaliana
tgatatcacaatagacaatgcaaaaataactcgtaagtatacaaactacaaagacttttagtatatgcaaccaacaaagaattagcaacttaactaaaaacactctcaaaacaaatggtcaaacacaaacacaactggtttctgagctcaatcaccaatgcaaaatgaaatctataaaaggagaaaaagatagaaatttccagagagtctcgatcccatggatatggttttcaaacagaagtggaagctgttctcgacctggaagggctagtaacgaaaccaacagctcttgataatccactcgaacctatatctggatttttaccatggaagacacggacaccggaggacgattcgcgaccttgacctctatttgatttcccttaccaacaaccataaatctagaaaccctagattgaattgaagattgagggtgttctgataaaatgagaagaggagagaggtgagagcgtttaagcataaaccctaaattactttcattgtgatt

SEQ ID NO: 746 - DNA, 926 bp, Arabidopsis thaliana
cctgcttcttctatttcacttttttgatgtttttggtttgatgatttgtgtagtgcttttgagtcggagttagcagatgttatccctattgttaagacctctattggaggaacacgaattattgggcgtctttgtgctggttagctttctcaactagctgttatattttcttgcttcaaatcatcgtgattatttcattactttagcgtagtgaatgtggttttgtgtttcttcgtataggaaacaagaatgggcttcttgtacctcatacaacaactgaccaaggtaattttatacttctttcctcagatcgtttctcataacaattaagaattgattgtttaataccagcatgatccagttgtctgagatagagattgtagagtttttggtgaatatcttttatgtaacttgcctgaagcatctactctgcgcctctgcccatacctgtttcatttcagtttatgagtggactttttataactgaataagcttttggtgaagatgattttcctccttaacttgttgatgattttgtaatgttgcaatatttattgagtctcttgttcttttatattagaaatctatataggttttaggtctgtaattggttgcatctcctgagtcctgcttatttttttatgtttactcgtccagagcttcaacacttaaggaacagtctacctgatcaagttgtggtccagcgaattgatgaacgtctgtctgctcttggaaattgcattgcctgcaatgactatgtagctcttgcccacaccgatcttgataaggtaaagattcatgtcatactttatttttctaatgaaaccttttcaaaaacatatactcttttcatgactggcaagaaatggtgaaagaataagtgcgcatttttacaaaagttagcagaaatgtaattaagcctttgt

SEQ ID NO: 747 - DNA, 1116 bp, Arabidopsis thaliana
tctcaatgacgcaaagataaagacaggcaatttcacttcagtgatgcaaatctgacagtagacttcactcttgtgtatattaaagtaaccgtcttgaagaggaaggaagataaccaagtgaatttcgtgatggtttcattgtaaaacaccactttttcaaattctctccttctcttggtgctctgtttctgttggagatttcagtcattggtaatctcttcttctcttctctagtcctcatggttgtttcatgctctgtttcttttctttgaaactgatagatagatcgttggatactttagaaaatgcattttattggttttatcaaatcaagttaatttactcgttcttgtaaaatccctatgtgaatgcacccatttttctattttagcaactatggacaagtagctggggcctcaactgctactgtaggatcagacaaaaacatagcaagtgccaattatgtcattttcctcctccattatttgctgtcgttttcaggaacaggaatatatcttagctgtgttttatcctttcgctcatcttgcaaaatggaaatctaaaaatctttacttcttgaagattgattatcacagaattttggtttctttcttgtctttgtagggttacacaaatcttcttggattgttttctcacgttgctttggctgtattgagagagtttcacgatgaaggcaagaacaactaacaatgttgttcagtcgaagagatctactaagagtgtaagaaaagatcaaaagctgcagaagacgaatagccagaaaaaaacagaacaggagaagcacaaggacttggatactaaggaagagtctagtaatatctctacagtagcaagtgattcaaccatacaatcagatccctctgagtcttacgagacggtagatgttcgttacttggatgatgataatggtgtcattgcctctgcagatgctcatcaagaatcagattctagcagcgttgttgacaaaacggagaaggagcataatttaagtggatccatttgtgatttggagaaagatgttgatgagcaagaatgtaaagatgctaacattgataaagatgctcgtgaaggtatcagtgctgatgtttgggaaga

SEQ ID NO: 748 - DNA, 1834 bp, Arabidopsis thaliana
tgtctctttcttattgttttcttttgcttcgtaaaccaccttttgtgaatcctacattccatcgtatgcagctcatgaatttgttagatttataagaattttctgaaaggtctatgtcaaacatgtccggttttatatccaatcttcccaaaatcacatttggagccttgaaacgtttgttttatctacacttaggttttcagcttaagtctagtacacctaaaacttcgccctcttcgagtcactttagggaaagaatacagtgatatgttccatgttcggtcacacttcgagtctgtttattaaagttgttgaggtttaacagtgaatctagagagttgaagagaccaatgaagtaattagagttctttggaagatgttctaaatggtagtgaaggttggaaggaagttgggtttgaattcaatttgaagagatatcaagtcttggagaagtcatctttatactgaaacttgcaaggtttgcaggcaagtgcttgctttttcatgtttataacgatggcttctattgcaggagattgtaatgccaactttttctacaggcttctcgtcaaagctgtacatctttcttgcttattgtgtttttggttctaggctgagattttttgtttgtttgttggatttgttgcagagatccaagggggtttggattcattcagtttatggatcctgctgatgctgctgaggctaaacatcaaatggatggttatcttcttcttggtcgtgagttgactgtcgtatttgctgaagaaaaccggaagaagccaactgagatgagaacaagggatcgaggtggaaggtgaattgacattcttcctagaaaaaagcattagtttgtctatacaatgagatgacttgatctcaacttgtatcttttcatgtttgtaggagcaacagattccaggacagaagacgttctcctcctcggtactctcggtctcctcctcctcgccgtggtcgtagatcacgatcacgtagccgcggctataattctcctcccgctaaaagacatcaatctaggtaactagctctgcatgcctgtgaaattcatactgacagatattcttacagttaactgatggattaaaccaccctctactctccaactctgtcttatggcaggtctgtctcacctcaggatagacgatatgagaaggagaggtcatactctcgctcaccaccccataatggctcaagggttcgcagtggaagtcctgggagagtgaagagccacagcagaagcccaagaagaagcgtgagccaagaaaaaacaggagctacacgccagaacaagcaaggagccaaagccctgtccctaggcagagcaggagcccgaccccagtccctcgtggagcacaaaatggagaccgttctccaagccagtgatttatgattacaccatatatctctctactcttcagtttttcagtcttgttctgtttgatcagatattttgtttgcctcagattgatatttccctacttagacagatatttgtagtgctattggtattttgctttatgtttgatccatggatgatcttgagacagtattttgaattagcatgtgttatttgtcatcttatctttttagatctcatctaacattgttatggtgaaaaagatggtcctattatgggagctttttgacgtaaggctccttttgttttgaatcggcatttgaacactttccagctattttcttctgctttctttttccaaaaagcatctaagaaaaaaaaaactttgtttctttctttcaaacaaaatgccaagattaacggtttcttactttttagttttttctcttaacattg

SEQ ID NO: 749 - DNA, 1038 bp, Arabidopsis thaliana
gtcctatctcatggaaatcatagaatcagcctactgtgaattggtcttcagctgaggcggagtatcgtgcgatggcttttcttactcaagaactgacttggctcaaacgtttgctacatgatcttggtatctcccatcctcaaccaatgacaatcttctccgacagccgatttgctattgctctaagtgctaatccggttcaacatgaatgcacgaagcatattgaggtggactgtcactatattcgcgatgctatcctctccggtctcattgccacttctcacgtgccttctcaacaacaactagcagacatctttaccaaggcattgggcgcaagggagcttcgtttctttcttggcaagttgggcattttcgatatgcatgctccaacttgaggaagggtgttgaagatattgctacttatcttatttagagcacatcaattaattgctcttaagcttaatgttgctttatgtactgtttgtaaccccttttggtctttttcctttttgtcccttaggtctgaaatgttttctctttgtataagtgtctgagaaacacttgagctactatcaagacaaaaccttatctttatctcttgtctcttgattttgtcactctcctttcacactcatggagatttgcttaagttatgtaaataaaaataccagtgaatgacagtagtccacgccacaaatcagctgctgaaagaaatatctagcttgagaaaaatagcaagatggaaaaatatataatcaaaaatttgtcaaaaaatccaataagaactaagttagaaagcatttatcaaacctcagcttcactgaatctactagcattacagattctttcaaagagctctcctctagaagcatactccatttcaattgcaagatgagttggagttagaaccaccaacaaatttactctgttttttaagtttcttaatctcaattaaagtactaaaagattatgcaacaaagcaacaaacctccttgaatcgaatgatattaagatgcctaagggatctatgattgatgg

SEQ ID NO: 750 - DNA, 1897 bp, Arabidopsis thaliana
ctcttcccaaccgtatatacccgtatcttcttctttctctgtcgaataaacttgggttttccgacttcgattccttcaattgtaaacaacttcgttgcccgtacaactttttgagtccgggaaagatcccgtgacggaaaaaactgtagatcaggcaattattatgtctatacatcgatataaaggattgaatcgttcatcttaagtaagtttgacgaaagttgtgatcttttgtgcctattcacatataacgtttcttagctcctatcttttgaaattgagctgattcgatctctacctgaattgcatgtgatcttattttgatataatttactattcaattagaaaatatgatctttctagattgattgcttctttaaagttctcttagacgctggtgttatagctcttgtgtttgtggtctcttctctcttaaatatccaacctcttttggtgtattttctaatctagtttgtgttgactgactgatagagagattgaagcttgactcaatgaggggaaggagctacactccgtcaccacctaggggttatgggaggaggggtcgaagcccaagccctagaggccgatatggaggtcgtagcagggacctcccgaccagtcttttggttcgcaatctacgccatgattgcaggtacatacttttgacttctctattattttcttcagccattgtggatgatgttattgtttgcacacctcttaagcaagaagacttgacacctcttagcatattttggcatgatgttctcttatctttactgtaaaggttttcaaaaagttgacgtcaatgtatcttcatttcttggcttttagcaaattgtaattctcttcttactccttgtccttttcttcaggcaagaagatctcaggaagtcgtttgagcagtttggtcctgtcaaggacatttacctgccaagggattattataccgggtgagcatgttttgtaaataggacaaccaacacttgatttttacttatgttctgattagaaaatatccctattttcacatcttctttcttgatttgtttactacgtttatctgcctttcctttttctttcggtcatctctttgtgtcttctcatggatactagggccttatgagaatcgtcttaaaaactgatttcataaatgaaatttaggctccatatttttcagatagtaattttctgtgacatgacaatagacagtgagcatacttgtggtcttaaacgactagttgtcggtgtcgttaggtggattagtcgtttagaatttagtacctggtgagacctcatagtttttagtcgcttaaggaaaaggatacatgatgatatgttccatgtctgaacacactatgagtgagttaattgaagttgttgaggtttagcagtgaatctaaagaattgaagacatcaaagaagtaattagagttcttatgaagatgttctatatggtagtgaagaattgaagtgaagttgagtttgtattctatgtgaagatgaatcaagtcttcaagaagtcatctttgtactgacacttgcaaggctagcaggcaagtgcttgcttttttcatgtttactgatatcttcggttgcaggggatcatatcgccagttgtccttcaacaggattgttataaagtggtacatcttcctcgccattttgtatgtttggtttctagtctgagatctttttgttctacattttgaatgcagagatccgcgagggtttgggttcgttcaatttatggaccctgctgatgctgctgatgcaaaacatcacatggatggttatcttcttcttggccgtgagttgaactgtcgtgtttgcagaagagacagaaagaaccgactgaaatgagagcaagggagcgtggtggaggaaggtcatg

SEQ ID NO: 751 - DNA, 988 bp, Arabidopsis thaliana
tctaggctccatgtctttgctgtgatgctattctcacttcaagtctttctctttgcgcctcttgttacttactgcatcaagaaattcaactttgggttgcatcttctcttctcctttgctctaatgggtttgacgctttactctatttatgcattgcatagactcttcttccttgtctttctttctcttgtgcttcttgtcaatgttgtgtgtccttattggctcattaggatgcaagagtataagtttgagattaatggtccttgggatgaagccaagctttgtttcgacattacagattgaccatactcttcggatagtttatataactgaaattcattagacttgcttttcttcgacttgtattaatctgatctgattttgcattgtagtgtatgtgtatctatgatcagattttgtagctagaaacaaagattataatcttctatataaacgatgtcgtcacgagaatgtcaataaagttaggacttaggatggccgagtggacacaagttctggtcctcgtaagagggtgtgggttcaaaccccacttctgacattttaatcttttttttttggacttgaatattggtcatgttcgaaaagcaaatgatagcaaacagacaaacagacaaacacaaatgttgttagcaaaaaacacacaccaagaaaattgcctatctactacactcgatcatctagctgggattgttcaactgatattcggcgggaatcctttgacggagccaccgcttctccgccacaggaggtggaccatgcacaatcagagaaggaatgcatccgccgttggtacgagaagacactcctctcgcttccggcacttctgcttctgtaaccacgccgtgagctcctagcctgagaaaatgccacgttgtccacggtttttttcgtcagttgcctccggacttcttctggtaacgaagcgtaaaccggtctaaattatctagcggttgaccacagaatgtcg

SEQ ID NO: 752 - DNA, 557 bp, Arabidopsis thaliana
gctttctcagtaaaacaacctaaatagagaagcttctgagtggtctcatgtggatcactgaaacactccttaaagacagagaagatatcctcgtcggaatgttgtttaccggtaacctctctgatgttttgaatggtttgaagcagatcagccggaatagaaaccctagagccgccatcgccgctgatcctgctcatgttggttacagagagaaagagaagcggagggaggaggagagaggaaatatgggttgaacataaagacttcgtatatagtactattatttatttccgtacaatctaccgcttaatgtctctctctacgtatatttatacgctgacgtcactgtttatcaatttcctcctcattatttgattgagtactattatttatttccgtacaatctaccgcttaatgtctctctctacgtatatttatacgctgacgtcactgtttatcgatttcctcctcattatttgattgttttgtacgcgtttaatggaaggagagacaacaaagttgatatggccgagttggtctaaggcgccagattaagg

SEQ ID NO: 753 - DNA, 1767 bp, Arabidopsis thaliana columbia
cctacatcgcttgaggtcgatctttgttactagccaagttctgacatagatagtaacaatattatgtaatatttaattaaatatcaccgtaaaccttatatgtgagcaaattgtactaacttcgtcttctgcttcggctagaagcttggggtcctatagtcagaaaacagattctgattatcaactgcatgtacaaaccaaattgggtttgaaacttgaagttaatcaacgacattgacgttgacagcaatcctaaccatagatcaaatcgagaactagttctcgataattcttagtcggtaacaaaaatattaactaaattacatatataatacccgaaactaataagagtaaattgttactaaattacaaatcagcatgcttaagagtgaagtattgtttactctcatcatcatcattgttaccgccaccgagaacttttccggcggagtcctttgatgcatgcaattatcatccaaaaaccattcttacgacgccctcatttaccggggaaaaaataaatagctagtgacaatgtttaccacgacatcacaattgtctccggcgccattaacctctacctccccccccttcttttgatgccttcaatgggaataaatccatcaactttgaggccgaacaatacttagcgggtaacaaacactcttaaatatataatactccccccaaaaggtattgataatattgtaggattattaaataacatatcatcatgtcaaaaaccaagttatgcaacttttacctcatcgtcttcaccgtttccgtctccattagactctacaccaccatcttttgattcctgcaagtatacaccaattataaatgatgtataataattatattagcttctaaacttgaaattaaacaaaaaaaactttctcctaactcacataacccgctaaagctataaaaactaactaaatattatcagttaatttgattacctcagcatcgccatggttaccaacttcctcagggtcgacgcccatagtttttggtccctataaccaaaagaaacaaaaaaatatttaccccataacataaaaagtaacatttctagtagttagttagttactaactggtgaactaaccaaataattttctacctcacacccttgaaaagattgaccaaccgccgcctgagacccactacaatcaccagggaaacaccctttgtaatatgaagctatcacatcaacataattttcaagaccaaatcctttgtcgggagcttgggtgtcgcgattagaatctttgtcaaggcgggaagaacgacaaaccaacggacggacaggaaagagagtgtcaaagtcatcgtcttcatcaaatatgggtagaggattattacggggagcaggcacgtgtttctctttcctaatcactgcaggaacttctttcccattgttagcaggaccgtctttcccattctcatccgagaccagtctatttgaaagaaaccaatcggtaacgcctttcattattttttttgtactgggcagcgaacttagcatctaacattcaggatagcgcgcccatgtcaaccgaaacaaccgtttcatcttcatccgtcaatgattgatgggtccttcaaacccagttaaattttttgggagtctgccttcttagaagcttttctccacgaccacctttcgaaatagcgttccttttatgtttcttgggtgctacaacaatttcagatgggaccaaccaccaggaaacatatcattgttgaacttggaccctttg

SEQ ID NO: 754 - DNA, 1155 bp, Arabidopsis thaliana
catccttgactcatgtcttcttaccgtaaccctgatgacacattacaaggagataaccctgtctatctagagctgattcgatattctcagaaacctcagaaggctcgagatcatcagggagtgggcattctacgacgtcccagaagacgactaccttatcctcttcctctagatacaaaaaaggcggcaaaatgcattaacaatcagtatccagagaattactattgatttgttcctccacatactattagagagatagagagagagagagctaaccagtggtcatggtttcgaccaacacccgagaaatcagggttttagatctgcggcggtggaagagcgagctctctcttggtttggttgggtttaaaaagaaatggtccgggaactttggtttagtaatttagaaatcgaaacagagcaacaaaagttgatatggccgagttggtctaaggcgccagattaaggttctggtccgaaagggcgtgggttcaaatcccactgtcaacattctctttttctcaaattaatatttttctgcctcaatggttcaggcccaattatactagactactatcgcgactaaaatagggactagccgaattgatccggcccagtatcagttgtgtatcaccacgttatttcaaatttcaaactaagggataaagatgtcatttgacatatgagatatttttttgctccactgagatatttttctttgtcccaagataaaatatcttttctcgcatcgtcgtctttccatttgcgcattaaaccaaaaagtgtcacgtgatatgtccccaaccactacgaattttaactacagatttaaccatggttaaaccagaattcacgtaaaccgactctaaacctagaaaatatctaaaccttggttaatatctcagcccccttataaataacgagacttcgtctacatcgttctacacatctcactgctcactactctcactgtaatcccttagatcttcttttcaaatttcaatggcgtccggtgatgttgagtatcggtgcttcgttggaggtctagcatgggccactgatgacagagctcttgagactgccttcgctcaatacggcgacgttattgatccaaggtctgttaccgccgagatcggactccgagtgatatcgatg

SEQ ID NO: 755 - DNA, 657 bp, Arabidopsis thaliana
aaaacctttggtaagtcatttacttgcaacttataggttattaactcatttggatttgacgcgttcaaacatttaacacagtcaaactcctaacaagagatttcgacgttaaacagatcatcaaaacttcaattataacaaaacttcacaacaaagatatttatattggatcaagaaaaactagggaaacacaacaaagtattagataataatttgcattcattcatagattagtaccaagtggttacaatctaacattatagtcttataaaacacgattatattaatactatttcataattaaaaccctaaggcacatctatacaacgatcatcttagaaaaatcaggccccaaaatccataattaattcttattagcagataaaatacgagattagtaaataaaataatatgaacacactaagatcccttcctcttttccttggaagatatccaaaaaagccaatgagacttcgaaatacggtcagatttttttctttacatgagcaggtcagatacccacccgacatcaggagcctcacccaaattctgatccggatcctgggcaactcgatccatgcaattctccttgtgcagtttctcgcgcatcttttctcgtagctcacgacccgactcaacgacacgctccattacggg

SEQ ID NO: 756 - DNA, 690 bp, Arabidopsis thaliana
tactttaaatgttttcctacttaaatttaattaataaaataagaagaggctctttaaatgaaagacatccttctaaaatgtctcaaagaaaacattttgagacacattaaaaatgatcttccatttaaaaacactattcatattttattaataatatttatatgggaagacacaaaaaaaaatatggtctaatagcaagataacgcggcaagtgacaaggatctatctatatatcacttagtgctcccacatgcatatggatttgtaaaaatcgttgactttgacttcgtagccctcaagtcgtctctctccctctattgatagctaaccaatagcttctctcaatcacaccgcaacaaatcacaatgaattcactctccttcactctcttcatattttctgtcattacctttctacaatgtttaagttcaaccggagctgccacgtgtcatcctgatgacgaggcgggtcttttagcttttaaatcgggtataactcaagatcctacgggtattctcagctcttggaagaaaggtactgactgctgttcatggaagggtgtcggttgtctcaccaaccgcgtcaccggactcactatcaacggacaatctgatgttactggaagctttctttctggcactatctcgccgtcattggccaaactccaacaccttgttggtatttacttca

SEQ ID NO: 757 - DNA, 1101 bp, Arabidopsis thaliana columbia
tagaggatgcctaaagtaagcaacatacgtaaggtagacaactaggtgttaatcactatatatagtttgtagtagaaaacaatatcaaaagtcaggatggccgagtggtctaaggcgccagactcaagttctggtcctcgtaagagggcgtgggttcaaaccccacttctgacatttctgtttttagttttatgttcaatgactggatttttaaatttattatttttccgattaaagtagataactttttttacaacaaccattatttttttttttgtcatcatttaaccatttactttcaaaagcaaaaaaacttaaagatgaacagtgacgacaaaaaagaaagaaaagatgaaacagtgaaagccaagtacagtcattttgattaaaccgtattcattaaccaacttttcactaactatggtaaaccaacccctgacccgaaccgaaccgttcttgtttttaaccaatgattcattcaatcagagtctttatccgtagaagtcaatacctccgtctcagccgcacccaaatccggagctattccggtgccgttgtactgctgaatcaccaaaaccgatgcttttgtcgaagattccggcgaaatcaacaagcttcctacaggtccaagctccggacattcactattctccctaatcgccaatgcaatttctccacctggcattctaccaaccaaaaacaaattgctccgccgcacttcctcaatcgccgatctaacatccacggcggcgttttcaatctgtttctccacgatcgttaaccgattcgtccaccgaagatatcttccttatctcagacataatctcctcatccgatttcagattcttcacactctgattctcgttgttattgttactcacttcaacattaacaatctctccgactctctccggcgataccacaaatcggaaaacagtcaaaacaattccgggatgctccgccatacgtaatccataagccaacgcttcacgatcatcaggaccaccgaagaacagaacaacaacagagtaagaaacatcttgagctgagacttgacttgaacctccgagtccacggtcaacgaatatacgaccgaacaag

SEQ ID NO: 758 - DNA, 1296 bp, Arabidopsis thaliana
ttatatttgtagtgagtgttctaaagctagttgatacgaaaatactgaaataccccgttttattccgttagacccatttggatttggattcgaattataattttccccctaatttgaaaattttagtccgttaaaacttaacacaaaaattcaaattacatattacttatggttggatgtgcactttacttaatttgagaatactaccacgagtgagttcattaagaaattcttaagtattacaacccttaccttcattctaacgagaacacaaagcaataacgaacacaataacaattagatgattcattttgtggatctagaatatttcttaaagtacaatgaatccaaaagcttaatgttcataagccaacaaataaatttgaacaaaaatataaaccaaaaatgaacctatggcgggaggagcatttcctgtcgaaaactaaggttaatcagtaatataatgatcaatcctttctctctctcaaactaagattcaaaaagctccaatggagtaacctgaaagacaagaagcgcataagaaaattggttgaggaaatgaatcataagaagtaaatcgattagacagaccattatagagattctgcgactatctcttaaacaaaccaacgtcttaaatctctaaactcacacttaaacaatatgaaaacaacctctccaatactctgataacaaaccatgcctcaaaatcgtgttgcttgtattctacggaacaggcattatactattataagatcaaaatatattgaacaaaatctcgcagcttaatttaatacttaaaaaatcacaggtcaataagatatacaagagggattaccaatatcacgcttaccattccaatgacatgtggtcaagtcttaagatcgagattcacattgatatcagatctctttattttgttaattaaggtctatatcatggagtatctcttttaccgacagagagttgattaagcctgtcatgggaatataaaatgataattgtcatgctgtaattacggacaccactaactatgcaagaaaaaacacgtttgaaaatgaatagaaatgaaatcagacctcgagtcgacgacacttcagtcacttctctcattcaacaaaacaccatgaactcttgttccttccctctcttcctctttgttatctttctccggtgtttaagtccacgggagctgccacatgtcatcctgatgacaaagcgggtcttttagctttcaaatcgggtatacccaagatccttcgggtattctcagctcatggcagaaagatattgact

SEQ ID NO: 759 - DNA, 541 bp, Arabidopsis thaliana
ctgcgtttgagaaagtgtgcacggtgttgctgcaaaggcaagataccaataccgagttagggtttcaaacagagcaatctattgacctaaagtgagaaaatataagttagaattggtctaagtcaaaagctaattggcgttgagatctttggtcatatctcttatatattactttagttcttggcttcatttgatatgaaaactataaataatcgagctaagacataccaaaaccgatcgtttccttgaggccacatgagatgagtgaatctctgagcaatttctttgttggtaacatagtcaactccaaggccttcatgaagagggatcacaggcatttgaccaacgtagccatggtaaggcttctcgtttacgtttttcttctttgtctccgtcggtagatcaaacagttcctcagcagcggcgaagatggaatcgtctagctgctgtgttactccgtcgtacacggccaagaaacagccgtatcctccaaggcttcacaagcttctcttgaaacagaacgccacgtggatgtgtttgg

SEQ ID NO: 760 - DNA, 651 bp, Arabidopsis thaliana
gatacatttcattattttataagttaactaatttgcttcctttatatctttagtaagtaattttcgtatttatagattcctttgtgcgaaacgagagtttgaaattgcttttgaataaagagtaaagtgtagtttggaggaaaatgaacatacttgtccattttaagagagttaattaatacttcccgtcaatgtgcaccgttaacattgctgtattagctataatttcttacagcttgattgatcaaataagcagcggttatcgtcggttagttattaacgatctactataatactaatcactgaaaacagaaccggacatttaagagaatagttgttcaatgaccagccggtccaattcaggattaacatatttcaaacatcgttataccatctctctagtgaatattataatatgtgcatttgtaatataacaaatgtgtacaaacaaatacaccatttctcatcggaatagaagaagcgtttcttgacctgttgaaccattggtagaggattcgctagagtcctgaaggcaaagagctggcaaagaagtcacggccgggatgagaccaatgtttaggtcaggcaaatgacttcgtccggtactagtactatctccgagcaattggtacttggaatgggcaaaattgt

SEQ ID NO: 761 - DNA, 843 bp, Arabidopsis thaliana
caagacattgtcagagatcgccctttgaggaacaaaagccgactgattctccgagatacatgtatatatggagcataggctgcattctctttgtaaggattttggatatgattctgtactttgagacttttttagggcttagtatcttgggaatcaatctgatgtgggtatggtttattcttctaggaagtacgtcagtgatgaagaaagtctgtacctctgaaatgatttcaatacccatggtctcccaattcgattgaaaaaagctagcagagaaaccatcagggccaggcgctttgtcaggatggatggagtagcaggcttccttaatttcatcagggcagcatttatctccgccgaaatacaaggggataaggcttcattcaccaccgtgtgtctgtttcccgcttgagaggtgaaaattgctgagtaataatcagagatggcctttactatatcctcttcctcataaactagtgatccctcagaagattccatcactgcaatgttattaatggctcttctgtttttttgtagcagcatggaagtaccctgagttcttatcaccttgagtaagccacagttgcctgcttctttgcttccaaaactcctcctctttttggtaagcaatgagtagattttggttaatctgtgtgatctcttcctgattctcctcatctccacacatcttttcttccaggaggatccgaagacagttgatttttgcctggctgttaagatgctgatttttactctaggctataatcgctaacctacacttgttgagtcttgtcactagggctaaaggttcagagttccaagcattcaaaacaatagctttaa

SEQ ID NO: 762 - DNA, 515 bp, Arabidopsis thaliana
taatgttctatcctccacgcggttctcataaaccgacttggcttctttatttttcctttatctttctctatatatttacacacacacgcatttgtgcagagatattcaaagattagaaacattcttgatagatacaaaaaacatttttcagacacaaaatcataaaatctttgcctttagtagatcaaagttctttacattaatcgttagaagatgagccagtacgatcacaaccagtctgcaggtaagaaaattttctctgtttttattttttgttgcctttaaccattaacgttatcttaagaatatttgtaaactctttatgtatattatgtaacgtaggagctaacccaccgccatcgatgtctacctgtacatcaccaccaccgccgattggttacccgactaaccaaccgagtcatggttcggtagctcagggtaaagtggaaccaagtctaagggtgacggattcttcaaaggctggtaagtacttatcatgaaattatgcaacttta

SEQ ID NO: 763 - DNA, 624 bp, Arabidopsis thaliana
gtgtaattattgtgagacatgtaacatagtgagagttaggatgataggaacctgatggatgagcatgaggataacggcggtgtcacggaaacgcgttttagggaggagagagaaagcgtttgagtggttgagaagttggtcgccgaaagcccagtagacggcggaggctgacggaagcgttaatgtgaagacgtacagagttgccatcaagtagatgctcttaaacttccttggtttccacatcgcatgcattatttccctgaaaattttataactttttttatagataaaatgtaaaaggaaatggcataaaagtcttttacagtggatttatgggtccgaccagagattggccgtccgggtccgaccactgtggttacgttacgtagtcgtactctcgaagatgagatagatatttgtgagtaaaatttactaaaataaaaagaatgttaggaattgagttcagtagctagtagctatagtgtgtgttaaaaaggtaaatagaatttttctggtaaatttgtctttatttattccgtaataatgattttgtctgtttgtgcgtttaggacagaacctaaagtaaccggcaaaagctgcacatatagaagctaaaagagatga

SEQ ID NO: 764 - DNA, 1017 bp, Arabidopsis thaliana columbia
tctctgatcccacgcatatccaatgtgcaaccagaatatcaaaagcctacacagaacaatttcacagaaggcatggtaaatctctatctaagctggatattagcaaaccaaaaggcaatcaaaaaccttaagctagaatcttttaacaaattgctgaggttgttatattacctcttctgaatcaatgaggagccacttgccatcatgtagctcaacaaataagagcctcgaacaaggatcactcttagacactgatacagcaaaatgccagtaacgattgtggcgccgatcttgtccaagcggcaaagatcggtatggatacacctcttctgctttgtggcctatatatgactttaattgggagcgtgatctctttgaagcataattttcttgacttatattggcatcctgattaataagtgctctctcagcagatgatttatgaagatcgttcgaaagatcttccaggggctttgtttcatctagaagttgagaagggtctctatcaaaactatccctctcacgagtagagctttgaatgattggtaggcctatcgttgattcagttttgctgcttgctaagttttgaagatcaagcttaagtacatctctcatacagctgttatctaactgtgcttcagcccacatttgctttttaagagcatttgctgcttccatacgatcctgtgaataaatttcaatcagataacaaataatagactcaaaaggtcaatttctactctgttcaacaggaaagctgataaaagaaaacccagactttacctcaagacctgttctgatggagttccttcattggcaatgcgactaaagcaacaagggcattaaggcgctcttcaacacttagatgacagtaatccccttccgtaagaccttgaatccatgattggccctggttgctttcatcaattacggcatccacgccgccaaccactgtatttttatgccgctcactatgttgtggacaatgctcttcatagtgcttggaggaggagatga

SEQ ID NO: 765 - DNA, 1148 bp, Arabidopsis thaliana
tgatatcgatttaacacgatgtgtaaactcacgactgttcaaaaatacatatgcatatctcaaacaacatttccaatgaacaccatctacacaagaatatgagaagataaagtacactcactgtattccactgcagttggtacaaacaaaagtccagaaagtagtgcaaacatattgtggtccctaagtaaatgatatcgaagaagaaacgttaacgttaagttctctcaaaatttttatcggaaatgatcaaatgaagagcaaaaaaaaacttacaaggctgttacagtttatacacctcttattctcaggaagtttaagaagactcctaataatcttctcgttcttctcgtcttctttaactcgacccgccattttcgattccaaaacactaagctagaaactacacaaactttagaactcaggatcagttttctgaatcaataatggcgaaatcaagttctgaacaatacgaattacagatttgttcgcttagtctaacgtaaacacgagatttgacaacaaattctagttcggttcacagagttgagatcgatcatgactaataacatacagatccagaaactataggagatttagaagagaaacggagcaaagtagacgaacctgagacgaatcttcaacgacgatcgaatttctggagattttgattcttctttgttgaatcagtgtttgcagagagagagagagagagactttgtacagctaagaatggtctgtggggttaaaagagtagagagagagatttgaggaaggagatggacggaaataattgacggcgttagatttttgtggaatctaagtttgtgaccggtgttgacgacgtcgacggctgtggtctgtctcgttgacggcaaaatgagacaatagtcgacttacttatctacgctatttgcctatttataattttataattatttgttcttttaaacaaataaaaaaatattagtaaactaaaacaaaatttaatacatagtaggtagatatgtttttatattgatttgtattacgaaaaatagattaattagtatttaactaaaaataaatgatttgagtaaacattaagaaccttgttttataggattttaggtaaataagattaatttgattaaagatcgaatgaagac

SEQ ID NO: 766 - DNA, 1516 bp, Arabidopsis thaliana
ctctagaggatcccgcataatcgaaccaagggaaagaagaattgttttgcataatgaaatagaattagtttatattgtatttgtttaaaattaactctcaaaacaacaaaactctatctttcaatttaacagcaacaaatcttctagaattgaatgtacaacaaatgcaagtaggtacatgatataataataataatgtgatataactagtttagtgaaatgagttaaacaaaaataacaaaataaatgaagtggagaaagtaaatgaagaggaagagtcatcgctgtcatggtcgcagttaaagaggtggtcagagtcagaagtctcccttaagcaaccttccaaatttattgacatttctgtttcccaagatccacccaccactctcctctctctcttcctcatttctgcgcaagaatctaaaccaaatctctcatcctctcttctatgtcccaaaacaggaacataactactactactaccatgtcttgactctgttgagaatcttaaatcctacctaacctccaatgggtaagaagagcggttcttcttcttcttggctcactgccgtgaaacgagctttccgatctcccaccaagaaagaacacaacaacaatgctcatggtaatgaagtcgacgaagatgaagacaaggttcgtatactttctctagtctcgagatcttgcttcttaattcttgtttttttattcacatgctctgtttcttgtttctctgttttgtatattactataattcatatgctctgtttctgcagaagaaagagaagagacgttggttatttagaaaatctacgaatcatgactctccggtgaagacctccggcgtcggaaaagacgctccggcgcagaaatccacagaaacaacgacgatcatcaacccaaccgttttatcctctgttacagaacagaggtacgacgcatctacaccgccggccaccgtctccgccgcatcggaaactcatcctccttcgacaacgaaggagttaccaaatcttacaagacgtacttataccgcaagagaagattacgcagctgttgtaatccaaactggtttcagaggctatttggtgagcaaaattctcccttaactacatttgattaattagtaatcaaacaggttttggatttaactttgaattatataggcaagaagagcattaagagcattgaaagggctagtgaagttacaagcactagtgagaggtcacaatgtgaggaagcaagcaaagatgactttaaggtgtatgcaagctctagttcgagtccaatctcgtgtgcttgaccaacggaaacgcttgtctcacgatggtagtcgcaaatctgccttcagcgacactcaaagtgtgctcgaatctcgttatcttcaagaaatatcagacagaagatccatggtgagtgatcctataagttcagacaccattgttgcctgtttcacgaccatttttgcctgtttcagcaacagctatataaagctacattttgaaatccttttttg

SEQ ID NO: 767 - DNA, 547 bp, Arabidopsis thaliana
ctatcgtacgcgcttaatatcgctaacgcgccgccgagactgtgtcccgtcacggtgatgcttaaatcggaatcatcgtcgtcgccgtgttcttccactaaccgtttcacctccgttaaaatctgttcacgcgctgagaatctcgcgaatttgcaggttgtgtctttgtcagtgtagagatctaagaatccggattccgactttaacggccgggtccgggcatcggatcttgttttcggttaccggttttaaataatcctttagatccgcgatccattcaagtttcgtaacggttcctctccacgcaatcgcgatatcacggcggccgagtcggttacgagacgtttcgtcgtctgaaacggcgacgtatcccatccaattagcgtttttgctccagactttagaccaccgcgatttcgagaagaagttcgggagattgatgttcgacgtcgcgtagaggtaacgcgccacctcgtaaccggaatcgatcattccgagagaatcgaagaactcgagtcgcgtgaacctggaggtgccgcagtatttg

SEQ ID NO: 768 - DNA, 1236 bp, Arabidopsis thaliana
cagattcacgcgccgtcacttgttcgattcgctcgggataatcgattctggctatgaggtggcgcgttatctctacgcgacgtcgaacatcaaccttcctaatttcttctccaaatcgagatggtccaaggtgtggagcaagaacgccaattggatgggttacgtggctgtatccgacgacaacgaagccacgcgctgccgtttaggacgccgcgacattgccatcgcctggagagggactgtcacgcggctcgagtggatagctgatctcaaggatttcctcaaaccggtatccggaaacggattccgatgccccgacccggccgtaaaagccgaatccgggtttctggatctatacacggacaaagatacatcctgcaatttctccaaattctcggcgcgagagcaggttcttacggaagtgaagcggctggtggaaaggtacggcgacgaggaaggagaagaactgagcatcaccgtgacgggacacagtctcggcggtgcgctggcggtgctaagcgcgtacgacgtggcggagatgggtgtgaacagaacgaggaaaggaaaagtgattccggtgacggcgttcacgtacggaggaccgcgagttgggaacattcgattcaaggagaggattgagaaattgggagtgaaggtgttgagagtggtgaacgagcacgacgtcgtggcgaaatcgccgggactgtttctgaacgagcgtgcgccacagcgtagactgaaattggcgggaggattgccgtggtgctatagccacgtgggagaaatgctgccgttggatcatcagaagtctccgttccttaagcccaccgttgatctttctacggctcataacttggaagctctcctccatctccttgacgggtcagtcattcttctttttattacttttttactttaaaaagtaattttaagatttccagctaatattttgacaagtcaaaagcctttgaggagacagatctcaatgtccacattttccaacaccatttctttattaatacgattttcaaaaatttggtaaacattattgcctcatcaaatgccgaatggagaataatggggtcatttagtaatctgatttacgtggcacttctttctttcatgggtaggttggagagaatttaattatcgaaaactactaggaaataaatttgtcgtttagagcataatagtattagtatgagttgatgaatctggattattgtttaaaaaaac

SEQ ID NO: 769 - DNA, 602 bp, Arabidopsis thaliana
atacgttgatgaaatgcgtagctccacagagaatgataaaggctccaaactgcataagcacccatttgtaagggaagaaagcagacttttgcacgaaatagataagctcgagtgggattgagaagtatgcaagagcaatcaacgcatctgagatgtattggtacttcactaacagatcatcttgattcacatgcgtctcaaaacaatcgcatgactccatttttggagctctgacttgtgttgacctggtcaacaaaactcagatatcagtggagactagatttggactagagctatggaaaagagatacaaaatctatccagaaaattgaatctacaaaatgagattgattcctcgataacacaacacagatcgatcagatgaaatgttactaaagtagtgaaatcaatcttcatcgatagatagatccgatcagaagagaataaatagaaagtttgttatcccgagacggcacagtacctggaagagaaggattcatgacggcggacgtattggtggtgtgagcctcatagctttgggtaatgatgaaaaaaagaaagttcaagttcgtcttcctgattgatccgagcgttatgaacttg

SEQ ID NO: 770 - DNA, 721 bp, Arabidopsis thaliana
tatgattctcaagaaacaaccagttctataaccattcctgcagcagaaagctctccaacctcggctaacacaaaaccgattacttgatttattgtaacgcagttttagcgtcgatggcctgtctttttcatctattagaattatctcattgcacagtttactcgaaccacttgatgtggtaaaacctcttggaagatactgcaaagaaaatttccaaagttgacagcaatactaatttcattccataaatataattctaaagaagttatagaatgaaggacttattacaaatgaatcaactcgttggtttgaggctgtaacagggaccacaaaatcagtgtccactgatgaacactcattttttccgtttttcttcaccgttctagatcttgtaacctttcctgaatcagaagcagacccacaagtaaacatcaacagtttcctcttttcgtatttaacttgaaagtactgtaaagaacttaacttacccgtcgtgtctttgacatctttctcgtctctctgtgagtaaagtatctcacaaaaactcagtccaaaaggtgtgacatgaaacaagagatttccttcgtgtctgaaaacaagaatgtcgtcgacctgaagattgtgagccacgcaaattcttcccaccctttggtcattcttcggccgtctatctttatttccaagtgatctcgtggcgtctgatctcagttctgcagcgttt

SEQ ID NO: 771 - DNA, 779 bp, Arabidopsis thaliana
gggtaccgaatgatagttcaaaaatctacaaagaaagaacaaaagcttttcatgacaaaaagatctcaccaaaacattttaacattggagaccaagttctgcttttcaactcaatactcaagttgtttccaggaaagctaaaatccaggtggtctgggcctttcaccatcaagaggtactgccatatggggcaattactcttactaaggagggaagttctgaatttactgtgaataggcagagggtcaaacgttatagtgcagattgccctattcctgaaggaactacagttgacctccaggaacccatcaatgcctaaaatagtaagaagtctaacttaagactttaaactagctcacttgggaggaaatcccatgtctatctctgtacatatttaattttgatattttgatatgctttttagtgtttttggaattcaggaataaatcaggatttgtagagctgtgaactctgtgatcaagaaatatctacaacataagcatttctactctatcaattgatcgagtaaagttgcatcaccattttactctatcaattggtcgagtaaagcaactaaacgaccaagcttggtgatcgagtggcccacttgtctccccgtcattctattactcggtggacaaagcctttacccatcatgctcaatcactatttggtcaacacccttatcccaacaaaaaaagcataggagaccatcctcctccactcattcaaatcaaaaccaaaagataagatatcactcttctcaccttcttctttgt

SEQ ID NO: 772 - DNA, 996 bp, Arabidopsis thaliana
tcctacacaaaacaataacagctacatgagtattcaacttgcaatctcagtggactcttaacgaaaaaaacagagcaaagaagcaaagcaaaggttaaaaaaacagagaatgaagaagcaaaaacctgttgaatctcgttgattttattgccatccacaacaactggttcttgctccttctccagatcatctaacataccgttgagcgctcttaatgcaattcgttctgagatatcgagcggctcagcggaagcagtactgtcaatgattgtttctgtgaaggaacggtggtcttgagtggtttgacttgagctgattcggcgcttgcgtttgtattggatgagaggcaatggagcttctttgttgaggacacaaagaggcaatggaccgtcatctggaacatggatcgcaactctttcaccattatcatcatcccactcttcttccaagaatggtgcatatctgctccctgtattgttttgcttgaagaacactctacacaatacatacgcatctatatgcatcccataaacacaagtcacagatatataaagagtttattccggaatcataagagatttgatcaaatccacttctaagtcaagaacattatgtgtaataaaaaaccaaatagacttaaaatgtggtaccacatgcatgatttaagaagcaaatagatcatcaactcaaaaggatcttgtagagaacatatatctcaccggaacgccttcgtcatttttagcgaggtgatactcattcatcacccaatcggttcccagaccgtttggactacgccccctgtgaaacacaagagtcttcatcgtaccaatggtcaccttaccgtctcctccttggcggattttcccgtctgttccagtgactttccagtagccttgctttgttgctcggctcatagaagtaccagtgcgagtcttcttatccaaggcactgaagaagaaccattctttgtcccttgtctttaacttcgattgtttg

SEQ ID NO: 773 - DNA, 526 bp, Arabidopsis thaliana
taaacacattgtcaaaccactcaagcgttccccaaatttccccattttggtgtttttcaatcgcaatttccgcacaccaaatctttttttccctatcaacaaacatatactcctcccaagaaatcgccatttttccaccatgatccgccaatttaacatttgaatgagaagtaggcaaactaggcaatcttcccaagcccttcaaaattgtccatgctctattcttgaggtcataccaacgtatctccccctcacagtaacggtagaacacgttctctaccacacaataagatgatgatgacgacagactccatccattattcatacatatgtctgcctctctccatttacctttatgcatcttgtaagtcacatctttttcatcagacttcacatagacggttccttgataacttacgcttaagtactcagagcctttgcatatctcctcgctagggatctgtagaaactcccaagtttgagtcttcgtatcaaaaatctccatccagttcattgtatcgagatt

SEQ ID NO: 774 - DNA, 553 bp, Arabidopsis thaliana
catgtaaaatcaaaagaaagtaaaaatgcttcctctttcaatatgtcatgagcaataaagtaaacattacccttcaaggacacacgctgattatctattatatggtcttggtcggtattgacatcaataaccgtccacgcatcagacttaaaatcgtagatttcatactcacggtacatagacgaaaaccataagattttgtggttgttgttgctgtcgtatcccatataaaatctgccagctggtctatgattaaacctgccagctggtctatgcttatgcgagttgtttctaggttggatccacctggtttgacccaagtaagggttccaaaccatgagcttcgagttatccttagggttgcataacaacaataataataagccatcacaatgaaacacactatctatttcgacttgattaagtttacctatttgctttatagatggatctgccaagtctttgtgattatggagattgacgctcattaaacaagcctttaaatcacatatcatgatcacctgaatctccttggcttctttaccataatggt

SEQ ID NO: 775 - DNA, 1058 bp, Arabidopsis thaliana
tattatacactttatcatctaaaaccagattaatctgttaagcgtgttgtattttttccttacaggttttgcaacagtcacacttaccgagatcctcccatcaacaaaagccattgcctccttcaaagtccctgattataattccgccaaggtttatattcctttttaatgaaatcacagatgtttacttctcagtggtttgaatgaaaattaatccttcagcttttgaatttcattaacagctcgaggtgcaatacttccacgaccacgcaacagttaccgctgctgcagctttgaaacaaaacccactaattgacataacagctactcttggttcgccagtcatctcatttggtgctgaagctggatatgacacaacctccaaaactttcaccaagtacaatgccgggatcagtgtgacaaaaccagatgcttgcctctccataatattgtaagaatacaaatttcaaaataaagcaatcactagctctagatgtggcttgtgtgggtctcatctgagttttttttgttccaggggagacaaaggagactcactcaaagcatcataccttcatcactttgatgaatttaagagaaccgcagcagttggtgaggtttacaggaagttctcgacaaatgaaaacacgataacggttggtggattgtatgcgattgatcattcgactgcagtgaaagctaagctcaacaaccatggcacacttggtgctcttctgcagcacgaggtcctgcccagatcactagtgactgtttccagtgagattgacactaaggctttagaaaagcatccaaggtttggtctctctcttgctctcaaaccttgagaacacacactcacatcagacctgcttgagtcttcctacttttctcgtatgctctcattgttgattcctctacggcaggacgtgagagttagcgttttttcctcctttttccttacgtttaattggaatcaataaatagtccgcagtgaaattgacggataattctttttttggatatgctcggttttggtttttttgttaccttcttttataatt

SEQ ID NO: 776 - DNA, 1089 bp, Arabidopsis thaliana
tgatcttgaaggtccaattcctgaagaaatgtttgatatgaagctactctcagttcttgatctttccaacaacaaattctcaggtcaaattcctgccttgttctccaagcttgaatcgcttacctacttgagtcttcaaggaaacaaattcaacgggtctatccctgcaagccttaagtcgctttcgcttctcaacacattcgatatctccgacaatcttctcactggaaccatccctggagagctgttagcttctttgaaaaacatgcagctttacctcaacttctcaaacaacttgttgactggaaccatcccaaaggagcttggaaagcttgaaatggttcaagaaatcgacctttcaaacaatctcttttctgggtctattccaagatctttacaggcctgcaaaaatgtgttcacactggatttttcgcagaacaatctctcgggtcatataccagatgaagtcttccaaggcatggatatgatcataagcttgaacctttcaaggaacagtttctctggagaaatccctcagagcttcgggaacatgacgcatttggtctccttggatctctctagtaacaatctcactggtgaaattccagagagtctcgccaatctttcgactctgaaacatctcaaactagcttcaaacaacctcaaaggccatgttcctgaatccggggtgttcaaaaacatcaacgcctctgatctaatgggaaacacagatctctgtggtagcaagaagcctctcaagccatgtacgatcaagcagaagtcgagccacttctcgaagagaaccagagtcatcctgattattcttggatcagccgcggctcttcttcttgtcctgcttcttgttctgattctaacctgttgcaagaaaaaagaaaaaaagattgaaaattcatcagagtcctcattaccggatttggattcagctctgaaactgaagagatttgaccaaaagagttggagcaagcaacagattcattcaacagtgccaacatcattggctcaagcagcttaagcacagtgtacaaaggtcagctagaagatgggacagtgatttgcagtaaagtattg

SEQ ID NO: 777 - DNA, 711 bp, Arabidopsis thaliana
cgccagtgtgctctaaagcgtggcgattcgcacttttttacagcaaaacgccaatcgggaaggcgattgcctgaccatccccgacagcagcgccacgcagcgtgtttctgcttcgccagcgaccacgggggcgcgaacgatgaccgcctggacgcaggatctcatctatgcaggcgatccggttcattatcatggcagtcgcgctaccgaaggacactttcctggcggcaagccacggcccaggcggggcagggagagcgttacgatcagatactcgcgtttgcttatcccgacaacagtcttagccgctggggagcgccacgctcaacctgccagttattacccaaagcgaaagcgtggctggcgaaaaaaatgccgcagtggccggtatattacaagctgagacggggtacaacgaaccagacgtgtttgcggtttgccgtttagtctcaggtttcccctataccgatcggcagcagaaacggctgtttattcgtaacttctttacgcttcaggatcggctggatttaacccatgagtatctgcacctggcctttgatggttatccaccgggcttgatgagaactatatcgaaacgctgacccgacaattattaatggactaatgctatgcgaaagatttttcttccgttgttactggtggcgctttcgcgtgtcgctcacagtgaaggtgtgcaggaagtcgagattg

SEQ ID NO: 778 - DNA, 594 bp, Arabidopsis thaliana
ctaaagcggcaggctggcgtccacgtcgatatggagcgccgtctgtttatcgcccgccgccgcattgaaaagcgtctcgaagccgacaaagacttctacgtctgtagcctgtcgaatctggtgaacatctataaaggtctgtgtatgccgacggatctgccgcgcttttatctggatcttgcggacctgcgtctggaatcggccatttgcctgttccaccagcgcttctccactaacaccgtaccgcgctggccgctggcgcaaccgttccgctatctggcgcataacggtgaaatcaacaccatcaccggtaaccgccaatgggcgcgtgccggtacttataaattccagacaccgcttatccctgacctgcacgacgccgcaccgttcgtcaacgaaaccggctctgactccagttcgatggataacatgctggaactgctgctggcaggcgggatggatatcatccgcgccatgcgtgtattagtaccacccgcctggcagaacaacccggatatggacccggaactgcgtgccttctttgactttaactccatgcatatggagccgtgggatggcccgcgcgatcgtgat

SEQ ID NO: 779 - DNA, 665 bp, Arabidopsis thaliana columbia
taatcactactcatgcaacattctcaagacacaaaccaaggaattactaaaatcataccaaaatatagtctaaacaagctaaacaactttacttaaacaatgaaatgcaaaaacgaaatagattaagagtaattaaagtttcaagattcataaacacaaagaaaaactgaaagataaaacatagatcttttggacaaaccccaaaacgatctatttatactaaaatgttggaaaccctagattcactagaagacaagagacttgaggcgctttgggcgaatgctcgatcttggggatcgagtaaagagggtgctgcaaagtttgcgcctttttgtctatgctccgagtgatcaattggtcgagtagatgctttatcctctcctatccatatgctcagatgtctggttgagtggggaatgaggaggatccgaagacgctttgatagctcaacaaatcttgtagagatggtcacccttggtcgagtaaatggatcgagtagtggatcgagtaggaggggcgagtagattagtctgctgctttcttctgaggttggtcgatcgagtaagagggtcaagtaaactgcaacatcctttgtagcatcctggatcgagtaaagaggtcgagtagaatgatgcctcttctgtagctgcccagattgagtgaat

SEQ ID NO: 780 - DNA, 855 bp, Arabidopsis thaliana
tggttttcagttattagtatgacccaaagaaatgttccgtttcaaccaaatgtcacttaattaggaggtttaggccaataccaattaatgtcgttgatgtttcttacaaaattgtaagtttcttgttgactttttgaacatgcacaaaaatgattaaaattgtgaagatccactctgtattaaatgtttaaaattacatcgaaaaatgtgaaaagggcccatcttttatactatttggcaaagttttgattaatcataaggttgtagctttgaacgtttatttgtgaaaataaaacgaaacaaagaaactatatcaaccagtaattatctttttttctttttaatatgatcagtaattatcttttaatttcatcacacgaaaaacttaataatgtttgataaaaatctcacaaacaacaaagaacggaacttttattcgatcgaatcattttcattattgccatcacacgttcacaagacaacaaagaacaactctccaagttacacacacacatacacatttgacatttcattcactactctcacacgatccaagagagagtcttccggatctcagacccgacccgaccgacactttccctaagcgaaactggacagttattccgaacagcactgagctcatacggcgatgtatcggacgcaagccattgctcaacatcaaagctttggtacgagcactttgcatgaactccggctgtcgtgacttccacgtagttaacataccaaccgtggtggtcaccggagccgtcagaggtcagatttaatgaacagactgggctcggaagacatggtgcttcccactgaaaatgtcgagattaccctctcgtagtagtt

SEQ ID NO: 781 - DNA, 918 bp, Arabidopsis thaliana
acttcagctcttgtgaccgttagacggttttcacggaatatgcgagtcacgtttgacaataagcctactctatccgtcgtgcacagttccaacttcaatccctaaaacatcaaacaatgatctctcagtgacagttacagaaagagtatataccagacactatatattactggatcatttacctcagatactcttcttttgatagctgcttcaagacattgtatgactctttgcttctctgcctctgatttcacaggggatccatctatatgtctcacataatactcctgcaaagcaaagacaaagaccgataagtaaatggattcaaggaaactctctgctctatggtaatgggatatttctttacctgaaacgcctcggtgccctcagtatcaacacttccatggaaaaccacatactgcatatcagtcaaagtgcagactgtgtcgaacagaagctttggtctgtctttacatctaactgtgaccacagagtaatccttatcgagccaattatcaacacaaacatctggtctttgcctttcatcttggatagaggaatcatcatccaccaaacggtgttcatagtctctatcctcaaacatcatctgatgaagcctcctatccgtgtggacctccccatgagacactacggttttagcttcccttggtgtgttgcttcccttaagcacatttctgagaaggttcttgatccgagacaacctctctggatcagaaatgccacacccggttaagtcatctgtgacctgcatcacagcagctgctctggtgttgtgtgtcaaatctcagcgttgaggacactgcatttgagatgggtcaaaacagctgacagttcagacagcagacctggtctgtcacatccagttaactcaataacagtgctgtctgttgatggtat

SEQ ID NO: 782 - DNA, 1199 bp, Arabidopsis thaliana
ctgtccttcttatgaacacggaatatttagttatttgtcagaataacatgtaccccggtgatattactatacttttgcaatttgagagaatgtatttcgtcttctttatttcgttgagcagatctaaatccatttatttgtttattagtttgagaaaataagattgaatcacctaaataatcatagatctaaaccctaggatcggaacagtatttgctttaatcacatcattgtgaatcaatgccttgctacggaagaaacaaatatcggaaccgtgaatcaaaaggaactatgccgcatttgctactagatgaacccagaaaaccccaccattgtcgcctgtgaatacactgctcaacaaatgcagcttggcgaggaggcaaatgacgagaaatccacagagcaaccttgcagtcatcgacagatttcttggcgaaacagtgaagcatttggggcacaatcaactttccccttgggctcactcccacttacgcctggatataatctttctgagcttcttcaagttcttctcctacgttctcggctgagtatattctcacctgcaagcaatttctgtgagaaatttgcaatatcggttcaagaatctgatgtaaaatgcagatagatatggaaatattaccgcaggagatgagtgcatcccgcagctgagagcaaatgacactagaggttccggtgtacttatccccgcttgtctctgttcgtctgatactttcagcttgagaatggagagaagcagagcctgaatatcccggtttaggtaagagttatagagtagaaagtgaagagattgcagaaaataaagaaggtgagtttagtacaatttgaggacgatgcagaggagggctcatctttaaagtcatgtattcgatcgttgctgcgttgtatgaatggccaccaactgtataagcagcctgatagaatctccaaatcagagacttatactaacctctctccgaaccaaaccaagaagagttaagtagtttttttgtgtggagatcaaaccttttgcatcaaggagaagagctctaagtcagtttttggtacgccgtaagccaagtatgcctgaatcagacaatcaggaaattgtaagttttgttgtatctgcaaatctaagtttagagaaattccaaagactttattacatgcatgatcatggcattgtatatattgatccagag

SEQ ID NO: 783 - DNA, 584 bp, Arabidopsis thaliana
agtaacgtccgccagtgtgctctaaaggaccaataatccccaatacgattaacgccagactcgccaggcgcatcgggttagcggactcaccgagcagcacaatgccggttatggccgcgccgactgcccaatacccgtccacacggcataagcctccctactggtaacgatttcatcgcccaggcaagtagcgccatactgacaatcatcgccgtcacagtaataacactcggcgtcaaacgactaaagccgtgggtatatttcaggccaacggccataccacttccagcagaccagcaataactaagataatccaggacatatcaggctccggagaattggggccgtccccggtgaaaagaggcgtttgcaggtcgtcctgcaaagctgatggttgaacggatattttgccaggtggcaggggaatttcaactattacctttgtgactatcgcagaaaaaacaaacggcacgacacagctgtcgtaccgttattgcttattgctgcgctttcgttgctgcccagaaatcgcgttaccgcatcagaaatgtcttcacgaacgcacgcgtggtgttgcaggcagt

SEQ ID NO: 784 - DNA, 598 bp, Arabidopsis thaliana
ggtgcctgtggtggttggtgggaggggtggttcgggttctatagaatcagtaggcaaaaatgcagccaacttaggatctttttccttcatgaagaggagaagcttctccatccgagattgatattgctagtgatcctcatcacgttttgcattttgagcttcatgttctgatatcttcttctgcagctgatcttgaagatccacaatggttgatgtagaagagctcgcataacactcctttctttttcttttggtcagcgtctccacaagcgatccaaggccataagggttgcctttgccatctgtatgagtacactaaaacaagaagacaaaggcacatataaaatgaattaaatcatgagtatcacaaaaagaaaatcatcattactctaagcatctatcgctcatcaaacaaagagtaagacaatcataatttccaagcaaacaaagacgagcattctaagtataataaaaacagaaatgagttacctttagaaagatctcattcttttcttcaaggctgagtgtacgatgacttgaacactgagaggaattatcagaagtttgaggaccatcctcctctatttcagacatcctc

SEQ ID NO: 785 - DNA, 460 bp, Arabidopsis thaliana
gcagcttacaaagtctgctcagagaaagattgtaccgcggcatctctactgtctgccttcgatgatgcgatacagtagggtgttgacctcatcagcatctctctcgcgtcagaatttccccaaaagtactataaggatgcgataggagttggggcttttcacgctaatgtcaaagggattcttactgtgaattcagccggtaattccggttcgtttccatccacaaccgcgagcgtacgccgtggatattatcggttgcagccagcaacacgaaccgtgggtttttcaccaaagttgttctgggaaacggcaagacacttgtcgtaagtattcaagtaacacacttgtttttgtcatcattgtagctctgtcccttgaaatatccttttttcttgacagggaagatcagtgaattcttttgatctgaaaggaaagaagtatcctcttgtgtacggagata

SEQ ID NO: 786 - DNA, 547 bp, Arabidopsis thaliana
cccggaacactcaactatcggttcagccaccactactcgatccaataacaggccgatgtcggtcctaattcaaaaccgggatcgaggtcaagtactccaactcgccgtccatcaactccgaacggttcatcgactgtactgagaagtaaaccaactaagcctttgagtaaaccggctctgtctttagaagcttctccgatcgtgagatcaaggccataggaaccttacgagatgcctggattctcagtagaagcgccatcgaatctcagaactacgttaccagataggccacaaaccgcttcaagtagcagaaccagagcctttgatgcgtcaagtagttcaagatcagcgtccacagaacgcgatgttgcaaagaggcaatcgtgttcgccttctagaagccgagctcctaatggaaacgtaaatggtgctgttccttcgttacgtggacaacgagcaaagactaacaacgatgatggtagattgataagtcatgcggctaaggggaatcaacaggtcgagaaagttgtgaatatgagaaaacttg

SEQ ID NO: 787 - DNA, 712 bp, Arabidopsis thaliana
taccatctaagggaagaaaagtaaataaatcaattattgggaaagtttagggaagggagaactcttatgagtataatggatagatctatgcagagcatcaatgatacgtagttgacacagaaatcttgtaaaacttttcatttgacacttttggtagattaaattctatagaagcaatttgttttttcttctcaaacaaaccaatagcttcaaaccctaatatgaaacagactaaaccgatacctgaatgtttggagccagcaaacttggttgatcagtgaaaaataaaaccatccgccctatttcctgcttcagcaatattctcctttctcggtgtatggtatcacataattgcaatgcttgctcatgcacctcactgaaagcagcgaccaaacaaaagtaaatctataaattcagagctaaagtcacaaaaattctccagtatcagatgaggattacaaagtactgaactattaaaaattggagttacctgatcattttctcaacttgttttgctacactatattctagatcagcttccttttgtttagtccgtccagacttagccatcttctttgattctaacactcggggtaaaacatacaactggtagtcttcgtgcaacagaatgtactgcatagttagattaatagagtcagctgatgcaaaactaattccaataccaaactctttttcgcagaccatttgatat

SEQ ID NO: 788 - DNA, 607 bp, Arabidopsis thaliana
ctattataaatcatatttcttttgttgagttatagtctcgtttcccacattagtgtgaggacttatttgcaatgtaagaccctgaaaatgcagtcggggtcggctatcttctctaaaatcatcctcgcagtggcctcttgactcaacaccccacatttcttctccaccagcaccgcttcgacgatatttttgaactcttggccatcgccattagccacgaagtcaaccagtgcggcttgtactggccccaaactagtgttatgcgccacactttccatgtaccctccactgtacactttacctcggtgatcaatcagcgccactcccgacggacacttgctatccggcgcgtacgatatggtcgccgcctttagagccctgcaattgagatggttacaatgctcggaataactgcagatatccatgtagagactgtgatttatgagttcgatgcagttaaagttccgctcgagaaggcgagggacgtttgcctgggagattaatccttgcggaaggaaggtcgaaagattcatgtatgtcctttctgacaggttgggttcgtgagcaagattttggtatcagacatatctctgattttatgaagtaa

SEQ ID NO: 789 - DNA, 700 bp, Arabidopsis thaliana
tattaacgtgatatcttcagtaatggccgattctattgttgcacgggtacggttgccaccctatgtaagcaacagaatctcatcctctttgactacgttcccaaatcgctgtccaatggtgttgattgaatcatacgcccaagcctgtaacacgaaagtcgtatccctgatggtgtacgacttgccaataggcctcaacatctttatagaaacaacaagggcttaaaatgctgactgaccccatggataaatcttcatggcttcgtcatcaaaaatcttttggtactatcaaatggtattctagagttaggatgcaagccataaagttcattggctagaagagtcaataacccaaaccatctacgcttttcaggaggccatgctctgcacactactaagcctcgcctaagttcatctaacttaggaccttcaccggtagcacacccaattccctgaagaacgttttgtagtccgcttcaagctcaaactgttctgtagacagtggatctgtgtttaactccttcttcagtattcttaactgtctacatagtagataatgtacagtcttaccagaccaaacaaaatggctatcaactagctaagcaattaatccaagaggtgtctctttcatttgatcccatgtatcttgtcctattgattctgatcagagggaaatctccatcttgatgttgtgattaat

SEQ ID NO: 790 - DNA, 577 bp, Arabidopsis thaliana
ctggaaagtatggtttaggtacataggcaggtggaatacggattgggttgctcgggtcatatgctcgttcgacaagccaagcaaagaagtcgagttcaatctcctgtcttgatcttggtctcaaaacctccccttcttgaatcccactgtccgcagtggcagaagtactcactgtggtgatagcatgggcatactcctttggattttgaacagagtttctaggaagttgtccagggtgcttaggagctgaagtagaagcaatgtgtccttccatggtcttgactctagtgttaagtgcgtctatctttatattcaggtcattataagagcaatcaatcctggtggtgagctcagctagcttcttatccatggtcatggagcatgaggcctgtccttgcacaagctgatgaagtagagtcttcatctctgagtcttgtgctgaagtttgctgtggctgctgggtgaagcctggaggtccaaagttctgcttttggttgtagccttggttatagggtataaagggcttagcttgaggtggttggttctgtgggggtacacttgatcttgtgggtttgcc

SEQ ID NO: 791 - DNA, 808 bp, Arabidopsis thaliana
ctatgactttggaagatgcccaagagtttattgttgtggccaaccttgtttaccagttggtcaatccgatatccctagagcaagcaccgtaaagatatactgcccaaaatgtgaagatgtctattacccacgatcaaaataccaaggaagtatcctttttctaatctcagtggtaaatgcagttctgtgcggttacacacacttagctttactttgattgtcattagataattttatcatgctgttttcgttgctgctatctttggtttttgtcattctttaacacacaaaaaaacagacatagatggagcttactttgggacaacgtttccacatctgttcctgatgacgtacgggcatctcaagccacaaaaggcaacacaaaactatgttcaaagagtgtttgggttcaaattacacaagccgtgaaggaagtttgacgacaaaacccaaggatcaagatcatggcgttggaatggaactgagaaaagaagagacgtgtgtgaacagaaacggaaaataaaacgcactgtaatcacacgaatggtgaagagagcattcatgtctctatttgtcttcaggtacatacacattagaagaaagcaaaagcatggttagaaagaaaaaaaacacgaaaatcttttaatgagtttgttaaacttgaacatgtatttttctaccttctgtaaacttttttattttgtttcttttctcagtgtctgatttagtcatttatcatttaaaaaagtatccattaaaatttatcaaagatttcaatttgtgaaggaagtttaaagggttgatttgg

SEQ ID NO: 792 - DNA, 626 bp, Arabidopsis thaliana
ctaaaaattataaaaaattaatctaaccataataatctctagctacaaaatcccccacgattcgtttaagttggctccataccccattccatcagtttcaacttcaaaacacagaaattatgctcaagttaacgaaggtcaacaagagtgaaccctcatctgtttcaggtgtcaaaaaggtagtgcagcgtatcataagctatagttttctacgtctgacattcaacgtaaacaaaaaccaattgtttgcttccgtttttttttactcaggttgctgttatccctgaaattcacatctcggcacccgtacttgctaaaattgttagctacgttgctaaagaaagcgtggaggctttgaaacccttggtgaaagctggaccattatttaaagcggctgtgtattcgaaggaaactctaagttgtgtccgccttgacaattctcgttattacatgtggtggccacgacgcactccatctattatcatttcttcacaaaatgtcttgaagccaacaatccacatgctttgaaagttgtattgtacaaaccaatagcatatgagaattttgctgccgaatgctatagagctaccttatgggcggcagttacggagagtatggaggataga

SEQ ID NO: 793 - DNA, 705 bp, Arabidopsis thaliana
attatggagttaccaaccttaaaaggaacatcttcaaggattccttcaaggattcgcttggaacgatccgcgaagagaagagtgatgctagtagacctgtagtgagtcatgcctagtctctcagcaacaaacttaggaatgaggttgatgcttgatccctgatcacacaaagagcggctgaatctgcttgtggaaatagagcaatcaagaacaaagctaccttggatctggaagcttctcagtggtctgaccaggagtaatggtgcggatgtactcagctatgtctactctctgtgccttctccttctttgccttaggcagcatgattgcacttatgtctctggtaagcagcttagcttcatctaaactaattccattgtcaagaagtcgcttgacatacctgttgagtgaggcggaagatgtctctgaagcatccttaggaagagtatggaggatcttctccattatggccgtgcacttagcagcgtgaatctcctgcttagaacgatgcctccttggatacgggaaaggaggagtataaacagactcaggctacataggtatttgcacctcacaaggtgccgtccggatccagtgtcgatcgacactggatgggtatcgatcgacaccatatgtattgagtcgtttctgacaaaaggttcccgtatggtgtcgatcgacactggatgtgtcgtcgacaccacc

SEQ ID NO: 794 - DNA, 808 bp, Arabidopsis thaliana columbia
ctcgagtgtccggtttttaagctcaaaactccatcaccaaataacaaaatcctttccactttgatacctcttggagagttgttcttgattttcctgtagaagctcaccaccaaaatccatggattcaagaagaaagagttcatctcggggctagaagatcctctatttataacaaagaagttgcggcgattgacatgagtggcatgactaaacgccaaattcgccaagctctccatgctcaaaggtcaagctcgattcaaggggggagctctagtcgctaaaccatgcaaagagaagaagtagctacgggcaagaggattcttgaggctgaagaagcggtttctgaagaagaggttgagatcatcagggatgatgcaccagcccctgtggggagaagaaaccgtccaagaaggaagagagaaccaaccccaagcgagtactatcaattcttgaaggaattgaagtttgagggaactagataccctcataaggaaacgatgcaagagcttggtagggatgtggaatacctaatggaattggccaatcttgcaacgtttatgtgctgccaatttgggggatttaaagaggagagctgccaactccttgcaatcctcaaggttcactttcatgttgatgattcggagaaggaagaaagaggaggtctcggttacatcactttcaaggttaaaggtgtcaagtatgccctagatatcagccaccttgatactatttttgggaaccgccaagactatgaccaagacgagctactctctctttgtgcaaaaatcgccgtccaaagccctacttg

SEQ ID NO: 795 - DNA, 516 bp, Arabidopsis thaliana
cctatcaactcgctccgagacaaacgagtgtaaaaccggtctagagacgtcgacccacaagaagcaacaattataccttaaccggaagtcaacgcaatcgttgaccagagcctcgatgtaagaattggaaccaccggctatgatcgggacacggtctctctggacgattgactcgacggccctgattgcttcacgctgaaaatcctccgccgtgaaatcttcgtaagtgtcgtggacggtgccgagaaggtggtgaggaacgccaaggctttcctcaggagtgactttgttagtcacaatgtctagacctttatagacctggatcttgtcggagtttacaatctccgccggaaaacgagtggctaggtcaatggctagacgagatttgccggttccggtggctcccatgacgaaaacaaccttgtcttttcgccggaaaaacggaacgtccaccatgtttccttggaagttcaacgacaatggttgaatcacttgtcttagagccgtcatgcatgg

SEQ ID NO: 796 - DNA, 2125 bp, Arabidopsis thaliana
cattgctcgtatctccgtaaatattttgttaaaatcagataagcggtacctctcgccgtggttgatactagacttcctatagtttcgtttttaaagaatgcgataatgtttcttttcaaatgaaccacacaagctgcatgcgaggacatgggatacacctgcatataataaataataagacaaacattaaccgtgtaccctattacttgctaacgatttgattaacatgctctaatcaaacacatcttttgatgatgttacctaactaatatatcatatttggactaacaatatatttacctttattatagaaattactcactaataaatttggtatcgcgttaatatgtacttttctaatacttgcgtagatggaggtatgccggtccgagacgaagatcaggtctgggtcgtcagggacaaagtcacttagcttgttcatgaaccaggtccacgcctcgtcattttcactattaacaattccaaagactagtgggaaacattggaaatttgcatcttgagtgctcgcagccacaagacaacctccatacctgcccctcaagtgagtcccatcgattacaacaacttttatcatgtaagcataccccttgatcgacgcgtttgatgcaaagaacagatacataaaacagataactcccaaattatccgtttctgtttctagcgcgggaattgagtttgggttcgttgccatcagtagtttgaagtatggttggattaatgcaaaactccccattgccgaccccatagtattgtccatagcaatctttcttgctctccacgctttctagtacgaaacattgaggctgaattcttgtctcagcattttccttaactcattaggtctaggtcctcttccaaccccaacataccgtgttctcattagctttcctattacttgttgacgcttgcttgtagaggttgcctcttgcgtccacgctggaggtgtgctgcagtatggtcgttctcacttcaaaccgatcactatctactaatttggttgcataaacccgccacgggcaagtgttccccacgcagaccgcgatgaccatggttggacatgatttcgcatgaataaagtggaacttgcggcgaatcgcacgaataaagtggaacttgcggcgaatcgcatgaattgccaattttgtgcaacagtcatctttgtttttgaacaacctccccatgaaaataacgtccccttcataatccaatgttctagccgtttttgttcccgcggttgcctcagctgcccccatttgctgtcctcctagggtcatctctgtagcacacatacctcgctacatttccgcaaagtatgttcttctaaacgcctcaaactccgcttctgcagaagcttgtgctgcgtcaaacatattaatacttggtaaactagtcgttagcacaggtagaggcaatgttgactcgataatttgtcctttgcctttctcttttgcggatgcctttcgtttatctccgtcaacggacggcttgggtaccgatgctctaagaggcgttgcgtctatcggttcctctatccttatccctgcatttacgtttatccttctcggtccttcaactgtctcgttcactcttggttgaagatcactcgcactaccgttaacgacacccacattcttcgtcaacaacctcgttaacgcactatcccaaattgaccttgtttctgcggaattccagtaattatctgatatctcctctgcagtcatgcctccaagatcaagatggctcgtggaataatttacactctttcccactcctccatgtatcactttcactcgtagatgtacctcatcgagatccgcccttatagccatgaataatgtcatatcttcatcgtcaacgatgtatattgagttagctcgtgtccagtatggtcccatcatccactttggccactggtaacttagcttgacctcgtccgtaacggccatagacaacatttcctttacctcgctaaccaccttgttataaccatcggtctccctaagacgaactgtcatagaaaatacttctaaagctgagacgtgttcgtaacagccgttttcgtccttcctccactcccctctaaccaaacgcaccaccattgtca

SEQ ID NO: 797 - DNA, 1453 bp, Arabidopsis thaliana
atctacattattcaacaatgttatcctaatgtctttgttttatgtacttaggtattctattttctaacttcgtaatatataataaaattactagttagaactcatatattgtttttgccagtcaaattaataatccctataacataacgacgagaatatagttacctccgtaagcggttatagtgctaacaattaagttaacaaagtagtgtacctttcgaatacttgcgtagatggaagcatgtcggtctgagacgaacactaggtctggctcgtctgaaacaacttcggttagcttgttcatgaaccaggttcacgcctcatcgttttcactattaacaatcccaaaggctagtgggaaaacttggaaattcgcatcttgggcgcttgcagctacaagacaccctccgtaccgtcctcttaagtgcgttccatcgatgacaacaacctttctcatgtaagcataccctttgatagatgtgtgaagtgcgaagaatagatatttgaaacgaataactcccgtgttatccgtttcagtctctaacgcggtaatggagtttgaatttgttgccattaggagtttgaaatatggctggattaatgcaaaactccccatagcggaccccatagcattgtctatggctatgtctctcgctctccacgctttctagtacgaaacattgaggctgaactcctgcctaagcattcttcgcagctcattaggtctaggccctctacccccaccaagatacttggtgcacatcaccttccctataatcgcggtcgatgcttgcttgtggaagtcccccctggcgtacacgctgcaggtgtgctgcagtatcgccgtcctcacttcaaaccgttcagtatcatctaactttgttgcataaactcgccatgggcacgtggtgcgacgcaaacagctatcaccatagttggacacgacttggcatgtatgaagtggaactttcgtcggatagcatgtattgctagttttgtgcaacagtcgtctttgtttttgaacaatcttcccacgaaaatatcatccccttcgtagttagcatctttaatcgctcgctggagagcatctgtcaatgacaaaaacacaaaaccattaacgcgatatgttgagatttatcatttagttatacaggttaccctgatattctcatcattactggatattaccttcttcacccgggtcatcgaaataggagggtgcatctcgatcatacaatactgttggtactggcgtgtccggaccgtctaaaacaaaatcgtctccaaattaggcatgaccaaaatctaacagtaaccgtatttcgaaccgtaaccagaccgtttattaaccgtaacccaaccgtaaccgtataaaacggttaataaccgtaaccgttaactgtgaaaatagatccattacggttaagaaaatatactaaccataaccgttaat

SEQ ID NO: 798 - DNA, 1519 bp, Arabidopsis thaliana
taacaaagcagagacccaataacgtatttagtctacttactattggctgctcttgcatatgtgtatcccattccccagaacagtcatcagattgtttctcaatcggctgctgctcggatgttgtagcatcatcttcctcatgttctacatctgcatcatgtccttttcttcctcgcccttgaccttgttttggttccttcgtctgtatgatagaataataacatataagccaagtggaactgacattaattaacccagacagatgacatttttaattcacagaatgttctcaactactaagatatctggactcggcttattagagtgagaaaggacgggcaaaggcacagtgtgtttgtcaaacttaaaaccacatacctgatgctttagcatcaaccggactttaagaccgctcctccaatttcccgcttcacttaactcggtaacctgtacagtaacatgccttcagttaaccacattagcacaagaggcatcaaaatatatagagtctgaaaatatgtgtaggtgaggcattactgctctctcggctagctcaacaatctcatactcaacaaaagcatggacctataagaacatgtaaaagagacatcaattttgcatccagttaatccaaaactacgaggcaaacacaaagccgcatgggtccatctagttaccttgttactgaaaagcgtaccatcgcttttagctgctgatctcgctgcgggtggagcaccgcttccattattttgaggctggcaggtacggatgttcttcacactgaagacaaacactcataattttagaaaacctcaagtgtataacaagacagaaaaagtagattctaggttttagaacaagatgaaacagttgtgtaccttccaacagttgaaaaaatcttcatcaggttttggtagcaatgatcctcagggagattctcagcaacaataatgcgagactgtatataataatatttattagcattatccagtatacactatacagaaatataggaatagcaggaatgagtcaagtacctgaagctcttctatagccgactcagtaatcggacttatgcgtctcactttctttccatcttcactaacaaactgtgagatgactcagtcaaaagttagaacataaaatctcacgtataaaagttattgaccaatacacactaacataaagaactcacaagcttagctgagttctgtagcactgcggcaagctgagaattattgttaatgacagctttaattttcttgaacgacgcaacaacatgaataggcactgaaatcaccaattaagaattggaacaaaaagattattacacttttatgcaaaacgaactcatatgacttagcaaacagacatcatcttaccatatccttcaggatccttgcaaatgaatctcatgagatgatctgtagtagcaagttcaagtcactgaaatagtatcaacctgaaaccaactggattagatttaagatccatgtggtcttaaagagtgcaatgctga

SEQ ID NO: 799 - DNA, 771 bp, Arabidopsis thaliana
caaagaaactgttcttccctaaaagattgttccaaccaggcagcgaagtagataatattacaagggtatcaaagcattcatccttcaaaattgtctcgactgtcaggaaagctttagagccgatagagttcaacacattaatggacacattcttgggtcctatagtggaattcgctgaaatggacttagcattttcaagccatatcgttcatcatttactccagagaagaatactaaccaacaatgacgaattgtgggttgtatttgctgatcaacctatgcgattctccctgagagagtttatcataacaacaggacttccaatggatgatgcatcaggaagcaatccaaatgtgaagagaaagaagaaagaaaagtggtggataaaagataatcagactttgaagggaaagcagaaaaaagatgtgtggattaacaaggaaatgactttgttagatcttacatatgttttggaaaagcgttccaaaaaaatgcagccagaggagagactgagattggcgggttcgttactagtggagggcatattgctagctcgaaatccgactaccatgctgccaattgagaatctgaagagagctactaatttcgaaaagttctgtaagtatccatgggcgcagattgtgtactcatatttggtaactgaagtgaagagaatcggtaatgactatttgttaaggaaacaatatggtctatttggatctgttcaatcaattcagatatgggcattatcatcggttcagaagttgggtg

SEQ ID NO: 800 - DNA, 533 bp, Arabidopsis thaliana columbia
atcggaagctttcctccgggattagcactgccgaataagatatcggcgatattaggattaggattcgacagatcatttaagtgaattaccatatgatccaaattcgagacagtgcttgcactcgccaccttcttgatttcttcaatgtcaccttcattataggcggtgagaagtctactagcacttcggctctgatcactcttcagaaaggcatcaatcctaaccatgagaagaaaaatattcagacactaatttggtatcacaattcctaaagagttcatgttttcttgttcatagtaacatatatgatccatataaaaagagaaaagtgtactcactgagaacagtcattgtagcatttttctgcctgctgcaggtcgtgagcatacagatataagatgattgcactgagataggcctgaaataacattcagaaaacagttaaatcacaagtcataacaataacattcagagatacaagggaatcggtctgagctaagcagaaagcagcaaggtcgaacagagatggttag

SEQ ID NO: 801 - DNA, 590 bp, Arabidopsis thaliana
gattctccttgagagagtttatcataacaacatgacttccaatggatgatgcatcaggaagcagtccaaatgtgaagagaaagaagatagaaaagtggtggataaaagataatcagactttgaagggaaagcagaaaaagatttgtggattaatgaggatatgcgttttatcgatcttacgtatgttttggaaaagcattaaaaaaaaatgctgctagaggagagaatgagattggggggtttgttaccagtggaggggatattgctagctcgaaatccgtctaccaggctgccaattgagaatctgcagaaagctactgatttcgaaaagttctgcaagtatccatgggcgcaaattgtttactcatatttggtaactgaagtgaagaaattcgatattgacattttgttaaggaaacaatatggcctgtttggatttgatcctgcaattcagatatgggcattatcatcggtttgaagttgggagaaaagtttggcactagagatgaatcatctagtggaaatatccattaatttccaatggagatcacatcgcgccaagtgcaaaactatacaataattcagatggt

SEQ ID NO: 802 - DNA, 788 bp, Arabidopsis thaliana
ctagaggatctctaaaaggataagctgaaggtatattctattgatggtctttaccattatttttagggttttaaattttgttctcaattttgtttctgcctttggcttacaagttactagagattctgtagaattcgagaatggttgaccaaatatcaagtcacttcatcgtaaatcttgtgtgctaattagaacatggaatttgtattatttgatgatatctcacaaaagttctctggtcttttgaaaaatcagagatttgcaccaacaatgtgagggtcttttcatataattcattaagatcagccactgatagtttccatccaacgaacagaatcggaggtggtggctatggcgttgtctttaaggtaataaaaatgataacttctcttacaatctgcttaaatcatgttgaggttcttctggtgaatgtagtaaagggttttgaatcttgcagggagttttgagagatggcacacaagtagctgtgaaatcactatcagcagaatctaaacaagggacacgcgagttcttgaccgagattaacttgatatcaaacattcatcatcctaaccttgttaaactcatcggttgctgcatcgaagggaacaatcggattcttgtctatgagtaccttgagaacaacagtcttgctagtgttttgcttggtaacttttgccacaattgcattcttgtctaccaaatcccatttgtgtcctgtatttctgatcttgtttgagtgatatcaggttcaaggagtagatatgtaccgcttgattggtcaaaag

SEQ ID NO: 803 - DNA, 626 bp, Arabidopsis thaliana columbia
gagggtcccgccgccttatttggagccttcttgactagcacctgaggtgtctcgtgtcatttcacaccctgataacactgtattttactcattttaggtgtatgtttatcatcattcagctgtgcatttgctcattgtagcatatcattttgcacaattttagcttattttgcatacttaggcatctaggatcatcctccattcgcattgcatgttttggtgtgttttcaggtgcagaaggagctgaaaaggacttcactcgatctaggcagctacagaagaggtatcattctactcgacctctttactcgatctaggatgcaacagaggaggctgcagtttactcgaccctcttactcgatcaaggcagcctcagatgaagcagcagattgatctactcgcccctcctactcgatccatttactcgaccaagggtgaccaactctacaaaacatgttgagctataaaaacgtcttcggatcctcctcattccccactcaaccagacatctgagcatacatataggagaggaagaagcatctactcaaccaattgatcacttggagcatagacacaaaggcgcagactttgcagcaccctctttactcgatccccaagatcgagta

SEQ ID NO: 804 - DNA, 936 bp, Arabidopsis thaliana
gggacacatgatcagataggactggctggttgtccttgttccaattatagcctggctggatcgatccgttgttgtcccaaaatacatgaggaggagtccttggactactccgcgaccgatcttgctgcctactaggctcctgaaagaaactgttggtgtagaaatttccgccacttcccgggcttctgcttgatcctatgccttcatgcaagaagttaactgtagtttgtctttggtgatggaacgggatggctccaccacacccagttaaaggtgttgatgaaccagagagagcgtggggactagatattggggatggagatcttcttccgctaatgtgtggtgaatgcgagtgaaagattggactaccgactggtgaaatcgggcatgacatgttcctaggagattgggatatactgtgaccaaaaaaggaggaaagtttagccacaaagaagctttgatgcttggaaaatgaaggtagaaacgaaatggctaagacctgaatcccgagccatgttttaatcctttctgctggtaattggttgcatcttccgagtctaagcacggaagactccttgcatgtccaatgtcctgaaacaaacagatttgtcaggcaatcagaagcatagagaatttagaattgaggaatatgagctttcataccagtgatctcatggtgctcgaagctacattcatggcttctgcaggctcgccactcacaataggcctttccatcggcatcacatttcttacaaaagcatgatccaaaagctgagcagctgtaggacgatttgcggggtttctttgtaggcattttcttacaaaatccttcccctcttcagataaatgatcagggatatctggaagctccttgctgtttccaatcttgaacatagcaggaacctgtaaagaactcgaatacataaggatggaaga

SEQ ID NO: 805 - DNA, 431 bp, Arabidopsis thaliana
gtcctaagcaactcataagcctcttcttctgaagtagggaacatcaacaaatgttcagtctctcttgtccccatgcttactccaacatggattcctcttatacttcaaatccatacctctgatcactagatgatccaatactgtctctatcagctgatggcagacatttctacaatcaacgcagggacagaacatctcagtatgattccccaaactaattgatgctccagagacaaaattctttgctccaatctcatactcaaggctattcctaagataatataaaacaacaacacattcaatatcacgataagtaaaactatctatgaaaatatctgacagatgcataccttggcagccaagcccatgccttgtccattttaaccaactcgacacaagagtccaccacaaattattcatacatttgtgat

SEQ ID NO: 806 - DNA, 557 bp, Arabidopsis thaliana
gagaacattgcatggccacttcatagtatacaatatgtgaattcatctcctccacagtatgaaacagcatcagcagaaaaagaccattaccaccatcagcagataaaagaccagcatcagtaaatttctgcactttaacttacagcctataaaatcaagtattatttctgcttgaatgcttggtattatttctgcctgaatgcttggtattatttttgaatcttgtagagcttaagccacagtactgctagcaccagcaaatctgccaaaaagaaatgcatcatgttagattataagaacggaagacaaaagagttgcagaaggaagagtatgtgcctctaacccttcagacacagtccaccatatgcccctaggtccaaatgcgagcaaggtatgtgtagaagtttcaaagattggagatgctgctgtgtggagaccaaactctgaaattcaaaccattgccgatgcagtaggtagtattgtggcttggcctactgataaaatcatgtttgtgtaaacatatgttggtttttttgttaagtactttgacattaaaa

SEQ ID NO: 807 - DNA, 624 bp, Arabidopsis thaliana columbia
cccgttttgagatcttcccttcattatatgcttgtgttgtaaccggatatcctggttctttatcagaacaagctacactcaacgacaatgtagaagcagaatcttcaggactctaaagaaagtgttggagcatcagacatcagaagcaaaatgaataacctcaaggagcagctcaccaacacagtgaatcatctacactcggtttgtgagacgcatgtcttcatcgcattgtctagaggatattgggatcgtatgggacaggtaactatttttaatggcctctcctctcctgacattttgttttgcgttgttggagagctaattattcttgtgtgcgtgatagattgttttaagctttttggagaacaggaaagagaacagagcttggtacaagggttctagagttgctgtctcggtaagtcccaataaaaaaactgctcttacttagattgtatgagtcacctgatcttacatggaatgatgcgtattttcagatattagacgatacatttgcagcacagatgcaacagctgcttggcaactcgctaagagagcaagacctggagcctccgagatcgatcatggaggtccggtcgattctttgcaaggaccctgcagataata

SEQ ID NO: 808 - DNA, 1387 bp, Arabidopsis thaliana
caaaataaagcctggccaaatgctgaacgagaaatccaagtctatattcgcatatgttatgaggggataaagcaaggagttaccgtgcaatttggagctagctagcactgatgagagtgacagaaacagtaaaatcaactccaaaatgctgatttcgttcttcatatcgtgttttatcctctgaattcccagcgtaatagctcgagctggcggattttcgaaaaatcgagaaaaacaaaaaacagaaaaggagaaagtttttgaaaggagatgagcttgatggagatgttgactggtccctgaataaatgaaaaatgtgttgcattatttctattattgagaagaaaaaaaccaggcattttggttattgggctttgatttgatgttgggctctcaaccattgaaattgaatgaagaaagaaggaaagtacgtgacttgaatttcatttacttcattaaatgggcggcgttggggccggtggaggtgggccaatgacattgatgtgtaaacagaggtaaagccgaattttggctaaggcgaatcaatgcccattggctcctctccttacatatttgaagtttgaggtttccttccttttcttaaattaaatgttgctgtaacatttctactattgtaaaccggggctccaccaccatgtgcttcttcaacactgtatcatcagagcccacatggtcatgcctctatataatactttgtattattattattcttatgtcacattataaacaagtacctccaaattgcacttccttcaaacttattcgacagtagactagctcaagtacctttggatggcgtcgaggcccggagctcttacggagtggccatggagtccccttggtagcttcaagtacctcttggtggccccgttggtgatggcgagcatgcactcgtacgtgacggctgtggatgaggagaaagacctcagcagacttatgatagtcgtgttgatgctgtggagaatagttcacagccagatatggatcagcgtgtctcgccagaggacggctaagggaacgaacaagatcgtggacaagcccattgagtttgagcaagtggaccgagagcgcacttgggacgaccaagtcatcttcaacactctcctcatgtatctcgcaaacatcaagctcccaggcgcctcccaccttcccccatggaggctagacggggccatcctcatggctctacttcacgctggtcccgtcgagtttctctactactggtttcacagagctctccaccaccatttcctctactctcgctaccattctcaccaccactcctccattgtcaccgagcccatcacgtgtacgtacctttatccaccatttgcttctattctatatacattcattcatatcttta

SEQ ID NO: 809 - DNA, 937 bp, Arabidopsis thaliana
tagctttccaacatttccactacgtcgtccgtacattgtgctccctcaacagagaatcgggtaagtctctcgctcttggcccacataacgccttcacatacttagcccttaagagtgcagctacaaccttagaagtagcatgttttccaaagcggctcctagtctcaaccttacacatatgatccaagctttgccttcctaacctcatattcttcattgtccacaacttggtgtgctctgactctccaatcacaacattttttatcataacattcagcaaccaagtaatgtttctcatacctagtaaatttgaagcagaaaacactgcttatggcataaatggacagagcaatcctaaaatcttccctcgatgcaaaggtccttccgacaaacatattgtcatcctctttgctcaagtcaacatgaaccgctatggcatccatatcatcatctccaaacattggctcaatgtcgtcgaacccataaacttgatcaacgcttatacctttctgaaatgttgcttctaactctgtcattgtaccaacatgactttctttttgcataactttttttctagggggctgctcaacaaaatcatcatccccacttatgccccaatcaccaaatgtttcacaaatatatgtactctgaacaatagcaaactgagggttgggaggatagacagtgctattcacttgaacagaagataacaaaccagcaaagtaccctccttccactgccgcaacgggtttaacaccagactgtacaatacctggagatgatgattctctagcttccaaacacttagcaatggttgtgccagtctttatagctttaaaagtagtgccgaccataactgaatcgccttctctaaaacacgcaaataaattcacagatttatcacaagacttaaggattttaaagcatctaaagtgcc

SEQ ID NO: 810 - DNA, 617 bp, Arabidopsis thaliana
attacaagggtatcaaagcattcatccttcaaaattgtctcgactgtcaggaaagctttagagccgatagagttcaacacattaatggacacattcttgggtcctatagtggaattcgctaaaatggacttagcattttcaagccatatcgttcatcatttactccagagaagaatactaaccaacaatgacgaattgtggtttgtatttgctgatcaacctatgcgattctccctgagagaatttatcataacaacaggacttccaatggatgatgcatcgggaagcagtccaaatgtgaagagaaagaagaaagaaaagtggtggataaaagataatcagactttgaagagaaagcagaaaaaagatgtgtggattaacaaggaaatgacttttttagatcttacatatgttttggaaaagcgttccaaaaaaatgcagccagaggagagactaagattggcgggttcgttactagtggagggcatattgctagctcgaaatccgactacaatgctgccaattgagaatctgaagagagctactgatttcgaaaagttctgtaagtatcgatgggcgcagattgtgtactcatatttggtacctgaagtgaagag

SEQ ID NO: 811 - DNA, 637 bp, Arabidopsis thaliana
agattcttctcttctacagtccaaatcgcctttggtttggtgattttgaacccatcttaagttagatcaaacggaggttcccatccttcctctactgcagtacatgcatctttaccttgacctctaatgagttgtgtcatacaaactttccagtatccataccgcttagtattcagcaagaataccttgcttgtacgagtactaggatatactaatctcagattggttacccactctgataccaattgaagtaatagaaccctaagtactttgactagaataagaacacaactccaataaacacactttattagaacaaccttcaaactaatcaatcacagataagtttccacaatgttacgcaacatcaacaacctgatttgctcttgtaagatcctaaaactacccagctcacaaacacagcaacagacgtgtactctctttattcactcaccaataaaacccacgagacaagttcttcttaacttttctaatcttccacttttcacaagtaaagtggcgaaccctaataagagaccaaagcttctcttatatcttgtcttcaaaaatggaggatgcttcactttatccaacaggtccaagtatagctcctcatcattatctagacactaggccc

SEQ ID NO: 812 - DNA, 477 bp, Arabidopsis thaliana
tgccaggattcaaagtgttcccactccgccaatttggaacatgggcaccagacatcacttcaaagctgaaccctgagaaggatacatttgtcttggtatgtatatcagcctcttctcaactgttagatataggtatactgtatctagcctagcacaatttagaggtgttgtaggttggttagagagcagttagtgagggctgggtttattatgggtgtcccagcagattgttttgggtatttatctggttaggagttgagagcctctcataagaaatctaagatcatctgaaacaaaggaacctctgatgttgaaatgactttttaaagttcttctctactaagtcgcggcctttgttacagtgcaaggttggtggcaggtcaatgcaggttgccaactggttacagtctcaggtaaaaagctttcctgctcctttataagtatatatatatatatatatatatatatatatatatg

SEQ ID NO: 813 - DNA, 587 bp, Arabidopsis thaliana
ccaaaagttacagaaactagcaaaacctctttcttacatcaggtaacaatatatccacatactacatagtctacatttacatatcacttttttgttctacgttcttcttattattaaaactatcccatcttgaatccagagtcataaacaatctaactggattgtcttccttgcgcttctccggaccaactatcttgactaaccacttcggcttgaatgaagcaataacgtgtgccattatcaatccaagtaacagtccaggccaataccctataaccactgctttccagtttaacacttcttcatcttcgtcttcttcctttggctgtggtgttggtggcgcaaagcaacttccttggagaggaagaccacaaagacctgcattcccttcaaaggaggatttagattgcccagtgatttgtgtcccttgtggaatttcacctatgagttggttatgggccacacttatgtacgccaaaaacgagagggtcttcagtccattaggaatagtcctgagagttggttcttgagaggtctagtgactcagctctgtcacgtttgccaaagacagaggaatatggcctgtg

SEQ ID NO: 814 - DNA, 911 bp, Arabidopsis thaliana
cgtctttgcggaagaaagattgatgataaattgttttatcactgctcttcttgtaactttaccttggatatgcgttgtgttttaaatccaccaccaaaatctgttttggatttgaaaactcatgatcatcaactcaatcttctcccaaggctcattttttttacatgtaatgcttgcgggctgaatggagatcgaagcccttacgcatgttttcaatgtgatttcttgatccacaaagattgttttggtcttccacgcctcattaacatcaatcggcatgatcatcgtatttctagaacttctcttattggtattgtgaattctgtatgtggagtttgtcgccagaaggtggactggacttgtgggggttattcttgtcaacggtgttcgacctatatcgctcattcaaaatgtgctactagagaagatgtgtggaatgggaaggaacttgaaggagtacctgaagaaatagaagatatagagccatatgtggtaatagatgacaacacaatacaacatttcagccacaaagagcattacatgaggctcaatgttaatggccttatgtgtgaggtgaacaagcggtgcaatgcatgcaaccaccccatctctcctcaatccttctatggctgtatggattgcgatttcatcctccaccaaaattgcgctggatttcctagaaggaaatggcatgtgctacacaatgaacggcttgctttagtcactagcgaggttaatattttcgggtgtagtgcttgtcacaaaattttcaatggttttagatacgagcatgaggatacaaaattagatgtcctttgtggttcattttctgagccatttatccatccaagtcatcctcatcatccgttatattgcatttcacctgaggatgatgaagtatgcattagatt

SEQ ID NO: 815 - DNA, 554 bp, Arabidopsis thaliana
aacaaaggataccatttggcaagaaattcaggtttaagaatttcaatatacagattcatgtgttatacgtatttgatcaagattaacatataccttttttacagggccggtttaacatgaaggaagagtggcagagatatgctattttcaacagatgggttgtatatggaggtctgcaaagtctaagctcctaactcaggtgcgagatgctaagagtagcacaaagagaatgaaactgaaaccaagcaatatactatctattcgagtttgtaattcttggattaagtgtaggactagcacaactttcaaggtgaaattgtttgaatttttttcattgtgtgtacctactattattatgtattggagtctgctcaacagtcaatgtcattgctattgcaggaaaaaagcaacaagtttagggaattgagaaaggctcagatttcccacacaaccagccgcaagggaatgtttcgcctagctcatgaaatggtgagatcttttatgtactgaaatcaatagaaggtccaaaattctgataagttagtaagttggat

SEQ ID NO: 816 - DNA, 856 bp, Arabidopsis thaliana
ctctacttttctgcaaacaggtatatcgtgtcgacgaaaaccgtatcctctgttcgcattgacatggataatcattttatgtggtggtcaatgcctcattctaaatactacaatttcttccaaaagtgtcttgccgcaaataatccatatgcaaagtttgttgagaagaacaaaggactgacatatgagtcaacaaccgggtactatcagatgagatgccgatggaatgttactcacgacaaacccgtgttcattgacatgaatattgagaaaaggtgcattatgcatcctcctttccagccaggaagaatggtgaggcgtacgtgccctaggtgcaagaaagttgggcacatgtgcaaaaggtgtctcgcttaaggtggacctcatgaataggaagatctaagagtttgtgtttttgttggttaataacatctaaggattttttgtttttgttatattataataagttttacgggaatgtaaaccaataaagattgtgatcgttaatttacaatgacatctaaggtccaatttttatttagtcatatgttttcattttcgttattggaaattgtttcgtttcttatccatgtaagaaaatatataaactccaaatccatggagttattcattagaatggcaattttgtatcctttgatataatgaaaattgtttagtttgttatccatataaatttataattaaatgaggaaaaaacataatagtggatatgtctagaaagtagcatcggaaggacagacgtgttgacgatgggtcccttgatgtgtagcttcacaaataatatccaacagataaatcaatgtaaagggtgtcagtagaaagtgaaaacctgacg

SEQ ID NO: 817 - DNA, 846 bp, Arabidopsis thaliana columbia
cttcttccaagtttagccatggcggatgtccttggatttcttagcataatagagagccaaatatggtctacagcttctgattctcctgttcatgtagtatctctcagaactctcatcagaataatccgggctgctcctagaaatctggtactgcatcttgagaaggtttgtagcatctacttttacattcagcgaggctagttgagatttaaataagcagaacatttttaccgatatatgtctgtatactcttatagagatttgagaaacatttgggaaaatcttgcaggcagttaactttgttcttcaaacgatggacccaagcaacaccgtcatgcgtaaaacttgcctgcaaacctcaatggctacgctaagagaagttgtgcgcgtatttccaatggtaatcttaaacgactcgtcaacaaggttagcaatcggcgatgttatcacagagatcaacaatgcatgtattcacatatacgacatgcgaaggtacaaaaatttacatgctttgtatttctgtcccacctttatctcagtttcttagttgtttgtgtgattcccgttgcagtatgacaaaaataagggtttcggatgcgagtggactccgggtctcccaaattttctcagaggagcttcagaatctgccgtgacaacagctatatcagctctcagcttttcacctgatggagaggtagaatttatgcataaacacattgtagcttctgcaccagacattaaagtcgacaagttcccgatgaatactcttgatgagatcctaagaataaaatctctttgtatagtagggattggttgcgtatcagatacggtttgatgacagatggt

SEQ ID NO: 818 - DNA, 551 bp, Arabidopsis thaliana
tgagatcttgccagggcctgagatgggcaagtgagaaaacgcagcttctactgccatcttgaggcccctactgtcgctgtcttcaacacttgaatacctacaaatccaaattacgcttaaagggaattgtactaaatcacaaattcagaaaccagtcaaatttctctggacaacctcagacgaggcaacacagaatagagctagagttcgttgtaaagcaataacttttagttcttttgagcgaacattcttagttaacatataaaatttaatggtaaaagcaaggtaggagatgagtaatgggtaccgaaggaagatccatcaagcttgagaacagtgagtttgatgggctcttcaggcatctgattataattgaaactcctccgacgagggagtccatcgattagccggagaggcgagagagacgcagccaaagagcggcgtggtggaacgtccgtagattgattattgagaaaatttgattttcccgggctaagacatctgcttccaagatttttggcgacggagtagggagaaatcaggagcttgag

SEQ ID NO: 819 - DNA, 521 bp, Arabidopsis thaliana columbia
caagccgactaactcttgactcttacttagatttggaccaaatcttatactttggactctgtctaacaacaacctgtcttctagagagagctggtttttgtaggtgaagtcaggggagagtgatagttgcgtgttggagatggttctgttgttgggtggagagacatggttggtttcttgaagcttaacgccgtgagcacgtttctttgatgacttcattagtcgatgaagccatacaacgagttcgagtacatatgaatcaactattggtttatccgcatgatgaagcgtctgaagtcgtgttggattccgttgttctcgccttttccttttcctttcccaaactctatcctgtattccaaattaccaattcgtagtttgctagatcagtttgaagattcaaaatttaaaacttcagtagctgatagagacttaccttgaatttgcccattcactacccatccgaagccttgatgtgctctgtgataattgaatgtgccaaaatgaacaaggagaacata

SEQ ID NO: 820 - DNA, 1081 bp, Arabidopsis thaliana
gtgtcagtactttaagaaggttttctattttttatttaatttttaattacttttatttaacgttatttgttttagatgaaaaattccgtgttagctgttgtaatgtggattggaccgcacacaagattgataggaaatcaaagctggtgctattgtatatttgttgatgggaacctcgtcacttagagaagcaaaaaccagaaggtattgtcaaggtgtagtgctaaagatgattaccaatctatggcaaaacagatgagctcatttgggtaaatgcattgatattggatctcggagtcaagacaattcagttcgttatcatgcattgtgacaaccatgttgcttccaattccgtgtggcacgaacgtaccaaacacatcaaagtggattgccatcatattgtcagaaggttaaactcgggatcatctatcatgttttatactaagagttctaattaccagagagtcatcatgtggtttgcctaggtcggtctttgctttccttgaatgtgatctcgtagttgggtccttgcgagggatttctccctccagagatcgaatatacttttcgttagtaggctttgattgaatttactatgttacgaccaagctgtgaacctcccatgataaagtcgactcgttttggttgcgacaattctatggtgtctctgcaaagtttaggtagtcgtaggaggtaatttatgactctccttttaagagttgggtcgttgtgatgactgattttgtcgatcttccccataagtttagttccatggagactaggcctattcacttctttagggctagggaggcgagtttttttgctctttctagggtttggcttcattcaaccaatgcccaagagcattcaacggaacttctgattaggtggtaggagacgtttgtcaggttaggcgtcaaaagttcatgtcagttggtagatcgtgatgtacctctatttgtttccttcatttcggataggataggtaatgcatttagtttcaagtatattgatgtttacaatgtattattagagtattttgcttaagtgttattgtagagctaatagactcctctagagt

SEQ ID NO: 821 - DNA, 834 bp, Arabidopsis thaliana
tcggtaactgcaagaaaccgtcagaccaggcgctttaaacctccccatactcttgactgccaccactacctcctcaagagtaaacggcttatccaactgttccttctcgaatgtagacaaacccgtaaaacctccagttggtaacctctctcgcacttcactaacatccacaagagggtataaccgtgtataataagctacagccaacctctccaactcctctttgtctgagatccacttatcctcatcatctttcaagctctcaattcgatttctcctcctccgaatgattgtcgaggtgtgaaagaaagtagtatttcgatcccccaaggaaataaacttttcacgcgatttttggaaccaaatagtctcctcttgctctaaaattgtatcaaactctttgaaaagctgctcctccttcattaataaagcatcagactgtgtaacatctaaaagatcttggacctccttaagctgtctcactgtcttctctttccgagtattaatcgcaccaaacacttccttattccaaatccggagcttcccctgcaacttctgcagcgccactggagtcgttagattcaaatcccacgaaatctgaaccatctctttgaagcactcatgactcaaccaagctgccttaaaacaaaacagtctccttctcggatccatagtttggttcagagccaattggagatagagaggcgcatgatccgaagagaagaaagggaggtgcgagaccacagcctcatgccacttcaatctagcatgtgcacaacagaacactcgatcaagtctttttgctacaaaattactctctacacgacctctctt

SEQ ID NO: 822 - DNA, 534 bp, Arabidopsis thaliana
cgctttctgcaacatacaatttgcattagcatgaagccatgaacattaacgtttcgtgtcccacaagaaacttcatcttttattgaaatagactactaattcctcagagctagctactaattcctcagagctagctgtcttctgcaagaatattgcaacaaaagtggagttcttatgccaaaacagaaaacacatgatgaagttgattattcaaatactcttttgaatcttcaatttactcattacattttcacatcaaaccatctgaccacaaacaacactagaaatttcactgagagaaacttaccatgtctgaaatatcatcttccatgcctttaacagagagagtttataatcatctttgtctgtccgatgtttctctggccttgttgggactgtttgttttctgttgtgtgcgtgagaaggttactaaaaagctggggccaacgatatggcctgtgttcggaattactccagagttcttctttcacaggaatgatgtttatggttgggctacaagatgtttgaaaaaat

SEQ ID NO: 823 - DNA, 808 bp, Arabidopsis thaliana
tagtaacgtccgccagtgtgcattgtactctaaagcaacggctacaccggtaaagcctgctgcggctccctcggctatgcaatagttgatgccgacaacgcaaaacaggtcgtgatgcttaccgaagaactgctgccttatccgcataatccggcaagcattgagcaagatcaggttggatttgatcgtcaaagttgaccgcgttggcgatgctgcaaaaatcggcgctggccgacccgtatgaccactaacccgcgcgaactgcttattgcccgtagcgctgcggatgtgattgtcaactctggctacttcaaagaaggtttctccatgcaaaccggcaccggcggcgcatcgctggcggtaacccgtttcctggaagacaaaatgcgtagccgcgatattcgcgccgacttcgcccttggcggtattaccgcgacgatggttgacctgcacgaaaaaggtctgatccgcaaactgctggatgtgcagagctttgacagccatgctgcgcaatcgctggcccgtaaccccaatcacatcgaaatcagcgccaaccagtacgctaactggggttcgaaaggcgcatcggttgatcgtctcgacgtggtggtactgagcgcgctggaaattgacacccagttcaacgttaacgtgctgaccggctctgacggcgtactgcgtggtgcttccggtggtcactgcgataccgcgattgcctctgcgctttccatcatcgtcgcgccgctggtacgcggtcgtattccgactctggtggataacgtactgacctgcatcaccccagctttag

SEQ ID NO: 824 - DNA, 876 bp, Arabidopsis thaliana
  unsure (1)..(876): unsure at all n locations
ccatcaataagattgaatgggtattataaaataaaatgcataagactactattttactattcaaaattatatatcaagaacaatgtatagattattattttactattcaaaatttaaatattatcgataaaaaattacagttacattttacacccatctattttaggcggacttatctagtgttataaagattagacttgtgaatatacctcacaacattcttacgtaaccaattcttgccattaaattaaattcataacaaagaaacaataaacttggtttggcggtgataatgaacacatcatcataacatattcaacattatttttattcttccgccaagattaaaccaaattaacaagccttaaggggagttccacaaagacagatgttgtgagcgaaggcagatggttcaaaggtctgaagtagaccgccacttgggatttttccgcagagatggttgtcgctcacgttgaaatgctcgaggtgtagtttagtcagtgctggtggtatcttcccgtagatatggttctggctcagatccaacgaaactatgcttctagcgaacttaaccttgacgagatcgaaattaaacatgtttctcgacaaatccactcgtactgttgttttgttccgtccgaagaacataaaggcatctccttcgaaaccatttcccgacaaatccactgcgttgaagtcgtatttagacaacgattccggtatttttcctgcaatgcaaaaatttcattaaaccgggattagaaatttatcaacaaaatcttatttggtgcgagatcttaactataaaagtttctttgtgttttgttggggacgaattaccanatataagtaagtaactagtttagttaagggtaa

SEQ ID NO: 825 - DNA, 809 bp, Arabidopsis thaliana columbia
acacttcgttaaaatctatcttttaagaaaactctccgacttagccttccgggttagcaccggcttgactttaacctccgctctgataccatttgtcacacctgttggtgtcggatcccgcaccatgggctcggatccagccaaagattgctgcacaagtagaagaagcccataagagggggggcccgtaagcatcctcgaggtgagagtatgggcgagatgttggtttgcgaggtgaatgcagcatcgaagtcagaactactcgaattgaaggaaccgaatgggccgagaggtgaggtcgagaaggcccggagtggactcgatttaaacgtttaaatagttaattcaaacactaaaaacggatacatttaaagtagaatgattgtgagtaaataggtattaaatgtattctttgggtataaattgtgggtcaaagatcatgtaaagggacacacatttcttggtgcaaattagctatacacattcttttgtaatactcatagttttctctataatcatttatctattttctagtatatttgtcctcaagaataatccttccaactaaataaataaacacttgagtgtgtgaatccgacatccacattttggcgccgtctgtggggacggaggattcttgagtcatcagattttttctgtgtgttacatacccgaagtgatccgcaatgtctggagagtatgctaccaacgcttcgatagtcgaaaccctcaagaccatgcaacaaactatggctgatatggcgcagaagttttcaaacgtggaaaaaactgtcgaaacactgcaaata

SEQ ID NO: 826 - DNA, 766 bp, Arabidopsis thaliana
gaaaatgtcagaaatagatccacaacttaaaagaaaatctcacgacgtggcgtaggtaaatggagactggagatattaatgtgggggagatgaagaagactttgaattggtctttgttttgaaatatgcgttcacgcttagtggaaacaaacacatggactcgtctcgacgctaattacgcggaccagattgtgccacgctttaacggtgcacgttggctttgtattcgatgggctgaaacttttgctgactttgtgtttggaccaatcagccacttgttcaccaattaagattaaccttcttttttttttatatagattatcggcatttatgtatattttatacgaactggtaataatagtgcataacaattgcaacaaaactacaagcttttggaaccctgaaagggttgctgattcatggaactagaagtgtattctaaggttgagacttgagagtgttggctgagaaatttatcaggtgtaacattggtagcttttggtttgataactggaccgcctttggtccactcatcaaatttattggtaacgacgggacaagaagcttgatagttgccgttaatgctaccattcctgatgtgtgcaaacctgatggttggaatcttgctaacccacggtctgatcagtataaaacacagtcaacaatccattggaaagcgaattacaagctctaatctattatttgcaatattcagctgctggagcaaaggctatcgaaaggtgtgtttcaaggtaatacagacaag

SEQ ID NO: 827 - DNA, 800 bp, Arabidopsis thaliana
  unsure (1)..(800): unsure at all n locations
ctaaagacagcgtggaatataactggctgagggaggcgatcccgtttttacaacaggaatccagatcggcaatgccgggatgtggatgcactgtgtagccagatctgcgctacattctttaccctcgcggtgcgtgagtggattgcacaggttaatactgagaaaaacattctcagtttgcttctgcatccacgtcttggtgcggtaatacagcaaatgctggaaatgccaggacacgcctggaccgtcgaatcgctggccagcatcgctcacatgtcccgggcaagttttgcccagcttttccgtgatgtttccggaaccacgccgctggctgtattaacaaagttgcgtctacaaatagcggcccagatgttttcccgggaaacgctccctgttgtggtgatcgctgagtcagtaggctatgccagtgaatcatcttttcacaaggcgtttgtccgcgagtttggttgtaccccgggagaatatcgggaaagggtcagacagcttgcaccctgaataaaaccgccagaaatcagggcaaagataatccgcattccgggagttgtgagcctttcaactatttctatttccaacggtggtttgggctttatatattttttctgatggactctagctcagtttttaaataaaaatgcaaactaaattgcttcaattaaataaaatcccgactattacttgatacgtgattattgtcggtgatttttttgtacaccatcagtgtatatctcaataacccctgaatctttagnnnnnnnnnnnnnnnnnnnnnnnagctgcag

SEQ ID NO: 828 - DNA, 1110 bp, Arabidopsis thaliana
gtggcttgcgatatgtactgcaaaaccaaaccataaaaaaatgtttagattaatggcaaatgataccaataatcgactatttgcgagttaggaggttaccgtgtcgtctaatacagcttcatagagaacaaaatcagcaaaacttttgtagctcaagatgaaggaaacagccaaggattcactgagaggtaacttgtagtacaagcaaggtgcaaggcatgcgaccagttttatgacaagtataagaaatgttaggaagatgttgaagaagatgtcattgaactggctaaggatccttgctccatcacatctcatcgcgctgaatgtgattgagattggtaagaacacgttcattgtgagcctctcaaacttagcctccagagcggatcctaatggtggaccctctggtatgatgatgccgataattaatggtcctaagacgtatttcatgttgaaaaacacaaaataagccgcggaacaaatgctgtcagaatcacggcatgaatgtatatatcctccacgggcttgtcttcgggtgtgcggtctatgatccattgcaccatcggcttaaaaacaaaaaagacgatgagaaagaagatgatcaccgcgacaaggtcacggtaagctattgcatgtgaaacatgaatgtaggttgcttgtgtagtggcgactatcatggcaaaaatccccaagatgtcgttgatgacacatgcagacaatgcaaggcgacctagctcggagttgatgatcttgagctctagcaagatatatgtagtggaaggcaaaagtatcgaagattgagttatgacaatcgcagtgcgctcacctagggctttagttagaggcatgtagtgagggtcgatgttgtcagaaaaaaaattctggaaaccgagaccaaacagaggagcaaagaaggacacgatcccgatcacaacgggcaatttttccgctatggaacgccactcgcctgctggttctaacagtcattagaaacgtaaacattagtgttccaaacaccgagatgcatcttaacgctgcgattccatccaacgcaggatccacggatagtttccctgaagatttctctagtacatcaaaaagctgaggccc

SEQ ID NO: 829 - DNA, 527 bp, Arabidopsis thaliana
ccaattaagactagaccaattcacacctaatacggtctagattgagttaatctatacaacatctctactcacgagaggtatcttttcgatcattgcagtttgaggttgatgcagacgactacatagtagcagtgcaagtgacctacgacaacgtgtttggccaagactctgacatcatcacatctattaccttcaatacattcaagggaaaaacatctccaccctatggattggaaacgcaaaagaagtttgtactcaaggacaaaaacggtggtaaacttgttggcttccatggacgcgctggtgaagctttatatgctcttggagcatattttgctacaaccacaactcctgtgactcctgccaaaaaactatctgcaattggtggtgatgaaggaactgcatgggacgacggtgcgtacgatggtgtcaagaaggtgtacgtaggacaaggccaagatgggatatcagccgttaagttctgagtacacaaaggcgcggagaatatcgtaggaggtgaacatgga

SEQ ID NO: 830 - DNA, 677 bp, Arabidopsis thaliana columbia
gtctcgctcaaaggatcatttccagagaaaccgaatcattttcgagattttcggaaatgatatggaagaatcttcaagaataatatcaaatcaggaaatatttttgaagtccccaaaaaataaaaaatatttccttaaggcaaagatactcttgaaccgatgtaaggatatattcaaatcttccaagaatatcgctggagaggcggtttatcaactctatataacgcgactcaaatatttcgcataaaagggagacacacaaattatgccctcatcttcagacgactcaagagctctaaatttaaaggcaaacacttctcttttcataatctaatcacttgtacgatcaaacacatctttttatcaataatattaagaaaatcatccgtggttagacatcggcgttttcatgaaagagatcgtgtgctccgcgaggttttccagaacactgccgagctaaacgcataaaagttgggagctaagtaggaaggcccatacctaattttgagagtcgtctgttccggcgtctacgagctcgccaatgtaaacggcagagcagttccaagatcccggaacgccatgcaccttaggaaatactactactaacaccgaaagtgcgcatgaacttgacatacgaggtgacttgaaccctgaaatggctacgtaggcagctcatg

SEQ ID NO: 831 - DNA, 515 bp, Arabidopsis thaliana
tacctcttcaaatccgagtagagtatcatttccatgttcatctcctacaatatcctcggcgcccttatcgtacacaaacttcacggccgatataccatcttgggcttgcctcatatacactttcttaacaccatcgaaagcaccatcatcccaggcagttccttcgtcaccaccaacagccggtagtttcttggcaggagtcaaaggagttgtggttgtagtaaaatacgctccaagagcatatagaatttcgccagcgcgtccatggaacccaacaagtttgccaccgttcttttccttgagtacaaacttattttcggtatctaatccgtagggtggcgaggtttttccttgaatgtagagaaggttatggatgtgatgatgtcggagtcatagccaaatattttgtcataggtcacctgcactgctacgatgtagtcgtctgcatcaacctcaaactgcaaaaatagaaagatatattgagtaatagtttaaggtttaggtttggcttgtta

SEQ ID NO: 832 - DNA, 613 bp, Arabidopsis thaliana
agggtctgggtcgtgggaagacaacggttcagcacaaacttccagcttctcttcaggatcatcaagggttttgtgttcctcacatttcttggacttctcattactttcttagctcttcgttttttaacacccaaggacatcttcctttgtatgctcgctttcatgccaaccggttggggaatgttactcgtaagttctcattcctccattaaactcctccaaattgtttttaatacgtctttgtgtttgtcttgtttctgagatagttgctgcaattcattcaaaacattctctcttttcttttcaagattgcacaagcgtgtaagcctctgattcaacggctaggattctggtcatcggttaggacgctggctcgaggctatgagattctcatgggtttacttttgttcactccggtagcgttcctggcttggttcccgttcgtgtctgagtttcagacaagaatgctctttaaccaagcatttagcagaggattgcagatttcacgtattcttggtggtcagagaaaagaccgctcttccaagaacaaggagtgaacaaaaatcatataaggagagaacagttacacatgtatatagtttaatactattga

SEQ ID NO: 833 - DNA, 851 bp, Arabidopsis thaliana columbia
cagcgaaaaccgcataggagccaagtgaatccagaagggtataaacgtaaatactaaccacttaactaacctagagattaccctaatctaatccatcctcaagaaccgtaatcactactcaagcaacattctcaagaacacaaacccagaaattactaaaatcataccaaaatgtagatctaaacaagctaaacaacgttactaatcaaatgcaaaaacgaaatagattaagagtaattaaggttttaaacatagatcccttggacaaatcccaaagtgatctatttatactaaaatgttgaaatcctagattcactagaaggcaagagacttgaggccgtttgggcgaatactcgaccttggggatcgagtgaagagggtgcttcaaagtatgcgcctttgtgtctatgctccgagtgatcaattggtcgagtagatgcttcatgctctcctatccgtatgctcagatgtctggttgagtggggaatgaggaggattcgaagacgctttgatagctcaacaagtcttgtagagatggtcacccttggtcgagtaaatggatcgagtagtggatcgagtaggaggggcgagtagttgaatctactgcttcgtctgaggttgccttgatcgagtaggagggtcgagtaaactgcagcctcctctgtggcatcctggatcgagtaaagaggtcgagtagaatgatgcctcttctgtagctgcctggatcgagtgaatggatcgagtagagtccttttaagctccttttgcacctaaaaacacaccaaaacatgcaatgcgaatgcaagatgatcctagatgcctaagtatgcaaaacaagctaaaatggtgca

SEQ ID NO: 834 - DNA, 992 bp, Arabidopsis thaliana
tgacataataagtgatagagaaaaatgtatttactctatttacttatttaggcttatccagacaataaacgttttcgtttttccagtccaacaagtttcttcatcaactctctcaactgttttcgacataaacattccagaagctgagatcagatactaaaatggcggagatcgggaagacggtgttagatttcggctggatagcggcgagatccacggaggtcgatgtcaacggcgttcagctcactaccaccaatcctccggccatcagttccgaatctcggtggatggaagccgccgtacctggaacgtaagtaatagtgttcactttcctcttcgaaaatttgaagctattaataatcaaagtaagaacaattgtttaagtatttgattttgttcgaatgtgtctgtcaagtttggattttgccttgataactaataattaattttcttcttcttatgaatcagcttttatttatgtaaatacctctaattgtttcatgcatgaatgagagattttactgatataggatcttaattgtgaacagtgtattgggcacattggtgaaaaacaaagcaattccggatcctttttatggacttgaaaatgaagcgatcacagatattgccgattccggaagggactactacactttctggttcttcactaaattccaatgtcaaagggtgggccaccctcaccctctctctctcttggtcgaaattgctatttttcttgtgtcttcttttcatattttgttttgacggttttgcagttattgaatcaatacgtgcatttgaatttccgtgccatcaactactctgcacaagtgtttgtaaatggccacaagacagagcttcccaaagggatgtttcgcagacatacacttgacgtcactgatattctccacctgagagcaattacttgctgctattgtcatccccagatcacctgggactatactcccgagggaggcaaggtggtgacatga

SEQ ID NO: 835 - DNA, 926 bp, Arabidopsis thaliana
gagaactttgtggaattcgatctctaaatgctataacaacctctttattcgagagagtattcattagggtaatttaactcatatcagtattccatcgcttgattgaactttcagcatgttaatctatttgttctctttatttcttctaatttgcaagtttcaatttcaatttgcaagtatattggtaagttatttgaaagtaaatctaattgttttcaaaatttttaacgatttataagtgtcgataagtatttgcatgtagatttcatgagttcttttaggtctgggcgttcggatttcggatcgatttattcggatttcgtttttcggattggggagtctataatccgaatagtattcgactgattttcggatcagatcagatttattcggatttggattggtttttaaacaacggatcaaccagtgccataggatcatagattcatcgtgaaggcacacagcccttcctcatacaactcagtccgttgtttccaatatatggaaaaacctttgctgccgcattaacgagtgaatgctttgaactcccatctggggccagcttaacaatttctctccttattccttttactctctcaagcctcaccttttcctcctcattttcatcagactcaggcagtatgcgattgtcttcagctagtaactggtctgtaatatcaaacatagaatcatcattgtccttctcaccgtcaatcttgtcagctttttccttgacttcctcaactatattggggacagaagcagcatctcctatcttcgcatcaatagcatgtgattttggcatttttagtttcacctttgtagccacctttggaagcgtcagcttttttcctcttttcttttgggggcctggttctttgacggttagctcatttagggttttctctttaacgacagctttcttc

SEQ ID NO: 836 - DNA, 513 bp, Arabidopsis thaliana
tcgccgcgtaacaggctttaaaggacttattcatttcgtgaattttattattttatttataaacaaaatgcgtgtagtggcgttttcttttttcatttattatgttcactctcttatctatatatttataaggcaattaaatgaaaaggaatttattatcttccgctattatagtcgccatcatgtccctcggtctgacgggttgtgatgataaaaaagccgaaacagaaacgctcccgcctgccaatagtcaacctgccgcaccagctcctgaagcgaaacctactgaagctcccgttgcaaaagcagaagctaaacctgaaacacctgcgcaaccggtggtcgatgaacaagcggttttcgacgaaaaaatggatgtctatatcaagtgctacaacaagttacagatcccggtacagcgcagtctggcgcgttatgctgactggctgaaagattttaaacaggggcctactggtgaagagcgtactgtttatggcatctacggcattagtg

SEQ ID NO: 837 - DNA, 274 bp, Arabidopsis thaliana
taccaaacaaaccagacaggaggagctggtctgtgcaataccagtcttcatatcgatcgattcggaacatcgctggcgacatgatcattagccaccagacgagtcagagctgtatgcgtgacgactccattgagaatatctaagagcttggggcacgatagaagacagactagaatgggtatgccacaacacgtagctactatcactgagctatcaggtaacggaactagagagatggacattgtccgagtaagggtaagcagtcgccactgga

SEQ ID NO: 838 - DNA, 541 bp, Arabidopsis thaliana
taagcttcatatattataccactatcgtctttctaatagtattaagctcttgataattctgactcttccatgaatcagcgatggagcttgcactgactttggagaaacttattaatgaaaagcttctgaagttacaaagtgtaaggaccttatctttttatcaattatttcatcattaaaagaagtaataatgctaagcctttaaactcggagatttcagtatcatagagcacactttgacaggaaaaggatgattagataactctctcatgtgtttgatcctaaaggttggtgtgaagaacaatgatgttaagctggttgattttgtagaatctgagtttctaggcgagctggtaagaacaaaagtttttaacattatcattactttaaacctatgcaacgatcctcatgtaacctgtaaaaacaggtcgaagccatcaagaaaatctcagagtacatagatggaacaaaaataaggtcaatgcagtggtgaagctgagatcggatgtttctgatataagctggcaagtgaagatggagg

SEQ ID NO: 839 - DNA, 514 bp, Arabidopsis thaliana columbia
gagtcatcggccggagagatattcttcccggagcgaagagctcattattggattagtttcttctgagtccatctccatttaggattagtgattgttttagatatcatatcactacgtctaagcgatgtctttatacacatcgcgatcttgaaaaactttgagattctcccttattgcttttgactaaaaaaacactaaatattaccatttgctatagataagtgtatttagtgttaaatatacgacataagatgaggtgtcatcgtgtgagtggataattgtctatatttgaccttggactttcgacacttacttggttgccaaacaaagtattgttctggtttcggaacttaatgtgttgcttccagttggatgccacaatgccacgtgtcaaatcgtgtgtggtctgatcccaaaaaggatttaactgtttctcaagttattctaaatggattaaatattttaatactgttaatatttgtggtcaaatgatcgtaatcgtttgttatatact

SEQ ID NO: 840 - DNA, 1064 bp, Arabidopsis thaliana
acccataatctatatatccaagtacaaaattagactccatacttcgtcagtaggaaatgggaataaagtcaataatttggtaatgataaagaacaagaaagaaaaaacaaagtcgttattacataattaaagtaaactatgtgctttcacacacgagcttcattttgcctttgtatacttttgagtagatagatagacagactatagtctatataagatccatgtgacaatagttaaaatcctcatattttcatttccaatggagcgcaaagtcttgaataccctcgccttctccgtctttgccgttctcttcttcacctcctctgcttcttcccaataccaaactcttgtcgtcaacactcttccttcttccgcaacactctcatggcccgagtccgaatctttaactgatgaatctttatccgagtccacaacttcactctctgtccatttatcacacgtggatgctctgtcttccttctccgacgcatctccggcggacctcttcaacctccgtctccaacgagactctctccgcgtcaaatctattaccagcctcgccgccgtatcaaccggacgaaatgctacgaaaagaactccacgtaccgccggtggatttagcggcgcagttatctctggcctctcacaaggaagcggagagtattttatgaggttaggtgttggaactccggcgactaacgtttacatggtgctcgacacaggaagcgacgtcgtttggctccaatgctctccttgcaaagcctgttacaaccagaccgacgccatttttgacccgaagaaatccaaaactttcgccaccgtaccatgtggatctcgcctttgccggagactagacgactcgtcggaatgtgtcactcgtcgaagcaagacttgtctctaccaagtatcgtacggtgacggatcattcaccgaaggagatttctcaactgaaacgctgacgtttcatggagcgcgtgttgatcacgtgccgttaggatgcggtcacgataacgaaggcttgttcgttggtgcggctgggcttttgggcttgggccgtggtgggt

SEQ ID NO: 841 - DNA, 560 bp, Arabidopsis thaliana
ccgccatcttctcaccgtaagccgccaagttaacacggctatagcatagaaacttgattagccgttccaaccccatcaactttctccaaaatcttcctttatagtcataccatttaaactctctatcattataatagaacaatatattgtttatcacacaatatgactaccactgtgcgacccatctccatatccattccaactgagtcccatctaccttctttcgggtcgtaagccacatgacccgcaccgccaaacaagtgatactttccttcgatccctacgctcttgtatacaagtctctcgcatctctcggtgccaggacttgccacagagtcccaagtttgagtcttaggatcaaacacttctagtacaatccaatgaagtgcaatcttcacagcctcctgctacatatatcttcccatcaagaacggtcgcagtggggtagtttcgtgccaccgcatggacggagcttcacgccatttctcacactgacaatccaagaccgagacgctagaggatggtgcacattgataggcctccaatagcgtagatattat

SEQ ID NO: 842 - DNA, 995 bp, Arabidopsis thaliana
gggtacgcataacttataactagaattactaaagtacccctaactctaataagatttcaaattgttactgattaccggttaccgagattagagagtcaaatctaaaaattttttgataccacggcacggcttctacttgtagttgttatacccgtggttgcataaaaaaaaaagttgttatactcgtaaaaatttttgatacgaacattaggaattgtatagttttttaagggtttttttttcatctttaaaaaatatttatagtttcattttcaaatagatacaaaaatatttatatgtgataaaataagcggatgttcgtttttccattcagataattcatctgaacgaaaatgaataatgatgttcgtttgtaacaatataaaaatgagatgaaccatgattttatattaaacttatccaaaaaatgatagtaatccggttgagactgatcggagcagttaactagaggtgattcagatcagtcataaatacccctgtttaatttagagaagggttttgtgtaaaaaaaaacctcgaagtcgctattttttgcaactttattctttacctctaaaaaaatgcagaataatcttatgaagtttcactttccttctattgaggatgaatttttaagtttacctcctactgtggttgtctcttattatattgatgcagcttggactgcaaactcggaagaatgcggcatggggtggatcttccaaactcagaacaatcgggtttccaccaagggaccgcaactcgcaccctcgcgccctcggctctagcttctgaagccttggcactgaaatcagcgttgtctgcagcgtctcgaacgaaattgacttccatcaaagttttctcgactctcaagtccttatatctctgttaaatacagagacttcaacgaacgagctgcaagggattctccatgatattgcctttcttagtcgttattttcttttatctcaaattctcgtttgtaccaccaaggc

SEQ ID NO: 843 - DNA, 913 bp, Arabidopsis thaliana columbia
taactctatttttaccgattttagttatgatttaggtataggtttatagagtctaattgttatttcctgaatctttttttagtccttttcaggtctttacatgtttgggatgcatttggagattatggagcatgctagagatcaacagacaacttaagctgcagaaacattccggagacgaaaatgcacgtaggtgtcgaacgacaccattcctggtgtcgagcgacaccaatacctgacggtaatttcgagacgcaacttattgatgttttgaagatttccaaattcggcccagaacttttttctatgtttaattaagtcccaacacgttttaagacatatatatatatatagtttttaggtcattgttttagaccctaagctttgggaggctattccctggatctcttttgtactttggcagcaaaaccctgtggaaactcccttttggatctttcttactctttcctcttgttatttcatcattgatttcttattcagactatgatttgtgtttctttgatcatgtctgagtaatcaacttgttaggtttagggtttctcattagggattcatatggtttaatagatcggcccctgctaggttatgtttagaattcttcatcattaattgttcttaatgttagatatagattgatcacctagaacttgaatccagacaatagatatgcccaccataggtatctgtagttgaatctattatttgatgaggctggtttatagatgtgtaataagaatcggcctatctactaaggtgagcaattcaactcgtttaaaatacatttttaggttaaagatctctcggtttctccggttattcttagttataggcatagggagtttcacggaacgccaccggttattccataattagagtttgagtttaagaatgg

SEQ ID NO: 844 - DNA, 1010 bp, Arabidopsis thaliana
cctgacacaatcttcgtcggtccaatcatgaagtatacgctgtaaaaacatatttaaaattagtataaaattctaatagcatgtagacacttccaaaacatataagtaataagttacttccaaaacatgtaagtaataaaagttgttaagcttactttcaagatcatggcatctccggttgggacatccacaaacatatctccggcaacatgctccacaccgggataagaaggtgcttgtgccaaggcacacggttagatcaaagttgatacccttaatattgggatatttagaagtaacaacaccaagagtgttaccaactcctcctccaacatcaactaaaactttcacacctttgaagccttcatagacttcaagggccttcttaacgaccgcgattgtgaatccggtctggttaaagagcttgctgaatctctcatctgtacccatatagtcaaagagtttcataccaccatgtgcgcgaccaaacgcatctcctccttctagcaccacatctttcaattgtgccctgaaattttcgtatagataaagtaagatttaataataaggattctaacattgacgacaaacagatttgttataaagatgatttgtgaaaattaccaggtattaaggaagacactgtcgaaattgacaatgacttgagaagcaagggatccaatatcctgaatgttattcttcaagaaaaacctgcaaattggctcggctcgatagaccctctgctcctttcctacggagaccttctcacacttgaccatggaatagctagcgagtaaacgaagcatgcggtccaacaagaccggagccccagggttacggggtgtagttggtagcttactcgctatctcagatggtgaaaggaacgagtcggtgcgagaggttccgcgtagagagtgtcaaagacaccgagctcgagggaagctttaagaaccattggaaaggcggcggcattggcaagtctcacggccatcaaacccaactcgttatca

SEQ ID NO: 845 - DNA, 623 bp, Arabidopsis thaliana
aaaaatgcaggagctacttatcaatggctggttaataaaatgttcaatgaacatctcagaaagacgatggaagtttctatcgatgatacgttggtcaagtcattgaagaaagaagaccatgtcaaacacctaggagaatgctttgagattcttaaccaataccaaatgaagctgaacctggcgaagtgcacgtttggagtcccatccggggaattccttggttatattgttacaaaaagaggaatcgaagcaaatccgaaccaaattaatgcttttctcaaaacgccgtctctaagaaacttcaaagaagtgcagcgactaactggccggattgcttcaagatcaacggataaatctttacccttctatcaaattttaaagggaaacaatggttttctttgggatgagaagtgcgaggaagcattcagacagcttaaggcatatctaaccacgccacctgtattatccaaacccgaagcagatgaaaagctttatttgtatgtttttgtgtcaaatcatgcagttagcggagtcttggtccgagaagactgttgagagcaaaaaccgatttactacagaagcaagtccatgaaggatccagagtcaaggtatacgattgatat

SEQ ID NO: 846 - DNA, 3064 bp, Arabidopsis thaliana columbia
ctctagttgcagtgctggcacattggttaggatccaacagagacataatcccaacaaggtcagagtttgacagtcttatcagagaaggatcatccgagtggagaaatatgtgtgaaaacgaggaataccgggaacggtttccagacaaacatttcgatctcgagacggttctccaggcaaaagtcagacccatctgtgtagtccctgaaagatcattcatcgggtttttccatccagagaaatcagaggaagaagaaggaaaagaagatgctagtctagattttctcaaaggtgtaatgtcctttgacagtatctgggaagagctcatgaaacaagaaccagaagagtcggcaagcgaacctgtgatctacattgtaagctggaatgatcatttctttgtactccttgtgaaccacgatgcttattacatcatagacacgcttggagagaggctctatgagggttgcaaccaagcgtatgtcttgaaatttgacaaagatgcagagatcaaaagattaccatccgtcatcaaagacaacaaagccgacatgggaaaccagaaacaaggtggtaagaacaagtctgagcaacccgaaagatcaaaagaatcagaagaacaagaagaagaagaagtagtgtgtagaggtaaagagtcatgtagagagtatataaagagctttctcgcagcgattccaatacagcaagtgaaagctgatatgaagaaaggactggtttcatctttgcatcaccgtcttcaaatagagcttcactacacgaaacaccttcatcaccaccaacctaatatgtttgaatcctctgcaaccgaagtaactgtgtcagaagctgctgtgtctgtgacagtggcttggtcattggcgagccaattcagcaatagtggtgggtttagttgcgaaatggctgagcttttgggggttaaagtttaagagaagtgtatagagaaaaggagttttccttctgtgtgaattttgatgtttataacttgataacccctttggtgtttttctggctaatttgatgttcataatgtcttctgtggagatagacttttactcctcactccaataatttgtatttaggaaatttaccagagttattataagtatttaataaaatcggtaactgttttttcttaaatgttattgaatccaaaaccaaaatcaatatataatagaaaagttttctctctatccagactatccatatcagtgtgacattgtctacttaagcatccatttaaataaaattacaagttataatttatttaaaatgttcaatcaatacataagtggatgtatctacaaaaccactcaaaccttcaaaatgttaagaaacatccctgagttgagcgagtcttagcttgcatcttccaactcgtcccaaacaaataataagtaaaaaccaagcaaaacataagaatgaaaaataatgttttcaagactcatattttagccttgtcgtctcggtcgatctttggttctccataccatttttccatatctcaatacaaagctaaacagtaaagaaaatttataaatagttaaatactcatatgtttctaattgattattattttggaaaaaagttgatatatttacgtttttcacattttattaacaaaacaaatgttttgatataattttcatatcaaatacttttaatgattatgaattaatatgcaacgtgacttaaagacagtttcattggaatcgggcaacgaggcaggctttgtcattattcagaattcccaataaaagatcaacaattcaaaacctataaagatcaacaattcggaaattttttaacggccctatcacttttgaattctaggtaatacgtttatctcaaacttattagaaaaaccaaaaacactttttcaactacaattgacactcttggcaattcacagtagtttgcaggttttgatcttcactgttttatataatgataagaagaagagagaaggaaaagcaactcactcaccatgattaactcaacgaatcaagactttccgcttccaccacatcagtctcactcttcttccggcttagtggtgctgttcggagtcatggcgtcagttgcatttgtgatcgtggtggtcgcgacagtgtgctactgcctagaccaccgcgaacaagctcgtccacgcgtcgagcaataatctggaaaaaaagtaaaacataagaaaaaaaagaagcaaaacataagaatgaacaaatgtatgccttatgttaagtagtaaacaagctactccatgttcatcattaaccaaaagaagctataggtctaagcaatgaaaacactttcagttaaccaaattttaaagcttccatttttctccgccatcaaacgataacctcaatcccaaaaaaaaatacaagtatttatttagtaaaaaattttgtaaatccgtcaaccattcttgcactaactcaagacaacaaaaatcttacgcctttccctttcacttttgaaaggaaggtgctacactcatctcaaattccctctaaataccataataactttttcaacctccaatgtttctcattcttcttttagtaaaatcgatactctatcgaactaacatccgtaactttttaattaataagaacttttaaattctatatagatgattgaaatgcgtttatataagaagaacaacttaaacactcaccaccacaatgttcaacaccactaaacccggatttccacaatatgagtctgagtctcactctaccaattttattttcatgggtgtgattgccacattcttctttctcgtatctaacaaaaggttcttgagattgaagctcagttgcaaaatccaaaaaaaaatgtactaaattgattgaaggtatcctcaaatataaagaggcacggttttgtatattttctccgacgagaagaatagtctctcttctactctaatgcgggaaacaaaagtaagttcatttgtggtttgatcaaaacagagacttgtcacttgtgatattagtaatcgctctggtaaagcatgaatcctaatacaattgagagtaaaagtacg

SEQ ID NO: 847 - DNA, 671 bp, Arabidopsis thaliana
ccctcaatgagtattcttacttaccccttctttttccttttttttcctcaggttagtaagcgtgagaaattatgtgcaatattttgtttgtgtgtgaagtttaaagaaaacgttttgactagatcagatgaataacatgtcgtcttgtcctataaggcggggcgggtgttacattacaactcttccttgggttagcattagggttttccaggaagaaagccctcttgtctctgaatggactgtgcagtttgagctacctgtacatctagcttcttcaagtgagagctatcattgtcgatctaccattaaactccataacaagctttgtttggctctcaagaatctactcaagcatggattccattcttgtctctaatgagggtagagggaggggggggggcttgctgaattaccataggtcctctgaaagttcctttgaggaaatgttttctggaaggcaagatttggagtgtagtttgatgaactctggttccctgtaaacccgttcccactgaagttaccctatggttgtccaaacttccgtagctctgactatctatgtagaagagtcctcttcagactcctattcggactcaatagtcttacctctgctatttgattcctgaaacaggtccacaatcttctcctcccaaagtcacatgcttggtgct

SEQ ID NO: 848 - DNA, 555 bp, Arabidopsis thaliana
gatttagttcctctccacactaaaagtggagctttaccaaggtatgacttcttatgatttggaaagtgaaggattgggattcttgcgattctctgtgtatggccaggattatatgctatcaatcacgcgcttggaaggactgtttggtttccccagtggaacggggactaagcccaaatttgatagagaagagttgaaagatttatggatcaccattggcagctctgtaccactgaattcttctagatccaagagcaatcagatacgcagtcctatcatcaggtacttctagcgttctgtagccaatgtcctctactcccgagagataacagggactgtcaccaatacttatatggagatgatcgttatggctctcaaaggcactctccgacaaaccaagaaaaagatgtctctccaaggtgaaccaatgacacacctctctatacttcttcttatccacctgttaggatacaagagttgggctgttacaataccacaagagagacgagcgctatttgatagggtgtgttgtgcaccgattctgacgcttgtgga

SEQ ID NO: 849 - DNA, 449 bp, Arabidopsis thaliana columbia
tctggttcttgtttcatgatctcttcccagatactgtcaaaggacattacacctttaagaaaatctagactaacatcttctttttcttcttcttcctttgatttctctcgatggaaaaacccgatgaatgttctttcagggacaacacagatgggtctgacttttgcttggagaaccgtctcgagatcgaaatgtttgtctggaaaccgttcccgatattcctcgttttcacacatctttctccactcggatgatccttctctgataagactgtcaaattctgaccttgttgggatttctctctgttggatcctaaccaatgtgccatcacttcacctagagctgtgcatgcgctttctccagtagctctctcgcttctctgatcaattgatgcgagaaatactctagccgtgagtttcatcagcccatcacggcttataaattctttg

SEQ ID NO: 850 - DNA, 909 bp, Arabidopsis thaliana
tgtaaaggaagttgttgaaatgcttttttgccgtggtgttattaaggtaggcttagaaactcagggacttgtgttattatatgagcctaccccattaatacaatgctggagttaatagttatctatgcttatggttgctgcttttaggaaatctaattgccatgttttcgtaatctgaaatgcttcaggtgatctatttttgttaatcttcctgcaggtgctattttcaacggagacatttgccatgggggttaatgctccagctagaacggtgaggctattttgatttttattattaatgttaatctggtgctacaatgttaagtgggttattctttacacataagtatcttcatatcatgtgggggaacaagtgtgggtattctgaaaagcatattattcatataaataacttctcgacgatattcgctacaggtcgtttttgatgctttgaggaagtttgatggcaaggaatttagacaattgcttcctggagagtacactcaaatggcaggacgtgctggcagaagaggacttgacaaaacgggcacagttgttgtcatgtgtcgcgatgaagttccagatgagagtgatctgaggcgtgtaattgttggaagcgcaacaagactagaatctcagtttcgactaacctacataatgatcctccatcttttacgtgttgaagaattaaaggtatctcaatgtccggaccgttgatctgttatgcgttttgctaccaagcctttctcttggctttttctgactcgccagttttcaaatggttgttattgttaggtggaggacatgctgaaaagaagttttgctgaatttcatgcccagaagaaactacccgagaaacaacagcttctcatgataaaacgttctctaccaactaaacatattgagtaa

SEQ ID NO: 851 - DNA, 533 bp, Arabidopsis thaliana columbia
ttttcttctccggcgagagactacaatggactctccggtatcaaaaaccgatgcatcgaaagagaaattcgtggcttcacgaccatcaacggctgattcaaagacgatgagaggttgtggactcgcgaatctggcatgggttggtgtagataaagtagagcttcgtcagaggttgatgatgcctgagtatcttcgtctcgctatgcgtgactgtatcaaacgcaaagattcctcggctattcctgatcatttacttcttcctggtggtgctgttgctgatatggctcctcatgctcctatggttgttttcattaaccccaattctggtggtcgtcatggtcctgttcttaaagagaggcttcaacagttgatgagcgaggaacaggttttgctctcactgaacttgtatttcaaatctttttctttgggtttttgggggaatttcgaatctaatttgtatctactttgtgttttgattatgttagtttggaaactttcttaaagtctctggcttttaagtttttaatgcttga

SEQ ID NO: 852 - DNA, 582 bp, Arabidopsis thaliana
cttactgtaaggaaaacattcactccttgctcaagcttgatgatccatgtctcaaaagcactagttgaagaagaactcatatttggctcctcaagtggttctgtaccagtagaagtctcggctttaaacgattcctccaccaccactttctcttcatcgtcttgcaaaatcgttgcttggactcgatgattgttcctgaagttttcaaaaaagttccaattttcagcaaactagaaatggacgaaacaaaagtacagcaaaattcaaatccttttcataatcacgtgtgaacaaatcaattaaatattagctgtagctaggcacaccttaatagcagacgacgagaagagagaggaagatgatgaagcaatcggtgagaggagctgtacgaaacggcggctctagagcgtcgaagagtaaccaaaggccgtgaaatcgtcaacgtaccagaggagatgcctgaaatcgccgccatctccgtcagaaccaaagatttgagcagataatttcacaggaaagaaaagtaaaagttggatatttttggtagaaatggagaaattttgcgggttttagaagaagaat

SEQ ID NO: 853 - DNA, 434 bp, Arabidopsis thaliana
actagtcctaactattttagcattgcccctctgtaacaggttaaaggtgagccaaacatctcatacatctgctcccgttactatcgagcacctgaacttatatttggagctacagaatatactacaacaattgacatatggtctgcaggctgtgttcatgctgaattgcttctgggacaggtcagatgactgaccagactttccgccacttatcttgtacaaatgatttgatttaccgtatgatgtccaaagttatatattaccaatctctggcttgtccaacttatgggtagcctctatatccaggtgagagtggagttgaccagctagttgagatactaaaggtacttcaatttgggtaaacaaacacacataatcctagccaatgctatattgaacatagagtggatcattgattatctggaatgaagagg

SEQ ID NO: 854 - DNA, 525 bp, Arabidopsis thaliana
ccacgactgtttcgtcaatgtttgacaaaatctagtctattcttcagatatataatgttttgatttaaataaggagaaatgttgtttgatatatatatactctggttggtgcagggatgtgatgcttccgtactattggacagtagtggaaccatggaaagcgagaaacgatcaaatgcaaatcgagactctgctcgagggttcgaagtcattgacgagatcaagtctgccttggaaaatgaatgtcctgaaacagtttcttgcgccgatctattggctctcgttgctagagactctattgttattgtaagtcaattctctaacacaatcattaggattgatatataattgatacaaacactcgttacttttgtaattatctacagtgtggtggacctagttgggaagtatatcttggaagaagagatgcaagagaagcaagcttgattggttccatggaaaacattccttctcccgagtccacgttacaaacaattctcactatgttcaactttcaaggacttg

SEQ ID NO: 855 - DNA, 526 bp, Arabidopsis thaliana
tacattaccggaatttcatcatctttgaagaccatgagaggcgtcttcatcgtcatcgtaacgtgtctggttttcttaccggatcctctacgtgccggtgtagcgtccatcgggagcatcactccaggttttggaggatctcagatgaattacatcaacaacgatggtatcttcctcgaatccaacaactcagccttcggtttcggtttcgtaactacacaagattccgttactctgttcacactcagtatcatccacaagagcagcacgaaactgatctggtccgcgaacagagcttcccctgtttccaattccgacaagtttgtgttcgatgacaacggaaatgtggtgatggaaggaactgaggtttggagattggataattcaggcaaaaacgcttcaagaatcgagctgcgtgactccgggaatctagttgttgtttcagttgacggaacttcgatctgggagagttttgatcatccgacagatactctgatcacgaatcaagctttcaaagaaggcatga

SEQ ID NO: 856 - DNA, 457 bp, Arabidopsis thaliana
ccattcttacaacaccagaaattactaccaattctgcccaaaatcaacaaatgtccaacaaaaatttgaccaacacgagtcaagttctttacctggtgaaatccgagttctttagtgagtggaacaccaagttcagccatacaagcttgcatgcgatcatctgatccatacaatgcaggatacctctgtatacaccgatcttgcatcttactcaaagctttagccaatggatagcttatagcaaatccacctccaccataagccataccatacgagaaaaatatgttctgtaaatgagattccgacaagctcccaatgtaatacatctgctcatggtcatacttcctcaacaccctaatcaaattatcaataacaaacaccgtatcatcatcacccatcacaaaccacctaacattcttcggacctaaacgcagcgtttcagaaacaatcctcgaga

SEQ ID NO: 857 - DNA, 600 bp, Arabidopsis thaliana
cgtgaatcaagaaacgacgacgtctcgtgaagtctcaatcacattgcctactgatcaatctcctcaaacctcaccaggatcatcttcttctccttcaccgagaccttccggtggatcaccggcgagaagaacggcgactggattatccggcaagcactctattttcagggggattcgactacgtaacggaaaatgggtatcggagattagagagccacgtaaaacgacaagaatttggctcgggacttatccggtaccggagatggctgccgccgcttacgacgtggctgcgttacgtttaaaaggacccgacgccgttttgaattttcctggtttagctttgacttacgtggctccggtttcaaactctgctgcggatataagagcggctgctagtagagcagcggagatgaagcaaccggatcagggtggggatgagaaggtattggaaccggttcaacccggcaaagaggaagaattagaagaagtgtcgtgtactcgtgttcgttggagtttatggatgaggaagcgatgttgaatatgccgactttgttgacggagatggctgaagggatgttgatgagtcaccgagaatgatga

SEQ ID NO: 858 - DNA, 803 bp, Arabidopsis thaliana
tgaagttcgaagcacattctctcctggtaagatgtcgtgcactaaactcaaaagttgatcaaagtaattgtctgacatcccactctttactttaatgcggtaaagccccataattgcatacacctttgtgtacttgggacacccataatataatggagtttcaacatccttcaacttctctctaaagtcagattcttctttagttgatggctccttactatcatcttcattctgattctcagaatcagaatggtcttctccatcaaaataagctgttcttatcaactcataagctccaaattcactactagactcagcttctaacttatcagcccgtatctccccatgcttactccaacatccatttctcttgtatttatgattcattcctttaataaccagatgttccaaaacagtatcaattggttgatgacacagattccggcaatccgtacatggacaaaacatttcagaaggatctcccaaacgtctcgatgatgcgtaaacaaattttgttgctcctttctcgtactcaatgctattccttggcagccatacccaactcttatccatttttgaaacaccaacaagctccaaccccatatatatgataatatttatatatatatatatatatatatatatatatatatgagttcacagagatacaagaacaaagacacagagagaaatttcaataacagacattcaatactatcagagctatattgaatacaagaccacactaactcaaagctacacgtatactaagaccacagaaattactcaattcgatacaagtg

SEQ ID NO: 859 - DNA, 541 bp, Arabidopsis thaliana
acaacggagtatttctggagctcgctagatcactagagaaactgtcctagatcaggcgaatggtactttatatatgatttagaatcatcattaatcatcattgttatgatccctttctgcagaaattgaaggacttcttgttatggattaaggaagatcttggaccttttggtcacttgcattgtaagtttttcatgtttgctactcatttttgtttctaccacttattggtttgttttggtgacactgttttctggctgccgtaaaaaatcttgtgatgagccttttttaccttattgaaatttttcagggctttggcttatattcctctcacaattgtggcggttcctgcttctgtactcacggtagttctggattcataactatgtagtgaaatttagggtgcttttctaagatgtttgtccaaagttttcattacaagataggatacttagacttttaatccggttctgatagtcttgattgttctctctgcagctaggtggtggttactttttgcctccagtaggatttgtagcga

SEQ ID NO: 860 - DNA, 553 bp, Arabidopsis thaliana
ttcacaatcgacctaatgattccagcagcttctttctccgagtaagacttcccaacatcgtacaaagctaggatcttgtcgtataactctccaccaccacaatattccataacaatatgtacagaatctttgtcctcgtaagcattcttgaactcgacaatgtttggttctccagacaattgcttcataatccgaatctctctcttcacgtcttcttcacattcttcgtcctttagctttgtcttgagaatggttttgcaggcgaatgtcttacctgtagatttctcaacgcactttcgggttagaccgaaattacctctacccaattcctccccgaggatataaatctttgtgatgtcaactaaaggtttctcaagaatggttcttttcgattgttgtagctccttactgctgaagcaacccatctctttgagaataaaaccttaaaagtgtgagatttttggaaatgggtctctttaatctcttttggctgaagcagatttgttatataatctctttagttcgaatttgtgttattgttctccaggcaagt

SEQ ID NO: 861 - DNA, 608 bp, Arabidopsis thaliana columbia
caaaagtttcgataagtggtattaagataatgatggataccctagggaaacccctagaggctatttataaaagaataattacacaataaggaaactagatagatagtaatcttcacgtcgggaccctgcgatcgagcatttgatgggctgaaatgggcctccctgtgatcgagtatgtcatgaatcaaactgggctttagggattctatcttgcgatcgagtggtaaggagtgaagatgagatggaatgtctagcgaccttgcgatcgagtggtgcgatcgagttgatgtcttgaggtggtctatataaccctgtttttactgattttatctatgttttagatttaggatttcgagtctttatgttatttcccgagtcttttcaggtattctatgcagtgggacgacaatggagatgtggagacattttggagcaagagctaaggaaaaggaagctaaggacgatttcagttccagattcagagagagtgtcgatcgacacactcctggtgtcgatcgacacagtcatggtgtcaatcgataccagttttggccagaaaagtccatgacgctttcaagtttacaaaagtggaaatttgccccaaaaga

SEQ ID NO: 862 - DNA, 473 bp, Arabidopsis thaliana
ataagtctaagccatttgttcagtataaccaaggttatgtccctaaacaacagtttaatggaggctaccaacagcagaatccaccatcagggatcactaaacaaccacaacaagcaccagcagctcaagatcctgaaattaagcaacttagtcaacagatcattcaaggacaagctactggagctatggcttttgacaagaagataactgaattacacaacaagattgattgttctttcaacgatctaaatgtcaagttcgaaactctgaattccaaaatcaagtatctggagagtcaatttgcatcaacctctgctctgaagcatcctcaacaacttccagggaaagcagttcagaatcctaaggactatgctactacaaatgctatcaccatccaccaagaagatgagtctccaccaggtcatcagactccccatactgaggacaatatgattcaaaaaggggggggattc

SEQ ID NO: 863 - DNA, 943 bp, Arabidopsis thaliana columbia
gaattaagctaagtaagatagtaatgatgtcgctcgacaccaggggtggtctcgttcgacactacgtggattttggtctgcgaactgcatctgcaacttaagttgtctggtttgctccagaatgctctataatctccaaatgcatatcaaacatgtaaagacctgaaaaagactagaaaagactctagaaataacaaaaggactctaaaacctatacctaaatcatagctaaaagcagtaaaaatagggttatatcaactcccccagacttagcttttgcttgccatcaagcaaaacacaaaagccgaacccgtggaaaaggttttaaaacactagaactcccaacaatctcgagcttattgccttgatcatcctaaccaaatccatatgtctagcagttctaatcaaatcctaaccaacatgtacttctctgcaagcttacacaacattctagattccatacataagttccacaactatatcccctaggctttcatcgctgggtctcatcaaacaagctaacattcaagatccgtctagattcaatcctgtactataccatgataaatcgaccgttctttatattctttttttggtgttctttctctccccagaattattctttttagagagtaaacaaaggggaactcgcatactggatcgacaccctaggcatttttccaacctttgtaattgatcattccaaataatgtataataatggggtcataggaaacattcgtacccctatacactatctgacagtcctatcaatctcttattcatcattcattttattttatttttataaggggagaggaatacttttctttatcacattggtctcaatatcaggtatgataaggagtcaatatctatgaatactaacggattgatgaggtaaaagaaagagcagtgagattagctctaacccttagtggttg

SEQ ID NO: 864 - DNA, 563 bp, Arabidopsis thaliana
tagtaacgtccgccagtgtgctctaaagttccgtgaccgcttccatcgctgggatccgaaaaatcagcgcccggagctgtggcacaactacaacgggcaaattaacaaaggcgaaacatccgcgtcttcccgctctctaactggaccgagcaggatatctggcaatacatctggctggaaaatatcgacattgttccgctatatctcgctgcggaacgtccggttctggaacgcgacggtatgttgatgatgattgatgacaaccgtatcgacctgcaaccgggcgaagtgattaaaaaacggatggtgcgtttccgtacgctgggctgctggccgctgaccggtgcggtggagtcaaatgcacaaacactgccggaaatcatcgaagagatgctggtttccacaccagtgaacgtcagggccgcgtgattgaccgcgaccaggcggggtctatggagctgaaaaaacgtcaggggtatttttaagatgaacaccgcacttgcacaacaaatcgccaatgaaggcggcgtcgaagcctggatgattgcgcaacaacataaaag

SEQ ID NO: 865 - DNA, 851 bp, Arabidopsis thaliana
  unsure (1)..(851): unsure at all n locations
catgatcattgcgcggagggggagtgatttggtcagatccagaagaattcgagtttgggagatgtcctccgcattagcgttatggacagcatcaaccctggttccgagagagagatccgttgggaggtgctagtccataacgtcatcgtttgggatctgaactggtaagcagatccgatgaattggatgaattgggatccatgatcgttggtcacaattgatgtgttagtttcggtgttggaatgatctattttcgtcccacagacggcgccaaatgtgggttctgaaatccacactagagatttgtaattgagattatgagaaaggagggctagatcttcacagaaaccttgagagttatatttctaagaacgaatggactttttgtattgataatgacaaagcttttacaatgtgaaaggagattacaagtgtaaaagtatgtgggtgaatgtaagcttaattgaatgtcccttccaagtcgtccttgcttccttatatgggtctacgcacgtggtagctccatccgggatctgcggagatcctcctggatattcggcaggtcagttcccagatatcaggtccgctccgcgaatatctcctcatcagttcctaggttgttattcgcttatctcccttcatcaggtgaccgggcttatctggcccaaatacccattcgcgtatgtgggctcatcagctgcgtaggtcctttacttgatgggcttttgtgggctggcttggtattttcgcaggtggattcctggaggggaatccagctcaacagagaccaaggattgagagaacttctgggatacattgcccccaagtgtcgacagattcncaagagagat

SEQ ID NO: 866 - DNA, 649 bp, Arabidopsis thaliana columbia
tttttggatttagggttattgttctatagcattaccattaattaaacgctacctaatgtaatagcgcggattaatttttgttgcctgccgaaacaaaaaaattagccttaaaaaattctaagtgaaaaaacactattcgactctttctcttcctctcggttcgtgttcttccctattcgtgttctgctctaatcgattcttcttctctctgtctctctttgtgttcgtgttcttgctcaacacagctacagagttttgttcaatctctctcgacgacgctcgctactcctcagcttctcagtcacatatctgtttcttatttgagaaggttatgtgccttttctaatcgatttagggattgcatgtccaatttttcttgtttgagcatcgatttggggtttaaatcagttttagggttttgttttcaggttctcagaagcttttggtagccgtcatagacgacgataaagaaatcaaagattacttcgattgcaggtatgatatacttttttacttggaatatatctatctatatttggtttcgtctacaatgttactaatatttttcttactaaatagatatgtgtcagcttctgaagcagtttggaggatatcaaattccccatcagtatagactacacctgtaatg

SEQ ID NO: 867 - DNA, 616 bp, Arabidopsis thaliana
gtcggatacaaattagcgagccaaatactgcttcttcaagtggacatcattcggtcggcgattttgacccagcaaggataacgaggacctggtcctctaacctgtgtcagatggaaatctatcgttgggactttattgtctgagtagtgtgtagattggcttctgttgaacattagtgttgctactaatatcgctcttcatgggattattttgcagcaagaaccaaagaaatcacttttttcgagacgaaactctatctgttgacccttcttcgaagttgtcaaaccgactggccaccttcaatagggatcgcaacgtaactgctctccccatagatccagcggatccagtgattgcccttccagcagcgcagccggatccactcgaagaggtcccacaggtccaaccgaaccatgtcgcagatccgcctataggtatgagtttcacttgttgtttttatttttacatataggccattgcgctatctatttaatcgtgtttctctgtaacactcactacacttcatctgtttagttcctcccgatcttatctccactctagattatccgtctatttcttgacgaagaatgaggcgttaagtcttcatgttcaacga

SEQ ID NO: 868 - DNA, 906 bp, Arabidopsis thaliana
atcaaactggaactggtgatgaaaggtgacctaaaaacagatctcttgtttgacccaattactatattatgacagtgatataaattctatctatggaacaggagggagaagaagaagcttgaggaagagcttatggagttgaacaaagagcttgaagagttgggttctgagagtgtagaagctgcaattgtgaggctccaggaagaagttaagaattgcaaaaacatcctcaaatgtggtgtatgttttgatcggcctaaagaggtaacaatgctcataacaatcctatatctcactgtcaaggcagacataatgattcgataatcctttctcatcactgtcataatcatcatcaatagtcatatatcatgcatcagaaaatatcattttcagcgcatatcaacaaccgctttttgtttcaaacattatttgcaggtggtaattgtgaaatgttatcatctgttctgccagcaatgcatccaacgtagcttagagatccgacaccggaaatgtccaggctgcggtaccgcctttggccagaatgacgtccggcttgtcaaaatgtaactcaaaacattcacacaaatgcactatgtgttggtacataacaaacttaattaaggtccacacagtctcatcttccttcccactcttccataaaattgttagttagatatgtcatatatgtatcggttaaaacactgaatctctggtttttccagctaagagggtgatgaaaaattaggtgggttctttatggagaaagtgtaggttttaggtatgtgacagtcgtgtttgtgttacctccatttatgccttggttttatgacatggggaccgacatagacatcacaaatggacggagatagttggttttgtattttcctcaaaacaatatagaattat

SEQ ID NO: 869 - DNA, 777 bp, Arabidopsis thaliana
cctttcttctttcttgaatgttttaaacaagtttgtgatatctttggtttaatttgtaggttgaagatcttttttcctatagcatgtattgctttcactgtaatggtaccggttaattggactaactcgacgttggatcagttaaagaatctaacttttagtgatattgataaactctctatatcgaatataccaactggatcatccaggttaagaaacttctttaatatttgtggctttagttgattctagtgatgaggaatattctgactagtatatgtaaacaggttttgggtgcatttgtgtatggcttatgttattaccttttggacttgctttgtcctacaacgagagtacaagcatattgcttccatgaggctacagtttcttgcttctgagcataggagacctgaccagtttactgtatgcagacattttaaatctcttggtccacttactttttgagttttctgaagaggaaatgtggtatgtgattctattttttgatgaatgtaggttcttgtaaggaacattcctccagatcctgatgaatcagtaagtgagctcgttgagcatttctttaaggtcaaccatccagactactacctcacttaccaggtactacaactttggttgtctaacttaggatgttccatgttttcggtgtattcatcttctcgtttaacaaaacaggcggtctacaacgcaaacaagctgtcggaactggtacagaagaggatgaaattgcagaattggcttgattactatcaaaacaaa

SEQ ID NO: 870 - DNA, 542 bp, Arabidopsis thaliana
  unsure (1)..(542): unsure at all n locations
cccattgattgggacttgtaaaacttaacattttcatgtttgttgcttcctgatataaaaggggacatttgtttctgatggcttaggttttgggagcaaattttgattgaaactgctatgtgttgttcttgtagcaacagcctcacgtcctttgaatctaattcctcaattccgcctctgaaaaattcttggtgaacatccttgagaactttcaaaacattcgccaatgatccctggttcctactctcgtctctcttctcctctgcgtaagattttgactccttatcatgactataatctctgaagtaactgtacttggtaatctgtagcagattcctctcatgatcaggccaaacatgacgagtgtcatccacaatcacaactccacactcatcagccaacacaagatcaagcgtcttcgaaaaaccactctcgtctctggtaatgactctatccccaaagtatactttcttcggatcaatccatttcagcacagcctgagcgtagntcacgattccccatcgtgtagacatacatggaga

SEQ ID NO: 871 - DNA, 527 bp, Arabidopsis thaliana
atgcttcatcacataccttttcaagaactcctgatcagtacataccaagacagatgaaatcggagggttttcacttccgatcaatcctttcgacatgagagctttgatcacgttagaccttggcactatcctcttctccaagctgtatccaagtaccgtagggatcatgaccacagcctctagcggccaatttcatcatcttcaccaaaacctcaaacttcttcctcagcgtctcgccagaatatgcagtgcaacaaggatatcgcttaaccatcatcttgaaatcatctctactgaatcctaagcctaagaacatttcaatagagtctaatatcttctgctcagaagatcgtatgcattgtggacgactcttcaacaccgaaataatctcttcctctaccaaaccacacttcttcagtgtttcaaacatcagaattatcttcttctcagagaattttaaaaagtaaggccacttcttgaaaatcgcccatatctcggcttcactaaagcctaacctcttatacaca

SEQ ID NO: 872 - DNA, 515 bp, Arabidopsis thaliana
agattgctcacagttgagaagttttcctcagatttcaaggaacatttcaattcttaatctaagtggaactgcaatagacgaagaaagttctttatggatagagaatatgtctaggctcactcatctccgctgggacttttgtccactgaaaagtctgccttctaactttcgtcaagaacatctcgtttctttacatatgacacatagcaagcttgagaagttatgggaaggagcccaggtacttattccattttatattttggtcttccttcgctttgcttttacattttgttgatttagcttgcatacatgcatctctttgaagaagtttaattaacgtcatgctataagtataactgtataatttgatttgtcaatctattgtttaatccaaacagctctttttggtaataactaataagtcatcatttagataaaataaaacatcattttcttagataattatggctggctcattggactcatgggtgcctattttcttgtttattttattt

SEQ ID NO: 873 - DNA, 521 bp, Arabidopsis thaliana
ttaattttgtttataacagatgtgccggagatagaagcgcaaggtaacgagtgcttgaaagaatacggaggtgatgttggtttcggcttttgtgcgcctcggatatttccgacgatttgttacacaagatgccgtgagaacaagggagctaaaggtggaagatgccgttggggacagggcagtaacgtcaaatgcttatgcgacttctgcgacgatactccacagtaaaatctaaagcaatcgctaatcaatgcactaaggctgccatagacgcaattattatacacgttgtctttacgtacattcacaagttttagtcatggtttgtgtaataaatgaatgtgaatggtctatccaagtgatgtaatgtgaaatcagaaataatgaaagtgtgacttttgctactacaatcatgttttggtaatacaatttgactaagaaagaagaaacgtgcgagtttggttgcctcattgttgttgtgaatttggtaccacatattcttatctgtttactatgtggag

SEQ ID NO: 874 - DNA, 584 bp, Arabidopsis thaliana
ggccaagaactattctgcgtacacacagaaagatgcagggaaacaatctgcttcacccggttctgctgaagaggaggatctgattcataacttcttgatcataatgttggaacattcaatgcgccagaaggatggctggaaggtaaatttgtttgtttcagcggtctaccagattaattccctttcacgttttttccaagctcatttgtgtttatttatatttttcgctacatctgattccttttacaggatattgaggctacaattcattgtgcagagtggcttacttttgttggtgggtctagcactggggagaaacgaattaggtattttcatgcactactgcgccacattttacgcgtgccttttgggatgccaataacattttgagtgtcatctgtttttcttgtcacattgttagtttgtgaaggtatcttttggatcatattgttgttgcactgtagtcgttcttccatgtattttgagataagcatgtttctgttcaattatattacactttttcctaatactttttcaaaggcgtgaggaacactgccaatttcaaacgaagactttaggtggat

SEQ ID NO: 875 - DNA, 994 bp, Arabidopsis thaliana
ctgtatgatagaccagctaaagaagagggtagcattttcaacagactcttccgatttggtagagatgaattgacttttagaggagtttgtgaggagtaaggaattgttttctttggttactattttgtttattccacacaaaaaaaaaattaaaaagcgggcatgatcatgcagtgcatgactttatctgcaaaatattagttatcctatcattccgtaagaaccataaaatccacatgaaacaactaaagtgatttcctgctccttatggtaagatggtactctccaaactagaaaattcagattcgtgggcaccaaacttgtaagaaatccaagaattaatagaaatggtgacaactctcaagtttgcaaggaggatggagacataaaaggagcatgattaatggtttcttcttatgtcccagactttgacaggttatgtcacaacttttttcgcgtcgttatagacttagtgtcggcttaactataggtgttggtagtacgaccgccccatatacataaatttttagggcacaaaaaaaaattgtatatacaaaaagggcacaaaaaaaattgtctatataaaaggggcacaatttttttttattataccaaatgggcaccaaatacttttcttaaaagaagaaacctaaaaaaaaaatattggagtgacatatctttaaatttgtctcatgtgatctgaaatgtatgagcatacttgaagtaactactaaggatgccgatgcaatttaccaaagaaagtgtctttttttgtgtgcgaccaggagtcaaacgcctcccgtgatttattagaaaaaataaaatcaaactacatctgtactcatcttggtcttgtagcccatgattatcctctaaccaaagcggcgaacagcctctggtacagaaagaaaagaatgaaaacctaacggtaaagtaaacgcatagttggctaatccgtcagcaagacaattagctatcatatacacgtgagaga

SEQ ID NO: 876 - DNA, 483 bp, Arabidopsis thaliana
tcataatcaccttgagttatgtgtacttgttgtggtgcattatatccttttgggactttgaaaacatgatgatcaagtggtatatcaaccgcagccattcagatcgaataaaactacttgtgattccagattctcctctatataacaacaatactgagctcaagaacacagagattatcaccaaatgattcatcacgtcaccaaatctcgactcagtttttttacctgtagccacaaagaatcgcgaatctgaatgttgatttcaaatctagaatgaagcaaatcttaagatacaatctgagaaattcgttgtgattttaagatctgaagaaatcgagagagaggttatggatattacctgagagatgaaggagatgacatttgggagattatcgtctcgatgacattaataagcccgtcggatatgtatgaatgagctatcgcagaaggtgaccacatacgtggagatttatgattggttga

SEQ ID NO: 877 - DNA, 587 bp, Arabidopsis thaliana
tatttctttgtgcacaaactatatttctttttgtcatcacatcaactagtacaagcgatcaaagtggatcaggatcaatggagacaagaaggccaaaaatatttccttcttctatcaatcataactttatgaacaaagctagacacattctctttctttctatcattacaaaagctcacatccactagtacaagcgttcaaagtggttcaggagcaatgaagacgaaaaggctaaatatctatcacttctttctgaacaaaaactagaaaactagatattcaagtagctaaatattatcctttctaccatcacaaggccattcatcaactagcaatacaagcaatcaaagtagttacagagcaacgtaggcaagtagaacacaacacataccttgatggtgtcgtaatggttcccccaacttcagaagaaagacggcccaatagacagtatttgtgaccagcttgaagcctcaacaccctgaagaagagcacaatgataatcatcaatgcccgaagtagaacagttacggatctacaagagaagatcaaaaatggtaaaaggagcacacttgagagcatcagggatg

SEQ ID NO: 878 - DNA, 726 bp, Arabidopsis thaliana
tcgcctttatctgctgcaactaagttgatgggtatcaaaacggattataatttgtccgaggattgtgtggatgcgattactgattttgtgaaagatttatcacccgaagataatcttgcaccgggaacatactacgaggtgcagaaattggtagctggtcttggtttaccgtatcaggtgatagatgtgtgcattgacaattgtatgttgttctggagagaagattcagatcgcttgacatataagttttgtcgcaaacctgggtatcgggaaacaagtggacgagtcccaattccatacaaacagatgtggtatttaccattatcagagaggttgaagaggttatatcaaattaagcgcacatccgggccaatgagatggcatgtagagccaacaatagaaggaaaaattacgcatccctcagatggagaagcgtggaaacattttcaaacagtgcatcctagttttgcttccaaacaaaggaacgtatatcttggattatgtatagatggattcaatccctttggaaagcatggacggcagtactcattgtggcctgttatcgtgacaccttataacttgcagccatcattatgcgtgacacgagagtttatattcttgaccttcctcgttcctggcccacatcatccaagaagatactcgacgtgtttctaaacacttatatcgagttcaaatgttatgggagattggtgttgagcgtttgat

SEQ ID NO: 879 - DNA, 500 bp, Arabidopsis thaliana
catcccctgcgagcaaatagatagtcaccgaggacacagtagatctagatggggagaattttagttttagtaaagatcaagctaacaaggaacttgagcagccactcgaccagtcactcgagcagccactcgacctcgtcactcgaccacctttcctaataacatcactaactgctctaaaactagttgctgtaaaaaacaaagaaaaggtctttgttcctcttccttacaaaccccaacttccatttcctggccgtcacaaaaaaatattggcagataagtatagagctatgtttgccaagaacatcaaggaggtttagttgcagatacctcaaattgacgctctagcactaatctcggattcccacaagtttctgaaagacttgatcgtgcgagagaattcgagaagtgcaagggatagtattattgagtcacgaatgcagtgctatcatacagcagaagaccattcctaagaagcttattgatcctgggtcattcac

SEQ ID NO: 880 - DNA, 440 bp, Arabidopsis thaliana columbia
atagatcaagagggggctgaggatcttcctgaagaataaccttggatagctcaaaaataccttcagcatcaagaacagccttaggccagctagcagatatcttctccaatgcctttatcgcagtttcctgcaggctcagtattccaattcctgcaagccggaccagaggaacaacagcactctgtgttgtgatgtcttgctggaaatcttccattgtaagaaaatggctcagcagttctgctccaagctgctggatagcttgggatgaagattctaaaaaagaaatcagcggcacaatggcttcactgggtgtaaaactaaaagcttcaagggtttgctgtttttccaatatgtttacgagtgcttgcagggcactatgttgccccataaggtcaagtctgaccgcagcaagaccgcgaagagaggctctacagtttttg

SEQ ID NO: 881 - DNA, 732 bp, Arabidopsis thaliana
tgaagctgaaagattaactttgggattttgaaaaaagagttaataagtatttaatgggaattgatctagagaagatggaaactacactagctatcaaagaggacaatgatttcagaacagaatggtttgcaccaaaagatcagaaaggagttcatttagaggaaagaagcttagagagtaagttgttgagtgaggaggaaatccctatgtctgacttattctccatgagtgcctaaacagcccaataaaccctctattgaagaagaacacttgattcaacaacttaaaacaagctcacttgggaggcagtcccatgtctatccatgtatataactttctattttcatttttatttttgatgttttcgtttatgtgtttcaggtttatttcattgatcctgaggaagtcaacggtcgagtaaatttaaatcaagtcaagaatcatctcaaccgttgatagagtaaaacaaagaggagtgttctgagttgtgcgattgaatgaccaaatagaggaatcatccccaccctttgatcgagtaaattcatgaggtttaatctggtccgtttgatcgagtgcttaagagtgaagtactttccaccgtccgatcgagtgaagaaaccaaagagactaccttgcggactccgacggctcgtgacccgcctccattgaaatccatgatgtctctttgtcttcttgtcccctcataatcactttggtccctcccccccatcg

SEQ ID NO: 882 - DNA, 618 bp, Arabidopsis thaliana
  unsure (1)..(618): unsure at all n locations
tgcagccttgaagcacatctatgcaaagaaggacactaaacctaggcttttgagatggatactacttctgcaagaatttgacatggagattattgacaagagaggattagagaatggagtagcggatcacctttcaagaatgaggatgacagaggcagccgcaattgatgattctatgcccgaagaacaactcctagcaattgggaccggttttgacaagtttaagattgaaacaatgtgtgctacaaggaatgaaaaattgccttggtatgtggatctcgttaactacttagctgctggaatagtccctaatgagttaagctcataccagaagaaaaagtttttcagagacattaatcactactattgggatgagccattcttgtataagaagggagtaaatggtttgtttagaagatgtattgctgaagaggaagttcagggagtgttagagctttgtcacaattcaccttatggaggtcactttgctactttcaagacagttcagaaggttctacaagcgggattatggtggcttctatatttaaagatgcacatgagcacataacaagatgtgatcgatgccagcgagttgggacatgtctaggangaatgaga

SEQ ID NO: 883 - DNA, 904 bp, Arabidopsis thaliana columbia
gttctaggtaatttgaaccacatcacaaaacataaaagccgaacccatggaagaggttttgaaaacaaaggaactcccaacattctctagcctattgccatgatcattcaaactaagtccatattgatataacccgatttttaccgattttatccatgttttaggtataggattttgagtctttatgttatttctcgagtctttttagtgtcttttcagttattttatgcagtgggacaacaatggagataaagagacattttggagcaaaagctaaggaaaaggaagctaaggacgattttggttcaggaatcagcgacgaatgtcaattgacacactcttggtgtcgatcgacaccagtttcggcccagcgaaaaccctagacgctttcaagtttacataagctcaagtttgccccagaagatttccctatttgtattattagtccttggacgtttttaggactatatatattgtttttaaacctaagtttcttttataaaatcttttatcaagttctttgcaaaaccctattgtgagagacataagctattcatccattgttcttgagagtttcattcagatctatatacagtgaagagatctcttctttccccttctcaataagctattcatccattgtactctctctcaaataagagagtagttctaggtaattgatctcttatttgagagagtagttctcggtaatttgaaccaatatcacatatgcctaacaagtctaatcaaatcctaaccaacatgtacttctctacaagcttacacaacattctagattccatacctaagttccacaactatacccaccaggctttcatcgctgggtctcatcaaacaagtcaacattcaagatccttgtagactcatttctgtactataccat

SEQ ID NO: 884 - DNA, 799 bp, Arabidopsis thaliana
gtcaatatctatgaatactaaccgtttgaagaggtaaaaggaagagcagtgagattagctccagccttagtggttgagttggaaactaggatatcctcaagtctgttggtttgccatctagattttccaatagtcggattgactcgaacgtgcagcactcatcaatcaggcaataaacaagagaaatatagatcaagattcctaactaaactaaacaaaacgtttttatatttttatctttgggtctttttttagactcaatattcgtaagaacctcccccagacttaaatgacactgtccccagtggtattcaaatccgaagaaggcggaaaaaataaatcaaaaataaaagaaaatgaaaagaaaggggaaagaaaaatcaaaccaatgggttgcctcccactaagcgcttgtttttagtcaatagcttgacttggcagagtacaggatgggggtggagtggtggtggattgctgctgcctcctcgccttccaaggcggtgtgtaaacggatctggttggggcatttgcaggtgtcgatcgacacttagtggtgtgttgatcaacactattctcgtcacctgcaagaacaacaggagaaacaagcattcgaggaactctaggcttgttatctagtgaagcagtcttcgaataatctatagaattaatcaaagataaagtaggagaggagatagaagagaacttatcacaaaggtcctcaagtggtgtgagctgaagagaatgtgcagaatcatctgtctatgataccaaagggtgtcaatcgacaggggtagtggtg

SEQ ID NO: 885 - DNA, 586 bp, Arabidopsis thaliana
gctaatggatgacgtccaccgcatcagacaacaatttacatttagcatccctattcttgttacaggaaagcaagcgaattttacgtataagcttgcaaaggaaacactagtttctcgcaacatcagacctatgcctcgtactactcagaagaagacttgtggaatttgctttgtggatgatatcgaaggtcaggagatgttttccgctgctttatgcagtcattacttctgtgtggagtgcatgaaacaacgtatagaagtgagtctaaacgagggaggtgtacctagatgtccgcgtcatggctgcaaatcagccctaactcttagaagttgtgaccatcttttgacacctaaacaaagagagatgtgggaacaaaggatcaaagaggagtcaattcctgtatgtaacagatttcattgcccaaatccaaagtgctgggctttgatgtcgaagaccgagcttactgaatccactgacgatggagttaggagatgttgctctaaatgccgtaaacccttttgcattgactgcaatgtttcgtggcatagtaacttgtcttgcaaggaatacaagatgaagggtaca

SEQ ID NO: 886 - DNA, 539 bp, Arabidopsis thaliana
tatttataatcacagttaatagctatagaatgtgattaatgataatacctgcaatatacattgatggttttatgcgacagtttgatcatgtgttggcactttttacattgacgcgatattgttttaggatttcgacccaacgtcttgtattccttgcatgacaagtcactatgccacagaactttgcagttaatgcaaaaggctttgcggcatttaaagcagcatctcctaactccatcttcagtagactcaacgagctcggttttcgacatcaaagcccaacaccttggatttgggcaatgaaatctgtcacatacagggatgaactcctctttgatcctatgttcccacatctcttctagtttaggtgtcaaaagatgggaacagcttttaagagataggattgatttgcagccatcatgaggacatctcggaacatctccctcgattagtctcacttctatatgttgtttcatcactctacaccgaattgatgacggcataaagcaacagaaaacatcagttcatgttcgatatta

SEQ ID NO: 887 - DNA, 817 bp, Arabidopsis thaliana
gattctaaacatgatttagaagatgtgttagcaaaaggggtccatacttacaatgattggtccatagtggtggatcgatggtacgaaaatcctcctgatgattatttgaggttcatgcttgtgtgggttcagatatggaatattccagtgaattactatacggagaaagcgattacaaagcttggagatctaatcggggaggtcaaggaggtcgtttttaatccggttgagccgcagcttcacgaattcgttagagtaaatgtgctctttgatgtctctcgtcctctaaggagatccaaagtgattaattttaagaatggcgacacagctactgtccgttttcattacgaaaggattcagaagcgctgctatgaatgtcaaaggctaacgcacgaaaaagacttgtgtcccattctgataaaagaaagacaagataaagcttctgctagaagacaaggaatcagtattcctaaagctcctccaccgtcggtgcttcaagaatcagaccctctgtttggggttttgaaggagagtcaagttggtgttgacccaaacacgggtaggccaagaatagctccagaagttttagagggaatgaggcagtatctgagggttgcgaatgatgaagaacggtctattagagtggatcaggtgattaagtctgtaagggatgctgaaaaggatccgtttactcaaaaaacagttcttcagctggaagcattgccaatcgttcatcatgatatgttaagggagaaaggtgttgtttttgattatgatcgtggggattcttccagccacaatggtggtctcaatttga

SEQ ID NO: 888 - DNA, 537 bp, Arabidopsis thaliana
ttcgattatctccaaggctttgatgtgatctccattagcgaagagagctcttgcatcgttgtagagttttactctctcagcatcttccagaaaagtagtacgtttcatagtaacgattctcaagactcttgctttttcttgatcgctgcttcagagaggaatgtgattgcgagaagaagaaacagagtcaaggcgggaacttcaacgaatataacagcaatgtaaaacgtaatcacgtgagagccacgtgacaaagcttgacgccttgacccaaattttgggcattggggattctatcgaacaccttatgtgtattaccagtttgggatttttgacgaagaaattaagaaaagagaacccatatttttggtgaatcttcgaatttggatttaagactaactgtaaaatggtcttcatgtatgggagatgaacaaaattcggacttgaaagatcagaagcactagagattgatacgtgtctatgtctcactttttgaaggtgatggagaagaacgagacttattcaatatatatatat

SEQ ID NO: 889 - DNA, 520 bp, Arabidopsis thaliana
ctctttaagaacctaagtttttgataaaactcaacaaaagcgcggttcataagctcttcggctctcctaagctcgggtttgctgaaggtttgctcacttgggagaccaagaatcatcattttgagagttaacaacggagtttcgggatcgattttgagctttacatgatccaacatttctactggagcaggtttaaatactttcttatcttcggtcttttccatttctctaatcacatccattggtgaaggggctacattataaaaacattcacatcaacctttgtaagaagcttaacgtttaggattaagtaaaatggagctaaacctggagtcctcattgttgaatgaggagaagaaggagcactcgcgacgctattaaggtcaggaggaagatgaacgtgaggattctcaactttaactctaagagcaatcaaaacatttaattgtctactaagctcatcagcttcctccataacattttcaactttttgcttatagaatctcaaaaccttgttgaa

SEQ ID NO: 890 - DNA, 463 bp, Arabidopsis thaliana
attgtttagtttttatatttgtgtaaaacaaatagaggagaacaaatcaagataaacaaagcttaatttaaaaactcggtagttgttgtgatatcgattcgctgtcccatccgtttgatctttatcaggccgttctgaatcgccgttgaggtcctgaaagaaagatttggccgcctcgtaagtggaccaacatatggctgttgctgatgcatggatgaacattctggggaggcataaacccttcatatttcacaaaggatacgaacacatggctcaatgaaaccctagtgacatgctgcacatgaccagataagttataagaagaagaagaagaagaagaagatcataggctatgtctggcctggtcgattagttagttcacacatcttaaaatcattttgtttatatttatgccttgattgtctacttttgtttttgcttttacattgtgagcgtgcgtgtg

SEQ ID NO: 891 - DNA, 575 bp, Arabidopsis thaliana
caatgtgagatagcatccattttacaacgaacttgagtttttcttcaaacccttgatcgtgaaacctgccaaagtttcaaactttgtggtttacaaacaagatttccacacatttgttcacacagttcttaacagaggcttaccagtgatcagggtagatatgaaccgaggcaaaatcgatgtttggcgaatcagagtttcgaacaaaatctgacccaagctcagaggcccaccgttcggggttaactgtcagcttttttgggctactgggaccgtagaacccttccaagccaacagttagaagatgcttgttgtcaattgatttaatgaatgctgtcatttcgttaatccagtcctttaaatccacataccagaaaaagaaaccacaagagtaacattactaattttctcaacaattactaatgatccaatgctggacaagaaaaccaccaaaatgaaggagaactcacttgtagagtatcccagagacatcagacatgcagcgaggctcgttatacaactcccatgcaaaaattgttgggtcgtttctgtactcaatcccggttaaagagttt

SEQ ID NO: 892 - DNA, 708 bp, Arabidopsis thaliana
  unsure (1)..(708): unsure at all n locations
aggtaaatacatcttttcttcctaatgccactctccacccaggccctccactctacaaatttaaacccgttataggcgacataatatcgaatagatataatccaggttaatttaattccgagagtatacatgtgtaagttatagacgaaggaagatatataattacaatattataatagaatatataatcatttgtaaaaacataatcattttgtttgttactataaatagtcaccacctaattcatattataaatagttgttgtatgaaaattagtaaaatctcgagaatttctctgaaaataaagtaaatatattaaggctttgatggttgttaaatggggacaaaagggctagcttaccaatacaacggagtcacgagcggccaaagtgaggatatcagcacaagaaacaacaccaggacatgcgttttccacagcggctttgattgtatcaattacttcaaatcctctagcagagttaatgtttgggatcgcgagtttctcgctgtcagctccatccaacaataacgacgcatcacacccctgaaaagttcgagttacgttttaggaaacttatgaaaagtgtttggaacattattttgtacaacatcctataacctataaaattctataatagaaaaaaacacgtaaagataacaaatacatacattaacaaagcagtcgtggaaatgangacgaatgagaga

SEQ ID NO: 893 - DNA, 546 bp, Arabidopsis thaliana
taacggccgccagtgtgctctaaagcagtcacggcattgggttggtgtttggtatcgttgggctggtgttgctactggttcaggcggtggatcttaatgccagcgccacagcgataaccagctacagcctctatggcggcagtatgatcctgctgttcctcgcttcgacgctctatcacgccattcctcatcaacgggcaaaaatgtggctgaagaaatttgaccattgcgctatttacctgttgattgccggaacctacacgccgtttttgctggtggggctggattctccgttagcgcgcgggttgatgattgttatctggagcctggcattgctgggtattctgtttaaactgaccatcgcgcaccgattcaaaattttatctctggtgacctatctggcgatgggctggctgtcgctggtggtaatttatgaaatggcagttaagctcgcggcgggcagcgttaccttactggcggtaggcggcgtggtttattcgctcggggtgattttctacgtctgcaaacgcattccatacaaccatg

SEQ ID NO: 894 - DNA, 556 bp, Arabidopsis thaliana columbia
tctgcttccaaagttacacacttgggaacttgctgcttgcattacaacaaccataaaagaattcagcattccatgaacgccagatatcacgatccgatcttcctccacctctctgcttcggtttaaaacatacacaaacccaaattagcaaacaaatacagactttgcaacaaaaatatcaaatataagaaccctaaccggaactgtgaaaaccactggtgtgttcttcttctcatcattggctccatagttaatatgcttctgcaatcaaacaaaaacaatggcgttaagagacagagatcagaatctcatcaacaaggctattgagagagagaaagagagtgtacggagatgcggcgatcggaatcatcaggaggaggggaaagaatggagagaagagcgaagaggatgagaagagctccagagacagcgcaaatgaaaggaagaagacgacggagacggttgtagtaattgttgcgccgccgttgaaaagccattgaaggctatacacgcggcgcttttaccttcgtctctacgccagacagagagagagaga

SEQ ID NO: 895 - DNA, 1735 bp, Arabidopsis thaliana
  unsure (1)..(1735): unsure at all n locations
tgccacatggccgcctagcacgtcggcctcccacacgcgtacggcattccgtgtgtcgcagagtccctgtgacgagcatggaccactctacgtctggctgtaccctataggcttggtccacgtgtcttctccaaagacgaaaccactacacactgtggtgaatcttgtaaggcttctgctgttgtaactgcattttgtcgtccggtcatttatcattcaacaataaccacggatctgcaaatcatgttgaggccgctgacaaaagtttatatgttattccattttcaaatcttttatatcccacttgtgcttgtggatgaacctatctgcatactctatatactcttctcttcttctcatctaaaacaaattacattgcatattacaaatcttgatgtgtagcaaaatataccatggctatctttgacttgacttgagttatgtgatgaaacgttttgagtaggtgtgaacatttgaagaaccagttataacaattttagtttaagtaagtactcgatattgaatatgatggttgtggaatgaagatatgagttgtttttttcatagacaatgacatttactgagaaattcacaaaaatagtgtatatattttgataaaaaagtcaaatgctattctgattgcgaatcacaagtctacattgttatcagaatgcattgaagtttataaacaacaaacacatggcaagtgggtggagttcacattatctaagcagaatttacttgcctttgttcgattttaactcaaaagtttgatttttattcttttacatatctcagcaaagttgtggagaaatgactgatcatgcatgaagttgtaagtaaccaaatcgtgctcaactcgcaatatctctcagatatacagttactgctgcgttcatttagagtctaagcgctgtacgtctacaagctggtaaagatctccccgccgctgcctattcaatggaaggctagtcctaagatggtaaaaaaaacgagattcagttagcggatcacgctatcaaaaaccaagaaagttctggtgtttccgtgattaccttcgttgttcaaggatagagtaatcaatctctgctatgataatggcctcctcatgctcagtcgttgctagtacttctccaaactgtcaaataatatatatgtttcaaagtttagtgatcagctaaaagcttcattatcaatcaagtaacacagaaaaagtttagtgcttacaggcccaacgagtgttgagtgcccccaagcagtgtagccagctcctgaatctctggcaggtgagcatgtcgccacatataactggagaaagtagcatacatagttctattaaccggtccatgactttgataacagtcaattaagtaaaactaaccccaaagagcagaagataatacttgtattgataactcaaagaaaaatgcaggtttgctatgaattcattaagaaatgtcagaacttgtatctctcttttggctatcaatacaagtatttaacttggttcatgtacctgattatccgtagccctgaaatggaacaaaacagatcgatgagcattgtgatttcccatgattaaataagccaagaaagtcgtaatgtagtagactgtgaatcatacctggccctttgtagtaattcccaatgcaatggtccagttgtcatgttaaaggctcctngggtagcacagcaatgagcccatgatatgattaaagtaacatgtgggtgatga

SEQ ID NO: 896 - DNA, 654 bp, Arabidopsis thaliana
caatctgaacgaaaacatgtttgttgatgagtttcattctacttacaggttttatctctattcttcacaactttacaggcgttttaaaatgttttaatatctctttttatggttttatctgtgtttatgtggttttaatctcagtttacatcgctgtaatttacaggtggcgtcaagcatattcagagagcattcacccaaatggtgatatggaatattgggagattccagaaactattagtgaagttatttgtctcccaccttctactcgtgtacctactggcaaacggaagaaaaagaggataccttctgtttgggagcatggacggtctcagccaaaaccaaaattacacaaatgcagtaggtgtggtcagtcgggtcacaacaaatcaacttgtgttgctgcaatttagatatatctttatctccaaagaattgaatattgttgggtttttaatattttcttcattgtgtcgtgtcattactctcgtttgttaaaattactatcaaacttttacaaataattttgaaggttattccaatattttaccttttaaaatctcttgtaaaatcctgtttaaaacgtctgtttaaatccttttaaaataccttgtaaatctttcgttatgccacttagatatactttaaacgatt

SEQ ID NO: 897 - DNA, 533 bp, Arabidopsis thaliana
ctctagtaacgtgcgccagtgtgctctaaagggttaacataatacccgcgcccatatcgaagttataacccacacgtagcataacctcgccctgatcggaggcaagattatatgcctccctgttttcgacgtatgcgccacaaataccgaggcagaggtcagagaagataataaaattattgcattaatctttttcataataagtccattttttaaacgtagggaggccgccacccaccaggatggaaatagcggctattgacatttataacgttacggaagccgttttttcttctgtcgccatctctttatttttgcgttggttgatttcctcaataatcaatgcaaaccgtttttcattgagtgtgtaaaagaatcccatcgtcaatgcagcaataattgccagtgcacaaggccagataaaaatgagctgacgcaaaccctgtaatgtcgcatcgctttgcgcgatgttgggaacataccaatttgcgtcacgataatgcatggcaagaagccagcaagtgcggcagaaa

SEQ ID NO: 898 - DNA, 532 bp, Arabidopsis thaliana columbia
ctcttttgcaaagaaagctactttattgtgcataagatagttgatctacataatcttaataccattttctcagtctccaatgtaattcaataaaccaaaacattttttcaatgtgcacttatttgatatctgaaattcaaatgatctacagcttgctggttgggagaccaacaggcttggccctagacctcttctccaccgcacgagagagttgcttcaccgcttctttaggcaagtggcgaggtttgctaagccacagtcctccatctaccaccattgttagtccgctcacatatttccctgttaaacaaatcaagcaatgagttacatcatctaaccatgtatatatgttttatattaaagagtgtgctttatttaactcagcataccagaatcacagctgaggtagagtgcagccatagcgatatcccacttctctccaactttataaagaggcatgtactctctggttttgtcttcaatctcctcaggtacaagcttactcattccaggtgtactccaataggacctg

SEQ ID NO: 899 - DNA, 974 bp, Arabidopsis thaliana
tggcgtcgtctgtggggacggaggattcttgagtcgtcagattttttatacaacattttcaagacaagcagcaatggccgtagaagacgtcatcattgcatcattggccaaaattctcaaaatcatgcagcaaaccatgtcggacatgtcacgtaagttctcggatgtggaaaaagccgttgatacactacaaccaacccaggtatcttttagacaaaatgttagtactatagaatctcgtgtttgttctatgaatgcaggaaatcctgttggagttcgaaagactattttcaattcgccaagctcccttgcgcgagatggaaccagcggacaaacaactccagatgccgctaacatggtagttcagccgggagacggggaaacacagctcggggacaaagaccaattcgcagatcagcacgagcaagaaagtctcgaccagttcgagaccatgagaaggttagtcgggacctgaaagaaataagatcaaagttccatcaggccactagttcggagccggatatcaatcaggtcattgaagaagctcggcgaacacctttcatcccacaaatcgcaagtttgagaatcagagattctcggaagctcaatctagaaccttacaacggtttggaggatccaaaaagttatctcgcagcttttctaattatactacaagaataccttcattttgggactctttgttgtgactaaactttcagtcgcaaaataaaccgacatttttgtgatccttttgcgactaactaacgactgtcgctaacatgaaggcaaattagtcgctaacatgaaggcaaattagtcgctacttaatgacgaaaacaaatagtcgcaaaaaagtctcaggctgcgactatttaccaacccgttagcgagaaaaaaatataatcgcaaaaacatcgcacttttgcgacctttaagctacgtttaaccggcgctcgcgttttgcatttcaaaat

SEQ ID NO: 900 - DNA, 790 bp, Arabidopsis thaliana
gaatgttggcggttatgatcgacaaatgctcgaatctgtagcgatagacgtcaccaaccatgtcatgctccagaaactcacagggatgcatatgatctatgtccattgtccttggttcaaaccatggttccttgagcggtactccacatactatctgaattaccgtcacaacactacctatgcaaagagcaactcgcaccctcttcttcacgttggtcaacgcccacatcatgtatccacacaggtggatcaatagaagcatcactggtggcgcatcattgagatcacctttcaggatcttctttccctttgttcggcggagaatgcctttgagtgcagaatttatcatctccatgtctatgttagacacagtgcctgtagactccctggagtagagaacattcgctatagagcactgatagtagcgaatcacaggacttcagatttggttgctcttggaccgcgtagagttcagcggtacaccattcccaatagtagcccacaaatcctttagctcttccctctgaaacctgggcttggttccctttccactagggaaacaaaacagtcctttcaaactcctgatcaacaactgataacgctgctcgtccacaagctcatactttgtaagaccctgatacatcttcatttgcattgtggagagaaactcgatcgtttccttcttgtaggcgccgtatggataagacatgagtgtctctaggtgacacttctcaagtaggtgcttcacatcctcgagtagcccagctggcgttgagtctgatagtaggga

SEQ ID NO: 901 - DNA, 814 bp, Arabidopsis thaliana
catgaaattacctcatattctatatactttatccaacatcatactttatccaacatcatacccaacaacatcattcctagaagtttgatcaacatagtttgtcaatcgacccttagtgaaaacccaatttattttctgttttgatattatagatcttgacactaataaacccaacaatttggtggctagtttgaaatctcataataacatttggtttctcataactcgatcaaaccacgaaatcttctggcataactcagtcgtgacatattggtattccactatcaaacataaaatttgaatatttgagggtttagttatacaaatcaattcgaactcgtttgaattatttttaatattaattgttggcgtgttcatgtgaatatggacccagtcattattggcggtccccataaaaacactttttgtaattttgataatgatataataaagaatattatttcgtatggaaataaggatgacaatgaggtacggcgaaatcaggaggcgcgataagggcgttctgatcgagtgtgattgcaatgctaaagttgtcgttgccacttctcgtgatcctgttacaagcggaaaactgtatttcagttgtccgtatgaaatatcagttgtaagcatcttttttgagttatgattctttattttatttcttttatttttgtatccctatgaatcaacctcttatttttcagggtcccggtcgaggctgcggtttcaagagatggtggactgttgcattgtgtgacgagtttgacatgataaaagaggagactattgtgatgaagaaggatctggaagc

SEQ ID NO: 902 - DNA, 932 bp, Arabidopsis thaliana columbia
cctcatgaacccaatcgtgtatgtaaaaaagttttgaggacaaaacctcttgaagaaggaggggatgatgtaagaatgggagctgacgtaccggctgatgcacttgttgacagactgcttgctggattttttgatggactttctgacggactacctgaagtacttcacgtatcaaaccagcttgtgcgaactaaggaaagctatcctttccttcccttttgtgcgtcccagagccacatatggaagcttggagatcctttacgccacccagaaccattcacacttaatccttagtgcatcattccttatgtgaacccgcgaagcaagactttccttttccggagctaaatgagatcaaatcacaacgactctattttgatcatcttttgggaattaagaagtttcctacaatgactctagacgtcctaaaatcacatcacttccagcccaagttgtcaagactcaagacacatcacaactttccttatttggtcgatttcgtcattaaagttccaacagccatattttcatttattgttgcgatttctttacttctttagagcatatgaacattgtatgagcctctatataagctcaccttagttttcatttgtattcaagccttttacgaaataaacaagtattttcttcaaagagtgtctttgagttttatgcattagaagttagtgtagattcactaaagtcttgtgtgtgcggatcaattagcttgtggattcaagtttatttgttcgtggtttgattgtggattcaatcaagcacgttgagtatggattcattcaacaaaacctccatctttcatctctactatcattcatcgaatcattcaagctttaggtcgagaaaccgagaagcgtaaaccctaggtggattccgaggtttgcatcacaacataaccggcttttaactcacgt

SEQ ID NO: 903 - DNA, 903 bp, Arabidopsis thaliana
cataattatatcaaccaaaataaatgaaaatagaaaaaatatctaatgttctctgttgtatgcatttagatttttattcattcaaacgtcggtgaaccgtggtccaacacggctcttttgttcacattgcaaaatagttcaaatatattttatagaaaacgttactttaataaattggtgatactaaaatttgttttcttgtgtaatttgtctttcagtgtgaagagtgcaacgaagggagtccaacccgtagctgttagctactctaaggcatctccaaacgcgtcgccaactctttctgccgtgttttcgattggcgttttggctgtcgcgtcttgggtgatgcaacgcgttttgtgattcatgtacggctgcgtttgaagtttttaataacatcaatctcaatcattcgacgagaaagaaaagatcattgaagagaagattttagttagtcgaggagtgatttattctaggtgataatttgtagaagaacaacttattttagattggattagttctagtattactattagtttctacgtaattttttagacaaatgttcagtctttatggtgtctctgtaagatatataacagttttgcttgcacaactaattgattggtaatgcgttttaaaattttaaaataacataaaatgataaataaataaatggaagaacttaaacaaataaactttacaattttgaaatctgattataaagccatataataatctagccaagtatattgatgcttgcaaagagataagagacttatcattaggtatcaaaatcaacttatcttaattaatgttaaacttcaaggatatctgttaaacttggcgggtaatccagtgtttaggttatcaataaacacatacaaaaagttgctatatttatagtgt

SEQ ID NO: 904 - DNA, 545 bp, Arabidopsis thaliana
catctataacaaaaggaacattggactttttggcaagaagcatgataatactcacacattcctggaaatacagagtcacataactcgtaagtccaccaccaaagtaatgacaaatcaaattctgtaatgtgattaagcaagggtagatgaatctttaccaggagaaatggatctcttcccaaaccaggaccaataacaagacaatcaaatctttccatccatttaccgacttctccaagcactttatcttgaacttctcttttatcttcttcactgagttgactatatacagatatgaaaccgggtattgtaataaaaacatacggaacaaaaccacatagttagaagtagcacacactgtggaatggagtattcacctgatgctatatgattcctcaagaacagggtgaactataagctcaggactatagctctttataacaggagctgcatctttcgtgcagaatacatgagacaaatcagcaccctacgagttttacagatatgaaaccactcttcacttttatgtagacagaagcagtgat

SEQ ID NO: 905 - DNA, 712 bp, Arabidopsis thaliana
cacactagcctgatgtctttcaagctcagcaacaggcatagtcggcgaacgaatatcgagaatcacaaccttattagaatccatcaaaatcgtagccatatatctaagatcttgtttgttccaagcaagtcttaacaaaggcgtatcaggctgaggactctcgtaaatgattgtagaatgttccttatcacgtaaatcaaagatcctaacggatccatcagcagagactgatgcgaaaaccctagcttctccccaagcaatgtcatgaacctctttatcatgagctataagctgagtctcaacaacagacttctcaatatcccaaatcgtacacgtcgtatcaatactacaagttccgagacgtttcggctctacatcgttccaatcgaaggaagtcaacggcgcacaaaactcgctcgttttgctgttgttgagaaccgagattggctcgacggttgatgaatcttcgttaatttcccaaagacggaggaaatcgccggagaagcgaggagatctccggaggaaggacgacggagagaaggaggactgaacattagctttgttggaggataaggatgctcgaaggagagattcgggagaggcttaacggtcattgaatcggaatcgaaagagagaatgtcgatgcggttgttgtaatctcgaggaagcttcgacggcgattctgtgaccggagatgagcggagagaagaga

SEQ ID NO: 906 - DNA, 655 bp, Arabidopsis thaliana
gtggctcccgcagaactaagaagaacagagtaagtcgagttcaacggtttcagaccacatctcaccatatctgacagtaaggatgcagcttctgcaaaaagttcgttttggacaagacctgagatcataaccgtccatgtaaccccgtctttgtcgtgaagtttctgaaacagaccaaaggccctggatacatcacccgcttctagatatccatcgatcatcgatgtccaagatactttgtcatgtaagctcttgactctctcgaacagagtttcagctcgctccaaatccccgttctttagataacggttgataataatgttacaagactgcaaatcaaagctttcattaagcagagattgagctgaagcaatcaagccagatgatgcatacatatgaacaagacttttcgccaaccttccatcgtgatccacagtttcccaaccgttagatataacttgtgcgtgcaattgctcaccaagacgacgaaattcaacaccaagaccaccacaagcataagcaagagaaatgagagtctcccatttggtgatactgcatcaacatccttcttcatttcaagaaaaagcatcaacgcttctctatacaactcattccaagcaaacccactaatcatagcggtccaagaaacgatatt

SEQ ID NO: 907 - DNA, 577 bp, Arabidopsis thaliana
atttaatataaaaagagagcaaactcttgttgctatttcatcgcatcaactccatctttttccttcgttattgttaccttttttttgactgacaaaattgaaggtaatgcaattaattcgaaatgttgcaggatgggaccagggtttattgggagcttgtgtaggtgagaagagaaagttgaaaatcccatccaagcttggttatggtgataacggctcaccaccaaaaatcccgggtatgttatgttatgaacctggctagtagattgtttatttccgtccttttatctaatgatgaggctagagagaacattgatactgaattgatcagtcaaataaaaattgctgtacacgtgaaatgacaaaccaataacgcatttgtaccgtaagtgcatcagaaccaagaatagggagatagatactgagagttgttgtgtcgtgtacattttcgaccctagctgcatttgtgaagaatgtgacattacagttgagactagatgtccatgaaatgagtgtaagtggatggcgaattgcaggtggggcgacactgatattcgacaccgagcttgttgctgtg

SEQ ID NO: 908 - DNA, 320 bp, Arabidopsis thaliana
tggatagtgatctcgacaaatgggtagagacagcgagtgtgaagaagatgatgaaggagagaggtgtagagaaagtaccaggttggagctggattgagattagacatcaggtgaaggcctggaatgctgaagatcgatcaaatcctcgttgtcaagatatatgtatggtgagtagagacttggctccaggtcatgcagtggcttgatatctgataatgacgttgatacagattcacttcatgcttaggagaaaatttagtttaggccaaaacaaaacttgtgagtataactttatttagaaattacaaggttgtgtgggt

SEQ ID NO: 909 - DNA, 536 bp, Arabidopsis thaliana
ctcgattgttcttccgcactctcgattttggcgaaaatggtgaagaaaggtggaaaaatgatgaatctcaatgttacacctgacgatggtggttctgttgctcgatctactcgtaactcgatgattgttgaagatcctgaagttgcgagactcaacaacagctcaatcggtgattcgaagcttctgaggtccatggatcgatgttgaagaaaactgatttttttgacaatccattggttctccattcatcagatcatccaggtttatcgattgtatctcacattcttgatggaactaattacaacagttggtcgactgcgatgaaaattagcttagatgcaaagaacaagctaggcttagttgatggatcgttgtttagaccttctgaagatgatttgagtttccatgtgtggagtagatgaaatcgtatggtgaaatcgtggattcttaatgtcgtgaacaagaagatatatgatagcatattgtatatttaggatgctatggaaatgtgggatgatctatcactacgttcaagg

SEQ ID NO: 910 - DNA, 759 bp, Arabidopsis thaliana
tggtcacttcgtgtacaaacgtaaacattaaggtttaattagtgagatggttaatgataactaatagagtgtgtatatagatagtccggtttagccggttaacttactatgtaattggtttattcggtttagagtagagtatataaacttcatacatgtacattctgttatttgagaaagatagaaaacgattcacaaatctctttgattcatgttctctatcatggtatcagagcattttttgcgtttttccagttgatttcatcttcaatcttcaattcttgctcagtttcttcgattattcactcctcttggtgtcgattgttcttccgcgcattcgattttggtgaaaatggtgaagaaaggtgggaaaatgaagaatctcaatgttactcctgacgatggtggttctgttgctagatctactcgaaactcgatgatcgctgaagatcttgaagttgcgagactcaacaacaactcaatcgaagattcgaagcttctgaggtccgtggatcgatgttgaagaacactgattcgttcgacaatccattggttctccattcatcggatcatccaggtttaacaattgtatctcatattcttgatggaactaattacaacagttggtcgattgcgatgaagattagcttagatgcaaagaacaagctaggtttagttgatggatcgttattgagaccttctgaggatgatttgagttccgcatatggagtagatgcaatagtatggtgaaatcgtgga

SEQ ID NO: 911 - DNA, 633 bp, Arabidopsis thaliana
tgataaattttagtacatattcatagctatgggagctagcattgcaggctatagagtaatgaggaaagttattattgtggatgcaaaacatttgaagaacggatatggtggtgtgatagtatttgcctcggctcaagaccctaatctttaccattacatcatagcgtttgaagtactcagcggtgagaatgatgctagttgggattggttttttgagaagctaaaaacggttgtacccgatacttctgaattggttttcatgagcgacataaatgcaagcctcataaagggcatacagaacgtgtataccgtagctcatcacgggtaatgtatttggcatttgtcccaaaatgtgaaagggcatgctactaacactaacaaagacgtactcgcatggaagttcatggagttaagtcagatttacaccgtggctaagttcaattgggagtatagattgtttaagttgagatatccttcggcgaccaagtatttcagggatacaaccgtgaaagagaaataggcaatgtgttgttccccagagaaagatcaacttagatacaagcaattgtgtggaatttttgaacaattccggatggtcgggtgtggcggtttctgttatgatgtgctatagac

SEQ ID NO: 912 - DNA, 368 bp, Arabidopsis thaliana
taccttgtagaatataggaatcgcttcatcggcggattcattattcttcagtaaatcattaaaatcacattttgactctgagaagatcgcgagtgagatctttgagtcctggattcttttaaacagattctttagacctttgcctcttacctcttcctcgtctatgaagacatttatatgtgcgtatggtaagaccgggtcgagaaaattgatcagaccgttgctcacatcttcttcttgcgactttatggacactaaaggccgtgatggtatcaatcctacatgtgaagacgacgaagaaaaggtagaagccgccatgatgagaaaggttttttcttttagagaaagtttttaagcgaattttgcca

SEQ ID NO: 913 - DNA, 515 bp, Arabidopsis thaliana
tgatctcaaaattgttgttctgaactggtggaggcactatcccttgtctttggtgatgaatccttggggcatcaccagcaccaatgtttcttggttgatcaatattaggtgggtcttgaacgtcaactggtttgttctgttgatccatagcagctggtctttgctgatcacaggctgaatggtagtaggtttgcagccacgagctattctatctattaactcacgagctattggtttcttgtaactcacgagctattctatctattctgtctctgaatggtagtaggtttgcagaacctttggatcgagtttgcatgcacaaagattagtacctataccataaaaacaagtagacgaaaagatgagttagtaacttgataaatggaaaagaacttgatcttaaaagtttctgatatcttgaatgtaacaatgcaaaaaggaattggcaacggcgccaaattgataagtaggttttttaggcctacttatttatgcggaatgtgtgagaggttcag

SEQ ID NO: 914 - DNA, 530 bp, Arabidopsis thaliana
tgaaaccatgaaagttaccttgagaaaatggcaattctcaagtacaccaggagtgccaaatgtgttaacttgagctcccactgctacgatcaagtagtcatatccaagggaaaattcttggcttgcttcaggatcatccttgaaaactggtcgacagtgaaccttctgattaacatgatcaatcttaaaacaatctgcttcccacaattcaatttccccatttttctgataacaacaacaacagatactatttaagtaagaacttagcagatggtgatgatgcctgcatacagtttgaaagagaggcctttgttaccttcttggttatattacggacagactccacaatgcttctagcttcaacagttccacaagtgacgctaggtaacaatggcgtaaaggcaaagtagttctggggagacacaacctgaacatcgtaggaagttatgtcgagatctttaaggaaacttataccagcccaaccagtcccaagcacaactactttcttcttcttatgctcctcctttttg

SEQ ID NO: 915 - DNA, 722 bp, Arabidopsis thaliana
ccctctcatcttcagctttttccctggcttcctcaggtgattttggcatttttattgtcacctttggaggcacctttggaggcaccgggggaggagcctttgtagtagcctttcttcctctgttatttttggcggctggctcttttacgattagctcatttaaggttttctccttgtagctttcttctttggtgatgtcttcgttttggaaattctcctcgctgtcgtcgtagagcgtaaacggcgggaaccaggagacttctcaatgaaatcaatatcagcattgtttacatcagtggtcttagcaaattctccatcaagattcctattaaccccaacctcagcaatatcaccatccttctctaccaccgaaactaaaacttctttcgactacataaacgtaaaaaaaactcagacgttaaataacgaaaactcaggcctatgtataaatataactcatccgtaactaaataaaagttataactcaaccgtataatatgaagataactcagccataactaaataaaagttataactcagacgaaagccgtaactagataataagtaataactcaacaattagcttaccggagtaggactagtaacaaattggttatttgtaggtattagtggaccttttggggtttagggaggccttgatcctcttgggtttaatgctaagtcagctatgccagagtttaatgctaagtaagttatgccag

SEQ ID NO: 916 - DNA, 531 bp, Arabidopsis thaliana
caagagcttgagtgaagctcataggaacaacagtaaactacaaaagtggtgcaagaagcaggagaagctgctcgccaagtgtttcaagactatcaagttattgaaagataagctgagttgttcctcctccactactgctattccatagggtcagcctcctctagagatgccatcgaggagatttgatgagcctgagcacaggcctgagcttagtgagcagagggtctcacatgtccaggctaggcattcgtcattcgagtcccgggagcacaagagaaggaggaaggctacactcactcgatctagcaacagatcacgcataattcactcgaggagatcactcgaccgtggtactggccgcagcagaagatgttgaggtcgagtatcctcagagcggtgctggccgccatagagttgataaggtcgagtaccacctgctggagctgatacggaacaaggaggttcgtctatggcctgggagcatcacaggcagccattaacgaccaattttgttcattctttgactgaggt

SEQ ID NO: 917 - DNA, 902 bp, Arabidopsis thaliana
cgcaatcgccctcttttttaatgaagaagcgggctagtccccgaaaatgcccgttaatcaagcaagttggggacaaaatcgtagttcagattcaagtcggttcagtgagggcgaccacgaaagtataaatgctataagcatagaaaaacttctcgtaatgtatttaaccataaaatcgattatgctcctgcggaagtatctactcgttacggaatctcaggtgtcaaagtgtggatttcatatagtcaaaaaaaagggagacgtgctatatccgaaacgtacgaaatatagtaaatatcgtaaaggcagatgtagtaggggttgcaaaccggatggtacaaaactgggttttggaagatatggcactaaaagttgtttgggtgtggtatattactttcttgttttcatagccccgaagttagggcgagttatcttattattgagactctcgttatgtcttcttgggtttctggaaacccccactttatttgtcgttccacaggtagacctgcctgccgatacggagggtaacgagattgctctcaatccctccgtatcgtcgttgtacaacgaaatagagagttccgactctttacgagcacggaatcgcctattgtcggagtcttgggaacgggtcgaggggacggaacgggccctccagaacgagggggatccaggccggcgtcgggaattaaccgcgcgcctggatcaggaaatacgagccctccaacgacaaatccatctcggtcgaagagctgattccattcgggatcggcaaatcgccgagtggaggggaaggtttaatacggaattagcagggatagaggaggaaagcgcacgccgtgcgttccttaattggtgtctccgtgtgctcatccatgcacacgaggaccaacctcccc

SEQ ID NO: 918 - DNA, 562 bp, Arabidopsis thaliana
caatttccttaagcattacatgcgtttctctgccttctttgtcttaggtaccaatttttgtttcctcattcacttcttcttcttcttcttcttcttcttcttcttcttcttagggtttactcgaattcattgttgattctttatctcaggtacgatgggaggtgcaattttcctatcgataatccagcatttctcaattcctgttgattccatcacctgcttcatattgcttttcaatttcacgatcttggggactttgtctgtgtttgctggtgggatacaattgtgcttagacagtgttatatggttgttatggggatagttgttgcagcttggttcactaagttacctgagtggactacatggtttatcttggtggctttagctttgtatgacttggttgctgttttggcacctggtgggccacttaagttgttggtagagctggcttcgagccgcgatgaggaacttcctgctatggtttatgaagctaggccgactgtttcatcaggcaaccaaaggagaaaccgtggctcgagtttaagggctttggttggtggtg

SEQ ID NO: 919 - DNA, 1001 bp, Arabidopsis thaliana
atacccgagtagcgtcaatgcagggtgagaagaatgttggcgattcgaatcgatgaatgctcgaatctgtagcggtgaaagtcgccaaccatgtcaaactccaagaactcacatcagcgcaagtgatccaagtccatcattctcggtgctaaccctggctccttgagcggtactccacaagcttccaaaattggcatcacaacgccacccacgcatagtgctgcctctcaccttcttcttgccgtttatcaacgcccacttcctgtatccacacaggtggatcaacagaggcattactggtggtgcgttgttgagatcgcctctcaagacattctttccctttgtacggcggagaatccctgtaagcgcgaaatctatcatctccatgtccgtgttagacacggtgcctgtggactccctcgagtagaaaacgttggcaaccgagcactgaaagtagcggatcacaggactccggatttggttgcttttggaccgtgccgagtttagcgataattgttcccaatagtagcccacaaatccttaagctcttccttgtcaaacctgggtttggtccctttccactagtgaaaccaaacagttcttccaactacttgatcgaaagctgataccgctgttcatccactgagaacgtcaagaaccctaaccccatggtatccagctcaaagtccgtgagaccctcatacatctccacttgcagtaaaggaactcgattgtctcctccttataggcagcataagggtaagacatgagtgtctccagatgacacttctcgaattgatgctgcacgtcctccagtaaccccagctcgactaaagtctcatagtagggatacctcgttccccagaagtcgttcatctcaaagaatctgacatactcctccactgtaacctcgtcgggtttgttcagcagcttcgtctccttgtgccatgactctggctcatactcagtttcgatatcctcatcaatcagctcatatctac

SEQ ID NO: 920 - DNA, 1685 bp, Arabidopsis thaliana
taacagtaatctcctcgggcatgtcccagtatccgcaagctctagagcttcaggtgcaaatgtaggccttctctttttgttagtgtagtatttgatcacctcctgacagtatccctttgggactcgcaccttcttcattggaactttgtatactgtgtgaaaccatgttcatatctgaatcagctggagaaagctctagtcgcaatttattagagaaattttgatgaaaaatgtttccagactcgcgtctcgagctaccactactattatccagatgagaatcttctgaaggtggctttgattgctcaacttcagggagcttcgctttttgttgtaagctgaaatatccaactgctcgactttcttaccaaaattcttaacaaaagtaggattccgaatcgcagtttccaaaaaattcagcagcttcttctgcctattctccatatcatcaacatgctcagtcatttcttcaaactgatgctttgctacaaccttctgttgtatgaactttaaaagcttagcttcaattgcagctttctcacgtgaaagcttgtccatttgctcttgcaacactgctctttcttgatcagtcgacgaagcaggtggatgactgtggctgtgtataggtctccttctatgtatctccttgagaagatgcttctgatccttaataaaatcatcattcaaaaactcccacctctctggatcaatcttcctaaacccctataaccataatcccaacaacattcacaccgttaatagaaacctaaagcagagaacgaggaaaaacaacacagtctctaagttcacccatttccacaattcagtccataatcacacagagactacaatttttagctacatttcatcttctcgttgaatcaatcaatccacaatccataaactcatttccataattcagtctataaatcacacagagacctagatgcgttctaacatttccaaaaccccttttacattggaaacttgatcaaaattaggtcaattcaaaacttggaatatagaagagtttggatagaatctgactcacataggtattgagctgacgaatgaaggaagagaagttattgtgtttgaagtaggttggaagaaggaggcgtgaaaattcggcatgattccaaacgatgaagctgttgttgttagcgctccacgatacgatctggtccgttgatgaatcgtcgaccatctcgtaggttttcaccaagaaaggcgctggtcctccggctccttctccgccgctaacggaggcggaggagttacctaatgcgccgttcattgttgaatctaatcagaaactggtacaagagatggtgatgctgggaaagagagagatcctttgccgtaaataaatgaataactttctattcatttgttatactaataatatctaagactgcaaattaaacccaaaaaatacctaaattgtttagctaaaactgcaaatggccaagtaaaaatgataaatttcataaaaatgactcttttgagtgttacttatagtcttatagaccatagtattcaacaaatattgttacgaatttgtttgagtataaatactgtgatactaatttctatccactggtcttttgtttggatacgcacaattgaaagatatcagcaaatagagctagtgaagttaatagagtgaatcttttgagtggagt

SEQ ID NO: 921 - DNA, 457 bp, Arabidopsis thaliana columbia
gaaacaaaaccgcaacagctaacacggtcgcctctctcacaagtcaactaaggaaccacctctgttccattatatgatattttgtttttaaaaccctcaaaatcagtgtctgtgtctgtatcatcactatgaatctatgtatacttttgtgaaagtgtgggatcaatcaatgaagagtcagatgcttctgacacatttgaaatattcatcattgtaatctatgatttcttattcgagtagttgagattctcttacagtaatcgaagttctcaaagacggtttgttctactattacataatgcgaatcttggaccctttttggttatgatggtatgtgatatgtgcatgcatataccacttgatcaccttctatatatgactcaaccatgaagatgctttaaaatcccaacaatgagcattttaagtgggagatccagtagaattttgtgaaatcaga

SEQ ID NO: 922 - DNA, 583 bp, Arabidopsis thaliana columbia
caatctggatgttaagaacccaaaccatttccaagagttagaagtgaaggcactgagatggttaatggtttgttctaagggaaggcagaatcaaagatttgttacctctagaatctgaagttttgcctcgtggtcgtttggtaaacaccggatttcttcagctagtcttgctgactctccaacgctttcagggcacaagaagtcaagtgccacctgaatattcgactgagaattgtatacatgggaaaaaagtttagtttagctcaagggaaaagaaacttaatggaataatgttgcaacgaaataaatttacctgaagattagtgatttggaacggacatccagccggaatgaagatagcctcaccacgatgttgctcaaatgtccatggctcaactcctgaaacaatagcaagagtcatccctcaggtttccaagcgattaagtgtttggaaatagaatagggaatagaatgtttgttttcctaccaaactcgtctcttagttgtctcttgtggtgttcatttaagaacaatccttcatacaacgggcgtgacacctgaaaccagagtaaacaaactagga

SEQ ID NO: 923 - DNA, 640 bp, Arabidopsis thaliana columbia
cactaaccgataaaagattgtcattcaaagtctgcagatcaacagctactagctcaaacagagtcaccaacgaaataggctgttttgactcttgtttcaaatcaaaactcactgtttgagattgaccaatacctacaattctcatgaggcaataagcataaactccagtgattcttaaaaatctgtaactattgtagaacaaggttcacgaacacttaaaaactaaatcaaatatctaatcacataaaacaaaaagtttaagactttaagtgagaatcatacataccattgagcaaagagatctcctttgatttcgttggcaccgctttgcaactccccaccagaccgccatagcttctattgctgctagtaaacttacaaacagtcttcgctaatgaaggaaactgacgacggccacaaccacatgccatcatcatcgtacctaaatctatattccgacatgacgtcatcattctcacaaaacccagaatccttttgggcaactagggattatgaagctctatagaaagtaactggaactatgtaaagattcaagctttaaagcaaacgaaaaagctgactccttttcttcacgggaaattgggtgtatggaaaattcaacaaaaaaaggtcaaaaatc

SEQ ID NO: 924 - DNA, 523 bp, Arabidopsis thaliana
ctataattcagccgaaacaacttagattgtaacatttttatattaggacaataacgggaattacagatccataggatatggtacacaagcattgccggaatcgcagcgtacatgaatgcagctgcagttgtagcccttgctttgaatttgtctgacatgtaaccacaaagaatccctcctacaatgtctccaacatctaatagtgtggagagattccctgctgttttcacagacacgtactctccaccaatagctgcatctaagagcaagtaagaacatggtctaaatctggtgtcactagcagacaatgagaatcaaaacttacctgtttggctcaagtaaaacggtaaccagtacaagaacgtgtacgcgaccagcttcgagaaaaagagacataacgcaaacggtataacaccagggatcatacaagcttgcaaaagtccaacacttcttttattctcataccctgaacctgaccctgatgatcctccccatccccttcaacatctgtccctaaatcttc

SEQ ID NO: 925 - DNA, 472 bp, Arabidopsis thaliana columbia
cgtccgtctcaagcgcatcggcccgtgagaacagaaacgggccagagcttttgaggtcgtagcaaggtataagcaccggtttaagcgtgtcctttaaggttagctccgagaaagactctttcatcactttctttaacttagccgtcccggaacaacaacccgacccggttctcaagacccgtttcaagattcctgctcctccgtaaagacccttggcgtttctcgttaagaactgccacgtgtcatctgctttgaagatggggcggttaccgtctcttgacccgaacaacatggctgtgtaaatcccacctataccggacccggcggctacgtcaaagtaatcggcgattcgggcattcgggtcaccgatttagatttcagagcgtgttctagataagccaaagccttaccgggtaagatcctctcattccacctccatcgatactcagaatacagattttacctctctggt

SEQ ID NO: 926 - DNA, 490 bp, Arabidopsis thaliana columbia
gagaaaactctgaagataattcccaatgtagtcatactcaaagcagagaggttcgtcgctgagaactgagccaaacttcatatggtctgcattgtcatgttcaccgactttgtcctgatgaccgaataaactgtttgacatatcattaggtaaagaaatctctttgctttggccaacatgatcaccatcattataacaatgtgagaaagtgttagtgagattggtagaagactcttgtttttgagaaaaagaagaagagataggatcagcaacgaaaatggttgttttcaaaaggctgatcttgaagaagacagagactagaagatccccaagtcatatgaggctccaaagactgttgtggatgtctttctaaagaggtgttttcagtgtagaagaagtttgttgtagctagagagccgctgatggatcgagcagcaacgtcatatgcaaaagcagcttcttcggctgtatcaaacgttccaagccaatg

SEQ ID NO: 927 - DNA, 548 bp, Arabidopsis thaliana
ttctactaaaggtcttctttcaatcctacaagcctgcatacgttgtatgacaatggtataccgtatcaagtatacactaagaggaagaagcacatgagtggagaagagaaagcacgtgagttggagaagagaagggaagcttagtcggtttcaataatgtagaacaattacatataaatactcagtattaatatgtaaatagattcttttatgctttgttgttgttcatgaggtatgtgtcttttggattgagaatcatgtacttagtgatgtctaagtagttcgcaagtggattaatgggaaatataaaacaaggaattcaacagtcaaacatgaacataatattagattaattgtttttcaagatattagtccctaaactcgacaaaacggtatttatcgaacaaattaattcaaaaataaaaataattcaattcctttgatacatgtttaaatttgcatgtgatgatctgacttttgatatacaaattcatttactctgtacttgcatataaatatagaacacttgccaatcattactattttag

SEQ ID NO: 928 - DNA, 591 bp, Arabidopsis thaliana
taagttattcactggtcagtcatctaatccctctaaactgcatttgaatgtacattggatcaaaacttcttctcaccattcaaatcttgaagcattattctcggtgctgttgtatatctataagaccaaaactctagtcatatgcatcaaagcttgaaatattttttcgttactgttgttgtcacaggatcagcttggatggctctatcacgcccgtttgtagagtattgcatatggggatgggacaatttaccacgaactctcctaatgtattacaccaacttcgtttcatcgcccgaaggttacttccagaccgtgatttgcaacgtgcctgagtttgcaaaaactgcagtaaaccatgacctacactacatttcctgggacaatccgcgcagcagcacccacacgtgttgtcactcaacgacacaatgccgatgatatggagcggtgctgcgtttgctaggaaattcagaagagatgatgaagtacttaataagatcgataaggaattacttaaacggaggaatgataaagatagttttaccctggtggatggtcagtgggaaacaaaatgcccagggtcggtatgtg

SEQ ID NO: 929 - DNA, 545 bp, Arabidopsis thaliana columbia
  unsure (1)..(545): unsure at all n locations
tgatcattcggtggaggaattcaagtcctctgtgagattcccacacagattttttgtcttgctgcccagtccagtttcagggggattttacctggtgatggatgtaaaaacaacgacaaatgatatcagtatcatgtaccacatttaaatttagactcgcaacgtgaagaaaatctggatgattttaaatatccggatagcgcgagagcaagggggttattttccgtgtactcgtgcacgagcagcaattggttcttctcggcgcggcgtccgtaaagcttggcgaggttaggatgattcggacctggtgtcgtgcctgtctcgttcgcaagctcgcggtttccttggcttgacttgacttggaaggaagctgcttgactgctgtggtggttccttctggtggctctccctgcgttgagtttctcgtgtcggnatcggccttgttttctgcgtttgagnagggcttggcgtctttcngcgttgctttgggtgcgggtccggggcctccttctccgggtttgttggtttgagcccgttgtttgttg

SEQ ID NO: 930 - DNA, 499 bp, Arabidopsis thaliana
  unsure (1)..(499): unsure at all n locations
nnnnnnnnnnnnnnnnnnnnnnnctaaagagttggccctgaccgaagcggccaattttatttttgtcgttatttacaccgcggtttcgcattcattgcctgatgcgacgtttacacccgtccgtagcgatccgcgaaacgcaccacatcatcctcttcgagataagagccggagcgcacttcaattaaatcgagcggaattttccccgggttttccaggcaatgcgtcgcccccagcggaatataaatggactcgttttcaccaagcagtttgatatcaccatcaatggtgacttttgccgttcccgcgacaaccacccagtgttccgcgcggtgatggtgcatctgtaccgacaagccctcgcctcggtttcacggtgatgcgtttcacctggtagcggtcgccgcgtcgatagagtcatatttgcccacggacgatacacttcgcgatgcaccgatgctcatggcgaccatcggctttgatctgctcgaccactttt

SEQ ID NO: 931 - DNA, 580 bp, Arabidopsis thaliana
ctcgtttaagatatcattcaaaaccttttcatcgattattgtcacattgttcatctgcatgtatggcgcgggttatccggccgccgagctccgccaacaccatttttttttatctgctgtgcgattcaacaaacatcaaggaattagggctcaattctttttatcaaagatcttttgtgggagattgacatgattcaggcgggagagaacatgtggcattaatcggaggttacgagttggagcacgtcaacttaaatggacctaaaggtgtaaaacaggcccaatgggtcacatgttaatagttctctaacgtttttggaaatatatgaaactctacatattctttcatatacaactgatgatgacccaaatttgcatgttaagtgttaagaagagcctgaaaaacttgtatacaagaattggttttatcattgtcaatatcgttgttatgacttacaacgtacgtacaatagcaatgaatccagaggacggtgatagctaaacatgtacatcctaaacatgtatgggttgatgaagaggcattagttctaagcatgcagatccacatcacagcatttag

SEQ ID NO: 932 - DNA, 705 bp, Arabidopsis thaliana
gtaagacctattccaaagctcgtctctctgaccgtaatggtctcggtcctcacgtccactactctgggccaaagtctttccaagaaatccaaattgaattggtaagtgtttccgcaatcttcccatgtgttttagtgatgttcgttttactgtgtgatgtttagtctgttgatagtaatgaagattgtgatctgtgtttgcaagaagaaaaaatgggaagacctgtccctcttggtgaggtgttcatccagacacacactaagtcggatgggacttatgttgatcagaaggcagagaagattgctctggcgtatgagcaaaatgtgagagagaagttatctgaactagaagcggctgcttctgctgtgtctgatggctcttcacttcctcgggatctcacactagatgagtatacaaccatatttctcgaggtaagatgttctttgtctttttcagagtcttagagactttgaggatctgtcactaattatcttcctctttatttcttgcagtccacagaaagggatacaagaggcaatccttatggacttggatgtcttaaagaaactctaggcagtgcaacctgcaactccccggagactcaacctttaaagccttagaagaacggctgtaggaagctcagcggcaaattgaagagcaagctgcatataacgagaagcgagatgctgagattgctgcccgaga

SEQ ID NO: 933 - DNA, 681 bp, Arabidopsis thaliana
ttcttcagtcacacaccaaacaaacttcaaaatgaattcttatgtagctttataggaaccataccatggtggagaataaaagcctaaccagtaaaccaacatttgaaaacaaaaaccctctcttgttattagtactacctaggggtccaatattgtcatgaataagaaaatccctaaatcataagagcaaggctaaaaactcccccctcactcaaaatactcactaggaagaaatggtcatcatgttcttgcgacagatcagttatatatcactatatatgttcccttttgcagagccgttagttgctgaaagggaagaagaatcattctggtcggtatatgagctggccagtggaaaaatcattcatgcgtggatacacatagactgttttttcatccagttgattctgagtccaaattgcatgcagaaacttaaggattatttgtcaagtctcgacatgtatgaccctttataccttaataagttgttaagtacgacatgcttacactatttgtgtatattaactttcttttattatttgttagcaaaaaatcgttggaaaatggaatagacgaggttgatttctacggagttttcatgaccgaaagaaagttatggccagattcaaattatggatggttgggtgatgaagtaagttattgttatattcgatctgaggt

SEQ ID NO: 934 - DNA, 623 bp, Arabidopsis thaliana
caccacggcacactgcaatcttttcgtacgctttcagaaaccggtatcgacattatgcagccggatgttggctggtgcggtggtttaaccacgctggtggaaattgccgcaatcgccaaatccagggggcaactggtggtgccgcacggttcgtctgtttactctcaccatgcggtgatcaccttcaccaatacgccattcagcgaattcctgatgaccagcccggattgttcaacgatgcgtccgcagtttgacccgattctgctcaatgagccggttccggtgaatggtcgtattcataaatcagtgcttgataaacccggttttggcgtcgaactcaatcgtgactgcaatttgaaacgcccctacagccactaatcactccgggcgttgctgtgacaacggtaacgcccacatattctaaggagctttttatgagcaccgctttgcttgacgccgtggtgaagaaaaaccgtgtgcgtttaattccgtttatgttggcgctgtatgtgctggcgtttctcgaccgttcgaatatcggttttgccaaacagacctaccagattgataccgggttgagtaatgaagcttatgccctgggagcaggcattttctttgtggta

SEQ ID NO: 935 - DNA, 622 bp, Arabidopsis thaliana
ctaaagccatgtgaccgcatttcttcactgacgccagctgatcttcgaagtgaactgccgctgcaccggcttcaatcatcgctttcatcagttcaaaggcattcaggacaccgccaaaaccggcttccgcatcggcaacgatcggcaggaagtaatcgacatagcgcggatcgcccggctcaatgcccgcggaccattggatctgatcggcacgacggaaggtgttgttgatccgctccaccacagctggcaccgagtttgccggatagagcgactgatccggatacatgctggccgccaggttagcgtccgccgctacctgccatcccgacagatagactgcttcaatacccgctttcgcctgttgcagcgcctgaccgccagtcagtgcgccgaggctgttgatgtagccttttttcgactcaccgtgcagcagacgccacattttcgctgcgcccagttgcgccacggtgcattcaggattgactgaaccgcgtaatttcacacatcttccgcactgtatgggcgagtaatgccttccaacgcggttgagtcactctttctgtaattctcaatttgttgtgtacgggttttcatgtcagatgtccatagttatgtggtg

SEQ ID NO: 936 - DNA, 682 bp, Arabidopsis thaliana
  unsure (1)..(682): unsure at all n locations
cctgtggaagagatgtgctctaaagccaggccgctgacgcactgttggcgaaaatcctcggagaacggattcagtgagcacatctggcgagtcaccataaagggaataaattcgacaatgccgcgatagttataaccgctatctttgattttattggcaaacgcggtgatatctgtggcttgttgcggggtaagatccgggactcgtaagacgaaaagcttatcactatgcttcatcgcttttttaagggaaacgatctggacgccagcgcctgtcgcttctgcaacgttattatcacccagaaagattgcaacgtgactcacagaggaagtgctgaagacgcggattccaaatgaggttaccccaaggcttgaggagaacagcaaatcgccgggtttgagatcaggtgccgttatttcttttattgattgttcggtgaaagagctttgatgctggaatttgacagcccatgtttttgcctcggcatctactgctgtggctgatgggtctggctggctgatatcaacggtacaagccgaaagtaaaagaaagctggggagaaacaggcggcagtacgcgtttggtttatcgattttatacaatccatgtagaaaaagggccctgaaattcaggaccctttctggcatcagcctttaatctgtntcaccagatattcgacgat

SEQ ID NO: 937 - DNA, 571 bp, Arabidopsis thaliana
ctcaaaagcaaaaaccacagctaacagctcctttccgtggttgcatatcttgtttgagctacgtccattgttctactggcgtagtagatgacgtgaagtttgccatcaatcctttggcctagaactgctccaactgcataatcggatgcatcacacataatctaaaatggatagtcctagttgggtgcttgaacaccaatgcctcttttattgaatggaaagccttatgacaatcttcatcgaaattgaacttagttttcttgcacagcagtctattgaggggtcgagaaatctttgaaaaaacttttatgaatctcatgtagaacccttcgtggcctaggaagcttctgatatccttaactatcttagggggttgcagctgaatcatgacatcgatttttgctttatcaacctcaattcctttaccagagatcttgtgccccagcacaatttcttcctgaaccatgaagtgacacttctcccagttgagtaccaaattggtttctcacacctttctagaaccctgtacaaatttacaaacatgagtagaaagaggatcatagactgagaa

SEQ ID NO: 938 - DNA, 949 bp, Arabidopsis thaliana
tcttctttataaataactcagaactctctgcctcaaagacacacaaaaaaaaaagtgaatcaagaaagaaaaaaatggaacaagaagatttctatttccctgacaccgatcttgatctcagcttcacatccaccactaccgaccgtacattcgcctcctcgagcgctcgcacaagtctaacattaagcttcaacgacagactctctacttcctctgcagtcacaacctcatccacctcctcctcctccgtcaaccaccgtcgtcatgatcctcactggtcagcaatcaaatcagcaaaacttctctcctccgacggaaacatccacctccgccacctgaaacttatacgccacctcggcaccggaaacctaggccgagtgttcctctgtaacctccgtgactcttccgcaagattcgctttaaaggtcatcgaccgtaactgtctcacgacggagaagaagctctctcaggtcgagacggaggcagagatcctctccttgctggaccacccttttcttcctacgctctatgctcgtatcgacgagtctcactacacgtgtctcctcattgattatgctcccaatggagacttacattccttgttacgcaagcaacctggtaaccgtttaccgattcagccggttagattctttgccgccgaagttctcgttgcattagagtaccttcacgcaatgggaatcgtataccgcgatcttaaacctgaaaacgttttgcttcgtgaagacggacacgtcatgttgtcggattttgatctttgtttcaaatccgacgttgtccctacttttaaatctcgtcgctaccggagatcttcttcatctccgtcgcttcgtcgtagaagaagcggttgcttctccgttgctgcggagaaaaagtacgagagagaggagattgtttcagagtttgcgcagagcctgtaacggcgttttca

SEQ ID NO: 939 - DNA, 286 bp, Arabidopsis thaliana
catcagatagtggaaccgtatggtcccggttcatcttcatttgagctgcaggaattttccattcgctagcattgaaatcgatctcatcccatcgagcctcagcagcttcggcagggcgggtgatggttagaagttgccacatgaacaggcatcttgtggacatgctgatacttgccgtacgcatggtgtgcattagctgcggaagttgatccggccggatgcttggcatgtttatcttttgcggtttctcgaaagctttgccgatatttacactaggaacagcatc

SEQ ID NO: 940 - DNA, 596 bp, Arabidopsis thaliana columbia
ttttaaaagacgattgaattctcactggactaggaacatgttttacatatttacatattgttaggggtgtcaaaatgggtcaaaattcatgagtcaactcaactcaactcaacccatgaaccctaatgagttgaaaattttgactcaaatgagttgatgggtcaaatgagttgatgagtcaattggtttgatgagtaaaatgagttgggttgtattggttaatggtttcaatggtttacccaattaacccatcaaattttgtaaaattaaataaaaccaactaaaatctctaaaccaatgccaatttaagtttaaccaacacatctaaaccaatttaataaaattaatatttttccaaatttcttaaatatacaagcgatgaaattgagaaaaagtaaactcgtaattttttcaccaaaaaacataaatccgtgattttcccgctaaaaacgtaaatccatgattttctcgcaaaaaacaaaaacccgagattttcccgtcaaaaacgtaaacccgagattttcccgccaaaaacgaaaacccgtaactttaccgccaaaatggtaaatcccgtaatttcccgccaaaaatgtaac

SEQ ID NO: 941 - DNA, 552 bp, Arabidopsis thaliana columbia
  unsure (1)..(552): unsure at all n locations
gaatcaaactangggatgtctctcgactttaaacatgccgctgtggccagtcccgacgagcccggaaccgacaatgattggtccgggaatcattaagcacctagtttcctccacgtacggatcatggattctcttgcctaacgtttctgtaacaaactccatgaaagagagaaagagaagaaaaaagagagaaatagatctaaaaatatgcaagaagtgaagtaggggactgatatcagattaggtttttaaacccgtgtggtaaacaaagattatactctcttttgtgactcgtggataattatgtcccgagaatagaggtgaaaagagagaatgagtttcattgatcttatctacaaaaagaactaagaagaaaataaaccaaatagataagaagaaagatcggatattccctataaaccagggtaaatctaatgatgaaatattattttttcaaactcaaaagatttttgtagtatttgttataagaaaatctctcaagaattgagatttgaaacaaagatttcggattttgaagaagaggttttgcgg

SEQ ID NO: 942 - DNA, 564 bp, Arabidopsis thaliana columbia
aataatggacgaagaccactggtaccgttgccgaacaaacaccttaaagttgtggttggtgaaccaattgagtttgatgttccaatgatggttgagactgctgtcttggactcccgccatgtaacccctcctcttcaagaagtgaaatggcctgtcctcacttctgctggccaagtgctagacgaaactgctcagagacacctctacatagctctgtccgagaagattcaatcctccttggaaacattgagactcttagccaagcggttgtgacttccgccgggaaacttcatatcaaaatccggttcacaacttttaaagttccggtttagattcgccatggtaatcaaatattatctttattcaatttcctgaagctgagaaaaaattatataactatgaaaatttaataactcgcattttaaattattttatcgactaggatatatagcaaccgcaataatgtatgttgttgacatgttatatcttatcaatatcttatgattatagcaagatttcagtgaaaaccttaacaaaaaaaagatttcagtgaaactttttttt

SEQ ID NO: 943 - DNA, 760 bp, Arabidopsis thaliana
tcatggtccatggctacggcaatgacgtcagctggactttccagtccactcccatttttcttgctcagatgggtttcgcttgctttgctctcgacatcgaaggtcatggccgatctgacggtgtccgcgcctatgttccctccgtagatctagtcgtcgatgacatcatctctttctttaattcgattaagcaaaaccctaaatttcaaggcttacctcggtttctcttcggagaatcaatgggcggtgcgatttgtcttttgatccaattcgctgatccgttagggtttgatggagcggttttggttgctcccatgtgtaaaatctcggacaaggtgagacctaaatggccggttgatcagtttctgattatgatctcaagattcttgccgacttgggcgattgttccgacggaagatctgttggagaagtcgatcaaagttgaagagaagaaaccgattgccaagaggaatccgatgaggtacaatgagaaaccgcggttaggtacagtgatggagctacttagggttactgattacttagggaagaagctaaaagatgttagcattcccttcattattgtgcacggaagtgcagatgctgtgactgatcctgaagtgagcagagagttgtacgaacatgctaagagcaaagataagacattgaagatctatgacgggatgatgcattcgatgttgttcggtgaacccgacgacaacattgagattgttcgtaaagatattgttagctggttgaatga

SEQ ID NO: 944 - DNA, 528 bp, Arabidopsis thaliana columbia
cttatcacttccaggtggtgaaccaaaatcaggtcctagaggaagccagaaaagaaaatcacttaaaaaaggatacatagaaaataaaaacaagagttaaatagcgaggttaaggatagaaagttcttgccatgttttatcttcaatagtgccaaatccatggctgcttttgcatcctctgcgctgtcatgtccggattcagactcctgtatctctctagcaagaaacttttttgctagaattcgaagtttagttttataagatcttccatgtggatgcttgtatagtactgcagtgtcaatcaccagattatgagagatcttcaaagacaacaagtcattttccaaggagtgtccgactaatatggtctctttgaaaaccagctttaagaactcttcctgaacatagcaaacgactctaattatactagaccattacgagtcttcatttcaaacatcctaatcagtatctaataagacgttataaaggaaatagtgaaacctgaatatctttaagtgttgttgtact

SEQ ID NO: 945 - DNA, 1353 bp, Arabidopsis thaliana
caacccaattttaatcgatccaacctcacccagaaacaaatttccaaattacaggtcagattctttgcctcgacttttaatgtttctgatcttcagatatcccaatgagattgtaagcacgacttcgtataatcatcttgattcgaatttctatcaactgttcaatccagttttttttttttttctttcaaccgaattactatgtacatagcaatttgaatttgaagccattttggttgtgttgagattacaggagctacacaagagacgtatgcaaataaaagctaatgcaaagattcataagaagaaacctaaaggtatatatatatttagctctctttttttgagaattctcagttcatattcactagactaaaagctctacactgaaatgcagcgagcaagaattctcagagtaaagcgatcgaagatggcgaaactctaaaaagttgaaagaaccaacttcttcttcttcttctaccttagaagaacagaatcataacaagacagtagtcacagtaccgaagaagccacaaaaactgttttgggggtgagcttatttcgctaattttagaattctttttcatattgagaaaaccgtgctaatgccatgctttttttgttttgaaacaggctagataccagggagaggtgggaaaggaaagccaacatgtagtggtcatgaaaagatttctcgttattgataacgtcgtccattgtacaatttaagagtagcagattagagaaagactcacaaactaaatgatgaaacaaactggtttttgttctgctgatttcttttgtttaatttcaagctccagatgtaagagcaagctctatttcctccagtgatcgacctttagtctcgacgacgtttcctgcaatgtagaggaccgcaaggacgcagactccagcaaaacccaagtagacactgctgattccgaatttagtcacaacgcttaagaagtatagtccgatcacaaagtttgatatctgttagggcaaaagagaaacaaaacattagaaacagagagaagaaactctgttctgaacccataaaacctatagatatatgtatatacccagtgcatgccgagagaaagagcgacggcttttgctctgattcgggatgcaaatatctctggaagaagaagagccggtaccgggccagcaccaagtgagaatgacaggacatatctgatttaaacaaccgagcataagagtcagtcaagtcctatacagagagactataaggaagtgttaagaggagattgacttacagaacagttccaacaacggcaagggttccagaataggcagcaagagcattccatgtgaaggacaaggagagta

SEQ ID NO: 946 - DNA, 403 bp, Arabidopsis thaliana columbia
atcccctatttatgtactgggaccttaaaagtttgtacctttggcgaagagtatttgacaagaacgataccccaagaaacaaaagtccaagataggagatcgctgagaaaacacttcaaaccacacaaagtttcattatcaactcatgaatgtgaagaatgaatagagctcgaaaggtgaaccttgacagagaaatcaatgttacctaaagttaaatcctttagcagcaaagcaagtagataggaaacatgtacagccagaaccacaccaaagtgttgatttcgcaacatctctccacataatcaaatcgcttataatctctcatagtccgctctaaatcaccttgacaaacatcaatgagctgagttacacaaatccttgagcaattattagagcacgaaag

SEQ ID NO: 947 - DNA, 463 bp, Arabidopsis thaliana columbia
ccataagcaaaagctcctatcatgatgattcctacaatgtattggtggtgtgggtagtcaagatcatcatttttaaattaggggttataaagcaacattactatttatgtttatatgaatttctatattctacaaagatgcatacaaagatttaagaatagtttttattgcttaatggaagtggagagaaagtatagtagatatgattagtattatagagtagtgatattcaaaggtgaatgtggggttttgcttcttacaacttcactacctatatatacacttgttgaagaacccacaagaaatgaccctttctaaaaggttatcttggccccgaggggtaatcgttttcgataagggaattggaataggggatgagccagtcagtgccagcatgaggataggcttgatagttaaaatcatgtattggcatctcctccttttgccattcttcccatctctc

SEQ ID NO: 948 - DNA, 528 bp, Arabidopsis thaliana columbia
ctggttcatccaaagtgtctaaactctcacagagtgttgcaattatggactcatacctgtatgaaatatttgaatagcataaccaaaatcaaagaagagttttaagatgccatttcaacagtgattgagaaatgtcaacttacgtgtttggatatcttctgaagatatctttgatgacaataatggcctcctggacaacataattcactttaatcttgatcaactcgagcaaaacactgatgcaccgttcagctgctctctctagtttgatagcacatcggcctatcgcacgaacagcctttctaacaaaatcaacgtctacttctgtggcatactctttgaattccagaagaacctagagtagcaattttcaaaaatcataaagatatgcaccaataataatcaagacacacagcagatggtagagctcagtgaggatacctggtctatgtgtctgtcagaggcaagtttaatcataatctccaacttctccatcttaacataaattgggtcgttatcttgcagaag

SEQ ID NO: 949 - DNA, 524 bp, Arabidopsis thaliana columbia
gttacaagattagagaaacagatggttgtactgtatgtgtggcatctccaaaataactcaacatttaacaagctcgtctagactgcaaagacagggatgaaattttctgtacacaatatttatgtttttgatctttagattctttactagaacaccgataattgcagaacaaattgacatcatgggaaaaccagacgtggcccaacataaagatgaaacgaaagaaatgggcaaattctacttggttatccagtaaatgaatatgagaaatgtgcatacagccgcaacgagtgaaagaatgattgtatccatcgactttttcctctttatcgctgccagaatagtgttcacctgcagtggttttaaccatccaattgcagggtgagatataggataaacacaggccataaccgaacataaagaaagcaacgagcaaaagagtgtgtaaataagactaggaaagctcttcgtaccgtagtagacggctggcgacattgctaagctttgagttgatgccccaaaag

SEQ ID NO: 950 - DNA, 535 bp, Arabidopsis thaliana
tggatccccttcgatctcctcgttttctctcagaaacatttcgatttcgactctcagcttcttgaacagcctcgtcgcgttcctctgttcttcagctagctgcgaaggttgaatcttgctcatcaaggcagcaaaacccgtcgcagatgttaacaacaccgttgaagctatcttcacagcggttacagaatctacaccgtgaccgttaaccgaggctattccggccatcaaagcggcagtgagagtaatcatgttgacagaattgagcagtaaagagttccaattgttacgttgatctccgatgttcttgtgcatctcaatcctatccataacttcttcaagaaccgcattgagacgagttctttggatagaatcagaacctctcttttgtttcaacgaaagaggaagactttctacaaactcaaagctcggttctttaaccgataaagtcggtattttcggaaccgagacgtgaaatttcggtagcttcgggattgaaactgctgctttaggtcttgtactagaagaagatgcc

SEQ ID NO: 951 - DNA, 546 bp, Arabidopsis thaliana columbia
gcctatggttatgaagtaaaaaacacgaagaatcctacatcacaccttaaagtgttagctggttcttcctcgattcttgctgctgttttctgtacatactgggactttgttcatgattggggacttctgaacaaaacatctaaaaaccgatggcttcgggataaacttctcatcccacagaaaaaagtatacttcatcgcaatggtaagccgcatttaaaacatcttcgattatataatctccaaaccatagaaaaaacaactgaattcttgaaaactaaacttcagatcttgaacgttgtgttgagattcgcgtggttgcaaacgatactgaacttcgaattcgagttcttgcacaagcagacaacgcttgcggttgtggctagtcttgagattatgcgccgtgggatgtggaatttcttcaggtttacttactatacacattgttactttggtttcttattcaccgttttttctatcatgggtttttgaaagtcttctttataaaaacagggtagagaatgagcatttgaataatgttgggaag

SEQ ID NO: 952 - DNA, 569 bp, Arabidopsis thaliana columbia
ggttctgcattaacggcgtcgccgccatagaagtcgaacaatctccaacgccgccgccgttaaatctcttgctaggtgacgacgacgatccaataccggaatcttgatttagactagtcatcatcatcaccggtggaaacaactgctcctgctttgatccagatgcgaaacaatgattcatcgagtaacttccacctccgtatccgccgccgccaccatcatatatagccgtcggatcattattgtcagaaaaaatcgccgggaagtgaagaccaggaggaacatgacggaatcgatcatcatcaatcatcatatcatgacgatgatgatcattatctagatgaatatgatgaagatgatgatgatgtctagatgctgtactattgtttttcttgtagatacgacacaacacccaatcatcaagctacatagtaataaaaagaatcaaaaattagccaatcaaaacttttcttttaaaatcaagattttaagaatattataataatatacccatgagagagttttcttgttgctgaagtcgacaatatgagtaggtttattatcagtta

SEQ ID NO: 953 - DNA, 419 bp, Arabidopsis thaliana
tgttggaacggtacaagccttaataagtgaccttgtaagcccttcttcggctatgagattcgttaccctagaggttcttcgtgcctcgggccgcccccacggcctcctaaacattgcggtggggcttatcgataactcaggccaaagcatgcctcttttgtttcgaagaagatttgttgtttcactagcataacatatcttcaaaacccgtaggcgttcgacggtcaaaaagtgatacaagctcaatggtggattcaccaaggaaggtgacacaatcccgtgtgagttctactacaaactcaggatttgataaagatgagttttcttctgactctcaaatggttgtgtatgagcccatagaataacgccgaatacaatgaggcaaacaaagcaacaactcgtgtatgggacaccgatga

SEQ ID NO: 954 - DNA, 561 bp, Arabidopsis thaliana
tgcatagaaaaataaaactaacacttattttgcaaaaaaacaaaatcctaaaactacatatagaaacagagggagtaagagattcaccccatttttagattttttagattttttccttaatcttatactgtaattattattgccttcttggaatcataaacagataaagtatgaaacacgtatcctaaccgtccaaataaggtcgaattggtaaaccaagagttataagcagaaccagaaaactatgtgccctgatgtgtatatatataacaaacgaatggacaaaagataacatgacataccaaaagcaataccaaatgcaaacacaccacatgcagcaacaacaactccatcacttcgtctttgtccacggctcatgtcatggagcatggtgctggttcaaactagctgcaaagctcaagctcgatggtcaccgtgtgacagctatcgaccttggtggctccggtgtcgacacgaggcagctcatgaggtcgtttggtgtggcgtactagacctttgatgagttcatggagtcctcctgaaacgagaagtggtcttgtg

SEQ ID NO: 955 - DNA, 471 bp, Arabidopsis thaliana
gaggatgggagctggaattcgtaatcagggtggggagggcggggtggttgtggggggaggtatggagtgggggtcagatgaatgctgagtgagttgcatgtgaatggtaattaggaggaaagaaaacaaaccttctctgggaggaagaggcttttggatgggtggctttgacggctgttattggtgtgactgttaatcagaacgcttatttcaaagggattgacttgtcttcttcatccatggcttgtgccatgactaatcttattcctgccgtcaccttcattatctccatcattgttgggtatgtatcatcaacatatatgttctaagattctatattgatggattggttatttattattgatattggatgtatgtttcaggttcgagagtataaagaggagaagtatgaaaagtgttgcaaaagtaataggaactggtgtctgtgtgggaggagcgatggcaatgact

SEQ ID NO: 956 - DNA, 593 bp, Arabidopsis thaliana columbia
ttcctcgtataaacacgggtcgggggagtcagagaacgtggatgaggatagagatgttgcatcaacggttatgctacggttgatggggagattcgaagaggtatgtgtggaggaagaactcgttgacctctcaccttctgaaacacttgtagttggagtagtgtgactagtaagtaggccattacttccagtaatatcagacagaacattgtggttgattctatgaccgaatctgtttgctactctgttcaaaaaccgagctgatgatgatcctgacaactttttgttatttgaattctgatcatctttgtcgtcatgaacgctgcttttctcgggatgcgcggaatggtcagatgatttaccggctccatcgagaagggatttgtgggtcaacggatcaatacctttcttgaccagacatttcttgatgtgagtgttcaatggttcttgatctcattgtctgttcttcttggtattttacgagctatggccgaccatctaatcaacaaaacattatttattagcaaatgtgtatatttacataccaaatcgtcactagatacattactttaggaataccattttgtggatta

SEQ ID NO: 957 - DNA, 1494 bp, Arabidopsis thaliana
tgttagtataaggaaacgaagcagttccaccggagattttcaccggagcaagaagcttttcgtcatcatcatcactaagactctttttaacctctttatctaaccaaacgtagccacgcatgcgttttggtttataccagatcttgatatactctttcctctgtttccatagcttagacgacgcagcgatcccaaacaccacgtggttaagatccgtcagcttatccaccaccgtgtcttcttcttcctcctcccaattacgccgccgtgaagctaaggaggtggataaagacgagacatttgaagagacgtttgtggagagagcagagacggtggtgaaagaagtggaatcgtcacaggagcgtgaggtagagacaagcttaagcatgtagataatgtaagtgaagacaatgaaacagataagccaaaccataagttttggaccgggtcgggttaaagccacattccgggtatagatgtacttgatgagctccgatcccatatcggtttttccgacgagtctttctggtttcctttcatccaaattttgttcttttcttcaaaaaaaagatccaaaatttgtgaaaacaaaccctagttctgtttgcaatccggggagaaacaggaaacagtgtgtgtctgtgtctgtgtagctctttgattcgtaacccagaagagaacgaaccgaaaaaaatggatctttctcgctacaaaaaagaaagatcaatgagaatgagactgttgatgccagagaaatcgagggaaaattagagaaattaagggaaagacaaaagtttttttttttttttgggcttctctttgggcagagagagagatagaagacagattaaaggtgagagagaacgcaatactctcccactagaaaaactccattaaacgagaaataaaaaaataaaaataacagaaaaaaggaggaacaaatattattaaaaattaataaaacatggggttgttgtcattatttttaataattaatttctgttaaatataagtaaatagttttatctaattttcatgtttttggtgttagcattaactaatattaatatgttttgtgtttttaagaattaaaaaggtttgtgtataaaaaattaagagtgtggatgaaagtgaaagcattcgtaaaaagagacgagcggtcggatccatgaatgtgtttgggtcctactttttcctcgttctcccacgtgggccattctgaactatctacgtgtcattttctgtcctaaattcaaaagctacgaacctacgtcgtttcgtaggctcgtattctcagcgaatgaactgggcaactggctatgagtcgctgggcaactggctatgagtctcaatgacattggcttcatcatttaacattgttagattctagtcagtccacgtgtttgtgtatatttatttcaacccagatttggttctttttttggaaatgaataatgggttttagatttttttcattaaaagtttggacatttg

SEQ ID NO: 958 - DNA, 475 bp, Arabidopsis thaliana columbia
atgaaactcataacatagaaaaatcacagattggagtctacttttcgttcttgggaatgtatacgcaatggttgatatttccagccttacttgggtttatagtgcagatggttgattttgggtaagttcttaactctgttacaaggtcttaagtaaatactaatagacatgccggcacatccatcatgcgttgttttctatctctttgatcagatccttgcagtttcttgctctcccaagtttctttgtgggcacaatactctgggctgccttgtttcttcagttctggaaacgtaaaaatgcggccttgttagccaggtaggaaactcctacactgatgcataattctgcaacaattttagatttgttttctattttctgatttcttttttttgtgtcaattctctatcaatagatggcagataaattgtttagttggcccagcaaggatatagattctcggaatggaatggag

SEQ ID NO: 959 - DNA, 560 bp, Arabidopsis thaliana
aacggccgccagtgtgctctaaagagaatatcggtgatgcctttatcattcagggctttaacgatgttgctgccgataaagcccgcgccgccggtaacgatgatcataactgtaaccttcgaattatggagtcagagacaatctcagacacgaatgtctgtaatcataccatcacatccgaatcccttcagccctttacatagaggtgcaaggatgctaattgcaacaaactagtttgggttttagctagtccttcatggcggatgttggttttgcatgtgaatagtgctttagtatcaatattccgatgtatgataaataacggaagcatttgaatggataatatacagtatacattctattaatatttatgatataattctttttttatagtaatggtcttattagtaatgaaatcatccaccacaattatcactgcatattttgacattggtagaggggattggactgctaataaagggttctgtgaaaaactagctcgttcagttgatggttattttagttactttgagcgtctggccgcacttgaaaattgagat

SEQ ID NO: 960 - DNA, 880 bp, Arabidopsis thaliana
gtagcctaatttattgaaccaattcacactgctgcaggtcttgactgtaggccagaaagcgacatttgagtatcatggaactaattacattcttacggtcaatcgagcggatgttgagggtcaggatcacacgaacggcattgaaagagggttgctctctaaagacacgtatattgtgtttgaagcatcaaatgcaagtggcataaaggtctgattttgataagttttctatatctgtgtaattgaatcagttactctaagaattcctatcaaatgatgattcaatcttacatttgaaatagtatcacatttggtgctttctcttttatggaaacagatgtagattgctagcttgtattcattttaaacttgtatgttcttatgcagattgtcaaccaacgggaagctgctagcagcaatatattcaaacataaggaatttaaccttgagtcgctgggaataggtggtcttggtgcagagtttgctgatatatttagaagagcttttgcttctcgtgtatttcctcctcatgtcaccagcaggtttctggctcattcttcaagcaagtgttagactgtatttgtagatatatattccttctaagttcatctttgttgatcttgcagactgggaataaagcatgttaaagggatgcttctttttggacctcctggtactggcaaaacccttatggcacggcaaattggaaagatgcttaatggaaaggatccaaaggtatttctgattttcataatagtctatcaagaagaattatgataacttacttgcttgtagtccttaatttcatttgtatgttttttgtaagtttgttacccaggattgcacttgcatgtacctaaatatattatcacttcatgga

SEQ ID NO: 961 - DNA, 838 bp, Arabidopsis thaliana
acgcgaccatcatgattactatcaacagagacaatcatcttctccacttgttcaatctctcctgcttcaggtaatccaagcttcttcaaaaccttttgcaattccacagcggagataaaaccatctccgtcttcatcgaacacattaaaagcttcttcaagatctgattccggagacccatcacagcaacttccttctcctccaaagaaagattcgtctaaggttttgtggagtgcagcaaagtcatcgaaccggagtccggttttgtccggtttgatgaaagaatcaactgttgacttgagatcggagaaatcagcgtcgagaccgagtcttgagagtgcttgacttagttcttcgacggttatgaatccatcgttatttttgtcgaataggtcaaagactcggtggagacgaagagcgtttagacttggacttcgtagtctgaaggaagaagattgtcttgagagtttcttcttctcgttattgatctccattgttactcttcttcttagtttgttcttggtggctctgtttgatatagtcggagacttgagaatcacgaggcagagactttactctattattatataatcaaagacttggaataacgaggcggagactaaatagataatatacaatatgactaaaataaggtatgggcacaagtacgcattgttcggcaattactcgttactagactcgtatctgtctcgaaaacttaagtaccctcgtagagataaagcggataacaagtcggttaattttagtatttctaagcccaggaaacagtgtgtgtctgtgtctgtgtagctctttgattcgtacccagaagagaacg

SEQ ID NO: 962 - DNA, 915 bp, Arabidopsis thaliana
attattttttgcttgagcccaaaggtgttcttgaatgtgaagcaaagagttaatgagttctgtgttttgtaactttgtgtagtgtggcaaattggcaatagctcaggttcggaatcagatctatcaaattaacctataccatatgtctcaaatcattagtgattatgtacaatgtaaaagtcttagaattgcctaatgaatgaatacacctaaaatgtgagctcttggatccttaaagttcgacatcattccatggtcgggtcaaaggtgtctataacttctcaaaatgacacctttagcagtctaaatgtgtctcaatccttggtgatgtataaagactttgattggctaatgaataaatggaaagcactgtaactgaaactcaattgtatctttcaaaatcgtccaaaaacacatgtttatactaagcaagaaaataactacttgatctgatgtgaagcaaagctggtttcatggatccgtaaggttcgaaattattgcatagtacccggttgggtcttgaaacttctacaaaatgatgtctttagccatctcagtaagcattggtggtggagccattgatgttgcctaacacttgagtcatatccaaacgggtcttgcaatggaactggagttcatattgagctccaagaatacgataacgttttaaccaaaacagcttcttgctcaactcatgactctgagctttgatgacaagaaaccgtttcttgaacctcatctcaaactgttctctagacttcttatcgacgtgaggcgatcttagcaccgtgtacagagttcgtgtatcgggcattgcgactttacgagtgtgaggaggaagacaccaagcttgcttttccgggttacaaaagaccgaatcgctatcaaatctttgtccttttactttgatgtgct

SEQ ID NO: 963 - DNA, 567 bp, Arabidopsis thaliana
  unsure (1)..(567): unsure at all n locations
taaatattttccatttaccatatgcttcaatcaatccatcgtatgtctccgttatcggtaacagaccattctccttcatatgattcaagtagaacatagcttcctcaaacttcccatcatcagcataactatgtatgattgaattatagatttctaaagacggacttagctcatgatcatcaatcatactacganaagctcgaattgcttcactcatcgatttttcctcacataaaaaccttataatcctttcgtaattgttctcacttattcgcgaaggctcaagattcttccacgtatcagaaacctgtaattgaaagaagaaacaaaaagtcatcttcatgttctgaaattttatgaaagagatagatacagaggaggaaagtacaggaagaatctagtggagtcttgaggactgacggagaaaacgaataacggcccagaaatggtctttgctccaatctccatcctcctgaagaagccgtagaggacacgaaccggaaagactgagctgccgtgtcaatgaactgagaaaccggtggtggtggagaagagaggtgggctgtg

SEQ ID NO: 964 - DNA, 638 bp, Arabidopsis thaliana
tacaagaatattgaccatatttaatgtcaactgtcttgtagcagacccggcataacgaatttgggggtggaaggtaaggagaaaaagagagacgatgaggatgacgtgtgatctttatgacgcgtggtaaatcaacacaatattgatgtaccacataattacattggaaacaagcataacttgcttccgacgcattgaccaaaccacaagcatcacaaggaactaagagtggacgagggaaaaggacgagtgaatggtgatggccttttgggttttcaatagtaagagggggtttggtttgtgtgcacatagtatccaaacaaaagttacaaatagaacaccgatagaaaactgtcattcttggatgtgaacttggtgttggtatgtattcccacaccaagtgcagttatcaaatatgttaccccatccagacttaccaggatccgatgtgccttggtcttcataagggccttgttcgctcatattgctgccgtcgatgatattgtcatgctttccataggttaaaaagagaggatgttggaggtgaaaggatgtaatatttttctaggaatattacacattcttcgtggaaatcacatcgcagatggtgcagtggtaatggaacccccgagagaagt

SEQ ID NO: 965 - DNA, 387 bp, Arabidopsis thaliana
cgaatgtcgtttttgttgttacgctgcctcacgggttattgtctgtgcagcgagcccacaagacccgcatttttatccaaatagataaggttacgtaataggtactactcaagatatatatagtgcaaatattttccaaacagataacaaaacgatctctctccagcttcgagagtttcaggaaaagatcttagtagacctttagcgaattcgttttcacaaaaagaaacataactgatacatgaaacaacccttatgcattaaagcttctaatacaaatcatctagaaaacgctagaaaggagattagcagcggtggaaatagctgctccagtgagagcagactgaaccacttgctcatggcttgtcctctcagacgtcgatcata

SEQ ID NO: 966 - DNA, 720 bp, Arabidopsis thaliana columbia
ttgttttcagaaagttatgagattgatgacacaatgcaatgagaagagctttgagctggaggtaaaatgtctctctagaatgaaatgtcttcttctatagcgaatatggaagatttctcaagtcaatatatatatttaaatgtgttctacctatggatcagattatatcagcagataatcgtattctccaagaacaactacagacaaaggtcacttctaagtcacggactccttttattcttttattcttttttatttttcatatacagcattttcttgtggctattatctcagtcatccttacttatatacacatgctctaacaactgcagtgtaccgagaacaatgaattgcacgaaaaggtgcatcttctagagcaacgattatcgagtcagaaggccacactgtcttgttgtgatgttgtgactgaagagtatgtagatgagctgaaaaagaaagtacagtctcaggtaatttctcaaaatctcaaccaattttgtcaaatttgcgaccatgcattctcacaagtatgcctgaatcctgataaatatcttcactggttgcgaggagattgtgaaaacacatataatgatatatatgtttaatggacctctcattgtatttacatgagcgtttgatgtttcatacttcaggagattgagaacgaaaagttgaagctagagcatgtgcagagtgtggaggagaagagtggattacgag

SEQ ID NO: 967 - DNA, 961 bp, Arabidopsis thaliana
ttgttcggctgtaatttaaattatacactttcattaagcatagacattttatttggcaataaatcagcttcgtttactgcaaaaagggtggtcacaaaagttggttcggtttagaaaaattgtgttcggttcggttagtttcttgaataatttaaacccgacggattaaatgagaggttttgtggtccccacaactcgaactcagtaaaaccaagtcgacccgattcagctggatccgagattacagagaaccccgtcccgtgtttaaaccctccggcgacaaagctcagatagagaaccgctccacccttgtcgttcgctgcagccatgtacggcggaggtgggtttctctttaaacccttgaattgctttgtcgtttatcttttgagacattcctgagctgtttttttccgtggtgggttttcacagatgaagtgtcagctattgtggttgacttgggttcgcacacttgcaaggctggttacgccggtgaagatgctcccaaggccgttttcccttccgtaagtcttaattaccagcattttatgtcactaatagcttaatggtgttattgtagatttgctcaagtcccttgtatcttcagactcttagttttttttttgatgtgttcataaggttattggggcagtagatggtgtagaggcaatggatgtggatgttgattctacaaagactaattcgaactctgaggattcgaagaccgagtctgaaaaggaaaagagcaaacgcaagctctatgtaggatctcaagccatgagctaccgcagagatcatatggaggttagtttttctccttgattaatgttaaagtttataactttgttggtgaaattacagattgcattttctctcaccaggttttgtcacctataaaagatggcatcgtttctgactgggatttggtggacaatatatgggaacatgctttcaagtaaatgtg

SEQ ID NO: 968 - DNA, 521 bp, Arabidopsis thaliana columbia
tgcctattcaaacacaagcactccctatcatcatgagcggtcgagactgcatttggggttgcaaaaaccggttcaggtaaaacccttggttttgttttgccaatgctgaggcatattaaagatcagcctcccgttgaagctggtgatgggccaattggtcttgtaatggcacctactagggagcttgttcagcagattcacagcgatatcagaaagttttctaagccattgggtataagatgcgtccctgtgtatggaggatcaggagttgcccagcaaattagtgaacttaagcgaggtactgagattgttgtgtgcactcctgggagaatgattgatatcctttgcacaagcagtgggaaaatcactaatctgcgaagagtcacatttttggtaatggatgaagctgatcgtatgtttgacatgggttttgagcctcaaattactcgtattattcagaacattcgaccggaacgccaaactgtgcttttttctgccacttttccacgccaagttgaaac

SEQ ID NO: 969 - DNA, 375 bp, Arabidopsis thaliana columbia
tcgtagattttggtaggtttggcaaatctctagaccgaccaccatattccgacatacattttatggaggaatcatcttctccgactccttcagcagattcgaatcccccgccggagttgaactcagtcatctttcaaatcacataacattaaccaaatcaattcgacattttctgaaaacgttttaggtcaaatttttaatatatatgacctcgtagatttgagtcaagtattaatctagagctcacatccatccaaatatgcgtaggataataaaacaatctttcatttgcctattttatcacgattattgtttacgccttttaagaattaccaaagaagtagaaaagagtaaaaacatacccagcttgggtgc

SEQ ID NO: 970 - DNA, 582 bp, Arabidopsis thaliana columbia
atttgttgaagacctcacaaactgaatcccattgcgaatactagtcacacttgcatccacttcagtcaagccgtgctttacaactaaattcaggatgggagcagcacaccgcatgtgcatatattcccctttcagtaccaatgcatcatccccaatcagcttcatcgttttcttgaatttagtcaatgcagtgttgttagctgtagcattatccactgtggtacaaaagattctccttatatcccactcagccaaacattccagaagaaccttgcaaatagttccacccttatgatcagtaacatgcttgaatctgattatcatcttctttaacttccaatcaacatcaacaaaatgagctgttattaccatataactctctccagtattgtttgaaacccaaatgtctgtagtcagtgacatcctctgctggctcttccctagaatcttcttcatagccactttcttcttgacataaagcatcacaatttctcttgtagttgtctcctagaaacaggcttatacaatttagctttagaacagaaatgtctccaagccacactctctatgaaagataatggt

SEQ ID NO: 971 - DNA, 616 bp, Arabidopsis thaliana columbia
caacacctcctttggttcttaaactacaacttatatcatcagtttcgtagctctcaactggcaaaatgagaatggaagccttaaaccttgaggaagcagagagagtaccaggggacagagggatggttatggatctccctgttgctttgtgagtgaactcttcagggatctttttacctggtaagcatatgtatctgtacactgattgttgtatgattccttttcttgcttcttcatccagattcaaacagttgttgaaactgagtgccctgattgggttatggaaagagaagcatactctcttgagtgatacacaatcatttgcatctaggtcctggagggaggaggggagacccagaattgacttgagttttctgcagctattgacattcagccaatctagacgagtgagacctatgatgctttctggaatactctctatattacttttccaaagaactagcgaagttatacatggtggtacatgcaatctcttgaggcttctgctgccaatgtaaaggtgatcaagacgagaccaacatccaactgatggagggacatctctatcattgtatctcgagattgagttcttgatgttctggagatactggaaaag

SEQ ID NO: 972 - DNA, 534 bp, Arabidopsis thaliana columbia
caactagcctggccttgtatctctttgactcaacacctagaattcctggttttatcttgtatagccatctgcagctaataacatgttgatcctttggcctatcaacaatatcccaggtttaatttttcagtaatgaatccatttcctcagacatcccaccattccatatctcctagtctttatcattttgtgcatcatgatagcattgaggttcttcttcttcaccaagttcttctgccattactaacgcataagcaaaatgggtatactctgacagcttagtaggtggtctagtaacccttcgggtctgtctcgagctagctggtagttttcgagatttacagtctgtatgggtgagtcttcttctgtagcagcaacctctgagtcactactgtcactgatttcctcaatagctccacctgaagcagaactttctcctttttctttaacactgtcattcacagtaacggtagtctctttactgagtttccatcaatcggttctttacactttcaggtagcagactcttgtaga

SEQ ID NO: 973 - DNA, 546 bp, Arabidopsis thaliana
gaagtgatcagttcctcctttatctccccttccagttcgcttccaataccgacggttcgagacggatccgactcgacaatgttcacatagactatcttgcaacttggcgcctttattgattggtgagccgagcattcagagggtgcagctcgctcttcgttctttaactgctataagatctcctttcttcgttgtttcttttcgatcacgtaacaagttcgggagacctttaggtttccgtacagggtgaaaattcctgtggttatcgggaacttcaggcacagatggtatgttgagggaatcgccttcatcgagtaaaatccagggactctccaagattgcgttgtagatcggctccgagtcgataacaatgaacttagttttttgggtgattccgctgcttgaacttgaagcttgatttccctatggacattttagcctctccgtcgaatcctgtcaaaggacggaccttgggtgttatcttcgtttcggagatcccatcttcaagagggtcttcaagaacattaggttgacgagctgccagtg

SEQ ID NO: 974 - DNA, 430 bp, Arabidopsis thaliana columbia
ctagaggatgaggatcctccgacttccatattatttcctataactagtagacatgttcgatatacaaatcaattttgatactttgttcgatatgtattgtttttctttttgtaatataggtttcactggaagtgtcctaaaggcatgttgtggaggaggagatggaagatacaacgtgcaaccaaacgtgcggtgcggagaaaagggttcaaccacttgcgaagatccatcaacgtacgcaaattgggacggaattcacctcactgaagcggcttaccgccacattgcaactggtctcatctccggccgtttcaccatgcctacttataattaataacaattaagttactcataagttgtaacttttttcttaacacacaaacttttcatataactcctaattgaaaacctataaatcgatcatatttat

SEQ ID NO: 975 - DNA, 435 bp, Arabidopsis thaliana columbia
cgccagtctgctgtacaggcagcgtttcgctcgcttctgcggcactcagcgaaccgttagtacggttctcaacgctatcaaccagcaggacgctacccgcagtcaccccgtcagccccaagcatcttactgaccatcggctgccttgcgccattccagtcataatggcgaatatgcggcgcacgcggtgcagtttgctcttcgtgctcaattgggcctggctgctgcgggatcgtcggcaccgagggcactgtggggacaggctgttgtggctcggctggttgtccccgcgctggtttcacttcttctaccggtgcaggttcacgttgcccacacattcggcgagacacatcgtcagcgcggtaatcaaggcgtacggactcatttttgtcatcaagattcaccccttacaaatatacgataagtctgactttgt

SEQ ID NO: 976 - DNA, 353 bp, Arabidopsis thaliana
  unsure (1)..(353): unsure at all n locations
nnnnnnnnnnnnnnnnnnnnnnctaaagaaagagagcgaatcccgtgagtaaatctaaaatcgccttagtattaggtttgaggtaataaaaatgcatgaaataacgctacttcagggattatccctggcggcgttagtttttgttctgggaattgatttttgtgtgggagcgttaatttttattccgcccgataatcgtgtgtaccctaactggcgctattctcggtgatattcagactggcttaattaccggtggtctgacagagttggctttcgccggattaacccctgcaggtggtgttcagccgcccaaccctgattatggcgggtctgatgaccaccgtcattgcatg

SEQ ID NO: 977 - DNA, 462 bp, Arabidopsis thaliana
tgatttctctggaaattctcctaaagaacccatggaagaaaacccttatcttagtcatccttttagtttcgtagatgcgatttataagttgagacttgcggtcacaagggaaggaaaggttctaatcgttctgagtttagtagggttagataaaaagatttgcatctacaagctgaatcttaagattggtgattgggaaatagtagagtccttgggagatgaaatgttgatttttggtcatggggtcacaataagagcaccggacaaagatattagtgggggaggactcaagagtgattcaatatgttttctttatgatgactatttgtctgatcattatcttacaatgaagagacaaccaatttgcggtgtgttcgatcttgcgacaagtacaatcacatggcatacaagattagaagacctgtcttcgaagatttgttggtttgtccaggatgtgcttag

SEQ ID NO: 978 - DNA, 539 bp, Arabidopsis thaliana
gcaacttccagtcatcacctcggttactgcattagccgctatttatcatactatcaagagtactcactcactcttgacccattaaaaacctttaccaaagctctttcgatgaagccgccaaagtctccagtaagagtttctttgagatgattaataaggagacaagaaaacatttgttaaactctgtcttgaaaaggtaaagatttagcacctgtttctttggattcgaggcttttttgggggtatgtttgttgcttttctttgttctcagaccttttttgaatgatgtaataaatgtttaccaaagttctgttgctacgttactctttttgctacaagttttcttcatgaaatttgtcaacttcaatttcaggaaaagatgagttaaaatattgttttatttgcagtgatgatgttttaatttttaatgcaatttctatcaataactttaatcaggctaatttttgcgtttgttaaaaaaattaaaaaatttaaaactctatgcgagtcctccaaatcgaaaatgacttgggaccgga

SEQ ID NO: 979 - DNA, 1268 bp, Arabidopsis thaliana
cttcaatcgcaagaacacagatcttcacttaagtcccactctttcttttccttgcttcttctcagctccaaagccaaactctctttggttactttttacttaaaacaaaatggtcattaagatccctaatactttcattaaagccacttcacttctctcattgatcctctatttcctaataatagcaacatctaagtctaactcggttttagccgatgaagttgtcgaccaagaagatgacccggagtactacattctcgacgaaactccctcgatactttcaaacgtgacaatttcatccaaaactaggctactagtttcccactacaagaagatcaagaaaggaatgagatgtcacgtcgagagttacaacatttgcaatggcgtaaaagcgaataaagggacgagcctcttgcattgctgcaagaagcattgtcggaatgtgctaggagataggaacaattgtggtcgatgcggtcacaaatgcggtttcgggcaacgttgttgcggtggcgtttgcacttacgttaactttaaccctaaccattgtgggaaatgcactaggaaatgtgcgtccggggttaaatgcgagtacgggtattgtgggtatgcttgatttttatagaaaaaaatgaaaaaagtgttatatcgtaattttgagttgttatatttttggttttttttgaagaaactgttattagcatacgtaaggatttcacgtatacaaaatcttcatcatacgcatgtaatgtaatgattttgtgagtgagagtatacatatgtaaacacatacatgattatttaatagaaataaataaataaattgttataactttgtagattttttcgtcggttcttttacattaatagagattaattagaactagtccaaaaaaaataaaaaactatgagaagagaagaaaaagaatgattgataatttgtttacagcttctttctaaagatatctgatgatttcaactgcaaatttacctttcttcgtttcattgatctctccaatctgtgattgaacacaaaaaggttaatgttattgaaactaatcagtaactaaactcactttccaacaatctttcttaccttgagtctccctttcccgctaacggagacaacatcaccagtcttcactatggttccgttctttgtaacggttgcccagttaacccgaacatccttgctactgcatacaaagaagaattttctttagcaaatatgagaatgcaatgaaagatcaaatggaaaaataaagctt

SEQ ID NO: 980 - DNA, 570 bp, Arabidopsis thaliana columbia
tagcaaggaaccaccttatttctttctttcttttttgacagcaaaatacaatcatccatttaagctagaaaccgacggtttccttcaggtgagaagtaagaaccagtccggtgtagaggaagcttacatgagaaagatagaatcgcgagatcttgcctttttagcgaagtattcatcgcggacattgtttaacgtggaacaaaagatagagaataaatgaggaaacccaagttttaacatactcaaatcttctaactccgaagaagaaaatgtgggccactcatcgggagtgtccaagacccgaataagctccttgcaatctatctcaaaagaaacattggaatggatgatgacatgagggaacacattgccaagagaagagcttcaaactctatgtgaaggagagataaacaatggtgaatgcactttaagccaagattagagaaatgatgatcaaaaccaacaatccatcctaaaccacataaggaggttgtgtttactcatgacccatgtacatggcatgtcaagcaatctctgataggggaacgagcgactaagtcttgggtaggt

SEQ ID NO: 981 - DNA, 491 bp, Arabidopsis thaliana
cctggaggatgtgagaccgtaacagcaacaaaatcatgacctttacccatctctgatggccactgaacatcgacagtctcaataaaaggtgaaaactttatcatccttggcaatcccctgacttgcttctcctctggaagcagcaaaggatgaaccaaagagagagctttcatcacagcaaacacaagcctaagctcttcaagtgtcgggcttctgaactggagctcaccagaggtcatacaccgcgcaacatccataatcggaaaccgatcagttccagaaacttctaaagacaaagacttaaccatcctcttgttagaaggaagcatcaatgactcaagctcataagtaactctaaagacctcaacattaggatctctagccatttcccatgaatcaccatcagtcattttcagtgcatagctcatggacctatacatatagattgcgatatcaccaccatcacctcctatgaactgaacacattgaaa

SEQ ID NO: 982 - DNA, 473 bp, Arabidopsis thaliana columbia
  unsure (1)..(473): unsure at all n locations
ctnnnnnnnnnnnnnnnnnnnnnnnctaaaggtatcgctctggtctggcttctctgcatgcgcgcgttaaagtgcgtatcaccgagtatgaaaaagatgctaacggtgaattagtagcgaaaaccagcctgaaagacacgactgttggccgtgccattctgtggatgattgtaccgaaaggtctgccttactccatcgtcaaccaggcgctgggtaaaacagcaatctccaaaatgctgaacacctgctaccgcattctcggtctgaaaccgaccgttatttttgcggaccagatcatgtacaccggcttcgcctatgcagcgcgttctggtgcatctgttggtatcgatgacatggtcatcccggagaagaaacacgaaatcatctccgaggcagaagcagaagttgctgaaattcaggagcagttccagtctggtctggtaactgcgggcgaaccgtacaacaaagttatc

SEQ ID NO: 983 - DNA, 985 bp, Arabidopsis thaliana
tatctgaagagcatcaggagaaagatactgaggcaaacgagagtgcagacaaacatgatcttctggagaggaaaaaggtatgcgttgaagttcctttggaaagtagtagctaaatgaaatgaatgaagattgtgagagttgtttctgtatccgttaaacactcatttctgtagctgagaattgaaatctggaatgtttagtctctttctattttgaaccaagacgcattacgaattcaccgtgaattttgtaatatcacatgcatgcggtttgcaaaactaatgctttattgacatactttaccacaagacagatcagatgaaaaacacaatgttctttcaactagatagataataaacaaagaaaaagcagcattgttttcgcttaaacttgaattcataagctacagcttgcacctactaacagttatgactctgtcagctgtctatgttattagccattgttctcagtacttatgttgttgagtcggaaatacttcaactctggcgccacttgctcctgaagatgaaccactcatcttagaattaggttcgttaccactgaaaacaaacccgttctgatgacgataatggtactgcgccatgtgaatccctggcacaggcccgtaggctccatactcggtcatggtcccattaggcctcttgaccaccaagccgttggtcatactaacggacccagcactgcagctaacccctctttcaccttccaactctctgtagcggtggaggtacaacgtgaggggttcgatgtagtcatcaaaaccgagcttgctcattgcccacaagacgtcctcagcagtgatggtcttgcgctgttcccgctggcaccgctcattagcctcccctgttatgaagctgatgtactccgaaacacactcttggatcgtctccttggagtcatctgagatcttggcgtgacgaggtaagatcctcgcatgatccgtatcacgttggcaataggcatg

SEQ ID NO: 984 - DNA, 620 bp, Arabidopsis thaliana columbia
gaagcatggtcatggacctttgttgttaggtcggtttggtaatggtcgtatcgaagagttcctccatgcacgggtaattatttttttaatatctgattctgtgtgttcctaagttattgagtatctttgcacttccctggtttttttcattcttcaggtaattcttgtgaatctttttgtatttgtttactgaatttgtaacttgtttgctgaactatgaactttcagaccctatctgcttgtgacttgcgtgatcctgaaatatctggtcgaatagcaactaggatgaaggagtttcatggtcttgaaatgcctggtgcgaaaaaggctttgctttgggacagattacggtacatttctttgttttctaccagattctactttgctttctaccagattctactttgctttctaacaaatcattaaaattttgttcttttttgtaatctttttctccactttgttttttttgtaacttcagaaattggctcactgcatgcaagagactggcttcaccagaagaagctaagtcctttcgtctcgatgttatggagatggaaattaatatgcttgagaaatctcctttgacaatgatgaaaatattggattttgcacaatga

SEQ ID NO: 985 - DNA, 548 bp, Arabidopsis thaliana columbia
tagctacagagaagccaacaaacgatcttatgaagaagaaaccgatagaggagagtggcgccattgatcacaaacatcatgtggaggaatctactagctcaagcgttttaccaaatctctgtgctcttggtgcttcagtttagaggaagatcgattttcaacgtgactgagaaagtgaagaacactttgatcttcaatacatttgtgctttgtcaggtgttcaacgagtttaacgctaggagtttggagaagaagaatgtgtttaaagggttacacaagaacagactcttcattggaattatagttgtgactgtggttttgcaagttgtgatggttgagtttctcaagagatttgctgatacagagaggctaaacttgggtcaatggggagtttgcattgccatcgcagctgcatcgtggccgattggatggttagtgaagtctgttccggttccagagagacacttctttagctacctgaaatggaagaagagatcatgaaagaggctcttgaattgatcttacattagtatatacattatgaagca

SEQ ID NO: 986 - DNA, 505 bp, Arabidopsis thaliana columbia
cacctttttggaatgagataataaagagcttgagagaggaagattatctcagtaacaggttattgattattacatgctttcgtgttctttcattttttgccgtttgtacaacgcctcttactcatacatttgaattctttgactgtagggagatggatttgctttctattcccagtaacacggggagccttagactagtccagtggcccttgtttcttctctgcagtaaggtgcagcttgttaaataatttcctctctttaatgttgagagctcaggcgtgacatttttctctcatgtgtgaattattcttgcttcttttgtttttcagattctggtagccattgatttagccatggagtgcaaagaaacacaagaagtactatggagacaaatatgcgatgatgaatacatggcgtatcgagttcaggagtgctattacagtgttgaaaaatattgaattccatggttaatgatgaagggcgacgttggtacagtatttcagtt

SEQ ID NO: 987 - DNA, 600 bp, Arabidopsis thaliana
tccccccaaacatatatcctctgctctattcctgatctgctcaccaattcctttcttcaccctcttcgtatataccttcgagcacaatgtatcacaagccctttaactctcgcaacactcgctggcaccatcttccacatacccatgaactttttcctcgtttcttacctcggatggggtttcatgggcgtttcaatggccgcagccgcttcaaatcttcttgttgtcattttccttgtggcccatgtttggatcgcaggtctacaccagccaacgtggacccgccccagctcggaatgtttcaaagattggggaccagtcgtaaccctagccatacctagctgcatcggggtatgcctagagtggtggtggtacgagataatgaccgttctatgtggtttactcatagaccctagtactccagtggcatcaatgggcattcttatccaaacgacgtctttgctttacattttcccatcgtctctagggttagcagtctccacccgagttggtaacgaacttggctcaaaccgcccaaacaaggctaggttatcagccatagtggcggtttcctttgctggggtaatgggtctgacggcg

SEQ ID NO: 988 - DNA, 581 bp, Arabidopsis thaliana
gatcttcttattttggcccattaattccttgtaattgcgattggactgaattctcagtttaattcgcaatttctccagtttaaaccggtattgtcggaggtgctaattcatgcaccaacattcatccataaagtcttcaattaagggaatagggaacctgtccttccttgtcataccattcaattccctgtgatccacacacaacctccatgtaccaacttttttctttaccaacactactagtgatgcatacgggcttgagcttacttgtatagtaccaccaatgtgtattttttcaacaattatataagtttcattcttctgatgaatagggtctctgatttactggattaaaaccttccaacaacttaatcttgtgatcatgttgtgtgccacaaaacaaattcattcactaccttctcactatagactcattttccaaatcttttgtcaatgtgttgacagtctcaataactcgctcatcttcacttcctttttcatcatcctctgctacttcttgcacatacaacattgcaagttgaatttgatcaccctgaagtttctgtagcttttgtgtttta

SEQ ID NO: 989 - DNA, 588 bp, Arabidopsis thaliana
gtaacttgtgttactatcttctattttgacaccaacagtcaacacgttgaaccccataaggcatgcttgccttgcaggctgcagcatccaatagcattgcaacttgttgacctgaatagaacacaagcgtggagtatccgattcgtcagcgctgccttgttatagcaattgattcttgcaaagtaataatctgaagctataaggttttttgcgccacaacttgacttgcatcccaccacacttggctcgacattcgttaaggatgccgtattgttgcaaccagccgctataagtgtttgtgctatttttcttatgtatctcttctctgtttatagtctcagatttctggtatgcaggttgtggccagagattctgttttatgaagctggtccattgatggcctaaagagtgaatagataagttaagcagtgaaggtccctagtttctgcaacttcaaagagctagaggaatgtgttgagacattttgagatatcacaaacaaaaattaataactaagaagttcattaaataaacacataaaacagagtagtcatcaatagtcagatatggatgatggacaaagagata

SEQ ID NO: 990 - DNA, 479 bp, Arabidopsis thaliana
catcgttggaggcaatgattccaacttaactacggagtttaaaaggtatatgagtgaatgttttcacatgaaagatttaggtcctttaaaattctttctcggatcaaagtttctagaggaaaacaagggatatacatttcgcaacgcaaatataccttagatattatatttgaatgcgggctgctaggagctaaacctgttgatactcccattgaacagaatcatactctcgccaaagaagatggtgaattctattctgacccaactaaataccgcaggttagttggtcggttggtttatcttgctattactcgaccggaccattgctatgtagttcatcttctaaagcaatttctcggacaaccacgtacacgtcattgggaagcggctgttcgtctggtacgatatctaaaggggacttgtggtcaaggcttattgctaagcaaggatgatgatcttcatttgaatgcctattgtga

SEQ ID NO: 991 - DNA, 456 bp, Arabidopsis thaliana columbia
tgagatgtcaacaatgcaagattcaacttcttccattaaagcagagtggagcattcacatggagaaaacagaatcaagccaccacgaggacacttcagcagttgagagcgggaagaaagctatgcaagaagttctcttaaactggtataaataaaaatctcacagtctacaaaacttcataacatatataatcccacgcgccgagcttttttcatgcatttgcttgacctttcgaaatggataattgtagtttggagaagaccgagatgagtgcacatcaatggaggaaagctcaagaatcacttgtcagtctagaacgaaacaatgtggcttctgttgactccatcgttaggtttgatctccgcaaaccatttctctttttttcatcgtctgtcatatgtctcaagtcacttatcacttcaatctctcaacagaggtggcatggatgccaatgag

SEQ ID NO: 992 - DNA, 797 bp, Arabidopsis thaliana
caacgaaaacacaattgaacacatcagaaaatgttgcacaacaacttgaattcgaattctggagcaatcaaagccgattatatagaaaaagaaaattctctaaaatagcatgaagtacaaatacttaggacacaattactttggatcaaaattatgaatcagattctttttggtaactttctcgtttaaaaatacaaatgtctcccaatgccctcccaaaaaaaactgatcgattcatccacaaatattaagtaaaataaaataaaacaactcaaaacaccgatcgatgtcagtcagtagcgacagtgacaacgtaaattaatggttccgataagtctccgttggtttgcgttgttgttattaccacatcaacgccttcagtacacgttagctttctggctctaattgcttctttctcccagtccgtagtagccacgacatatagcatcatggcagcacaacatatctgagcagctaaaagacctacccaaagtccgcaaaatccatatgcggcccaaaacgttagcccaacggctacaggcgttccaacgaggtaaaacgctcctaggtttatgttcgctgccatggacggccgtgcagtgcctctaacaaccccgcaacctactgtattgcgggcagttcccgagctcgcaaagcccgagaatcggcaacgcggctgcggttaatttgatgatagcaacgtcgtttgtgaagatccatccccagacatcttacgccccaagcaaacgcagacgccgtcagacccattaccccagcaaaggaaaccgccactatgg

SEQ ID NO: 993 - DNA, 482 bp, Arabidopsis thaliana
  unsure (1)..(482): unsure at all n locations
nnnnnnnnnnnnnnnnnnnnnnctaaaggcacagccggaaccggtcgtagaagaaacgccggagcagtggtatcgaacgtgaagagctgccgttgccggaagacgtcaacgccgaagcggtttcgccagaagagtggcaggctgaagcggaaaccgtagagattgtcgaagcggcggaagaagaagcggctaaagaagaaattaccgacgaagagctggaaacggtgctggctgccgaagcggcagaagaggcggtgatggtggttcctccggcagaagaagagcagccggtggaagaaatcgctcaggagcaggaaaaaccgaccaaagaaggttttttcgcgcgcctgaaacgcagcctgttaaaaaccaaagaaaatctcggttccggatttatcagcctgttcctcggtaaaaaaatctgacgatgatctgtttgaggagctggaagagcagcttttgatcgccgatgttggtgtgga

SEQ ID NO: 994 - DNA, 693 bp, Arabidopsis thaliana
gaatcccgccgctactactactccctccaccaccaccagatccagctgtaccattcctgttaaagaacctcggcgtcgtcctcgctcctcctcctccgccgctgaattgatacctagctgtgtaattaccatcatcgtgatcatcatcatctccactttcgttaccttgtttaatctctggtctattctccatagcttccattcgcttaaaatgaacccaagacgatataaacctcgccaccggcacagatctagctctctgtatctcggtccggtaccttttccggagcttctccatcttgtgacggcactgaaccgcggttttcttaagaatcacgtcggggcagttagcaccaaccgcttctgcaacttcttcccagtgattcgcctttagatttccacggttaagagcgtaccatttgtctctgtacgcgtcaattagcgcgatcgtctcttccagagaccagcacggcggaggtaaccgctagagttcttggacgcggtggggatggaggcgctcttcagatctgtgttggaagctggttcggttgacgcatcgtcatgagcggaggaagataatggtggcgggaggggagctagaggtgatggatccggaattggatcgtggttcatcggagaatccggatcggacatggatcaaaaaattgaagaagaaggagagaaaaagacaga

SEQ ID NO: 995 - DNA, 705 bp, Arabidopsis thaliana columbia
ccgtgaatatggaaggtttcattcttatctccatccctcctgggtgggaatgagagagagtagagagtgcgatgtggaggaacatagataagaaggaatgagggagtttgttggatagcttgtggttgaagaaaagagggcgaaaaaaaggtcatgaacgtgagcaaaggtgagttgttatatgtgtggccagtttttggagtatgctgtaatttggtggaggatatgagcattgatgatattcaatggtctatatttagcaaattgctaattctgttatcttgacaattttaacacaaagccaaaaataaaataactctggttcctatttcaagaaaaaaaaaaaaaacaagctctaaccagaatcataacctaactatcagttttttatttatcaaacaagcaagtatgaagaaagtgatcataattatgtcttcaagcaagggagtgtgtagaaacaataagtaggcgagaacataccagcgaatcttttcaatgccactcaagtgactccaaagcctgctgatgaatgtctgaatctcctgctgcaactacattaaagcctgtgacaaatgaaaaagtacataaagacgtttaatagttcgacattcaggggtatagtgatcttttgttttgcaaatgaatgaaacaatggttttttttttcaaatattaaacatacttgtcgcaactgcactggatgaag

SEQ ID NO: 996 - DNA, 546 bp, Arabidopsis thaliana
tgagccatttagttgtttaataagaaaattggacattttcaggcttcatcctctatttgaatttcaatggatattttgagagaaatctctggttttaattttaatttttacagtcgtagagctaatgaacaacaaaaagatcaactttggctgctgcaactggacaagagacgctatgaaatggcgacaacgatttgaggcagcagatgtcacatgggtgtcaagaacaaacaatggaccagcggatcttcttgcaaaacatcggctaccagataattgttcgtttcaatatcactattatgttccacctttcattgtatcagccttacattgtaatcactcttgacttgattaattgaaaaaagtcgataaaaaaaaaaatctctggttttaatccaaacatctaagaggtcacacactagagtcacatgcagtgaactgtcataattttatcacattattgtgatcccatcatgtaaaaaggagtggttcttttgtacgtgttatttggttgtatgtctcggtcaaaacccaaattgtgggatg

SEQ ID NO: 997 - DNA, 500 bp, Arabidopsis thaliana columbia
ataaaatgaataccccgaagaaaactgataaaggtcttgagacagattctttgggagtcagaaaatctcccaatggcattcaccaaccagcagagagtcaggaaggagagagctcaaagaaacaaggatgcaatggtgaaataccgtctctgtccaagcagaatgatttgccaactcagttgggtggttctacgtataagtcccctcgtacaactcatgtgtcaccacattgcaaaacacctcgaagaaatgcctttgacttccagaacctgagatctgaagacaaattcgaagttaatcagatatgggctatctatagcaatgacaatggaatgcccttagagtatgtgaagatcaagaaaattgaaaccaagcctaagtttgtgctacgtggaaccccgacagagctgtatccgccatctacagaacctgtgacccgcacagtgtcttgtggggaatcaagttgctcaaaggaagcccaaaatcattctcatgcgagc

SEQ ID NO: 998 - DNA, 579 bp, Arabidopsis thaliana
gaacatggggaatcctggggaaatgataatgtttatgatgatgatgatggcccattcgatgataatgaaaatgatcaaagtgatgcagaggataccaacacattaatctctcagccacgccaggtatgatagattgatctgcatatggttacagcattacaaatcattttaaaaggctgtagctatctatcttaggaatgaaacattgttgtaattatcctacacaactcatgctttaggtcaacaaaattgatgtccaatacgataaagcttcaaaacaagttgatgtgcaagtgctaaaggaaactctttgggagtgtcttcaggaatctcatcaacctccaattcaggttaaccaatatactctgattatctctcttatgatttacatgactcattcgtgtacttcacatcagccaagttttgtcaacatacaatctagaattcctcacacatacatgtctgtttagtgcagtgcacttgttcttatggtccactgcgaaactacccaaggatggcttatcctcttttctgccattattgtgatgatataacagaatctgattgtgcaggatgagg

SEQ ID NO: 999 - DNA, 510 bp, Arabidopsis thaliana columbia
taaaacgaaatatcaaaccgagcataggagatcgataaaagtattttgcgggtaccttttggagagtggatgaatcgtctttaagaagatagacgaggcaaagaagaacaatgaattctgtaaatgtaattcccatatcctcgttaatatcgcaagccttgaacaaatcattaatctcttcttcatcgaacgagatctctagcttcctgatacaattctttagctccgtgtgatctattgacccgtttgaatcctcatctgcccaaaaccaaacaagtaaacaacctcaaatcgtgcgaaaacccgcaatttagaatctgccctatatgcactcaccgaattcttggaaaatggctttgcagtttcgaagaccatcatcgatctttgggaacttgagaacaatactgttgaaagatttcattgtggtgccctcgatgcctgcgttgcacggcttctatgatcttagccccaactttgtctctggaaccattctttttgcagagtttcaga

SEQ ID NO: 1000 - DNA, 555 bp, Arabidopsis thaliana columbia
ggtgatacgtaagtattttcgttctacttcaacactcattcaaagttatattcctgaatacgatttctcattagaattcatctgaaaattgtagcgtgggagatccgttcaaggacacagccggtccatccattcacgtcctcataaaaatgcttgcgactataactctcgtcatggctccggttttcctctgaaagtgaaccgttacttatccatcccggcttatttactctcttgcacatatacaaatagagagggagagaggttggttataaaatgatttacatggattaatggtttttgtgtttcatttcatctgaataaatgagataattctgtttttgagtttagagacactctttaaggaattctagagacattttaatcaaccacatctttgactttgagagtctttattttcctcgatttaatctttctagtacttcttcttactcttcttgatttgcgccaactcgtacagacaattgtctactcggtagtcttatgagacaggcggtgttgcgattgctgccatgatggtggtggctgtgtttg

SEQ ID NO: 1001 - DNA, 665 bp, Arabidopsis thaliana
cactaacatctttaaacatcaacaacaggattctttaaactaaatagctctaatcaaacgtaaatctcagtgaaaatatcagaaatcaaaggcataatcagtttacaacaaacatcaaaataagattcgtctccctttcacaacaaatcaaagagaaaatcagtgaaagagaagagagtgacattttcccgggaaaatcggccaaataaacacagattcttcaccgattatcaatccaagtgtgcaataagcgaacgatgatacgaaaacgaagataatcaacgaaattcctcacaataacctaaaatccaaacgaaatcgaaggtatggaagaagagtataccgtcttgacgcgagagaaagttagcgtacgcataacagagagagcgaccagacgaagcgtctttacagagacgaacagaagttaagctcttgaactcggcgaacgcgtcgtagagtataccttcggtgacggaagggtgtaagtctccgacatataacgacgccgtcactggagaactcgatcccgaagaagaagcatccgccgcatgtaatgcagcatgaacagtcgccatttttgctctgatacctcaaaggaaacacaaacgcactaaacgacgaaagaaagaaagagagagagggagagaaaaaaagaaagaagatga

SEQ ID NO: 1002 - DNA, 450 bp, Arabidopsis thaliana columbia
ggctttggtcagacattctccgtctttcgattttctgtttcattttccggtcgacagaagccgttttctatcgccggttgctttttctagcgttcgctatcatcgcttccattcttgtagatggttaagtctccgctcttcaccttcatgttctcgcaggttcgaatttggtttcgaaatgaatttgacaatttttgatcaatctttgctaatatttgttgtagtgatttttcgatttttgattataggttaaacagttttagttcgaggtgttcgattacaaacactgatgtatgtcacgaatttgtgactactgatgatgaaatccacgaggatttgcttactccaattgaggatcattcaattcctattgttcatcttgataccaatatctccgttactgaatctctgaccttactcaccgagtgtacttacgtagatactgtttta

SEQ ID NO: 1003 - DNA, 547 bp, Arabidopsis thaliana columbia
ctaagcagttattgatccaagtatatgagtttttgcatttattcagagttgtagataaaatccagactcaagcattgttctgctatttttgaataattaaatggtgttgtttaatacaggtgatggtagccaaattcaatcaggtctcgcagaatggacaggacaacgtaccgtgcctaatgtgtttataggaggaaatcacatcggtggctgtgatggtaagatgattagagcaattcccttcaaaacttttgtttgtttgtttgtttgttagcggagtgaggacttgtaatctgttattctaaacaaaagtttgtgattttcaatgtgttgtagcaacatcaaacttgcataaagatgggaagttggttccgctgttaactgaagctggagcgatcgcaggaaagactgcaacaacttctgcttaagagcacatccatatgtgattgcttctatcaagaataaagaggtttgagtcataaatgtgaacttgtttcgttgtcaagttgaagaaatattctgtaatgtttttaagattatggttatg

SEQ ID NO: 1004 - DNA, 678 bp, Arabidopsis thaliana
ctaacattaagaatgttttaacagctttcttcaaaaggtgagacatgggatgagattgatttcgagttcttgggtaacgttactggacagccttatgttatccatacaaatgtctttaccggagtaaaggtaaccgcgaaatgcagttctatctctggtttgatcccactgctgatttccacacttacaccgtgctttggaaccctctcaacatcatgtaagtaaccgatcaatcctattcaagatagacaaatatcgctagacgctaatcgggcgtttaaagccgcctagggcttgatcttaatatgatccacgactgttctaaatattatgttttgtttttcttggaatctcaaaagctttctggttgatggtatcccaatccgggtgttcaagaacaatgaggctaacggcgtggcttacccgaaaagccaaccaatgaagatctactcaagtctatgggaagctgatgattgggccacacaaggcgggaaagtcaagaccgattggaccaacgctccattcagcgcttcctacagaagctttaacgatgtggattgctgcagccggactcgatatggaactgggttacgtgtaatgcgaatagcaactcgtggatgtggactaccttaattcaatcagcctggacagctgaagtgggtgaaaaagattatatga

SEQ ID NO: 1005 - DNA, 648 bp, Arabidopsis thaliana
ggatatctctggtttgatcccactgctgatttccacacctacaccgtcctgtggaatcctctcaacatcatgtaagtatttgatcagtccaatacactattgaaaacatcattaagcgctaattcttactttattgttgttctcttattttactttgtgctttgtttttttgttggatctcaaaagctttctcgtggatggaatcccaatccgagtgttcaagaacaacgaggctaatggcgtggcctacccgaagagccagccaatgaagatttattcaagtctttgggaagctgatgattgggctacacaaggcgggaaagtcaagacagattggaccaatgctccattcagcgcttcctacaaaagtttcaacgatgtggactgctgcagccggacctcgttgttgaattgggtaacatgtaatgcgaatagcaactcgtggatgtggactacccttaactcaaatcagtatggacagatgaagtgggtgcaagatgattatatgatctataactattgtacggattttaagaggtccctcaaggtttgcctacggaatgcaatctcaactgatcatgttactgagagggattgaaacagaagttgatcttaattgtatttgattttgctaccaaggttggagat

SEQ ID NO: 1006 - DNA, 567 bp, Arabidopsis thaliana columbia
gtaaatctttggatcaaaatcttatctttgtgttttgggtttgtttcagaaagttcaaaaggctttgttgcaatctagatgtgcaatcaaaatctgataaaagtccagtgaccgttgctgattatggttagtttgttatacctgtccctgattagaaaaagctcttctctttgaatgttactgagattgtcaggaaatcacttaatttgatctgtcttgtgttgaatttcaggttcacaagcagttgttagtttagtcttagaaaaagagctcagttctgaacccttttcattggtggctgaagaggtgaaactgcttaataaatccttgttagatgtctcacactttacttatctttgagtttgtgtttatggactcacattgtctaacatgatctatataggactcaggcgatctacgcaaggatggttctcaggatactctggagcgcatcacaaaactcgtgaacgacactttggctaccgaggaatcgtttaacggctctactttgtctactgatgatctacttagagccattgactgtggaacatctgaaggtggtcaaat

SEQ ID NO: 1007 - DNA, 620 bp, Arabidopsis thaliana columbia
  unsure (1)..(620): unsure at all n locations
tgcagttgtgttcttatttttactcttcttacttgtaaagttgcatcctttacatatcctttttggtcagtctaaggaacatgcttatgttaggtaccatgtaagtgaaatgatcctgtggtgtcttgcgcattgaatagttttaactttttaaactattccgtgcattgttctctcatctttttgaatttggttttttattgcttagagattttaatatcaagagagaatcttagaatgtgctggccatgagtcatgaggaattgcttttgtatagatggtggagaaacccaatggacaaaaagcttcccacaacttgtccctaattatgattttttttccttatcattaaagtcaactctccatccctggagaagtcaacgcatcaaaacattaacataatcagctgatgtattgaaaaatgttgatggcttaactattactttttgtgtgttttatgtttatacaggttgaaggaaagactgttaaggcccagatatgggacactgcaggtcaagagcggtacagagctatcacaagtgcttattacagaggagcggtaggtgcacttcttgtctatgacatcactanaagacaaacctttgacaatgttctgaggt

SEQ ID NO: 1008 - DNA, 1885 bp, Arabidopsis thaliana
cacttgtaggatatcagttatgtttgtgcttcggttggtcagttcttggcaagttacgctgcgcatttcgaggacctctgaagtaagatcacaaaaaggattcgccagttttcagaagctgggcttagtggtatcgcaatattcttaatgaaaccgtcgtgtcctccttgttcgaacttttctatgtcaagttgcaatcttaagaggtggcttttgacatggttgttgtagatgagctccgatgagtcgaaacctatgaaggttgagctgcgtatttacggacttttggaagcaagattacaaatgtaattacgaactattagtggtgggcctattgtatcgtaagattacgaatgagtttgccaaattctcttaatttggagtgaattggtgttgggtgatgagatcgatgaaggatcaaaaattatttgatgctaggattacgcagtcctatgttacgcacttagatggtctaagattgttttaacctcatgttaagtgtggacctgttgtaaggttattcacttaactggtttgaggctattcggttttaatacctaaaattcaaaactttgctgataagaagcatgaaaaataatttctgcgctcgagagttaatctgcctatgtactagtgaagagatacataaacggaaatcaaaaggcaagcggacgagctgacacttgtatcagcgacatgctaatagtgtcctatctgacgggaaaggatcggtttaaccaacgagctgaaagccatgtatcttaaaaagtcaaatatgccttatatgcgaattggaagcaaatgagctaaaaggagtttcggtgtaaaaaactaggtccgcgaagcaacgcataggcctagtttttttggcattaaatgaggtgctttatcctttagactctgtgaatctaagggctaggacggcggtctcttcttcggctttggcgaagtagagagccttgtggagggcatcatctaatgtaactggttgtcggagagtgagttcctcacagaatcttgaggaaaacattaattcgttgcggagggccgctatggctacttcctcgttcaggttcacaatttttgacttgattccttagaacttttcgacgtaggatcgtagggattcgttttggagctgagttaagtctcattggtcagcctgagatgttttattcacgatgagcaccaagtattgcttgaggaaagcagctgcgagttgatcgaaagtagcgatagtgtttccttcgacgcttgtgaacgaatctagagcatggcctacgaggttttctgcgaaaaagcgatagtggcctcgtcgctttcctcgtctgccaggtacgctagtgttatggctagccggaaagctctaaaatgaaccttcgggtcggccgttccatcgtactccgggaagcagagtctctcggcgactcggatccaaaaatgggcaattctgtccgtgaacggggcacgctttgtcatctctattactcgatctatgtcgggagcgttgctcacagccaggtgcatccatgagtgcatttgagccatgtgcgtttgacatttgagccagatatataaagaaactacaacatataaaatatccaaaaaatgttttttaataaaaaataacaccttacaaaaacaccctgcgatttttcatatcctgaaatcttttcatcacactttcatttgtaatagtttcaaatacttctttcttaacaaaacaaactaaacagtcgttcaaaaattaatctccaatccggttgcgccgatctgtcttcacaatcttcattgctgaacaacatctctcaacagtagcagtagcaacatgcaaaatcaaaatcaacttcaaaagcctataaaccaaaggacatgacatatgttt

SEQ ID NO: 1009 - DNA, 622 bp, Arabidopsis thaliana columbia
ggtgcagtagctgtagaagatagactcagaagtagaggagtaaaagctgatgagggatatttattgtgtggtgctgagcaggaaacaattaatcatattttgtttctttgtcctgtagctagacaagtctgggctctttctttagtgccatctgctttacatggatttggaagttcaatctttacaaatctttgccatgtctttgatatggtaaagaatagtctcataactcctcatatgcggtgtgttggtccttggattatttggattttatggaaaaacagaaacaagcttctttttgaggggattggttcattgccaaattgtctaaacgataaagcttatgaagactgtcatgaatggctcttggcacaacagactttaaagtctgatacacagccaaaggaagtatctagtaagaagtggaggccacaccaaagggcgagttgaaatgcaatattggctttgcatggtctaagcagcagctttgttctggtgcatcttgggtggtgagagatgaccagggttcagtcttattgcatagtcgccggtcatttgctcaggtacattctctttctgatgcaaaatcaagaagttgggaatgggctctaagtagcatgtt

SEQ ID NO: 1010 - DNA, 559 bp, Arabidopsis thaliana columbia
ttttgatcataattatggctgatccgcaaaatataaatcttttcacattgaacgtcaaaatttgagtttattaacaactaatttattatttatatgttttgatacagtttcatggttgatgatattccggtaagagaattcaagaatctacaacatatgggtatccagtatccaaaattgcagccgatgaggttatactcgagtctatggaacgcggaccagtgggctacaaggggaggtctcgttaagactgactggtccaaggcaccattcaccgcttcttacagaaactttagagcggatgcatgtgtttcctcgggcggaagatcatcttgtcctgccggttcacctagatggttctctcaaaggcttgatctaacagcggaagataagatgagagtggtgcagaggaagtacatgatctataactattgtacggacaccaaaaggtttcctcaaggatttccaaaggagtgtagacactagctacgagaattaatgtgtgatccgaactccaaagctagtattgtataggttcgtctaaattatatatgtaatg

SEQ ID NO: 1011 - DNA, 547 bp, Arabidopsis thaliana columbia
caaactcctccgatgaagtaaccatcggtgacggagacaacctccctatttcacctattttcatctgccttaatttacgattgcaaaaatcagcgaggattcagaatattgcattaggggatgaagacgggaaagccttacgtgataaatttttcaagctcgagacttcccctctccaaggccatggtgacaatatatcggatgatcatgtcgtactccctcttttttggtgcaacaacaaagaagctgatccaaagatggattgcaatatttgcagagtgcaaaaggcaggcacaaactattattactgtgtcgagtgtgatgtaacgtaccataaagaatgtatcgagtctccacttgagatcagttatcctacccacgccaaacatactctccaactttgcttttcatctctgcgaggagttcatcagtgcatcatctgcaaaaacagagcagatcttatcatttattattgtgctctgtgtgacatttatatgcatgcggtttgtgctcaggcggcaatacccttttttatagacaaccaaaa

SEQ ID NO: 1012 - DNA, 466 bp, Arabidopsis thaliana columbia
  unsure (1)..(466): unsure at all n locations
tttctagtccgaacttcatttactatcaagcttcttcaagtagttcagttctggtttagtgcatcatattatggacccattgagtgtttttttttgtggtagaatagaattaaccttttttccaatctccgaccctaacaaaacactaatagaagaaacagttggttctaataacagtctatgattatttcccaatattgaaggtatgtatcttgcgttgtggggtgtccagtagagggacctgttctaccctcaaaagtggcttatgttgtgaaagaactctatgacatgggctgctttgagatttctctgggtgatacaattggaatcggcactcctggtaatttcgttactgaaaatcttgtgtagtttattcaattacgcatgtgcactgtatgtgggagtgataaactctgaagacatttagcagctctgntattatctattagactgaatgtagatgaat

SEQ ID NO: 1013 - DNA, 1243 bp, Arabidopsis thaliana columbia
gagatgatgaaattaaatgatatatatatatatatactcctttacttggattatagtggagattaagaggatacataaattgaagaaaaaaaacttaaaaataaaagcgttaccaaaataatgaaaatgaaagtgacaatagcctggtaacttgtgattttatatatgatatctttgcagtttttcataaaaaaaaatatttgatgaacattttccactattatctacattgagaacatcaaaagtacgaaataagaaacctaaggaaaattggattaatgatatgaataattgaatactcctttagttttttcaacagcatctctcatatatgtgattgctctcactgagaattggacttgtttgtattgttttcttcgttttcatcagcagggatatgcaagaatcatgttttttgggagacaaggcgagtccttccagaccctagcgtgcaacttaagcaactcctttgccttctctttggtcttacctccacagcttacttgaagcacaagacaaagcttcgctacaacccccaactgtaacatctcgtgcaacaaagcaggcgttgcgcagaaccttcccaccgacaacaaaaccctaaccgctctatcgcttgctgtctgtgaaacctaagtatcttcttgcacaccaccgctatggctgctccgtggttcaagaactcggctcgtccctccgcacactgacacaacagatcaagaaccaccatcgccatctctggacctctcctctctgatgtgaagctctcgtccatgagaagctcgatgatcacagagattactccagcttccacggccttgtgtctgttccttccccatgggcatatgttcaccaatatatgcatggcagctttggtcgccttctgcgagatccgtcgtccaagatctggacgacctcagtgaaaacctctggcttgagagtcatactctgcattggatccgctacttcgagaatgttcttgagaagcaaagtggcatagactctggactcgtacatcccacgctgcatgatcttcgtcaacgactttacgatattgttatctttcttgttgtttaaaagattcttgaggactgtctctgaggtctcgaggtggtaaagtaagttgagggcttcgtcggtcaaactcccattttctgagtcgttgcttacgatgttggccaagaactccggtactcccgctgcctctaaacaccgcttgttggtcgcgttctccgacacaatc

SEQ ID NO: 1014 - DNA, 559 bp, Arabidopsis thaliana columbia
ggcatttcatcaaacagcttccttgcttcctcaagaaacctaatcccaccacatgaaacataccccgaaatcatcgtgttccaagtcacaacatctctcttaggcattacgtcgaacagtttccgtgcttgattcatttcacgccttttcacatacccgcttatcatcgtattccatgtcactgtgttcctcgcttccagtttctcaaaaatatctctagcttcggcgatataccccgatcttatcatctggtttaactctttgttcgtcgctcgaaaacccaagcttgacgaaactgaagtagagaaagagtttgcacataataaacacttaagacaagacgattgatacaacaccttcctgaaaattaacaagacacttcgtgatcggatcatcgtcgtcgccggcgaaatttgcagcgatcaaaaactaaaaaagcctctagctttgaaaattagagtcaggtaaatttggttcagatgatgatgtaatggacattcttcggtttaccatgtttgaaccggaaatcatttggttcaattcagatagtaaaatgtgt

SEQ ID NO: 1015 - DNA, 493 bp, Arabidopsis thaliana columbia
ctacagacagtaaaagcatcagtaacaaatgacaatgaagcaagcatgttggttacttaatacatcaaaagaggtttaatgtaggacaaggactgacaaaacacaagcctactcgtgaatataaatgtcagacaaaggcatcgttgatgtcagtcaggcatgtttctgtatataaaactatgaactactatgggaatattcacatgacgatgagaattaactacaccgacctcattataaaaacttcttgagaaaattctctcagcatctcattgtttacacgatcaggcttgagaaatttgatagctacttcctgactgcaataagtgcctctatgcctgtatagtcatcaaaaacaaattactcttaacttttaaatagaaacttacagtttacaaaacgagcttatataacgataatactcacagatccccatatgaaccagatgccactttcttttcaattttgagctgagtcacgtcgatttccactc

SEQ ID NO: 1016 - DNA, 918 bp, Arabidopsis thaliana
tcgactctagagctcagtttttcatatctaatactacactaaacacaactgtgacacctccaagcaaagctatctaccaagtacaaacatattccatttcccatattctaatcaatctattaagcctcttccacagaacactcccaggttagacttttctcaccacaaagttcaaaaactcactgctcaagtcacctcttaaagactcattccgaatcccatcccttggaaataactcaacttcactaggaaataaagaattaccttcttgatgaagtactcaacgttattgttccactcagactcaggcttattatgctcctccgtgttctccaccaaactaactttagcgatactaatcttcacaccctcctcttccttctctgctgcatacggagactctgacctaagaccagtcctcattttcttgcttccaaaactattcctcttaacacccaaatccttctctttcctcttcaccccttcctctttcctttccgattcagcttccaccgcaggcgtcacagaaacaacacttccgttctgatcttccattacactagaaacattaaagttggccggaagcgaacgacgagcagaaggaagacgagctcttgaattaggccgagaaggaagcgccggaggcatatctttaggccgatcacactcatctttctgacgaagagactcaagcatctcctctaacgaactttttcgctagtgtgttcggcgatgccgataacatcattcctcaatcacagacctcaaaaactgaatcaaagttgaaaactttctaaaaacccaacaccagaaataaatcagaaatctcttgtgctgagtctttaattgagaagcatttcacgcaatccaagcttccataaaacctaatctctcaaatcacacgcctcgttaaccatg

SEQ ID NO: 1017 - DNA, 812 bp, Arabidopsis thaliana columbia
gggtaccggatgtgggaagatgcacttgtctgatatcaagtccaactgatttgttattaaactttggtttgtaatatatgcatttctttgcagcttataggtatccatttttttgcttcgtttacaaaggattagctttactcaatatagagaaatcatggcgataaggggagactttgaaagctgaaaggccaaaattttcattgacaatgcttgatgtctttttcgtatatacaatcaagcgttcaaaatttgcttactgctttttcgatgctgggaaaatgttgcattctgtttgaaagaattttctgcatgtgaatcaatgaggaaatagcagtaccctgtaatgaaagtactttggtcatttcatctcacgagagtgcagaccaagtgagacttttctataagaaagcaaacctcaacaacatccacaacgacaagcccagccaagctaggcaatgttttgtttgcagcaacttgcacagcgaccgaacctcccatgctgtgtgttaataacatgaaaccaattcatgaacacagaacactggatcacactacttttatcctacaaatttatgcatgtgtctatcactacaaccctataccgaacgaagcctataaatgttccatacttaagaatctaaaacataaccatagtgtcagtagacaaattgttgtacaggtagatcataaacaactaaaatcttaaactttcttacaaatgttacaggtgtggaaatatattcgcaggcgcactggaaaaatattgatgtactcactattgaccagccatttacacgttaagatagaga

SEQ ID NO: 1018 - DNA, 944 bp, Arabidopsis thaliana
ctatctcaacgataataacttctccggtgagttccctgaatcactgacgtctctacaccgattgaaaacggttgttctttccaggaatcggttttccggcaagattcctagctcgttgctccgactctcccgcctttacacgttttacgttcaagacaatctcttctctggttccattcctcctctcaaccaagcaactctcagattctttaatgtctcgaataatcaactctctggtcatatcccaccaacacaagctctgaatcggttcaatgagtcgtcgtttactgacaacattgctctctgcggtgatcagattcaaaactcatgcaatgacaccactggaatcacttcaactccatcagcaaaaccagctatccctgtagccaaaacacgtagcagaacgaagctcatcggaatcatttccggaagcatttgtggcggaatattgatacttctgctgacatttcttctcatatgtcttctttggagacggaagcgacgaaatccaaaagagaagagaggagaagcaaacgcgtggcagagtcaaaagaagcaaagacggctgaaacagaggaaggtacgagtgaccagaaaaacaaaaggttctcttgggagaaagaaagcgaagaaggatcagtagggactctggttttcttgggaagagacatcacggtggtgagatacaccatggatgatctactcaaagcttcagcagaaacgttgggaagaggaacgttagggagcacttacaaggcagtgatggagtctggattcatcatcactgttaagaggctcaaggacgcagggtttcctcgaatggatgaattcaagagacatattgagatccttggcaagctcaagcaccctaatctggtgccactcagagcttatttccaagccaaagaagaatgcttgctcgtctacgattactccccaatgga

SEQ ID NO: 1019 - DNA, 703 bp, Arabidopsis thaliana
taatctacatttgtacccatttgatgagacatttcctgaatctattgagtctgctcaaagcacaattacatcgatttgtgttctctctgtctcttcctttctttctctttactaatatcagaacatggaaacttcgtttatttacttagcatcattttctgatttgatatttgaacaattccaagctagtattaaagaaagaggtagtgtttgcttattggtgatctgctttgttgtcctcgtcttcttctctttcacaatcttgagtcaacaacattattaacctctttcatctcaaaaagttctttcgtcatcttgggttttctgtaaactaagaaggaaatggaaggtgggttttattccgattggaatgatagttcctcgtcgttattcggatcagagaatccggagcacgagttggaggaaggaaatgtaagaagtgaagagattgtctctcagatacctcagcctcagacaccaagggagccaatgaagtttctatccagatcatggagtctatctgcttctgaaatctccaaagctttggcgcagaaacagagacaacagcgagatctgttttctgtttccagaacagtcctagaggcttcttccaagatgttgctgcagatcactcatggtatgattacatccacttgtgtgacatattcacagtttttgaatctgattttgatgatccttggta

SEQ ID NO: 1020 - DNA, 1117 bp, Arabidopsis thaliana
catattcaagacaagcacaaagattcagattctaataatgcagttccttaacaaactctatgtcaaaactcaaaacatcttatcattgagcatctagattctgcatttcgatatgaaaaatttcttgatcataattgaccaataatcataattgaatcgaagaagctcaccttcatctcagcttcagcaaccatagcagcagaaatatcggaagcagagacgattgctccttccttagcaagtggaatcgagagcaaaccggttccacaaccggcgtcgcaaaccgtgacaccggccaaggatctatcttcagtcagcataagcatcgtgttctccaccgtcttagcatgaccgagtcgaatatccttctgtactcgattcacttcatcagtctcaccgtagatcttcctccacctctcgaaccccgtgctattgaaatactccctcacaacctccttatcgcctccgccaacttcctccgcctgcaatttccgcctcctctccggatccgttaaggaaaccatcgccgcgagtgctgctacggatcctccaccgagtacggcgattgttgtactgtcgaccccggctaggtcggtgacggatgccgcgacgacggtggcggctctgctccgtggagttacattgaatctagtcgcgttggggaatctgggaagaaattgagagactgaggaagacgatgacaacaaggaaggagcaaacggcattatcgaagtagaggagaaagctaaaacaaagtgagccttactctgtttcgcgctcttgcagtgagagagagagtgttgttatcgttatcctggataagatagggaaggagacgatccacatttcgatttctatgggacccatcttaatgcggtatgtcacagaccagtttctttatcatattttaacgtttcgaccttttttatacacaaactttctagttttgcctcaactatataaaatttatatttttgcccctaactatatgaaattcagctttttgtctcaaaaaacctgtatttgggttatttgggtgaggtacgaagagtattatcaagtacaacatggaagcaaacatatacaacaattggacacagtctgaagcgaacagatg

SEQ ID NO: 1021 - DNA, 452 bp, Arabidopsis thaliana columbia
tttcaattagtccataaacaaaatctgaaacaaactcatagaagacatgaaacagacaatggaaagattagttaaccagggagtcttccttcttctggacactgttcaggtgctacaacatcaactctcccatatttcatcgggatatcaggaccaccagcctcctgaagttttatttatttctagagttatcagtaaagccttaagaccaaaatagtttcctaataggccaagcccaagaaaagtgaagaaagacctctattgctgtggcactagctaactggaataagtccgcataagagatgttaggatacttgtctttgagaggctgaatgagctttaaagcattaagcagacctgtaaatgtcaaaagtagaatatcaagacaccaaataaaagtcttaagccacaatgcatgtgaaatgatgaaaccagtaccagcatttgcagca

SEQ ID NO: 1022 - DNA, 620 bp, Arabidopsis thaliana
gactttggttccggtggtgattgtggatgaaatagcggtgactgtggtggtgattgagacaaagtttcttgaacagtccttcgtgggggttggctgctgacgctttgccgcagttggacaagtctagctaagtttcctaaccggaatctccggcgagattgtcgattattaaacattagtgttatattctcataaactatttagaaatgtatgcatatgtttggctaaaatagatatgaacgagaggagacaactttaacatacacgaaacataccttcttgagactaagtatattggtaacaaaaagaaaagtatcggattcaccttttatgtcatttcacaaatcacgtgttcgtatacctttcatttcaggggaaaacaaactaacaaacttgcaatacgttcaagttcaacaatgtaagagttgactaggacgtcttgaattaattattaacaaggcctagggagacattaataggctttgggcattactttaaaagccaacttaaaacgtcaacttgggagacaattttttgagtaagcgttctcatgtctccgttttgacacacaacctctaaaactctttttctctacatatcgttttttttaatgaatatat

SEQ ID NO: 1023 - DNA, 277 bp, Arabidopsis thaliana columbia
tgcaggtcgactgacgtcgtagtacccttcccattaaaatcataaaacccagatatgcggcataaagaggcgttattgtcaggcttagcatcgctattagcacttcatactaccgtgggttttttaaaccttccgagttttgttgatgttattccgagaattagcaaaccgtaacgaagatgttcttggcaaccatcttttgatgggagtccggctgttcgatagccggccaagggtgatgaacgaaatgtgaacccttgtctcgcctaggttggat

SEQ ID NO: 1024 - DNA, 599 bp, Arabidopsis thaliana columbia
  unsure (1)..(599): unsure at all n locations
nnnnnnnnnnnnnnnnnnnnnnctaaagttcattaaattcagatggaattcttacagttgcagacgacctattaaaaaacgacggaaagcacttcatcgatatgatggagcaattggcggacggcgcatgcagcgcgaggaggacacgcaatacggcatagcagcagcacaccaatctcttcacagcagtcataaccatggtccgctagatgacgaggattacgacgacgaggaggatgaggactacgatagtcaggaggaggaagaatacgaggaagacgaaatggtttgtcgcacagactgctacagtaccaagaactcgaactgatgatgttaggacgccatgacggaagaacagcgcatggaggagggccgacgcatgtttcagatatttgcagctcgaatgtttgagcagcgggtgttgacagcctatcgcgagacagtagctgaacagcgccacgagaagcttattgaagagctccttgaagaggagaacttaaacgagcagcgcaacgccaagaaagctagggaacccagaaacgaaaagacaagaagagactcgccaagttagcaaaggatgaagaacagctcgaagagag

SEQ ID NO: 1025 - DNA, 594 bp, Arabidopsis thaliana columbia
  unsure (1)..(594): unsure at all n locations
nnnnnnnnnnnnnnnnnnnnnctaaagagagctcctgtagtgtagctgccattgccgggacctgtcctaaattttccagtcgtactttgctgtggggacccttcgtaaaagaccacaagtatggcagaatctctcggggtatgcctcccccttggtccgaaacgcgcataatcacatgttgaggtgcttcacaaatcagcacctcgatggggggtggtgtttggttgagaccttgatatctctcgctcacagcctggatcgaattacgcaggagttcgccaatgatatactccaggtgactgagcatgtacggaaaagtggcgtccaaatgcccctgcacagatatctctgggatcttatctgacccagaactctgccgaataatgtcttgtaccagcttgccgcatcgctctacgacttctttggcgttgactttaggaatactcgccgacaaaatctgcatttaggtctgtccgatcttgtgatccagggaagtgcacggcgaattaaaggtttccgcaatgccaggtgctgtccgcaataactcgacgagaaatctctgtcatggattagacgtgtagctccaatggatag

SEQ ID NO: 1026 - DNA, 507 bp, Arabidopsis thaliana columbia
  unsure (1)..(507): unsure at all n locations
nnnnnnnnnnnnnnnnnnnnnnctaaagaaaaggagctgactcagtacattggcaagcgacttacaccccacccgacgaaagtgcgcgcggatattgaagtcacctgctttggttatgatggtatcgatgcggtcaagaacgctctgcggaccgctgaggcagagaacactcctgagaaccaaataaaggtcaaactggttgctcctccgctctatgtcttgactagccaatgtctggacaagacacacggtatcaagatgcttgaagaagccattgaacggattgagaccacgatcaaagcgtctggcggtggctgcactgttaagatggctcccaaggctgttacggagcacgatgacgctgctcttcaggagctcatggagaagcgcgacgtnngagaacatggaggtcagcggagacgagagccagtctgagagcgacgagggtgtcccgaataaatatgtgcgtcattgtttaagtgccgctttgagtcttcctcaggaaga

SEQ ID NO: 1027 - DNA, 498 bp, Arabidopsis thaliana columbia
aatcgcttcgtccaagaggttgatttgagcgaattcgaagaaaacatcttttcctttgtccttctcatcataattagacaatattgagtaaccgtttctcctacaattgagaagcaaacattttcattcatcaaatagttagatttcgacgatataatttaatttctcactgatctatatatatatcaatcaagcatatataaactgatgttctaaattttattattattagaagtcaaaatttcaaaagaaagtttacaattttttattgtgaaatcgggattctgtacatatatatatgcacaacaaaacctcttgtgcggatgacttactcagcgatgagttcacgttttcttgttgattcagggggtgctttttcattcaaaagcgggtagaaagaatcttgagtctcaaaggtgttgatcgtgtcgtacacctggttccataacaaagagtgttaaacaaacggaaataagtctagtgggagattacttgcga

SEQ ID NO: 1028 - DNA, 563 bp, Arabidopsis thaliana columbia
aaatgtaaccgttaaagaagctgagattgaaaactaaccaaagccaggattatctctaagaccaaacttcatcaaaattggtttaggccattgtccatcttctgatgattctccaccacctcctggataataaaacccattttccaaatccttattgattttcccgccttcattctcagtctccggcgttgcctcattccggtttagtctcctctcttcttcttctctagacacaggctcagatcccgttacgtgttcgatttcgggtctatttcgtcccaaaatcgggtcgatctcggttttgtgagacgacccggtgactacttgatctctaccttttggcaaatcaaaatcagagctttcaccaaacttggttcgagtactcgtgctggtttcaccagagtaatcggatacaaaaccagttttcttcgcccaagatcttaagtctctcggattcaaatcctttttaggtaaaaagggttcactctcttgaagaaagcaccaaactttctctcgccataaccattaccaccaccacttccattacccttattattaccagt

SEQ ID NO: 1029 - DNA, 526 bp, Arabidopsis thaliana columbia
cttacacacacatacatccttatagcaaaacataaagtaaaacacaaaatactagcttctgacacctacacgatgacacctacacgattacactgttgcaggctgctcccactactagcatgcttactctagattatagcttagttttccaagtaaacaaaagcgactagattcaaaccaacttctttcacatgtaactacttgttctctctttgacttcttcagtatggtttgaaagcaaaataggcattattcaacactccctcttgccattttgcaactcaaaccaagcttttctcgaaatccttcaaagctctgtcttcccaatgctttagttagtatgtcagccaactgttcttcacttctgcagtataacagtttgatatcccatttctttctgcttcccttacgacatgatacttgatctgaatgtgttttgtccttctatgctggacaggattcttacaatggcatagctgactggctatcgcagtaaatagggtcccctcttgagtggtgacttcaa

SEQ ID NO: 1030 - DNA, 943 bp, Arabidopsis thaliana
accacacaactcttgacagtggttgtacgttcatccatatcttgttgagcacctactccatcaagacaaacgcacacaaaaagttcttaaaacactcaaaaatgtatttgtctaaccaaatgttgtacccaacccgaacttagtaccattgaaccggattaaccaaataaaccacaacatcacatacacaattgacaaaaacagttaaaacactggaaaatgtctttttagcttttagatttttaccacggcgttgaaactgtaacgttctacgcctttccaattatcgacatcgtaagcggtatagtgtttgcagcaggcggcgactttgagacggttagaatcgccaccgtcagtctcttgaagacccttaacgtaccctgaagcatacttactagcgagcaatggatcttctcctggagtctcttgccctcttccccatcttggatctcggaatatgttcacgttcggtgaccaatacgttagtccggctaatcccacgttgtacattgccctcgcttccgttgagacgaccttaacaaataagtgataccaatgtcattcaaaaaagccatgtgtatccaatccggtttgaaattgtattgacaaaaccatattcggtttattatatttcttagaagaaatgagctgaaacttaaccatgaatcataatcatattaatcatggcactgaaaacaggtgtggggagaaattcattattggttacaggtacgaaaacgacgtagtataacgtgttgtaaagtgtttacttgtaccaaacgaaagatcagaaacataggagaggcccagtttcataataagtaagatattcccattatccaaaaagagaataaaagcaaaggacgaaaataaaattttgaaaacaaagatcaaaagtggataaaaaattaattaccttgccaatggcttgaaacagagatac

SEQ ID NO: 1031 - DNA, 461 bp, Arabidopsis thaliana columbia
tcggctataagttttgcctctggtaataaaattaatcaagtaagtctcgcttcttcttttgtttattttggaggtcaagtattctttacacttggacacttggtcagtaacagaacaatttgataattctatctagtttgttagctaatatggtatcaaaatgtaaatcactctttggcgctttcaatttcctttgattgatcaagtcaacactaacaaagcaaaaacagcggttgcagcagagatcaacagcgagataaaacgaggagtcgaatcagcagttgaggcgtttaggttatgtgaatagagaggtggtaaagggcaaacaagcccagctttcctttctctgcactcgttagcgaaaaggccagtagggtagtttccataaatattcatgtagctgaacattgtctgtgcacaatcactattcatgtcgttgatctgactcacgtaaggacatg

SEQ ID NO: 1032 - DNA, 508 bp, Arabidopsis thaliana columbia
aggatcccccatcccgtcgttgaacgtcgctgcgggattactcggtttcttcttcgttaagtcgtggactggtttcttatcgaagctagggtttacagtgaagcctttcactaagcaagagaacaccgttattcagacttgtgttgtcgcttgctatggcctcgcctttacgcggtataaaacctttcttacttaagatctgtgtatcattgtgctggaatcggattcttagttttcgaattctggaaacagttgttgttttggcgattgtccaatagtaactgtgatttgatttagaggacttgaaatctgtagctgtttgtgagatttgattgattgtgattactagtataaggatttgatatggattggtctttgatttttgcttcaggaggatttggttcatatttgattgctatggatgagaagacatataagctcattggtgctgattatcctggaaaccatgcagaagatgttataaatccaggattgtggtggatgattg

SEQ ID NO: 1033 - DNA, 741 bp, Arabidopsis thaliana columbia
ctcttgtggggagagagagacaagtaaaaagggaaagattgtgtgttgtgcaacttcttcttcactactatccccaaaaccacaactataacctgtgaacataaatatcgactttacaactgccattatcgtcatgaccggagaaataattgagacaaaacagaatacaagtacataaaacaaaaataataatttatgacagcatttttggagttattcaatagggaattgactaaaaaaataacaaaaagaaaaacttaggccaactaacttttgtttgagttagctgaaataacgctaactagctaccttttttagttggcgtaagttttttcaccattgatgttcacatacaggagaattaaagtaaatcataaaaccaggattaacgcacggagagtgtggagatggcacggtcacgggtgtgaaataaaagatggagacaaaagcaaaagagaaagttaggagctgcctcttctcttctcttctctcttcaaaagtggcgattcgtgtgggttgtcttctcttctttctttctttctttctttctttgtttttcattcctttttctttttctttttttattttaaacagttttacctttcgaataataaattaaaagtaactactttttcttttgctcgtgtttctcttatatatatacgtatcaaattaaaattccataaaacaaacaaatctcttttctctgttgtttttgggcacaagtcacatttgtctttt

SEQ ID NO: 1034 - DNA, 521 bp, Arabidopsis thaliana columbia
  unsure (1)..(521): unsure at all n locations
nnnnnnnnnnnnnnnnnnnnnnctaaagtttacactttttaacggcattaattctggaattatattaataataataattatcataccattttgtttaagtctaataaatcctgatcctattatatccattaatccttttatctaaaatcttgaattatgttcttctagattattgattcatgcacttccttaaaataaaggtgctaagtatatttttaagtcattataataaataattattatttatcatagttccaaaaagtctttattatttaagacttattattttgccatatctggacctcctactaataatggtaatcaaaaatttccgaaacctcctattaaagctggcataaccataaagaaaatcatcattatggcatgagctgttattatactattatataattggttatctgctatatattgaacaccaggccctgataattctaatcttataagtacagaaaaagctgtacctaataaacctgaaaataatgcaaacattaaatataatg

SEQ ID NO: 1035 - DNA, 389 bp, Arabidopsis thaliana columbia
cttctccttcttcttctcttctgcgtatccataccacccatcaaattctttgttcaaagcggtatatttctctgaggaattcgttacggacaatgcctgatatgctttcgacgcagctttcctataaaacttctttatcccaggctgatcaaccaactgagataagcgaaagtaaaacaaccacgaaaggacttcaaagcgtcatgacacggaagagtaaacattgaaaacgcatcgagagaagcaaacaagtatacacgtttgatgtcgttggtgatctctgtttcttctgctagttgataaaagatatcactttgcagttcgtggtgaacatagcaggaagattcgttcttcccctgatctgaaatcgttttctcggttaacatcaa

SEQ ID NO: 1036 - DNA, 486 bp, Arabidopsis thaliana columbia
cctaataagattaccatgatgtatcttctaattcatgtgatcattttcacagtttctcatcttcagtttacctcacagctagtaaacagatatctctaccataaaagctagatgagggaatccacgatcacgtgtcagatcaagctcaaggctaatgcatatagaaagtactgaaaaccctaatcaaaagtagttcttcctcacaggaaatgatcaaacatgcatcaatttagaaagctaatgaaacccaatgcgaaccctaaccctacaaacgaactaattgaaatcaagaaaaactaagattatgagcagtgagctgaaaaaacttaccacatgcttcctctgtatttgagtgtataagggccaccatcgagtgaccgctcaaaatggctatgaaccttatgtttccctttccactttggtcaacaagagctagctcgaaaaagcgccctaacttcggttccttgactggccaatgcgataaaa

SEQ ID NO: 1037 - DNA, 292 bp, Arabidopsis thaliana columbia
ctcagcgatcgtgaacgcacgtgtggactggagagagacgcctgaggccacgtgtttaaagctgacttgcctggattgaagaaggaggaagttaaagttgagattgaggatgatattgttttgaatatcagtggagagagacacgtggagaaagaagataagagtgacacgtggcaccgtgttgagggatcgattggacagtttacgaggaagtttaagttgccggagaatgtgaagatggatcatgttgaggcttcgatggagaatggtgtgttgactgttacggtgccta

SEQ ID NO: 1038 - DNA, 653 bp, Arabidopsis thaliana columbia
tgtggaatttctcgaatgctggttttaagaatgagtgattgcccttctccgacccttactgcccaacctgcgagcggacagctaatgcattccacttattgaacagggttctatggtcggtccgcgacccctggataccgaaggcgtccttggggtgatctcgtagttcctacggggtggagacgatggggtcggtccatggattttccttccttttgccgcatttcgctcaaagggttgaagggagatagtgcatcaagctgttcgcaagggccaacttgatcctcttccccagggatcaatcccagacgagggaaccataggagagccgccgactccatctaccgttcatatctcatgctgcgtagttctgaatggcggctttggctcaagcagcaggacaagcaagggcagaagagtctcaacagtctcatgccgagatgatggctcgtaacctgttgagagctaatgcgattgggaatcatggagaacaggggcgtaacatgaaccctaatgagatgatgttgctgatgaatggatgggggacaataacacaacaataatagccagaaggaagagaaggaccattagaagatttcttaatgatgatgagatgaaatggtgacatgagaagtgcgagaagtgggatttga

SEQ ID NO: 1039 - DNA, 401 bp, Arabidopsis thaliana
taaaggtgacggcatgaccatcatggtgggcggatttatggggattggcactccatcccgcctggttgaagcattactggaatctggtgttcgcgacctgacattgatagccaatgataccgcgtttgttgataccggcatcggtccgctcatcgtcaatggtcgagtccgcaaagtgattgcttcacatatcggcaccaacccggaaacaggtcggcgcatgatatctggtgagatggacgtcgttctggtgccgcaaggtacgctaatcgagcaaattcgctgtggtggagctggacttggtggttttctcaccccaacgggtgtcggcaccgtcgtagaggaaggcaaacagacactgacactcgacggtaaaacctggctgctcgaacgcccactgc

SEQ ID NO: 1040 - DNA, 443 bp, Arabidopsis thaliana columbia
ctagaggatcccctctccaagaaccatccacaaacaaaaaagactcaacattgtattatctttaatttatgtatctgaaaataattcgttttgtagaataaaagatttagtaataaaagtagactcgattcccaatttatatcaaactatagagctgtgattgttttagacgtaaaaaccacgtttacttttccgtttgcgtttataatgctgcaaacgcaactaccaattaggcctgaatgataatctgctatcatggtcttgaaactactcgcaaaccaaacattgaattatgttttgtgagagaaattgaaataaagatggaaatgtagagaatacttgtcgaagtagaaggcgaacggagccataacaacggtggcaactccgtgacggtagacggaaagaacgtaaatgctcatgcctttgtttaggacatcctttgt

SEQ ID NO: 1041 - DNA, 857 bp, Arabidopsis thaliana
aatccccctactcctcaatgtgaacatgtccaatgtcacaaagctgacatcaacaaactttctcatgtggcgtcgtcaagttcatgcgctattggatgggtatgacctcgccggttacgttgatggttcgatcgaagaacctcacaccacagtcactgtccatggtgttacctctcccaatccagaatacaaactctggaaacgccaggataaactcatttactctggcctcatcggtgccatctctgttgcggttcaacctctcttgtcccaggctaccacctctgcccagatctggcgtaaactcgttgacacttacgcaaatcctagccgtggccacaagcaacagatccgtgaacaaatcaaacaatggaagaaaggttctcgttccattgatgactacgttcttgggctcactactcgttttgatcaacttgcactacttgaagaagccataccacatgaagatcaaatcgcgtacatacttggcggtctctccgatgattataggcgtgtcattgatcaaattgaaggacgtgatatttcgccttcaatcacagagctacacgagaagctcattaactttgagcttaaactccaagcgatggtccctgattcctctactccggttaccgctaacgcagcctcctacaacaacaacaacaacggccgtaacaatcgctcttcttctcgtggcaatcaaaacaaccaatggcagcagaatcaaacacaacagtctcgctccaacaatcgtggctctcaaggcaaaggctatcaaggtcgttgtcaaatctgcggtgtacatggtcatagtgcgcgacgatgctctcagtttcagcctatggtggcagtggtgg

SEQ ID NO: 1042 - DNA, 542 bp, Arabidopsis thaliana
gtgggatgggaaagcgggctaatagagctgtcgaacgtaaagattatagaaacagaggaaggtacgactgcaacagcagctcttgctcttcggctcgaaccgttcatgtgtcatgtctcggctgtgaacaggttagcttggagaccaaccgagaagtgtgagtctaatcagagcttgcgatggttaacttcttgtggggatgataattgtgtgagagtttttaacttcaagttttgagtttacaacacaaaacatatcgttgtatttttaagattatggaccaaaaggtccaaaactctcttccatacaggaccattgtaatatttatgcaaattttggttagctaaatcgaaacatgtttaacaaaccacttttttcctcgtttaaaaggaaaaacaaacaaataactttctcgctttgcatctttgatgcttttcattgattattaagctatggtgcaacagtcagttttgtctcttgacaatataatcagcgagagacaacaaaggaaccaccttgtcagaatcaaacccctgaagatg

SEQ ID NO: 1043 - DNA, 1131 bp, Arabidopsis thaliana
acattccgtgaattgttttgttgatgttgttgaagttgtagacaacgttttgcactatgtccctgtactccacacagttgacattttccttgatagcctttgctgaatcgagagttgttgttattggtgttcctctgaaactgctgattgttggtttgtgattgccatggttgaacggaccggttattctgtttgcaggacgagtgttagcgatgtcagcagaaacgggaatcaccggggagaaggacgtagttgtggacagcagcttgttttccttgttgagcaacttctcatgaatctctggaatggagggaggggagtcacgtccttcaatctgctctatgacgcttttgtagtcttcacgcaatcctaggagaatgtgttcaacttgcttttcatgttgtagaggtttgccgagaagtgctagttgatcaaacttagtgatgagaccttgcatatattcatcgactgtgtttatatctttggtctgctgctttaattggatgcgcagttgttggatgtgaccccagctcggcttggcatagatgttggcatgtgttttccagatttcattagtggtgagtgctctagagaaggttgactggaccggaagagagattgcaccgatgaggccacgagtggataagcttatcctggcgtttccatttggtgaaagctgaatttggtgtaacgacaccaatgatttcaatggtgggtggtggtgcaggcagtgagccatcaagatgaccggcgagatcatagccatctagaagtgcatggacctgaaggctccacatcaggtagttgccagcggtaagttttgtgacattggacatgttcacattgaggagagcctgagtagtgtcgattgcatcaatagcagccattgtgtgagagaaagaaacaggagatagaaaacagaggagaagaaaaagaaaagagattatagaggagagaggcggctgcgagaaataaaaagaatttagaggtttctagggtatctttttgctcttgataccatgtaaagaagatatgttttcttattattcacaagagaatgtacaatcctttataaaggaattacagaggaagattctggactatcgtcatttacacagtttccataagtgt

SEQ ID NO: 1044 - DNA, 540 bp, Arabidopsis thaliana columbia
caacaatatcttttagacattttattctgttaagtggaacttctcttcttttagacttcttggaaagtttctttgcaatgacaggactcacaccttttccttcctgacggttactacggcgtagatttcctcctcctctagtaattgccatgactgagcctgaaacaaaaccaacaataaatatcccacattagcattacataatccagtttatattccacattaatcttccactagaactccatcatagtcatctctaacatagtaactctcatcgtcagacaactgattccccatatcttcaacttgctcctcaaacaatggtgttgctacatactcttcctcagtatctagctcatgatatcctcttggtggcgccctcatgactacataccatggagaggattcatcttctcttgagtaaaacacttgtttagcttgtgatggcagtatgtatgtatctcgaagaaacgctgtctggaggaagatgctagatgctgaggaagatgaaacatgatgtcaaataatgatggagggaag

SEQ ID NO: 1045 - DNA, 490 bp, Arabidopsis thaliana columbia
gtaagtgactgcagtacaagcagaattctctaaacacaacttcttgcatctctgggagctaatctgagagataacagaatcattagccgggtagatcccatacaactccaagttcttgaacttcaccatgttgaaaccagatttgcagcctggcttctgataaggcaccaagcatttaggatccgagaccgatacaaaagcattaaaagggcaattgcattcggtgtatccagaactgttaaaggaacaaacttgcgaaccacaggttgcgaaaacacgacactgattctcaacagcttgccaaaccggtttccaaatccttgaatcctcgttccacgagtacattctcagattaccatcccggtcaagcctaagaaaccggaacttcacagtgtcgttatgatcttccccaaaaacagaccaaacaggtctcatcagatcttgatcctcaagaaacagagctccttcggaagtaagaacagccccaata

SEQ ID NO: 1046 - DNA, 535 bp, Arabidopsis thaliana
tatgttgcagctttggaaaacagcagctgcgtttccgaatatgaaatctatagttccataaatgtcacattctctatagaactgacgcaaggcagctgcgtaaagtgtgtcttgataaccggagatgctacatcggtataacactgattggtctgatgtgatgcttaatgctatggcttgatgtcctctaggccctgctatgttcttgattccgatatcacgtgcaatgaatccgtcacccgtaaccgctacaaaaattgcattctaattatcaaacaacaaagtttcgttataaacaatttatgtatacgaatgaatgagtgtatgtacttactcattgtagcggtgtccgggacagaagttcctccggtggcactatcatcgccaacaatcaccgtcaggtctttgccttctccgatcaaagtaatctcatgtttatggattattactttctctttgtaaacccctcttttcacgtaaattatgaacctaccatttccatgggcagcagtgacagcgtccatcacggtgcggt

SEQ ID NO: 1047 - DNA, 840 bp, Arabidopsis thaliana
ccataaacacgttcatataatgttcaactaaatttgttttttctagccttatataacaagagattatattgcttgttatatttgtatatacatccattgaacttctcttctcaatcaatgcgagaaatcaccaagatacagagataaagcaaagaacttgcttccttcaccaagcagctgcaccactacaccgaccagatacgttaaagacgacatgtatgaaaccactttcatccgaaccgatccttcttccttcaagcaagtcgtccaactgctcaccggaatccccaagaacccgacccaccaacccgacccgagatttcctccttttcactcaatccctccgatcaaagccgtgaccaacaagaaacaatcttcgtccttccgactctccgaacgtcgcaactcgatgaagcattatctcaacatcaacccgacccattccgggccacccgagattctcactcccaccatcttgaattttccggctctcgatctcagccctgacactcctctcatgtctgatccgttttatcgaccggggtcttttagtcagagccctagtgattcgaaaccgagcttcgatgatgaccaagaaagatcgatcaaggagaaagggttttatttgcgcccgtcaccgtcgacaactccgagggatacggagcctcgacttctctctctctttccgatgactccgattcactcgccggcgccttcacctcatgatcattgatcaaccctagttttgcttttgttttatgttatgttgtaagtttctgttatgcttggtgtgacacaattgattgatgacaattatattcttacaaaaacttggacttt

SEQ ID NO: 1048 - DNA, 1370 bp, Arabidopsis thaliana columbia
atcagaatcaaatattttcaattttgacctattcaccaacatcaaaacaaactaacaataaatcaacaaactttatatatacggtatatctcataatatatgctctgaaatgtataagttatgcaattttcatatgttaactatattacaaaactctcttagcttttaaaataaagaactaaaataagattaaatgaagtgcatggtacgagaattccttcgagagcaagcaatgaatatcctaaaaagaagaaatggaaaactcgatgagtgcgatggtacagttggagagatgtgtcttcgttcgaaaaaggttccttctttctttacaattataatgtagaaaataaatatgaaccctaaagtaaagctctcacgggatcacccacctaccaccttccctttgagaattatttgtggaaaaaaagaagaagaatattcagctttccaaatttgacattctttaagttatgaaagaaaaaaacagtacatatttctcaatttaaactattttgttatgcaaaaaacaaagtagttttattaaaaatgtaacgattgttggaaaaaaaactgagagaagctattcattcacttttcttccctaatagtacttctaagaaattgggaaacctttgttgcatggggtgcctgctttatgaaaagcttagaacttctttagtcaagcaacaaaaaaaaaaagtaaaacttagccatccacatgttactgaaaacataattaaattgtacaataatctataccatattattatacggccatcactaattagcttattttgggttcacatcctctaacatttctaaataattttggcaagcttaatattgtagattatcaaataatttttaatgtatacgatgataatagaaaattagaaaccatttcgatcaaataaaagtgatgatttgttttataataaaaccattaaacttgactagacttcacctaattatgtgatttgggtggaaaaacctacgaaatatcattccatcgttcctcattaccctttaagtaggacttagatagttaacatgtataaataggtttccatttgtattgctattgtctttctctccttctccactaatgccaatggcaaaactaaggaacatcatcaaaactctctccatcttcttctttctcatcgcagcaaccgctccttcactctcctctgccacctccgccacagacaccttcgtctttggcggctgctcccagcaaaaattctctccggcgtctgcgtatgagtcaaacctcaactctcttcttacttctctagttaactcagccacatactcttcctacaacaacttcaccatcatgggctcttcatcctccgacacagcacgtg

SEQ ID NO: 1049 - DNA, 596 bp, Arabidopsis thaliana columbia
acccaaatcaagaccccgttaaagtagctagtacaaaacaacaagccatcacaatcaacatagtcgtgtagccgtatcgcatctcagatttcaaaccaggaatggctaagggtaactcatggacctctatccgtggacctttgaaatttacggctaccgaataaatcttagactcggttcggaagattaattgtggttgtgattgaacaaagtggtcgttgacaaacttattatcatcgaaaagagaattccattgcttacatacggttctgaatttaacaagagattgaggtggaacctacataggatctcttccactaattcccatggaaggttgaccgacaccattagctttaagatgaaaataaagattatacttgggtgtgacaaaattttctaaattataaaacaacagtatatatgcactatatatataaggtctctctctttgaacaaaaaaaaaaggtctctctcaaaataaaattatatgtatatctaaataattgcataaggtaatgtacaaaaataagttagacaaagagattttttgactaaataatattaaattttggaagagatatttaaaatgtattaga

SEQ ID NO: 1050 - DNA, 374 bp, Arabidopsis thaliana columbia
tacaggtaaactaacacttgtttttttactttttttttttttttttttctgtagtttttgtttagcagaaaaccttatacaggtttgaatacgtatagtgacataataacaatattatttcagaccaaattaagatattaagtcatgatgtgtatagtaatttatcgaagtagttacacatttttattggttaagcttccacaatggatccctacggtgaacttatcttctcagaaggaatgacacgtaaactagccgactcatttgacttcggaggaggactagtgaacccaaactaaagctgcctgccctggtcttgtctaggatataagcgcagtggactataggcttttcctatgtgcacccattatgac

SEQ ID NO: 1051 - DNA, 450 bp, Arabidopsis thaliana columbia
cagtcttgagggtctgatttgcaaaagaacatagtatcgtctgcaaataacaggtggttgattctagggcttttctttcccaatttgattcccgtaaaatctcctctaatttgagccttgttgcagagtccggataaaacctcgctacagaggataaaaatgaatggtgatagggggtcaccttggcggactctctttgaggtgtgactagaccttgagccgttccattaaggaggtaagagtatgataccgttgttatgcattgcatagtccatcttatccatattttgtgaaaaccaagtctctccataactagttctatgaagtcgcattccaatctgtcataaagcttgctcatatctgtattaacagccatgaaacaagatcattttgcctttgagttgtgcagataatgcagggaatcgtgtgtaatcagcacattgtcagcta

SEQ ID NO: 1052 - DNA, 610 bp, Arabidopsis thaliana columbia
tggatgaaatggacttctcatccaaagaaactgagagatcaagactaggggaaaaaagtttcgcaaatactgtattttctgacgggcaaaagcttctagcatctagaattcccagctctcaagcacaaactcaggttgctgttagtcattctcaactaacgttttctcctggtttgaccaaaaacacaccatcagagatggtggggtggactggagtaatcaaaactaatgacctctcaacttctgctgttcaactcgacgaatttcattcttctggttagtgactatcttagatgggattgttttaactgatgggtctttcccttttggagtgtagtattgttaactaatttgattgataactcttcgaatatggatatatggcacatagcagatgaagaggaaggtaatttgcaaccgtcgcctaagtacaccatgtcacagaaatggattatgggtcgacagaataagagactattggttgatcgtagttggtcccttaaacagcagaaagccgaccagcgaattggttcacggttcaatgagttgaaggtctttctctagccttttctttcattggtgttaccttttgttcacgagtggatgattt

SEQ ID NO: 1053 - DNA, 527 bp, Arabidopsis thaliana columbia
tgttaaacgtccaagaaccatatatcaagaaaaaaaacaaaaatggaaagattgtcattaaggttttacgtataatcatgttagcattgatatatatgcacgcatgcagtaacaaataaataaataaattcaacgggttgcacctgtttgcttctgagacagatagtccccagagagcaccagctactctctcttgtagacccgttgatgcatttgaagaggacttcgcaagtgccacctaattttataatcagaaacatgtataagttgtctgaaggtgaagctgaaacacataaaatgaaataaggaaaaataaaggaaatcacaataccaaggcttcaacaccaccaaatgcagcaatggattctcgattcttgtcatcaaatgctaaattccaaagagccccagcagcttcctgtttaacaccttcatgaggtgattgcgtacgtgaacaagagcttccaatgcaccagcctcttgtccaacagcagcattattaccgttgctacaccatgagcagctagatt

SEQ ID NO: 1054 - DNA, 1611 bp, Arabidopsis thaliana
tgaggtcgctgcataagaggaagaaacgaggacgaccaaagaagtttgataggataaaagagccaggcgaatcagcaactaatccaaataagctaaccagagaaggaaaaacagtgacttgtagcaattgtaaggaaataggtcacaataagggaacttgcaaaaaaccaacagtgcaatcagctcctccacgcaaaagaggaagaccaaggaagtcaatggtacgtattctgactctctcttggcccatatttaagcacacgaccatcttagccttcttcctcacaattgttgtaggaggatgatgatccatggagcatcaacaatgctccaagaaggtggagaaatgctccaaatgttgctcaaagtcagtattccaacccacatgttgctcaaagtcagtccaacccacctattgctctcagtcaaccgactcaaattccgcagcattctagtgctccagcagctccttcaagtggtacaggtcgtgctcgtggacgtcctccaggagtaaaaaatggtcaaggcaaaagtaaaagtaaaggcaagggacgtggtaaaggatccgatgaagctccaagacctcctgtcttttttatgtccccttaaactgataaggtcttcgatgtatggcgacctgagaagaagtaggaatgacttatgttctctttgtccttaatgactttgtaggattactttctaggatgatatctatgtaggatgatgtgttttggttggtaagatcctgaattgtttttgatgggatcttactatttctaacggctcttttgatcaattaaagtagcattttgattatcgaaacaaagagttaaagttttacaacaacaaaggttccccaataacaaaacaacaaacaaccttagcatcaacaacgttatgtcccgaacaagacaatgaactaggacctacttctttcccattccaaggcacatcccaatgacaacaatgaaacatccccaagacaacacaatcaattgcctaagcattttttctctctcattagcacccataacttcaattgcaagtgtcttcttctcttcatcaagcttcttcttctcttcttcaagcttcttcttctcttctacaagcttcttcttctcttcctcaagcttattattctcttcctcatacttcttcaaatggtcgtttgagccatgacactgagacactcaccttctgttccctcaaagcctttatacactcgcttagctgccgaatctcatctctagcctccaataagctctgtttttgccaaccaaatggcttctctgcatctgcccagttgatgaagccatgaacaccacatctaacaaatcttctaccaggattttcatttgtccaagccttagtaattgtcgtagccctaccacaactgcaaacaggaccccagctacggctgattgaatttgcatcagatcatgaactttggctcatcatctttgagaaataagcaaagatagaaatttttttagggtttgtgaatttgaaatcgatttggggagaatgagaaagggcaacagtgtctttaaattggactaattaaccacgtgtggttatgttttaaccacatttagtggttctgttagcggc

SEQ ID NO: 1055 - DNA, 506 bp, Arabidopsis thaliana
catgtcatgttttaaaattttagtataaataattgttaagatgtttggttaagaaccaattacttcttaaccattggggatggtaagatatatcagaaattgattcctttcacttcactttgtattaggatttatcttgagaatcagtacatcatttatttttaaaaaggtacacaaacgaaccttattaaacacacaacacaataatttcatatatatatatgactttcagacctcaaagagttgactttttgtttgcattaggagctttgacataagcaaccagggaagaatctccggttctagtcaatgtcttgagctcgtagcccaaccaacacctcgaactctttctattgtagaaaaaccctaaacatttgcaatctctcgtacacttgtccccacacgcactctccgtcgtcgatgatccaccggtatatcttgtcatgaaactatcagctccttcgatcatgaagtacgtgaatgtcttgggatcgaacttgcgagac

SEQ ID NO: 1056 - DNA, 937 bp, Arabidopsis thaliana
taaaactcagatatttttaattgtcacaaaccccattggactggaggaatatcccatttatatagatcagtagtggtaagtgttaactctcttaggaattattagttcaaagcaaatcagctaaagaatggattttaacttcaaactaaaaagtccccattattcattccaacatcatccttgggaagtttttaagcagtaagatacaaaaaagaacaaaaaagctagtcgattaaatgtcacaagcttgtgaacaccatcctctccccgccggattttctaacatatcggctaaaggaccaaaagctgtagacgattttacataacaagtttcctaagttgtgaaagagagacgaacaaacaaacaaacaaacaaaaaaaagaaagatcatcgatcctctcgccggatttgtcttgtcatatatcaactctctcgttaagcctagcagcgacggtaagagaagccgctacaccaccagggtgagtacacaatttagggttattcctcatctctgcgctcaccactccctcggcatcttccctcgtcacagctctgtctgccgataacttccctgctgcaccctatataattcattcggttcgaaaacatttagccactactttaaaaggaaaacatcaaaaacattgatgaaaatgttttgaaaattagggtttaaccgtcaaaacatcacgaagcttgattttcctctcgtcacgatctacggtagcgttgtgatccgctgcagattgagctgaagcggcgactccagctagagcaatgacgttggtaccggaagctctcatctctgccgcttgaatcgctgcggcgtcgctttgatccacaggtttgtttccagctgtcttcacagttgcttccagtgcttctccaatcgttattgtactttgcaaagcttcttcgtccgtacgcgcagagcga

SEQ ID NO: 1057 - DNA, 694 bp, Arabidopsis thaliana
tggcacagatttctcctgatgagatggaagggtttgaagatataaagtccttcttagcaagcgacaagaacaaggatattgatattatcacaccctttcctttgttgaccgaaaatgctgtcgagtctcttagatatagagctgaggtgagtaatctctgtagtaagatgattacttctttcattaagtgaacagtattaaaagttgcaatttgtttgcaggatgtggcaaagagtgttacaaagattgcggttcgagagtctcgagctcaggatttgaggaatgagataatcaactctgaaaagtaagcaagaacataactacgtgtgtgatgtgaattctcttatttttttcatcttcttaatttctctacttctttcttcaggttaaaagctcattttgaagctaatccaagagacttagatctgttgagacatgacaagcctctgagtaagactgcacctgcaccacatctaaaggacatccccgagtatctagtggacgcaaagactcaagaagcaagcaagatggtaaagctagctagagccgcaatgggcaacactaggagatctggtggaggcggtggtcgcaacaacaaaaacaagaaacggtctagaaaaggcagcgacccactcaaaaccttcaaccctaatgtaaaacacaactgaatttctccatttcttctctgttttgg

SEQ ID NO: 1058 - DNA, 853 bp, Arabidopsis thaliana
gaacacataattatcctctaaaaatcacttttttcatttacatgataaaatctccagatttcatcgtttcgaaaatcattaccgaaactaccgacaaaacaagaactttatgaaacctgagtcggattctctcagtcgggtcgagaaaacagatgaaaaagtttcaagccaatcaaaattcccccaaaaatccaaaattttcagtcacctaacacagaaacagcaaaattcaaaaccctagaagaagaagaattgaatcgaaatgcgacgttcacaaacctgaccagaagccaaaacgacgggatccctcataagctcattagagagaggacaacgaaactcctcaggacaagacacagtctcgagcatctctaacgaggaagatttcgccatcttcctcatcgtcgcttctctcaacgcagacaaagcgtcctgtaactgatcaatcgtctgaacacccaaatcatcttcgtcatcgatcttaatcagcaacttcttcatctcacgcttcagttccttggctttagcaatcgccgtcggatccgaatcgaaaacaccggtcttcgccatcgccgtcggttccacccgccggtattcaccaaacccttcttctctcagatgatacgtatgtccaaatttttgaattgattttctcacattaattaattttatttatttattctctgtgtgtttgtgaaagagagagtaataaatatgaggaagagagaagaagaggcacaagtgttgttgttgtactctagtgcttcactataatagaattgtggcctgcacgaatttgctacctatgcgtctcttccttatgagtgaccaatagaaacaaaccaactgattg

SEQ ID NO: 1059 - DNA, 783 bp, Arabidopsis thaliana
ctaaagtccgcttcgccaccgtaaacgcgtttagctggcggcacggtagtaatcttcacgtcgctgtactccaggcgagtcgtgccatcagcatcgcggaaggcgagggtgtgtttgaggaagttgacgtcgtcacgctcggtgcaaccttcgtccagacgctggtgcgcgccgcgggactctttacgtgccattgcggagtgcgccatacattcagcaacgttcagaccgtggcccagttcaatggtgtagagcaggtcggtgttgaacacgctggaagtgtcggtgatgcgcacgcgcttgaagcgttcctgcagctctgccagcttgtcgatggttttctgcatcagttccggcgtacggtagataccgcagccttcttccatagccaggcccatttcgtcgcggatcttcgcccagttttcgccgccatcctggttaaccagatctttcagacgttgttcaacgccagctgcctgcgcttcaattgccgcttcgttgccattaccggcagttgctgcacgctctgtcgcttgttcaccggccagacggccgaagaccaccagttccgccagggagttagaacccagacggtttgcaccgtgcagaccaacagaggaacattcacccacggcgaacagacctttaatgcgggtttcacagttctgatcggtttcgataccgcccatggtgtagtgtgcggtcggacgtaccggaatcggttctttaaccggatcgacgccaacgtacgctttcgccagttcgcagatgaacggcagacgt

SEQ ID NO: 1060 - DNA, 158 bp, Arabidopsis thaliana columbia
gccagtgtgctctaaagctcaggcgtggctggaaagtttacgacctaaaaccctccccctcgcctttgctgcaattatcgtcgagacagcgctggcatggtagcaaggtcacttcgatccgctggtcagcctgctggcacgaatcacagccgggctaa

SEQ ID NO: 1061 - DNA, 491 bp, Arabidopsis thaliana
tgacgtctcgtgtaataagatatgaagttattagagctggtttttataatagtgtccaaaaggtactaccgatcaaaaccgacaacaaaataacaaaaataaattataaaatataaaatatagatatatatattaatacggtagatatataaatatatatttaacattttgaactcatgatatttttgggtatcattgactcggttatgagagtatagaagaggtgtgtatatgtgaaggtctatctttaaactattgaaaaggatcgataatagtttttgagtattatcatttatccggtttctcagaaattagtaccacaaggtaaatggtggttgcaagtaggacagtgccataacggccgagataagcatctgcgacgaagcgctccaagaagaggcatcaaagtagtgacaccagaccagtagttcgtaatttttacagccatcttgagatcttggtgaagaatggtagtcaagtagaccactaag

SEQ ID NO: 1062 - DNA, 585 bp, Arabidopsis thaliana
gatttcttttggcaatggcggcgacaaagacttgcaacattggggtcaatgggctaccagaaggtgctctataacggtaaaacggtttgccgatacggaagataaaaaacgaagtagccataactattgtgagtatgatgctagccacaccccaaccaatccggtcttcgatatagacaattacagtcaccgcggttaaaataccagcgcatagaccagcattccaccagttaaagtaagacattttcatttttcgttcttccggatggccatcttcgaattggtcagctccaaagctctcaagggatggcttatgacctccagtgcctatggagatcaagtagattgcaatgaagaaggctatctcgtgggctttccttggctcaacacacatgtcttcatgacatgctttcaatcccggtataaaccaagacaatgttaacagaatcaagccctgcaaatttgtaaattcaacaaattaagacaagaaacaaggaaacaaaacatatatcaagttttgactaatctcaaaatttgttgtgtgtgataagatatgaagttattagagctggtttttataatagt

SEQ ID NO: 1063 - DNA, 562 bp, Arabidopsis thaliana columbia
ggggtaatcagtatgatgtgacaaacatccatgttgagaacatcacaaagaacctcttctttgtaatgcttaccaatggagattggaaccctacaagacagtgatacacaaaattgagagcctttgcttacccatcctaaggaatatggcttttgatgtaacgttgttggtaacttcaagtattcaaccagtttctgagaaactaagttttcactgctaccaatatccacaatcaagttacacactttgtcgttaatagaacatcgtgttctaaacaaattccttcgctgtccttcttccttagatgataataagatcctttgaagtacaagatttatcatctcattcgactcttcttcagcaaattcaacctctgcatactcatcctcttcttcaagttcttcttcttcctctagaaaagctacagttctcctactaggacaaacactcgatctgtgatcttgtccttgacagcggaaacacttgtcgatggatggtctcgcataagggttagtttgcttctggattgtgttttatcttctcagcattattagaaccattg

SEQ ID NO: 1064 - DNA, 525 bp, Arabidopsis thaliana columbia
tcatcccctaatgtacaacattttagctcaaaaagcaaaatatggtttctagttttatatgtgaactttttctatagttattacagagttatggcatggaagtgtgttatatgtgtgttcatgactatttgtatcatgatgttcttatatgctgtttttatctatctgtaggcgcttagaaatctcaagtggatggatttgagttattctataagcctgaaggagcttcctgatctttcaactgccactaatcttgaagagttaattcttaaatattgcgtaagtttagtgaaggtcccatcatgtgttggaaaacttggcaaactacaagttttgtgtctccatggatgtacaagtatcttggagctcccctccttcaccaaaaatgtcactggcctccagagtttagatctcaatgagtgctcaagtttggtggagccccttcttcgattgggaatgcataaatctcaaaatttggatcttggatgtttaaggctgcttaagcttcctttgtctattgtgaag

SEQ ID NO: 1065 - DNA, 499 bp, Arabidopsis thaliana
gcaactgttaggctatgtccacacgcaacttgacaaaaattaggttctacaagagctgcaacacaggtaggcacaagttttggttctttgtcaccatgaccaagacgactcttgtcaccatcaccccatgtaaagagctttcctgaagagcagttactagagctcgagctcccaaccatgacttctacaactgcggctgtgtgccatacaccacaggctgcccgaacagtgcgaagacctttcaaggagtctacctctctaggtatgaaaacacttttcctgtctccatggcccagaacaccaaaggtcccatcaccaaaagtaaacaactgcccagcggaagtcacaacagctgtgtggtaaggccacaagcgatggatgatacatgtatcccttccatcagcaaatttactcttttggggcccagtgactgacttcatttccatgtcccagaataccaaaatctcctttaccccaggtatacaaacccccgatagag

SEQ ID NO: 1066 - DNA, 754 bp, Arabidopsis thaliana
tatcgacaatgatccttccgcaagagcacctacttaacacctgtttatccttaagtgactcaaccaatgtcggggaatttctatcatctacatctccatgaccaagtctaccatttgatccctttccccaagtgtaaacctcagtcctcgaagttaaaactgcaacatgataagcaccacaggctatctcttcgacaaaactcttgtgaagtttaccttcgacacggtttggagtttttccgtctgcatgtgagtttccaagctgaccatagacaggactgcccatagtatagacatggcctgatgttgtaagtgcaaccgttagactgtgcccacatgcaacttggcaaaaattgggttcaaccagagcagcaacacaggtaggcacaagttttggttctttattaccatgaccaagacgacccttatcaccatcaccccatgtaaagagctttccagaagagcaattacttgagcttgagctcccaaccattacttccacaactgctgctgtgtgccatacaccacaagctgcccggacagtgcgaagacctttcaaagagtctacctcccgaggtatgaaaacacttttcttgtctccgtggcctaaaacaccaaaggtcccatcaccaaaagtaaacaactgcccagcagaggtaacgactgctgtgtggtaaggtccacaagcaatagatgatacatgtatcccttccagcagaaaattaaccctcttagggacccagtgacttacttc

SEQ ID NO: 1067 - DNA, 590 bp, Arabidopsis thaliana
ccatatatccgactgacccgaccaatgatacaagattgaagattctttaaaaatgggttaacacaaattctgttgcgttaacaaaaatcagaataccctaataagaactaagtaaataatacactgattatgataatttatgacgagttgaatggaaagcaataattcaaagttttgtttcttcacttcctaaatactaacaagcaacgaagcaggaaccaaagactcaaacagctttaataacccaataaaaaaaaaagggaacagagatttttggagaaaatcaaataaagatctttctctctgcttctacaaatcccctaatcatatcatatgtttttggaaaatccataccatacatacttagaaatgtctctccctctctctctggtcactgccctgtctcagctggttcccctcttccggctcatgttttgacgcctccttgatctcatcaccgcccgcctcatcctaaaaatcagcaacacaatcagcgtttgagagaaatttctgagtaaaagaagcttagactgcatatataagagtttatagggaaaagcaaaaggaggaagacaaaggtgtacattgat

SEQ ID NO: 1068 - DNA, 773 bp, Arabidopsis thaliana
tctgtaaccttgtacccacaagtatctcagtgaaggcaattttgtaaccgctgcagcgattgctcgctcactgaagcaacaacctctcatctctagcttctgtagatttggacagcctcttgagaattccattaaaccttcatctgattcacctacgtaacccagcagcatccatctcacgtttggactgtactgtccgatgtagcttaagcccaagtcggttaagccgccttgtctcagatagaatgcaaatcgtctgagtttcttgcatccaatcaaaagagatcggactccgttgtccagtggcagatctgtaatcctttcttcccggtcgagtaagacaaggcggaagtcacagaggtttttcagatatgtgcctatgctttcaagagattcgttagttatatctgagacatacaccgccatgtattctagctcctggcagccctgagccaaagcgattaatcctctttgtgagactaagccttcttcgtcctccattccttgttcatctgcaccgcgttcaatcctcagccgcttcaactgcttacagtactgtgcaaggacctctagacccctatctccgattacattccttgtctgaagaaaaacaacaagtgttgtcagtcttatatagatgtaaagactaaagagaaccaatattgcattcatatcccttatctccccaaatatttcgtgaaaaaataggaacacaatttagtactaaggacgcattcccaagtatgtagtaaagacagcagagttaaacgttt

SEQ ID NO: 1069 - DNA, 494 bp, Arabidopsis thaliana
taacggatgcgatcataccagcactaatgcactgcatgttgttcaccaaacccttgttgaagtccttcatcaccttaccgtactgctcctggatgtccaacgtgattgtcacggcacggtgcaggaactctcctatcttctcaaagtccttctccaccaatcctctcgatgtcatcgccggtgtaccttcaaaatttatagagattcaaacaatgaaattcagttggtcgttgttaagaacaattcacaactccctcataccgattcttacacctctgggagcaagacaactagtgtctccgaataccgcattcctgttcaaagtaatgtagcacaatgcacaaaccttctcaaccttgttacctagctgacgcagaaacagaatttaacatcaggaaattagttcagtataaaatatggtctcaaaggttagtgattatcacttaccggtcaaccaagagggcgaagatccaaagattaaggtggtaacagtc

SEQ ID NO: 1070 - DNA, 590 bp, Arabidopsis thaliana
acaaacaacaacgacacgaaacccaacaacaatgaaaacaacttcactgtcataaccgcacaaactccaacgacgatgacatcgacacatcacgaaaacgactcttcattcctctcttccgtcgccgccgcttctcacggcggttcagacgcgttcaccgtcgccacgtgtcagcaagacgtcagtgacttccacgtcgacggagatggtgtgaacgtcataagattcgggaccaaacagactggtgacgtgtctcttacgcttggtctacgccactctggcaatattcctgataagaacacttctttctccgttagagactttggagatttttagtcttctttgtttctcaatttattcatcaaaatttattatagtgaattttatttttttggtttatcgatatatgtttttagtttcttcacatacttttaaaatttcctttcttctttagtttttttttctgtcttttctgtcgtaagaagaagagagatatacatatatcaagtgagatctagctaccaaagttccatatataattatgcacatatttttattttattcatgaaacttatatccttacatttttg

SEQ ID NO: 1071 - DNA, 549 bp, Arabidopsis thaliana
aacaacttaccgtatgtcttttggatgtccaacgtcagtgtcactgcacggctcaggaattctcctatctgctcaaagtccttctccaccaatcctctcgatgtcatcgcgggtgcacctacacaaacacatatatatttatatgttagcaagatcccacaaatgagattcaatggccattgtcaagaacatttcagaatttccctcttaccgattcttacacctccaggagcaagagcactactgtctccaaatactgcgttcttgttcaatgtaatgctgcacagatcgcagagcttctcaaccttgtttcctgacagaagaatatataaacatcaggactagttccagaaaccatagggtcgcaaaagtgggtttttttcctgagatataatcactcaccggtcaatccaagagggcgaagatcccagagaacaaggtggttctcagttccattggtcacaatctggtaacccttgctcattaggtagtttcaagggcacagcattggcttcacttgtgttgcgtagacttgacccaggagtatta

SEQ ID NO: 1072 - DNA, 1498 bp, Arabidopsis thaliana
atatggggaggcaacggtcaaggtaaatccttccagtgtgagcttgtcctggccaagatgggtatcaagtgagtccatttcccaaatctccgatcttgacccggtttctgtttagctctctttcgacaagaatctaaaaaagtttgaatctttttgcagcccaatcatgatgagtgctggagagcttgagagtggaaacgcaggagaacccgcaaagcttatccgtcagaggtaccgtgaggcagctgacttgatcaagaagggaaagatgtgttgtctcttcatcaacgatcttgacgctggtgcgggtcgtatgggtggtactactcagtacactgtcaacaaccagatggttaacgcaacactcatgaacattgctgataacccaaccaacgtccagctcccaggaatgtacaacaaggaagagaacgcacgtgtccccatcatttgcactggtaacgatttctccaccctatacgctcctctcatccgtgatggacgtatggagaagttctactgggccccgacccgtgaagaccgtatcggtgtctgcaagggtatcttcagaactgacaagatcaaggacgaagacattgtcacacttgttgatcagttccctggtcaatctatcggtaagaaagattcttactaccctgaaaatgttctatataggacctcgtgcagaatctgatatgtgtttttggtgtggacagatttcttcggtgctttgagggcgagagtgtacgatgatgaagtgaggaagttcgttgagagccttggagttgagaagatcggaaagaggctggttaactcaagggaaggacctcccgtgttcgagcaacccgagatgacttatgagaagcttatggaatacggaaacatgcttgtgatggaacaagagaatgtcaagagagtccaacttgccgagacctacctcagccaggctgctttgggagacgcaaacgctgacgccatcggccgcggaactttctacggtaaaacagaggtttgaaactcgtttgttttttggtttagttggccactgggtatgaaaatgtaaaagagaaagagaagaaaatggaattaggttttctgaagttaaacttacttgacttgcaggaaaaggagcccagcaagtaaacctgccagttcctgaagggtgtactgatcctgtggctgaaaactttgatccaacggctagaagtgacgatggaacctgtgtctacaacttttgagcaatattatcctgcttattaatttgctgttttactcctattgtctcttttggtttatttttctcctttgtgtaattgtggattggatcttgtcctcttttgttccctttttttttttttatgatgtacaacacattggtaatttaaaattgccttgtcataaactacacttcttattccaatgttgcacactaggtaaatgcttagacatataaagtatacaaaatctgaggccaaatagcactaagtagaacagaactata

SEQ ID NO: 1073 - DNA, 651 bp, Arabidopsis thaliana
  unsure (1)..(651): unsure at all n locations
tgaagaaaattttgacgcccaataatctatgtcaagcagatggttctctatctctgaattattagagtgcccattaatcgattttatgagtatttcacaatctctttcaaattgtatcttcctaaaccctcttatccaagcttgttaaagtgctactagaagagctttcgtttctgcctctaaaggagacgttacattaggtagttgtgatgaaccccaagcttttggtatcccttgatcatctctgataatccacccgcatgtagcttgacccgaacgcatatcaaatcctgcatcaaaattacatttgaccgtcgacaagggaggttaatccaaatagggtgcgagatcataaccggttgagtgtctttggctgggattaaagcacttcttaaagttgtaatccattcatgaacctcagcttgtacttgtagaaccatccgtgaagggctttcccaatatttgttaaaaacaaaattatttctcgccttccaaattctccataatagccatatcggaaccaactatttattttttgtgagttgctggttaaagtacgaatctattatataagagatattctcctttagatcattcaaaaaatgatgggtttgaaggatagtcanatttgacagacgccacacgatattt

SEQ ID NO: 1074 - DNA, 585 bp, Arabidopsis thaliana
atgatagagtcagaattcaagtttaggtcccgatcagatcatcaaaaacacaaaacagtatatctaatatagtattcatgaccaaaaactactacaagattgttataagtattcataaacttggaggtttcatcacaagaagtttcatggaggtaatttacctgggccctgtgtccttcactagaaaggtctgtcaaagtctccacattccaccgttcaacaagaaactccagaatatcagcatagtccttggcagtgtagacaccgagcctctgggcaacggttgagaagtgctcaaacaggttatcatcttggccatcatacattaaatgtgcaggcattgatatctttttcttcatcatatcagccaggcccaagatcgtgccatcagggtcaatttcaaagagcttctctacaatcttggtgtaagcagtctcatgacgcctctcatcagcagcaatggtcccgcatatctgcgcaagtttcaaatctccacgatctttcgccagtctggcagtgtttccatgggagatgaaggtcgctctttcttgaaatgatgtgtagatgaacccaagtaagggttgt

SEQ ID NO: 1075 - DNA, 881 bp, Arabidopsis thaliana
caattaacttctttgttagcagcagatggcaatttccctaaaagtctaccacacagatccatagaaacctcatcaccaactttagaaccaacaataggatctccatcaatctcaagcccaagtagtaaagcaacttggtctaaagtggctaccaagagagatggatcgtctgcacttcgttgcacctaaataaactagctgcaggattagtttttttttttaataagaagccaacaatctcaaaggtcgagttgataaatttagagactaccattagtcgaattgtcaagtaacaaaaattattttagtcctctcaaaacaccagcaaacctatcatgtgatctatcataatcgtactgtgaatattacaagaacttactgttttggataaagagacccaaaagagccttcgggtccatagtaaaagatacaagtatgggagtcaaaagatgctaacgagtcttgtggggtttagagactttcttttttcgcttcttgacagatttgggtgtcttcgtcttcctagactctcgtttctcctctttcactttcttcttgtgctctttccttgcagctttcttgtcttcatgacccaattcttcttcactctcttcttcctcacttccttcttcactttctccgtcttcttcttcctctccttcctcttctttctcttcagcattcacctctatttgctgctcgtctattttaggaagagcatccttaagccccgttatcgtttggtatagcatgtctcctgtgtcctgcccgcttgttatcttagccacgtcagcctcagggttgttcacagcatccagagatttcggtatgtatgactgaacatcaataacaaaccagtaagattaagattatctacagac

SEQ ID NO: 1076 - DNA, 621 bp, Arabidopsis thaliana
gtataatagttaacgggaatatttctgattctaacccaaattgggagaaacctcagatagtcatcaggtggtttctctatccatttttgcataacaactgcccaatcatcttgtgtccacactccagtcttcaagatttcttctaagtcttcctcatatttaaagaaaaattgaaaccgctctttcgaaagagccacacctctaacacgattagataaacgccaaatacgaggcatgtctaaaatccagttagacatccgttgattttctggatttaagaatcttcccagaatactacagctattgcgttcaatagaggaaaactgcggaagatttgagagaatcagaggttgattatcttcaagagacatgttttgaatagctttatccaagtctttatccatgaaaacttcagcaagcagatgacagaacaaaaacagagcactttgtaaaagtttgttttaaccggaccgaaaaagttaatatctccggtagaagtccgctcagatgaaaacagctgagagagaagtccttgagcccaaaagaaatctgggacggcgattgattaacggcgacgcgagatctttatttcacctactatgaaagagaacagagagttta

SEQ ID NO: 1077 - DNA, 1047 bp, Arabidopsis thaliana
tgaagcataccgtgcggcggaggaggcgggataatcatcctcggaggttgaggcagcggaggagtagttcgaccaggaacgaactcaggagctccggcgttgagtcgacttaaggagagagacctcaagagtgatggatctgaggaagaagaagctgaagtagtagaggaagtagagtgggagtgagatagatcatcggattgagtaggaggaggagtagaggaatctagggtttgttgatcagccatggatgatgacgattgaaggatgatagatgaagaactttcccaagtaaagttagggcttttactgaagtgggaatcttcttcttacagattgagagatagatagagagagcagatctctccggagaaggggagagaccaaaagaggcaaaagtcgcttcttttcgtttgtttttggagagagcttctcgagtctcaaaggtcgtctcttgtcgtatatttatagaatgtgacttttgttcttatcgacaaaagaaaaaaaacttcacttgtttggtcttaaaattacaaaattccataaaagatgtttctcaattattattagtctcagagtatgaagcataaagcagcttcaggtcattcctaaaataaacagacagaagagtttcgcttcccacaatgttggattcaatgcttctcttggacatgttggtcgaatctgtttctgatggcttcccagaatgcaggaactgcgatgttatccggaacttctttaaaggatggtaagtagttcaagtctactatcacgtgatctcctgttccttcttgaatctgtggagattaataaagagacaatgtgtaagtaaatgagttatatataaagggtcttgtgtgatgaggatgatacttacaactacgtcaaagccgaagattgtgagatcaagcttctttcttagccaggtagctgcttctgtaactagctctagatcaatctcgcttaccgggttctggtttgcggaatcaacaggtaacgattttaagctgtggaggtaatggaactccaaagttacaatctttttag

SEQ ID NO: 1078 - DNA, 604 bp, Arabidopsis thaliana
gtccttggcagtgtagacaccaagcctctggccacggacgagaagtgatcaaatagattatcatcacgaccatcatacatcaaatgagcaggcatcgagatctttttcctcatcatgtcagcaaagcccacgactgtggtatcaggatcaatttcaaagagcttctctacaatcttggtgtaggcgtgttcatggcgcctctcatcagcagcaatggtgccacaaatcttcccaagtgtcaagtctccaagatcctttgccagtctagcagtgtttccatgggagatgaatgtagctctttcttgaaaagaagtatatatgaatcccaagtaaggattgttttcagtttttggatcctacaaaacaaaacacaatcaatacgaccaaaaaaagagacttgtaggtttagcctttataagaaaagctagccatattattatactaaaggagcttaccattccagaaccaatgaggtattgaatagttttttcaatctgtctcatgtctactcgtccagacagataaaggtacttgttaagaagatcaccatgtctattctcttccgcagtccatgccctagtccatactgcccaaggagttggac

SEQ ID NO: 1079 - DNA, 1423 bp, Arabidopsis thaliana
cccccagttgagtaacaaagagttctaaaaatgccgaaacatatgtatatgtctcactaaaacctaaggctatgttacctctaatcaaatccaatgaatgtttctccacaattcatacaaaaagacaacaactttgacaaaacactgagcaaacatttcaattccacaattgaaaaacagagcaattaaccaattcagaatcactccatcgaaaagtgtcaaactttctttgaaaaatgtacctgttagacgatgtgtgagcgaaatctgaccatccaagcggttcaccgcgccatttcaagatacgaccatctgagacaccaacgtacggaccttcacctgctggatcgaaagctatactctcaggaccagaggctccggttaagttaaccactttcgccgacgggaaaacatcacgcgaaccggagatttcaggcggtgcgaagatgccagaaccggtttgagaattcttgacaaggattgcgagaaccgctgcaatcactgttaagaacactgtaatgatcatcatggtcatggtgattggtgccttggtagtagtcagtgagatttgcactctgcttctactgttacgagagcttctttacttttgtttctctcttctttggagaaaagtcttaaggttagagaaattagagaaacttccttataattgttgtttaattcagatttagcctaattagttgttaagagatcaattatccccagaaaagattgaaatgaagaatacgaaactaacatgtcaatggactttattgaagcccatttgccggcccaatttagaacatataatgttttaagcaaccagtttctgttgagattatgcccaatttagaacatagtaatcttgagccatttctttacgaaatggtattttatgtaaaattttgtctgaacataagaaaatttcagaaattagatagattcttcaaaaataacaaaaatgggagaacaaatcatacaaatacattgacttccctttttaaaatcataattgatatttcttatagtaaaaaccaagagaaatgtcactaatggtttaaaatgagttaactagcttgataattaaaagatcttatataggaacacaatcatacaacctttatgaattaaatgatacgttacatgaaatataaactcacgcgatagataaaataataaaagatttgctggcaaaggaaaaacaagaaaagcaaaagggatttggtgtgtcaataatgtggctctgtactccatcggagagacacttcccgtatcttgaatatggcctagcagcaactgtaagggcatttgtattaagtgttgagtttaatcaatattattctgatattaaatcttgaaatttgttggcacaaatctcgaaagcagaaatgaatgaatagcgttacattttcaagttaacgag

SEQ ID NO: 1080 - DNA, 804 bp, Arabidopsis thaliana
gtgactttgtgtcgtcttgagacggtctcagcctctgccacgtcaccttttcctccgccgctcgccggcgatgtgccgagtatcttgaaaaaaaacagagtaattcaaattttaatgaaaaatcctcagaaaaatatcacattttccgggaagaatttctttacctagcttgaaatgtatcagtcttgaaatcgtatctgatcttagcatcgtaacaagacatcatgaatccaacatgtccgttctgcaaatttagaaatcaaaagaagcaatttttctccaattcagtcaaatgggtaacaccaaaaccacacacaaaaaaaagacgaaatctttgttcatgattcgatcataagcatgattacctcgcgattgtagacttgagcagggaaccaaaacttgccattttcaagattcgagtaccaatacatcacagaatctataggtgccaaatatgatgatgatcctctgttttcacaaccatggtttgaacttaaccatgcaaagggtttcaaattcgcaacaaacctcgaactccagtttggtttactctttctactactactactactacttgtgagacatctcattatcgtagcaacgtgagatttccactcttgaatcgctgcatcacccatcaatcttccccattttgtctccatatgcttctcccatagatgatcgcttacacacttatctcttagctcggagcaaacactagtcattgcacagagctctgatggtgagagttctctaatatgcagtctaaggttaagccaggcaaatccaggagagacattttgt

SEQ ID NO: 1081 - DNA, 1270 bp, Arabidopsis thaliana columbia
tccaaagcaaatatgcatctcatctggattttctggtcctttgagatccacgttcttgcgattcttcagaactttgacatttatttacctgaaaattttaaatttatgaacaagtattacttaaaactttgaatatactaataaccacctaactgtatgatacacatggaagcatattacatataacatttcattatgatcagattgactactacgtatatttatcatgagaccatgcatgtaagaaacattttggatatttttgtgtgtattttccatatattatgaaagaaattaaataagagtaaaactatgtaagatagagaaatcacctccgcgactgcaaacgcctctgaggaaaagaaggaagataattagaagaacaaccgcagctagtagtcctatgatgatcgcgaacgtcttttctcctccgtagtttgttttatctattttattcaacaaatattattcaaaaaaatattattgttagtttctattttgttttggaattaaaaaaaaaaaaatcatcaaattatgaaacgtataatttgagttcttattgtcattttcttgcagatatatataaatttgtaacagaatttttgttaattccaaaaatatcacaactttgagattttacaaatatatacgaacttttgttataggtaggattcactaaaataaataaaattttgtcaaattttaatttctaatatacatgtactacactattcctaaatatttaggaaacttatctaaatctatatttgcaggtctatttttaaaaaacaaattggattttgaattatggaaaacaaaacattttatttttgaaagttttcctactaataatagtaagtagagagaactcacaattatgagacttggcgtaatgttgtgcaccatcagttgaatatctagcgtaacacttagccaagaacatgtctccgaagacggccgtgcacaatcattcttaagccgtccaatggccgttcctaaacaatcttggcactctgacaccgttagatctcctacacattgtcccataccttgaacatcaccggaccctccggctcgaaaataccctccgccattgactagctccgtgagaactgcgtctctccggctgataccgtcggtattataacctcagaggatcacacttctttaggacaacggtcttgtcttcttggccaaggaagctgatgttatcgtatttgatgtagcagcagctagctggagggctcaccacaagtgaaagggcaaagag

SEQ ID NO: 1082 - DNA, 593 bp, Arabidopsis thaliana
taaagtgtgctgtttgttttaccgatctggttatggctgcattacagcaatcgttctggtcgcagtgaattgtcgcaaagtgagcagcagcgattacgcaactggctgatgaagcaaaacggatgcgcgaacgtattcaggcgctggaatctattcttgatgcagaacatccgaactggagggatcgctaatggcgggcattaatctcaataaaaaattatggcgtattccacagcagggcatggtccgcggcgtctgcgccgggattgccaactattttgatgtaccggtaaaactggtgcgtatcctggtggtgctgtcgattttcttcggtctggcgctgtttaccctggttgcttacatcattttgtcatttgcgcttgatccaatgccggacaacatggcctttggtgagcagctaccttccagcagcgaattgctggatgaagtcgaccgtgaactggcggcaagtgaaacgcgtttacgcgagatggaacgttatgtcacttccgatactttcacgttacgtagccgtttccgtcaactgtgaggaaagttatgaatactcgctggcaacaggccgggcaaaaggt

SEQ ID NO: 1083 - DNA, 1669 bp, Arabidopsis thaliana
taaatggacacttacaaagccctgatttttcttttcttttcttcttttataagaacattggcaagtgtttcataaggaataaaagaaagttgtgatagactgagcaggggatacaacaacttaccgggcaaagatcatgactgatctcatcaagagttttctttggtttttgatgtacaacctgtatttggagcaagaattatttttttacccttatgggacaatcctgaaggtttaggtagaagataaggcaaggttaccagaaacccaatggcctgtctaatatgcttaagctcatcccacgaagaacccgcatactgaaattgttgttgttagttaatcagttagtgttgttgaataatgatagcagactgctaagagagatacctcatttgtggccttaaaacaccagtgttccaattcagacaagcccgctttgacgtactccccattactaaatgaacaacactcgcgtctcaataaaaggctgttgtggacaacaaaggaagcatttgattagtagaacatagctagcaatgtttgagactagagataacggggttttagatgctaaagattcccgtaaaaacctgttaaacagctgaacattgatgaatgagaatatctgcgtaaacaccttacgcaccaaaaatgaaggaacctaaaagcataaatagaagattcaaactccgggcaatccggaacttgttaatatttagaggaaatggaatcgcaaaggaactcacattgtttgattttagagtattgaggaaatttgtaagactcttgacaattccttgccaatgggcgatcagtgcctgctgagctgcagtgttgccaacggaacgagatgctcctttcactaaactagccctcgatgttcttggtgcctatttgaagttgcagccagatatattcaataagcaagaacaacctcttttttcttgggaacgtgatggctgtaattaatggcatacctgaatgcacaatccaaggagtggagaaatctccttcttcaagttatcgcgaatcattccgtatatcttttcaacataagctgtgagctgctgcttaaacagtagagccggatattttgcttcaacttgtctaaaggtatctgctccacctcccgcagcaccgtttatcatggcaagatttacacctgggggtgcccgcggaactctaattgatgataacatttatcagaattaaagttataacgaaagaataagcttttgcttcattgtgttgatggatctcaaaccatatatataactctatatacctgactcatccttccaaatagagtggcagaagatgaacggcggcgctgcggacgcatcccagctgcaccactagctttgagtgtgcgctggaggagtaataggagtgtcgaggtattggataaccaataggccaatgtactgctgtaatcatgagtctgagagatgaacttgcgcaacattattaatccaatacacttgcaatcacaattagatacctataaaaactaggaagctgaagccaaccgcaatagcatggcctattgtctgaatactgcgatcatagacactggttcgtacaactgcatatgagctccattgcagtaaacatctgtaaatgatacatgctgtgataggtcggttccctggaatccaagtgttgaaca

SEQ ID NO: 1084 - DNA, 414 bp, Arabidopsis thaliana
ttcggtttatgtgacagctactctaggtcaagtcactctaaaaacggaagtttcttccgggacgaacccgtcatggaacaaggatctaatctttgttgcatcagagccgttagaaggaactgtctacattaggttaatagacagagtcgacgatcaacacgaagaacgcataatagggaagttagagaagaagctctcagagatgactccgctcaaagttccaagttccgcaccggctttgttctacgacattgaggtcgaaccagcaggtgattctaggaggttcgccagcagactcaagatgatactagccactgatcaagcttatcacgtcgctgaggagagcattcaatactcgagcgtctatagaccttttgttaaagtgttgtgtgccatgtctgctcgggaaattag

SEQ ID NO: 1085 - DNA, 584 bp, Arabidopsis thaliana
taattgatactaacattagctttaagaagcagagccatgtgaagacgaaagaaaaacaaaaacacttccattacaaaagtcttgagagattttcattagttttgtgatattaccatatcagtggccacgaagaagggtgtggccatggatgtaaagtatataatggtgagtagacaggagacaccatgagcttgatttggtactttcgtatgtcaatttagctagtcagggatttttttctttgcaaatggtaggggtgctaaaacgagggaccaactgatgagtaaccagcggctttaacctctttgagtgtagcggataaccagtctaagccttcatagagcccatctccttgaagagcacatgtgccttgtatatgccatttcctgttcttgagatcaagtaagccaagcccttcacatacttctcgaggagacatggctcctctctgaaattcataaagagttcagacgaattttggtaaatgagaacgaaaaaatatgaaataaggaaagctagagcctatgaacttttaccatgtcttgtttgtttgcaacactagaatgacactgttgagcatgaat

SEQ ID NO: 1086 - DNA, 1203 bp, Arabidopsis thaliana
gtccattgcaccaaataagtttctctctggccggtccaggtcgattttacaggtacggataatataccaagaaaactgttggcctccatttgttttgtttttctatctgaagttaatgacttccatatgtgcataaaaacaaaacagagaggttcagaaagtggtcatctatcagttgatgcaaggccaagtttggtaagtacctcgatatgtctaacaaatattgtcttgcatgttttgtggagttctcttaatcgtgctattcttctatttgggtttcatttaatttgaatcaggatttgcatagccattcaattaaccgaaggagtctctctgaagtggacgataagccacagaaatcactaaacgagaagcagcaagaaaaccaagagctgcttattcgctgcatcgttcaacatttgggtttccaagggaaacgacctgttacagcatgtatcatatacaaatgcttattgcaatggcggtcatttgaagttgaaagaactagtgtctttgataggatcattcagacaataggacaagctattgaggtttgtttgtgctactatactattttgagatacgaaaatgaaagttatggatttcggactggtagtgattgcattttttttctcattcagacgcaagacaacaacaatatactagcatattggttatccaatgcctcgacattgcttttactcctccaacgcacgcttaaagctagtggagcagcaggaatggctccacagcgccgtcgctcatcttctgccactctctttgggaggatgactcaggtgtgtgtgtggccaactaatatataaacttcatcatatcagatgcatcacaagttttaacttgtcaatgtcaatctttctctagagctttcgcggcacaccccaaggtgtgaatcttgccatgataaatggtggagttgataccttaaggcaagttgaggcgaaatacccagctctcctcttcaagcaacagctaacagcctatgttgagaaaatatacggaatgattcgtgataatttgaagaaagagatttctccactccttggattgtgcattcaggtatatatggcaatacatcagttacatgttcaagcaattgcgcatttcttcactggatttaaatcttctcttgttggtcatataaaataggcaccaagaacctcaagagcgagtttagtgaaaggg

SEQ ID NO: 1087 - DNA, 911 bp, Arabidopsis thaliana
cgcttccctttaaaccggttgctcccaagatcccgatttctaatttcccgagcagaccgggccataacccttttacaaaagctctattgtcgctcgagtattgggtgcattcctcggcgacgtgataagcttgatcagtggctagtttcatcttgagtctgctagcgaacctcctcgaatcgccagccggtttgacttcagtcggcatttcaatgtcgtagaacaaagccggtgcggaacttggaactttgagcggagtcatctctgtcagcttcttcttcaacgtccctatgcatccttcgtgttgttcgtcttctctgtcgattaacctaatgtagacagttccttctaacggctctgatgcaacaaagattagatcttggttccatgacgggtttgtaccggaagaaactttcgtttttagagcgactttacctagagtagctgtcacataaaccgaaggagtcttgtttttatccttggaaatcaaatcatgacctgaaacaatcgtaaccctaacataacagagccttggggctaggtagaccttaggtcgcgtgttgatcacgcgagaggcacacacttcacaggcgtctgaaaaccaagcctctggataaacctcatcaacttgtgtaccgaaccaaactgacatcagcaactccatgtaaaagtcggtttcggtattatgcatagagtaccactgcggtgcgattcttgcatcgggaggaacctagtcggaatttccgaggccagcttgaagttgcgcttgttgattacggtattggtcggaccgtctttaagagtaaccgacaagacatcacctttggatttgtcgaaagcaaagacttggttcaatccatatttggtctattggcagatttttggtagaggatttgtagttccgagagtga

SEQ ID NO: 1088 - DNA, 842 bp, Arabidopsis thaliana
caactattgttcatattcttcgggaatgaaatacaatccaacaaaaatgataaaagacatgatagccgaaaggtgtaacacattgataataaacaactaacctctttccatctttcccagggcaacgcgagaaaacaataacatcagctccaagtctcattgtactagtcttaaacccattgccatctataagcagtaaataaattaagcatcttcctgcaaactttcgatataagtcggataaacaaagaataattacattgtccaatggtgtttgcaagtttgctttttgcagagtatcctagagacatgcattgtcgcattttttcagggtccatcccacccccgttatctgcagttcaaaacataaggattctcgtagtacatgagtggacaaaagtgttgcattttaggcaaccaataaccacatgaataaattagggaagaggttctttaagaattgctaggtaaagtgtataccttcaattaataacatcctgtttccccctttgttgttttctagcatgtctactttaacataagtagctccactggcaacctgatatcaacgagagaaaccattactacacatcatacaatctgtctaagacaagtaaagaaacaaaaacctacctcatccaaggcattgtccaaaagctctgcaaaagctgcataagagaactcagataagctcaaaaaaatagaggcaaactcgctcatataaaggttgccaataagaataatcctccaagagccatttgtgactagttgcattagaatgcaaaactttggatggactcttcatgatcaaacacctgagaccaaattgtacactcaaagtt

SEQ ID NO: 1089 - DNA, 755 bp, Arabidopsis thaliana columbia
caatcattcaatttaataaaaatgaaaaaatatattttagttgtcacctttataataaagcttttgtgctattatccaaatggaaataatggatattttggtctttgggacaacacacaaatgacgtgtcggattgtgaatggtagtgatcacggaccaccaaagtccaacattacgaaactacccttactcgtttactatatatatacacctaagtttttgtctacaacattcgaaaactcattacaaaattctctctgtttccctccgcactcttgagaaatcgctttcttcgagtcactctcacaatggattgcataaagagtattggtagatccgctttcgttgccatcgcgccggaatctccgttcatagcagccggaacaatggccggagcagtagatctttcgtttagttcatccgccaatctcgagatctttgaactcgattttcagtccaacgatcgtgagctaaaactagtaggtcaatgccaaagttccgagcggtttaatcgactcgcttggggaagttatggctctggatccgatggtctcatagccggtggtctagttgacgggaacatcggtttatggaatccaattaggtgattttccctaaaccctaattgaaatctattagcctctcttcaatttatactgattatgtaaagtattttactttgtatttatcagttctgagtctggtgaaattgcgcacgttagagatttgtcaaaacacaaaggacctgtgagttt

SEQ ID NO: 1090 - DNA, 587 bp, Arabidopsis thaliana
tgagaaatgttcataaacttacaatcaatgcttgttttcaacttcctcctcttgccattacttacttggtctccactatagttgatgctagttttcaactttttcgtcttgccattacttccttggtctccattacgtatcgacttgtaatctcgtaaaggatgatacttcatggattctagctcttttattgctatgtcatatcggtgttttacctccctctgcaattacagagataacaatttaagagacctaaaaagtcaaccagtggaagtgtggaacatgattggaattccctaactaagactcacaagtgccctattcaaacccatgatttgctgcttgcataacttcatctccatctcaagtgcacgcaatcgaccctcaacaggaacagcgttttgctcaaccatttgcttttgtctaccacgtactacctccggctgccaaacgttcaaagctactgatgcttgcctgagaaagccattaaaaaattacatgagaaggatgcatgaggcaagaacagtaggaccaatctcatttcactgtgacaacaaagaatcatctttctaaactgtcacactgac

SEQ ID NO: 1091 - DNA, 494 bp, Arabidopsis thaliana
cttgctcgaaggcctggtgatgagtgatttgctttgttgagtttgatttgaaatgattaatgatgaagtaactgagaaaggacctggcttacctcgatagcaatttcagttggtgtgagatctgagacatttttatagccacgctttgctgcaatatctgatgattcgcgtacaaggaaggagagcaaaatttccagaagaagttacacagattgaacaaaggctatggcagataagatggatgaagaagacatactttctaaggagactctggcatttgcgtttgtgtatgcttcaccgcgctcgtcccaaatagccgagagacgtttgaaagcctacgagtaattcattcacaagcacaaacagaaaaaaagatgaatgttttgtttgaagtatccaaggcttatgattgtacaacagtcagaatcagtaccactgagtatgcatctcctgattcatcgtgtagcagtggtcgtgaatcagttcccacagca

SEQ ID NO: 1092 - DNA, 527 bp, Arabidopsis thaliana
gattccctctgggatcttctgctcgtccatgatttccctaaccacatcgtctctgcttcttcttcttctgaatctcccaccaagtttatctacatgactaggtaaccttgtttgattgaaatttgtgctttctgagatttcttctgttgttagtgtgagtatttaagctcctatggatgtggttgataggtttgagagggagaaggagaggaaattagctgcccatagaagagctttactcaggaaggagagtgaaatttctgaatggggccggagattcgtgaattggaggcacgattgtccgacgaggctgagagactacagtcttcttctctgcaattttcagatttgctgaaagtgaggtagtcccaacctggtgaacattttgtcagatttcagaaagtttcgttttttaaagtcgttatagctctctgtctatggctacgaatagcaattataaaggagattgcttgttcagttgtgacagtttagaaagatgattctttgttgatcaagtgaaatgagat

SEQ ID NO: 1093 - DNA, 1112 bp, Arabidopsis thaliana
catggaatgctccatacgagatttgattatacacgtcaacttcagtcagcacagggtttggcctgcctattgagatcgttatcaagtccactccatcggctatggcgtcgtccatcgctttgattatgtcggcgcttgcgaggtgcggtctactctttgccaacacactttgtagaccgcgatacgagccctagggctcctcctcttattgtacccactccaaacccgttgtcactcacatttgagacgaaagatcccccagctgtggaggccacgtgggtcccgtgaggcaagctttcccttgcggacatgtactccgtgtccggtattccgctatccgttttgttccttcggaatagactatccatgtaatacctcgctcctatcaacttcttgttgcaatgcttcttcgagtcgaaatcttcaccgtccacgcacatccctttccaccgttttgggatcggccccaagcctttgtcattgaacgactgtgactctggccacacacctacaaacacacgtacatgtatatactagttgtgtccaattgtcggaaatttaatatcgaaaaacgaacctgagtccaagacaccgatgatgatgtcctcgcccatcttggcttcatgaagaagtccttttggtgtactatgagaaagccccaagtaatcaaatgtccttgtcgtttgcagctcatagaaagtattgggcgttacttgaactacatctggatgctctaatcataattatgaagattaaaaatcattaattaacctttgatctaatttgcttcctatatctttctactaaaaagtcattagatgtacacacctgagatttgttccgcttgggaatccgtaagatgggcagcaaagccggagaaaccattccgataactatgaactatggactcactagcgtcttttttgctgcaaccatatttccacaaaatctgttaaatattacttccaacaacatactgttttacttgtctaatcttggtttgttggtacttccgagtagggattctacattctgagatgcgagctggttacaagctcaggatcattatgctccttttcaccaaggtatactatgtggacgtatatatgtat

SEQ ID NO: 1094 - DNA, 590 bp, Arabidopsis thaliana
ttgtgcaagcacagtaagtaataaccaatggtgtgtggctatgtttacctgcaagtatggtaattctgaggagggagatatggatgaaacttcgatgcggtccattcaccggcttctttttctattttgatgccaccgaccggtttctcagcttccaaagcaccttcagtcacagcatccataagccctggtccagcaccagaccatgtagtacagtccaacagagttgctgcctgataaaatacacaactctgagaaatctatatctaaactaagctcttgtggagtgttaagggtcttacttacttctctgctcaactcttgtgcttgcagataatgtgaatggtttggtgggattctggcggaacctaagtacacaatgcctctcccgagcctatgtacgaggtcgaagcaaatctcaagctctttcttaacctttcaaacaatgagaattcaacagaataagttgagaataacctctatcgaaatggtctttcaaggggaaactatcagtacttaaaaaccgaaatctccaaagaagattaaagataaagtgaagtttacttcttcattcaattgaacaagaaaaa

SEQ ID NO: 1095 - DNA, 661 bp, Arabidopsis thaliana
aattgtacctgcaacgagattatgcatattttacatttctttttatttgtaccttgggattcaagcgaatcattgggtgacgtaactcacgttagttttggttttgattttcttaattgcattttccaaataccaatacactagactaagctccagtgctctaacattgtgcttgctcattgagaatcattcatggctaagtcttccacagttgaaatgagactttttcacacgcaaccaagaaaggaaagaggacatgaacttgtctctaaacagggtcatccacttgcctctgctctgctgtatgaaacctactgtatatgatgtagttataagatcaatgcttctccatttcctcgatcctgcatacttcttcaaaccatcttcaatccgcctataactctcgttctcatcttctgtttcacctttcatattcttagctttcattgcttcaccgagacaacgagcgaggataactccgtcctccatcgccgagcaaccaccttgtccaatatcaggagtcattgggtgaagtgcatcccctgcaacacatacgttgtcttttgcaatgtttgcccaaagaagttcccagggaggtcgatacatgagtggattcatcaccaaactatcaagatcagtggtctccaggatactcttgatg

SEQ ID NO: 1096 - DNA, 1291 bp, Arabidopsis thaliana
caacatctaattcgaagaaaattactaattgacaataaagacataacataacactctctctctctctctctttgtgtcttacactcattgacccactagtaatattttggtcattagttaaatatatatatactcttaagtgtattattgattgtgttatttacttgatttacttgaaacggtcaaaacatgtcatgaacctaattgagtctcatccacgaagttgcacgagaactttcctttcactttttgtttcattttcatactattcaatcaatagtggtaatctggtgagagatgataatatttaaaattcttgattggatcctgaagaggtcttacctactcatgtttctgtttcgtatttaataacaagcctaattgcattatctaataaatccaaacgtgtcttagtcttatcatagctctgctgctcacaattactaatctacacgtgatggccgccggaacatgcgaagaaaagaatctgtgttaagtgtgtattctaagaaattctatattccaccgtttgacttcaaaccaacaaaaataaatggacatttcaaatgggccgagaaatgacgaaaaggcccaaatagaaccgaaagggccgaatcatcacccttgactttgagagagagcatctcaattgctcctcctagtctccatgaagaagcgcatgtggagaatctcactgatttcccagatatctgatctgctctgcctttcccgtggctcttcttcaaccttgaagactctgaccccattctgctttaccctctccaggtctcccttccaccaatccgggggcgatgatgatgcttcgggattgaaaaaccaattgttgcgcttccgtaatgattccggtaaagttgcctccgttttggagaggaacaaaatccaaggagctgcgtttgttgagctccttaggcagttacgtccatggcccgttttgtcccaactggtatacatacatcttttttgtcttcgaatttcacaaccacaaaagaaaaagccttttttccgtcatgtttgatgttgttgctttgcaggtgttcgactggagaagaaacaaggcactatgcgatgggttgcctatgactgctgatgaatacgctaagggcattaccatttctggtagactgaagaatgtcgatttggccctttccttgtttcacgagtctgcaaacaagaccacctccgtctacaatgctttgatgggtgcttactctgcaacggtttgtctcatcattgcgagcagctcttccttgacttcaattctcaacaagac

SEQ ID NO: 1097 - DNA, 643 bp, Arabidopsis thaliana
gcattgtgctagacacgtttatgctaattggaagaaggtgtatggagattactgccatgaaagctacttttgggctattgcttacagtgcaacagaaggggactactcatacaacatggatgcgctgagatcatatgatccagatgcatgtgatgatttgctgaagacggatccaaccacgtggtgcagagccttcttcagtacacactctagctgtgaggatgtaagcaataatctctctgagagtttcaacagaacgattagggaagcaaggaagctcccagtggtaaatatgcttgaggaagtcaggagaatctctatgaagcgtatttctaagttgtgtgacaagacagccaagtgtgaaacaaggtttccacccaaaataatgcagattcttgaaggcaaccgcaagtcatctaagtattgtcaagttctcaaaagtggagagaacaaatttgagatattagagggtagtggctactactcagtcgatctcttgactagaacatgtggttgtaggcagtgggagctgacaggcattccttgtcctcatgcaatatatgttacacagagcacaactgcgacccggaagagtagactttaactcttcgcttctcttgtacaatctgatgtatatgtgatg

SEQ ID NO: 1098 - DNA, 1901 bp, Arabidopsis thaliana columbia
caaaatatcttcatcacttgagttgagtccatctatcgttactgttttcagacaaatccaatggtccccatatcagcggctgctctcatctccttcgacaagtccacattatatcttatatcgatctatgctattttattatacaaaattagaaacatttagtaagacatcgacacatcggtaattatgtttcatcttatcatatttatcgggaaaaaaaaatgattttctctattaaaaaaaaaaattatccttttttaccattatgtagttgaatttaggttgcttcttaattttttttaaaactgttcaatatttactcacacaattaatattgtgcctttttaaaaatggaagtcctaatttttgttaggctatcaattttgctgactaattaatatattatccataagaaattaacttttatttaggcaaatatctctgctaaacttggcaaacatttatcaaaatctacatttaatacctcaaaggatttcataattgtcttgccaactgaacccaattattagaggtcaaacttgtactactaactttaacaagtcaaagatattaataacttgtactctattcttatcatctcattgcccaaaaaaacaactataaatacttacacaaaacattaccaattcggatctacgattttcaattaactctcttcttttttttttttttttggtttttcatttaagtctattcaatcatggaaaccggtttaaacatcttaaagctatcgctatgcgtcacgctagtcgtggttggatcatatgctcaggctcccgcaccatggaatccatctaatgggtttcgtccggggacatgtgaccactacgagtgtcccacctataaattggtagaggccggatacggctttgagatccgcatgtacgacgctgccctatggatatctactagtcctatcccctccctatccatgactcaagccaccaaaaccgggtttccgacggtaaatgaataaatcgaatatataagacttggtgttctttcggtttctttatattataaactgaagttgactacgtttttgggtttatagattaaataggtacatagaaggagataacaagagcaacgtgaagatgaacatgacagctccggtgatcgcacaagcaacgcctggaagatcagtctacacggtctcactctacctcccgaagaagaaccaacagaacccacctcaggccgatgatctccacgttcggtctacgaaaccaacttacgtagccgtgagacagatcggtggctacgtgtcgaacaatgtagccaaggacgaagctgcggctctgatggaaagcctccgggattctaactggattttgcccatcgagaagagcaaaggaaagttgccggcgtattttctcgctgtttataacccgccatctcataccacggctagggtgattaatgagatcatggttccgtttaacatgtagatcatgttaatgacgccctcacgatttgattgttacgtagcaattggattagaagaggtggtttagaaccgatcgatactgtaacagcagcttgcagcttctggtttaaccggtataaattgtatctctggttaagtggtgattaatattgttattttgtaaaggtggggaaaactgtaaccaaaaagtttgataaaagattaaataataactaagattattgaatcaaaattgaaaatcaaacctaaatatcatcgaatcaaaaaaaaactgtaaatgattttttcagtttcgctttttttttttttcagtttcgctttctagaacacttataaagctgtaaaagaaagcacctgatcaaaaccatgaaaaaaaagagtgaaaaataaatattaggaaaatataaattaaagcgataatttatgtaat

SEQ ID NO: 1099 - DNA, 1791 bp, Arabidopsis thaliana
tcctgtattcaaatgggcccataagcagtcacaaaatgggccttaaaatagaaaaaagaaaggcccaaatagaggagaaattccttaaaaacccagccccgcccagatgatcacatgcgtcttcatcgctgctcgccatcgccggccaccggggttgccgctgatgcgattcgatccagtgggaacttttgtcaccttgcctcttctctctttcctaacactcaaatctctcctcagccttcaggttccttttctttttctttctgaatccattcctgtttgaacgaggctcgcatacgttataatgtaataaacataacttctgctatggttcaattgaagtagtcattttcttttctcattcatcacttgttgatatcagagctttagattgccgtaaaaaataaaagagcttcttgttcactacacaaacttactttattaattctgagtttgttatatgaaataacactaaacagatagatagtctttgaagcaaaccaaaggtgaaaactgttctgcagttggtgatgacaagaagaatcacaagcttttgacttatgtttgagaatcatcatgggacaaggcttccgcaatcgaaatgggactttttcagcagcatcctagaaaggtaagacgacaggaacctgtctctgaacatgttcatccacttccctctgctctgctgtatgaatcctactgtatatgccgttgttataagatcaatgcttctccatttcctttctcctgcatacttcttcaaaccttcttcaatcctcttataaccctcttcttcattttcttctgtttcacctttcagactctttgcctttatcgcttcacctagacaacgagcaaggataactccatcctccatggctgagcaacctccttgtccgatatcaggagtcattgggtgaagtgcatctcctgcaacgcacacgttgtcttttgtgatgtttgaccatagcagttcccatggaggtcggtacttcagttgagacatcaccatgctatcaagatcagtggtctccaccacattcttaatgttttcaggcaagtctttgatcttgttcagcacaaactctttgaggatttccgaatttgtctcctcatctaacaagcgcaaggagaagagtcaaagacagtagtatgatatgaacaagaagctgcttgtagttagatattagatatcaggtaaagttgcatatcttcacctatatcagtggaggtgtgggttaggaaccagtagacagtgttgtggtcacatgggataaaaccggaacgaacgccgtctccataaaactggaagaaccttttcccaaatccatggccttccggaaaatgtgtgagccctcggattgctaaccgggcagttgtagcgggatttttgaagcctagccacttaccaaccactgagtacactccatcgcaccctaccaaaacctgcatttcgtttagaaaccctacaattccgtagcaagaccaggcctcacatggtttacagaggacaagtagttatttaccttggttttgagaatggtcccgtcggagagatgaaccttcttgtagcatccagacaattcaatatgaacaaccttagacgaaaacctgatggtctcttcaggcaactcacctgctagagcctctaacaacagcttcctctgtacgcatcgagactcatattctctgacaaaatcattcaacaatattattgaagttatcttatttattgttttaacattcatatgctctgtgcagagaagaagaaacatactcggattctggaaa

SEQ ID NO: 1100 - DNA, 522 bp, Arabidopsis thaliana
tatggtttttagtgtacaatatcgatggaactgataataattattcttatcatgttctatattctagtgaagacgaggcgtcgatgattgaagagattgttaaagacatttcaaaaaagttgttgattatgcagccagtagatttcagcgacatcgtagggatgaacgctcacatggagcgcctgagtcctctattgagtatggactctgagaatgaggttcgtatgataggaatctggggaatgggaggcatcggcaaaaccaccattgccaagtgtctctttgaccagttttcacagggatttccagctcgttgtttccttgaaaacgtttccaagatttatagaaagggtggtgtctcgtctttagcagaaaagtttctttcaactacacttggtctgtctaagaagaagatgaagggttcgggcgtaaaacttggaccccaggagattaaggcgaggtttggatgtcgtaaagtctttgttgtccttgataatgtggatgacatgagacaaatgcatg

SEQ ID NO: 1101 - DNA, 1096 bp, Arabidopsis thaliana
aatcctctgcaacagtgtacagttttagcaagagaaataagtacgttaacgaaacaagctcagatgctgcaacaagaagaggggatctatcattagatagaaagttgttgtcatccttgtccactgtaactgcatcaagtaacatcggatagccagcatatttgaacggtcgtaacacatgtccataacggcgatataagatgcactgcgctttcagtaaaagcagcaacctccacggctgaggaccttgcaatccttgcattgttgcctataagcagaagagcgaatatgtatagtatgataaatatgaaatctagagacagaagtatatataaacacaatcatatatatggacctaaaacactaatctacagtggaatagcttcagagataggagtatactataaaattcttagatacaaatcgactatgttcttagcagaactaaatgataacatcatgtacatactatgattaaacacttgtttgacaagcaaacatatggaaaaaggaaaaagttgaccaatgttatctctactaataagaacacagcaacataatgaaggggaattcaatttctacataaagcatttatcaaataacttgaacatgaaataactgctggtgtcctggtgtgctggtatccaagaatattgcacttttcaacatattacgtgaccatccaatggtccaatgttctaaaagaccgatacaataacacacaaagatggtaaacatataattgaaaaaaacatcaaatcccagataatgatcaaaactttgtagacgtacctgtaggcattcataagctttttgaacagccaggaacttttctcttccttctggattcttgtcaggatggtacctcattgcaagcttcctatactggcgctttagtttctcttcatcaaggttttgaatttgtttggatatattagatatttcctcattcaactcaactgaagcagtccggtttaggtcatcacttgatacattgttcagggatatttctagaattttgcaagcttctccttcagaaagatccatgggtttcctagtcaactcttcacgccacatcacaagtaatgattgtaag

SEQ ID NO: 1102 - DNA, 801 bp, Arabidopsis thaliana
ctttatgtgctatataatgaattctcgtggagatagggaggaatggtgttgccacaatggacggcaaacgcgcacacggtgctatacgtcacaggaggtcaagccaagatacaagtggtggacgacaatggtcagtcggtgttcaatgagcaagtgggacaaggccaaatcattgtgattccacaaggctttgcagtttcaaaaacggctggtgaaacgggtttcgagtggatatcattcaagacaaacgataacgcttacattaacacactgagcggccaaacatcgtacttgagagcagttccagtggatgtgatcaaagcgtcatatggagtgaacgaggaagaagccaagaggatcaagtttagtcagcaagagaccatgttgtctatgacaccaagctcttcttcttaagctctttaattgcttcctttaatgtttttttagattttccagtcactgaaataaataaagatgagactaataaccaacttttcacaaagcttcaataacaaaatttcagattaaaaattcctactaacatacacatcttagcttttatgattacgttgattttattttgttaaatttgattacgttgattagtgtatatattaaattaaaatcattgaaaggataatgataacactaataaaaaaaagaagaagaaggttacggtctcgtaaagctttcaaaagtccgcaacgatcacacacgtctttctccgaaactcagctgagagaggctctgagattcgatgtcgttcgaggaagaagaagaggaggaaacattcgagcatac

SEQ ID NO: 1103 - DNA, 605 bp, Arabidopsis thaliana
tcacgatcaatgcaacggaagatgattgacggagggatgtgttgaaggttgtgaaccatgttattcctttgtttccaaatgaaatagacagaagcttgagctgcgactttccggaggagtgacgggccaaaatcattaatatgaacacgtctcatttgaatacccttttcttttagaaagggttaatttatgccatttgtctgatcaacaattttagtccttaagttgactcttttttcttttggtttaacctttagttgacttgcttattagcatcacaatttaatttctcttttaaatttgtagacgacttttacgctcatgagtgggaactttaccaaaagttgtgatcttgagagcttgaagaacttttagcttgccacaaaaataagaaatttcgtcaggaggaaaaacaggaaaagaagagcttgatgaaccttaatttgtcaccgatattgttggaatggacgttgacatggaacgactgaatcctctattgagcatcgaatctgagaatgaggttcgtatgatcggaatctggggaatgggaggcataggcaaaaccccattgccaagtgtcctatgaagaatatcgcgccgatttg

SEQ ID NO: 1104 - DNA, 1052 bp, Arabidopsis thaliana
tcatcattagacttcaaaaactatgagctgagtgtatatgcagataccaaacaagaactggtcgaggcttttgttgggacaaattcgtatacgagtatcttttcttctccttccatacaaaacccgagaactccaaccaaatttctgtgctgaagctttgccacgagactagtctcattctggaactcttgtacaccttgagctgattcttttgacagcctcttcactgcaatttctgatccgtcttgaagcacaccctacaaataataaagagaataagatcatcacaccacctatattcattaatggaagttgagaagatttaccttgaaaacttctccaaatccaccttgaccaagcatgttgcactttgaaaaggtacatgttgcagcttcaattgtcttaagatcatactgcagtgaatatttaggtgattcctctgctacacagaaatgtcatattattccttgcaacatggaagtacgtacacataacaaatctaaaccatgatgatatgttttcatattcaccaaagtttttcatttttctaataaacattggttagctaataagaagttttagatagttgaccattgaactgaataaactattcctagttaaaattcccttgtcccggcatcatgcagtgttcctgattaagcatgcatgccttattgttcttaaagaaaaagaaatcagtgagtaaaatacgaatcaactcacctggaggatcagtttttctctttctgcaaacaagtactactactaaagtagatagcacagagatgacaactccggtggcaacaacaatggccacaaagaatccaactgagatattccttttgctacctgggcatagtagaatcacagaggatagtttacaatagagaaaatgcatcatccagtgattgaatctgtttcaaacctttctcaaactattggtcagcaacttagcagaatgatacgttcttagaatcatattttttcttttagttgaggaattacctggcgggggtgaaagtgcaaattaaaagctccgatgaagggatcag

SEQ ID NO: 1105 - DNA, 591 bp, Arabidopsis thaliana
ctcgctgctcttcctcccacagatcgaaaaccatgaatcctgagtagtaagttcctttctccagcgacacatacttgggtcgaaattacctctgttagatatttgattctccgggtggttcctagggtttaattagcgttttgggatttgcagcgactatcttttcaagctcctgcttatcggggattctggcgtaggcaagtcttgtcttcttttgagattctctgtaagttgttttttatgtctttatctttctcagagatcaaacactgtagctttctacatttgttcatgtttgttgttctgctgcaggatgattcttatgtagaaagttacattagcactattggagtcgattttgtaagttgatgttttcttttttttcttcttgctactgatgacgatgctttgatctgacctttttttttttcttatatatctcttgttcagaaaattaggactgtggaacaagatggcaaaacaattaagctccaaattgtatgtaacgattttcacacgtgtcaagttaatagcggtgcgtctcttttccttaattcagtagtatcagtcatcacgtataaactgatggag

SEQ ID NO: 1106 - DNA, 770 bp, Arabidopsis thaliana
cctatggctgctgttgttatcgctcagttcatgttacaaatcgtttcaatgatgatggttggtcacctcggcaatctctccctcgctagcgcctctctcgcctcctccttctgcaacgtcactggcttcagcttcatcgtctgttttctcttccttctttcccctaaattgatacacttatctctgttattttgatgattgttactttttgcctgtggtgttagataggattgtcatgtgccttagatactttgagtggtcaagcttatggagctaagctataccggaaactaggagttcagacttacactgctatgttctgtcttgcattagtgtgtctccctctttctctcatttggttcaacatggaaaagcttcttttgatccttggccaagacccttctattgctcacgaagccggaaaatatgccacctggcttatcccaggactgtttgcttacgctgttctacagccgctcactcgctactttcaaaaccagagtttgatcacacctctcctcatcacctcctatgttgtgttctgtatccacgttcctctctgctggtttttggtttacaactcagggcttggtaatcttggaggagctttggctatcagtttgtcaaactggctctatgccattttccttggatctttcatgtactactcctctgcctgttctgagacacgtgcgccgctctccatggagatattcgatggcattggagagttctcaaatatgctcttccttctgcggctatgatttggt

SEQ ID NO: 1107 - DNA, 1034 bp, Arabidopsis thaliana
ctaactcatgtgagattcttgtgctgcacaatgtacttgcttatgaacatgaaccataacagaaagtatacttcagcatttatgtactggatagtgtgacaaaagctctaaccttgctgcagccgcgatcgctagtggtattgaataagttattgaaagtgtttcgaaactgtccgtagtatgaataacattatgattttgcaaattcaagattgtgacaggaaatggaaagatgcaaggatgagtaccagatagagagcacagaagtctccagctgtgggttgggtaacagaccagaaagtaatattatgagttcatatgaccaccactccaggctgcaacccatatataaaagagtttctaacaaaaaatgtggaggcaatgagaagtgaaaaaggaacagagaaaagtgatgtaccaaagcatagccgcagaaggaagagcatatttgataaactctctaacgccctcgaatatctccatggtaagcggcgcgcgtgtctcagaacaggcagaggagtagtacatgaaagatccaaggaaaatggcatagagccagtatgacaagctgagagccaaggctcctccaatatgaccaagccctgacttataaaccaaaagccagcagagaggaacgtggatacaaaacacaacagaagaggtgaagaggagaggtgtgatcaagctctggtttttgaagtagcgaatgagcggctgaagaacggcgtaacggaacagtcctgggatgagccaagcggcatatctaccagcttcgtgagcaatagcagggtcttggccaaggatcacaataagctttcccatgttgaaccataggagagagagagggagacacactaaagtaagacagaacatagctgtgtaagcctgaacacctagtttccgatatagcttagctccataagcttgaccactcaaagtatctaaggcacatgacaatcctatctatcatcaaaaagtaacaagaaagtgaggagaggatgcaattccatggttctggtagctagtaacagaga

SEQ ID NO: 1108 - DNA, 1083 bp, Arabidopsis thaliana
ggatatggaaaatacaaaaattaaaagaaggaataatttatgcatgagagattaattcactaatgtaacttttttttcacacataagccgaaaaaacatagatcacacgacggctaaaaatctagaaaacgacgtcggatctaacgaaactacccgacaacgacaaagactcatcacagagacatcttcttcttgctctcagccgcagtattctcggctattttcgcaagagattgaagattgcatcgtacgataacgtcaacgaagtcacaagtctcttcctttgtgttgcctggaggaacatcaacgacgtaagactcgacaacgacggtcccggagatcggagaagggtgaagggtcgttacggatcggtagttagagagccggtggtcaccaccaacaacgctgaagctgatgacgtggcgttcgtcgtcgaggatatcgagtctctcggtggagctagcggcggggagaccagagacgacgtggacttgacggaggctaccaacgttatcgccgtctccgccgatgacgctacagcttttgagaaagtgtttgtaagcttgtgggttatcaaagcggcgtacgacggaccaaacggtggagattggagcggagatctcttgaataacggcggagcaacactgattaggaccaacctcgtgtgtgtgaaaacgagcggccgtggagtcgcgtgagagagaaggaaaacgtttttgaaacgacgcgatcatcatcggaatctgaacggaatctccgtctgatacggcggaagaaggacggtgaacggcaagcatgttgatctgagtaatggtgtcttcttgatttcaaatcttgatctcttctttgagatggtattagggcttagaaaaaaaactgaggattgaagaggaaagtgtatggaggagaagtatgtgtgtatataaaaagaagcaaatcaaactttacagcgacttgcgaaaagttgggctgtgcctttcgatttgagagagatagagtttttaatgcagagttcatgtgagtggtgataacgaaaaaaccgagcaagttgcttgttgtgaaattacggttttgccccttgct

SEQ ID NO: 1109 - DNA, 832 bp, Arabidopsis thaliana
tgatgaagatgcaactgaatttattttactcttttttcttaacatctccaagtctttttttttatacggattctgagggagattatggattggaatttgcatacaaatgttatttccgagctatgtgttatgatatgtctttcaaccatgaacgtccaaagaaagcgaaattataatccaagtatctaaccattcttcattaatcgttaaaacaatcgcaactttgtaaacctatctatttttctaaatttatcaaatcattaaaaagtacaataattattataattgaccaacgagttcattcgaatccacaaatgtgccatgaaacccatacggtactctagacggtagtttaatcgtagcttcaagctttaaattaacagcgttaataatctgaagctctgatgtctttgtttcttcgtcatgaacgtgacaaaatatataaccgtcatcttcattttcttcaccgttaccggagttgccgggcaagaaaaacggttcgccgccatatttctcaccgccgtaaatatattttttcatctcaccggtgcaaagatcgaccttagcgaaaccggaaacttttggccaaggataagcaatagccaaaaacgcgaaccgggtttttcttcctaaccggttccggttaaccataccaatctctaaatttacatcctcgttaaccaacaacgaacgacgcgtggttttacgtgttctgaggtttatcctgatctccgacaaaacgcttctcaagctctcgtctctctcgttgaagattgaatccgccggcgacatacacgatccgatcaccacaatctcctccgtctccggcgat

SEQ ID NO: 1110 - DNA, 515 bp, Arabidopsis thaliana
cttgatgggctacaaagatacatcgaggacacacataggtggggaaagcttctttaatgaggccacaaacatcgcaaagtaaggaagcttgtttgggaaaaaaggtgagaaggtggggatgcctttttgagttgtctatgaaaatgggtattggcttcatcgcacaaacgggatgcatactaagttcgtaggtgggacaatgataaaacaagctaaagagagctaaatcacagcacatgcaactcacgcatggtttttgatacgaagggtttttgagctcaagcggagactccacgcattctttgtggaacatttgatcacatgtgagacatatataatagtctgtgtcaatcttgaatgtgtcacatgcacggcaaatgaattgagcataatcaccgtgtttattgttacaccaatagatagggacaacagggagcttacagatattagcatcacggctgtcggaatcaagcagatgctggacttgttgatcagcgctacttatgctggggaaa

SEQ ID NO: 1111 - DNA, 861 bp, Arabidopsis thaliana columbia
gtaaagaactttgggttttcacctgtttgaatgaaatcttttccttctcggtatctgattatgtttattgctcctatttgtcttgtttcagactgaaaaacaacagtttcattgcgatgactgtggaatttgcaggtgataatctttcttcatacagtcttatactggtgattcgtttgtagttgtgtgctgattgtttagttgacatttcattgctgcgtgttgcagagttggtgggcgtgagaatttcttccattgcaagaagtgtggtaaatggaaaaaacaataaagttttcttatgctcagtttcagactaacacaatcatgtgtcgttgacttgtgaaattatccattacttgcttttaggatcttgttatgcggttggtctgcgcaacaaccatcgctgcgttgagaattcaatgcgtcatcactgtcccatttgttacgaggtatgtgtgttaaggcaaaacttatcaagaaaaagattcagcaaaaggtatcgcggttttagctaattgtgtgtacgtgaaatgcagtacctttttgactctctaaaggacacaaatgtgatgaaatgcgggcacacaatgcacgtagaatgctacaacgagatgatcaaacgtgacaagtaatttaccattttcctgtggttatgtctctgtttcaaccagaaagtttggtttcttctttggttgattgtgatggttttgaaaatgtgtgaatcttgagtaggttttgttgccaatttgctcgaggtcagtgattgatatgtctaaaacatggcagagactcgatgaagaggttagttcaaatcattgttgaacttttaagctgatagatcttcaattagttgctgagata

SEQ ID NO: 1112 - DNA, 740 bp, Arabidopsis thaliana columbia
ccctttatccagaccactgcgtactataattaatgaatggtaaataaaaaaaggtttgatccattgacgattttgtccgccttaaccatcataaccatccaaaccctaattctaaaatttcaacgtggcagaaaagaaggtaattgaataacaaggtgatatactcttgaaataaacatgaatctacaagctatacttaatagttgcatgtgatgcgcacgagtaccatcttgttgaaatagtggtagtacaatttaagagaaatccaaatactaattaaaaaagccatcatgattaaaataattaggcttgaaatcgtacgtagtcaaaaggtttgtccattaattaagaaattaataaaaatggaccatcatttccacgtatctacaaatctctcttacccccatatgcacatgtctgcgaaccccatcatttaaagccccaacgtagcaacctcaccgccttcaatcatcaaacatccaaactctatcctttcgttttcttgtcagacaaaaactaatactagatgggtacagtttaggcggcaagaaaacgaccaaagtcatgaagatagacggcgagacttttaaactgaaaactccggtgacggctgaggaggtcttaaaagactttcccggccacgtcttgttagactccgaatccgtcaagcactacggtcgccgagccaaaccacttgaggtatgttttttttttttttctatcagaactatatgttatgt

SEQ ID NO: 1113 - DNA, 541 bp, Arabidopsis thaliana
agaccactcaaaaaggcatccccaccttctcaccttttttcccaaacaagcttccttactttgcgatgtttgtggcctcgttaaagaatcttttcccacatatgtttgcgttcggtgtatctttgtagtccaccgagattgtatctatttcccgtttgtcattaaaatatgtcgtcaccaccatcgtatctcttttacctcttctcttccatccggaaaatggtcttgcggagtctgtcgtcaaaaagttgacaacaattgtggtgcgtacacctgcaacaagtgtaaccactattttgttcatacaagatgtgcgttacgggaagacgtgtgggatggaaaggatctcgagggagtacctgaagagcctgaaataattctcgagccatttgagacgatagctgatggaataatactccatttttctcatggccatcatctaacactcgagatcagtagagtttacgacgagaacaagttttgtcaagcgtgcatccttcccatctatgagggtaactattattcatgtatggatgactgt

SEQ ID NO: 1114 - DNA, 955 bp, Arabidopsis thaliana
tgattaggcatttctttaaaccaagagcaggagtacttcaatagcattcctatgaattcacaataaaactcacatagaccgtaaattggtggaaggccagctagtttcgcatacgacattgcctggtcaaatccatcaaaagtcattcagcaaaataaacttaaaacaaaactccagattgaagaccaatacataattttactaaaaacttgaattgataatctcttaagctataatacattttgtcacatctttaaccaattttgcagctcaacaagacaatacgattgaaaccaataattccagtttcctattctaaagccaatgattccagcttccttaagcttgaaagtaaagtacctggggaacaagcattataccgacggtgataccagccatgagatcgagcttaaaatactcgctccatcggtaagttcgaatccatcggaaacaaggaaagagagtatcaatccaatcgacgagcctcatgcgcttgatcttcgccgtccatccggagaagatatcgtcgaaaggaatcgaaggaggacgagcttcattggaggtgtcaggatgctgaagcgggatgaccttgacggggcgggtctgacccggaggcttgagcgaagaagacgaaccggttccggatcttgaaacaaggctggtcaggtccttgacgctgagagatgcgtaggacatgatggctcttgcgcacgcttggcgcactttagagaatccgttaatgagagaatggaatactcaaatgttaaagagctttgtatcatttattccatcaatgctcataagctttactctagtgtctggtcaattttgttttttttcaaactaaactttacaattatcattacattatctaatcatacgtcaaaaataatttagtttatagtaatagatccagaattacgataacgtaactacatttaaattttgctaatca

SEQ ID NO: 1115 - DNA, 970 bp, Arabidopsis thaliana
cccaccttctcttgagtattctaatttcttttcgcatacctcacaccagtctaactgatcacttccctcttccccttcccgaaatgtgaggaaatgtttgtcaagcttatactttgccttgtatggtaaagtagcacaactgaaacatataatataattgcattcgatgcaatttagttttcgaccatacttttttcggcaaatttgacaaattgcctccctttcttcttttcggtctaaagcttggaataagggatgctcatggccttgataatcaaatggttcagaaacagaggcacaccgtatgtctatgctgtattgatcctcctcatagatgaagccacaactttcacgatcacaagcggaacacctgaagtaacctttaaagtattcattctgtatatcagagacaacttttagcgtaagtgggtgactgtgtaaggcatgatctttcttgcgagaagcatttgcacatgcttcgtggaggatgaagttgcattgatccatacacgagtaataattaccctcatagattggaaggatgcacgcttgacaaataatgttttcgtcgtaaactctactgttctcgagtttgagatgatggccatgagaaaaatgaagtattattccatcagctattgtctcaaatggctcgagaattatttcaggttcttcaggtactccctcgagatcctttccattccacacgtcttcccgcaacgcacatcttgtatgaacaaaatagtgtctacacttgttacaggtgtacgcaccacaattgttgttaaccttttgacgacagactccgcaagaccatttgccggatggaagagaagagataaaagaaatacggtgttggtgacggcatattttaatgacgtacgggaaataaatacaatctcgatgggctacaaagatacatcgaacacaaacataggtgggaaaagattctttaacgaggccacaaaca

SEQ ID NO: 1116 - DNA, 832 bp, Arabidopsis thaliana
ttccgctggtggattcggtggtctccgtgtgaacagccgtctcctcatcccggtcccttatgctgacccagaagatgactacaccgtcttgatcggtgactggtacaccaagagccacacccagttgaagaaattccttgacagcggtcgtactcttggccgtccagatggtattctcatcaacggaaagtccgggaaaggcgatggatccgatgcaccactctttatcttgaaacctggaaagacctacagggttaggatctgtaacgtgggtctcaagacatctcttaactttaggattcagaatcacaagttgaagcttgttgagatggaaggatcgcacgttctccagaacgattatgactctctcgacgttcacgttggtcagtgttacggaaccatccttaccgctaatcaggaagctaaagattactacatggttgcatcctctaggttcttgaagtcggttataaccaccactggtcttctccgctatgagggaggcaaaggtcccgcttcttcgcagctaccccctggtccagtcggctgggcttggtccttgaaccagttccgatctttcaggtggaacttgaccgccagtgcagccaggcctaaccctcagggatcttaccactacggaaagatcaacatcacacgcaccatcaagcttgtgaacactcaaggcaaggtcgatggaaagctcaggtacgctttgaacggagtctcgcacactgaccccgaaaccccattgaagcttgcggagtactttggtgttgccgacaaggttttcaagtacgactccatcactgataacccaaccccagaacaaatc

SEQ ID NO: 1117 - DNA, 1719 bp, Arabidopsis thaliana
tagtgttgtgatcttggctgctggttcgtccttgatgacgttgtatttgaagaccttctcggacatgccgaagtactcagcgagcttcaagggagtctcggtgtcaacgtgtgatacaccgttgaatccaaacctgacctttccattcaccaaattcttggtgttggcgagcttgatggtacgggtgatgttgatctttccgtaatggtaagatccctgggggttaggtctagcagcactggcggttaagttccatctgaaggatctgaactgattgagagaccaagcccagccgacgggagccttggggatatcgcttgaagcctgaacgttgcttccttcgtagctcatcacaccaacagtgctcacttccttcttgaggaacctagtggatgcaaccatgtagtagttcttggccacttggtcagcggtcactagaacggcgaagcactgtccaacgtggacatcaagagagtcgtagtcgttctggagaacgtgggagccttccatctcaacaagcttcatcttgtgtccttggatcctgaagttaagagtggatttgaatccaacattgcagatcctgtacttgtaagtctttccgggcttcatggtgaagagaggagcgttgtttccgcctagtttaccagatttcccattgatgagaacaccgtcggggatcctagagtacgtccgctgtcaaggaagttcttgagggcggtgtggctcttggcgtaccagtcgttgatgaggatggtgcggtcgtcttcggggtcagcgtatgggactgggatgaggagacggctgttgacacggaggccaccgaaaccaccggcgaagcggtggagagcggtggatgggtagtagaagtagctaccgatctggtccttaggctggaaatggtaagtgaagttggtgcctgctgggattgggcatgaggtcccagtcacaccatcttgccatgagttcttcctgtgctggagtccactcctgccatgtcacccaaaaccattgtcaggactaagtattcaaagatacaatgaagactagttatatataggtgtggccatataaccgaatctaatgcaaagcaaatctttaaaaatcttttaaaaaatgtgattgcaaaagtctaactccaaatgcaaatggttgatacaaaaaaaaagatttgttttcaaaaacaacaattttaatgtaaaacaaaaatcacgaaaacaattgaatgacaagttctgacgaaaggaataagtttacagattagttacaaaccaggtcaagaggaaaggctcgtcgaggttgttgaagacattgatgacgacattgttgttggaggttgagtttaggttaggaccagggaactgtccgttgatgagaatcacctgttgaggaattccgagaggcgcggcggttccgtaggttacgttccacgtgtagtagaagtaagggtcaccggcgctcaccaacgccaccgtggaggcgaggcacaccaacaccgtcaaaagcctaccaccctgcattatctcttttctgcttctgtttagaacgatgtattaataaattaaccctttcctatataaaaatatataattattttttctcaaaagcaagaagaaactatgttctcttgctctggacgaatcttatggtgatgttgtgaatactagttatgcaggtgaaggaccttggtatgcacggaattgttgcccttgtcacgctgca

SEQ ID NO: 1118 - DNA, 453 bp, Arabidopsis thaliana columbia
gctatccgacgcgttagtcgtactcgcagttcaaatcacatcccagcattgccgccgcgatatatgcgccaacgacaccttgctgctgcaaccaactcccacaaggttgtctatgtcactaacggccataggactatccgtcaagttcattacaggtcgcggagtcccgtccatcactagaacatcctgcggatgttatcggacttctgacacgaactgacccaaaggattgcctaccaggaagatggatactaacaacttctttgctaattacagaaagaaaggggacaagctttcctgaagtattaagacattcgacgtcgtatgacttctcgagatagcagcccataccgattccaaaagggtatgggatcgcaattcctccacatttgcatcctccacattgagttcgacatgagctcgaagctgtgagatctgcagcatacaggatca

SEQ ID NO: 1119 - DNA, 1186 bp, Arabidopsis thaliana
cctgccttccagagatcatccacatgcattgtcaaacagacaaattattcccttaacaaaaaagataaattattattaccattcattaactattttcttatatccgaccatatatagttacatcgatcatagtattgagctcgtaagcttgcacagctctaatcgcaacgacactatctacctcttgaatgtaattttctgtatctagttagaattaaggactagtacaaatcatgttttgaattttaatttgtgcattacagtttcaatattcatgtttgtctactttgtaaaataatgattcatttccgaccaaaaataaattagtttataacatgtcttgggactttagtttaagtttcgattcaaactacgctgattatgtaaaaaaatattttttaataaaagtctttaatagaaattaatttttaataaaatagtggggttttatgtttcaactatagatggaccccaccaaaaattgtagtgtaaataacgaggttacccttcatcggcttccacaggcaaaggttgcaaaggcaaataccgtcatttaacacaaaacgaattacatgaataatttcatttctatgtatacattaacaacaatatttataacgaccttgaggactcgtcgtcgtcaaagaaatcactaaaaacgtctggaatcgtcgttttgttttccatgttgcctccgccgctactgtgagagagcaacatagtcaaagaatctccctcaagctcgtcgagatcggcaaagaaatcctccggctgatgttgaaactcttgcaacaactccggtctataggtattttcaacgtcattataatcgaactccatcttttcctgacgctcttccacgttctcctccttaattgcggcggcgtcaaaaggaggatgagtggaagaggaaggcaagttggagttattgggttcgtctttgctgctgttgttttggaaaactctggatgagggagaagtagtggcggctgcggttgaggatttggaagaagggtttaaagaggaggaggaagaggaacgagtggaacctgcgagagcgttgcgttgagtaggccatgggtggttatgctcagaggtgtaagtaatgactaacatgtttggatcagtgcggctacgttcgacttgtttcctagctgaacaaccttttgagctgctacagcctatc

SEQ ID NO: 1120 - DNA, 896 bp, Arabidopsis thaliana
gataaaacacttgtgtgtcaacttatatttgttttgtttacatgtcaacatatgtttttgtcagcaatttaattgctttttctataaaagtacaaaaaaaatcaacaaagtgactgttatgactatgatataaataatttggaagttctatcgttttggttcataaaaattataaaactgttagatataaaatatgaaatttttataaatcactcacaaggacttttgtatttaattttcctataaatatgacataaaatatgaatttttaaaaaagattagatatgaccctgaaaacatgtagaatggctaaatggttatataatatatgtatgtatgtttggttgggatttgatcttcatttttttgaactaggttacccttggtgtagcattcaatggggttggacatgcaattgtttatccggtgcttcagtcgataatcgcggatagctttaaggagagttcgagaggttttggttttggtttatggaatctgattggtacggttggaggtataggcggaaccgtcgtgccaacggtcatggctggtcatgatttctttggaatatcaggatggcgatgcgcctttatattgagtgccacgctgagtacgattgtcgggatcctcgttttcttctttgtcagtgacccgagagaaaagaagactagcagcgtcattgttcatcacgatgatcaacatgaacggtaatataaatctctacattcttggttatatatagcaccaacatgacaataaagcgttttttgcttattggttttgagttagttatgtggttttgtagagatgaaaacaatggtggtacaatgatggagagtccgagctcttcggtttggaaggaatcgtgggtggcataaaagatgtaccaagttaag

SEQ ID NO: 1121 - DNA, 867 bp, Arabidopsis thaliana
gatcccctgtcattgcatgatatagccatgtcactggccaatggacatgtcattacaactggtgatagtgatgacatgtgttctatttgtggggatggtggagatttgttactttgtgctggatgtcctcaagcatttcatacaggtaggtgtaaaagtactgtactctactatattaaacatgcaatttctaggtttcaaactgaaagtagctgaagcacagatccataatggtttcctcaaccatagagcatatggaactttggttcagggacgacgttgcttagaattaaactctcgtattattttctggttctgatcattcatgtctcttttcatatgcagcttgtttgaaatttcagtctatgcctgaaggtacttggtactgttcgagctgcaatgatggacctatctctagtaaaaaggctactactactgatccttctggcaacgctaggcctatagttataagactctcaagagtcgtgaaagcgccagaaagcgatattggtggctgtgtgttctgcaggttagttgcaattttgattactgtgcatgatgtggaatctagatgtggattattactttttttgtgagacacattaaggtgccagttttgatatgtgtattcttcccctttggtgcttactgcttactgtgtttcactctcgttttatggttgataggtcccatgattttagcattggaaaatttgatgataggactgttattctctgtgaccaggtactctcttgattcataatctctataattcattgcttcccattaccagttcagccttttctgatagtcctcttcttcttttcttttgtagtgtgagaaagagtaccatgttggttgcctgag

SEQ ID NO: 1122 - DNA, 504 bp, Arabidopsis thaliana columbia
tgtagacttcatctgttaaaaaggcaactttgcatcctcctccctttgtaaggtttccattagtagagttcgttattgtgacaccaatgagttgttgagagccaacaggtgcttttgcctggcagcatccctccccgttgcagattaatgtgtcgtcctgtattttcgttgtactgcaaaccggtatgtagtttttaggcaagaggtctcgagtgacgctgtcgacggacccagagcatccaactttgttgaaaaaagggatgctccgcgaattgttgcttgtagtgcaagtcgactcgcatcccaccatcgttggttctacatttgtcagcgacgccttgttattgcaaccgacagccacgaggttgttttggtccccaaagaaaaaaggagtctccgtaaaattcaaagtcaatccagaatcgtttccatcggtagaacatcccatggatgcaaccgggcttttgacacgaattgaagagaatgacggataagtataaagat

SEQ ID NO: 1123 - DNA, 1716 bp, Arabidopsis thaliana
tgcgaaagagaatcctcgaatctatttgaaacggtaaagtcaagaaaattaactaaaggctatcccatccttttaaagataaaggggcactaatcagatactattttcctttcaggaataagcgtaaaaatggtggtgacgatgaactctgcaccacggatgaagttaagattattaatggtttggaatgtaagataacctgcagttcttcaaaggtacagtgccttttttcctgcttacaccactatgcgtttccatgataaggactttaagctcgtctttttaaaaagaattgtctggtgtttccttcaggtctcctatgtattagacaccgaggatgtgttgcatcgtgctaagaggaggaaacttttaaaccaaagcggtttacccctcgcacatgattctgtttgcagtggttctttaattaggcaaaggagaacacaaagatatcaaaaacttctcaccggtcaatgacatctgtcacttactaccagaaaacgctcgggaatagagcaacttcgcactttttgagagataaaaggttgccatactcagcattgagctttgtcagaagagaagaaatgtaagatggctcttacttctgttactgcctctggtccctgttgtattctcacagaaaataaaaagggagggagggggaaaatcgaaggaatactaaacggattaactgcccaagccttgaagtcttgtttcccattgtgtatataagcattttgtatgttgtaacattaattaaaatttcttctttgttgctcctattctttccaacattaatcatctgaatgaaaaatttgttcttgtatccccaattcttacatatgcacttcttgcacatcccaggctcttgtgttttttttgccaatgggtctcactaaagacagagctaatgtggggttcactttaaccggcaagctcactaattggtggacggtccatgatatctgctgcagctgctgcactacgttgcaggactgggtcaatatcaggcaacttaggaatctgagctaagagatcaattgtgcgtcgtaacaggcgagcaagatcgccttcgtccattgcacattccatcatcatttctttccaacttaatccagaagcccaagcttcaaccataccagagaactgaacgtccagacaacatggaatcataacctcgtgcttctcttgaagctttataagagagcttctttcgtcttctaagaaattgaccatgtctactactgtatcagatggctcgtaaatatagttgttgtctctccaaggtcgaacttttatgccttctgaaactaaacttgcacatacaccagctagttgaggaggcttgagatccaccagggctttgttccgcaacaccattgcaagccaaagctcgttttctcctcggattgcagcagctgtttctcccagaggaaatatcaagtgtgtattaatgtccaatgctctgctttcgtgaatcacgttgcttatgcgcatgaaatctttccaaccagacggttcaatctgctctaaacggtttataaggcgtctcgatctcgccttgagccgtttcatcttctcaaccgtcaagttagcattctctagaattttcttatattctctgaacccttctgaccgggacatcttcttcttcaaacgcgaaattttgctcctttgttccttgtatttttgcgccgcgttatcatactcttcggacat

SEQ ID NO: 1124 - DNA, 546 bp, Arabidopsis thaliana
atattgggttggaccgttgatcggtggtggactcgccggtttcatctacgagaatgtcctcattgaccgtccacatgtcccagtcgctgacgacgagcaaccattgttgaattaaatgtgtttgaaactgtgctatgcacgtcacataccctattagctaatcattaatgtattattgatccccaaaaatcgtttcaataatgtattattgatcccaaaaattgtttctttctgtcctctaagatgtatctcttttaagttggaaccttaatctattaattccaattattgagaataaaactttctgtttaccactttttcatttttgagaatttgtgaagttaaaaaaatatacatattatgagaatgttttaaacgggaaattttcttctctcgcttctattcgtctaaaatttagggccggttttggtggtgtgtaggtggccgacgaacttatgtaatttggcgcgtgcagtctgaaacatacatgtttccttcgttgatgtctgatcagccaaacttgtttcatttctgtactttgagaat

SEQ ID NO: 1125 - DNA, 664 bp, Arabidopsis thaliana
tggcatttgtataagaaaatagaacatatatataaagaaaacgtctattaattaaacaataaacaatagacgtgtgtgtgagtgtatatagaggtacataatgcaacacgaaaacacttaaccaaatcatcatcaaccaagttcatctcataaaccaaaagaacacgtctaataactgggaatgtttaagctaatctcctatttaaacagagccagcgatgattacgtttagttatacactatcacaaacgaaaacctaagaaaaaaaaggatcgaggaaagagagcttagagcgctatggagagcaagaaaaagcaattgtttgggaacttgcgcgatctgacgaatgccgtccgtccaagtgcgtatggacaacaagacgactgcggcggagttagacgcaattgccgagaatcttctcaagtgctgcattgatgtcatgacgatcacggtgagaccggtggagggagagggaccatccaaggccgaagcgaaaccatgatcgacgtccacggcggtatcaaagttatgaataaataataactatggttgtttctgttaagaaaacctagatgacgattgtatagacaaactttaatatataacgatagggtatatatatgctctgttgttgtttttaatataagatgggtgttcttgtgaa

SEQ ID NO: 1126 - DNA, 525 bp, Arabidopsis thaliana columbia
tttttttaaaagtttcatatttaagctgtaaaatcagtagctgtagcacaggaacaggtgtgattttgtggcaggtttcttgttattgatttaaacacactttcgagtctgtagtaagatctcaagagtcgttcttatgattggaattaaatcagattgattaagaaaacaaacgcatcatacaaagtagaaagaaaacagttacatgttttagtcttggaagtcttctttgggcttggtctttgtctttcgatatctttcttccatctgcatgcccatggaataagctgcttgagccaccttttctatgtttggaacgttgtagctctgcgctatatatatcccccagatggttccgcagacgaatgagaagtagcttcttataaaccccattttcaacaccagattagattagcctaagccactgggtgggtttctctaatatatagagccacgtctatgtttatcttttacttcttctccaaggggtttgtttacaagtcatttattcctcaagggaaaagt

SEQ ID NO: 1127 - DNA, 455 bp, Arabidopsis thaliana
tcccgaatagcatcatatataaaatcacagagttctgttctctttgcttaaaattgtcaaaaacaaacctttgttccaagacatggagttaacacgaaggccacggccatcgccagtggggtaaaatggacccaactcagtgaaagctcctccaccaattgaagaacaacctggacctgcaatgcaaacctcaaatatgaaatatcctttacaaattctttaaacatatgcagaaactgagcaggaaaacacggacctccattgagccaaagggtcaatggctttgagtcaggttgtttcacagcctccacatagtaatagaacagactccgaccagctttcacatcgacatcgacataacctgcgtattgtttgaaccaacagttggttgcctggcagcctcacaccaaatcttcttccgggtaccttttgcaaccactgcaatgacagcaaca

SEQ ID NO: 1128 - DNA, 551 bp, Arabidopsis thaliana
tgaattgtagctgagtatcacatcagccagttgaggtatgtaatgccctgcgagagaatcaaatcaaacattggttagataaaagtaaaactgacaagtaacatcatcaaacacataaccaccaacattgttactcacatagccatttcataaactaagaatcagaataataaaagacacacctgcgtagctttcgccagtgagaaagaggtcgcgagacttcaactctgggaacttgttgaaccatctcaacaagaacacaagcatatcattgactgttcaaatacaaaaaacatgtcaagatacaacagtgttctaatataatctgaaaaaatgggatatatactttaccagtagacttgtccccagtgttgtaatccgaacttctgttagagtatgaccatcctactccggctggtgactccacaaataacaagttcgaagctacacatacgcaataagagacaacagcatcacaaacgtagaatcacatagttctctgctttttgcataaaattgtcaaaaacaaacctttgttccaagacatggag

SEQ ID NO: 1129 - DNA, 659 bp, Arabidopsis thaliana
aatggcctggatttaaggtcataaacaaggaggaggctttgaactatactgttggacccttcttacaaggagattggatcagtgcctcaggctctcccgttaagttgggtctttatgatgcttgatgacaacttgttgtttgcaaagaaagccatgtggatatagaacttcatccatggaaatttacttggaaaatcggatactagaacatagtgtgctaagagaatgtgttgtatcaaatttatatcgatttgtgctgaaaatatttttggaaggaagcatattataagtaatatgtaggatccaaatgtttttccttctttctccattgatctcaaatacgatgaaaatacacacacatgtatttccaaaagaacctagacatattgataaatgcatgtaatcttaaaagatccttgtattgacacacttgtcacatcattagaagttgtattgtcaatgcctacaactataacaataatgagtatggtcctttgatggagtccacaattgtagcaaaaagccaatccacacctacaaaaatgttaaaagataagagttttgtacataaaggaaacgaaaaagacggcgaagaagatacctgcacttcatgtataagcaaccctcagatttttcaatgtagaatttgcaagaaggac

SEQ ID NO: 1130 - DNA, 1005 bp, Arabidopsis thaliana columbia
aaaacacttaaccaaatcatcatcaaccaagttcatctcataaaccaaaagaacacgtctaataactgggaatgtttaagctaatctcctatttaaacagagccagcgatgattacgtttagttatacactatcacaaacgaaaacctaagaaaaaaaaggatcgaggttgatcatatgactattataatgcatgtatatttatatatccttactaatatcgttgctgcttcatctgatacatcagattttgctcctcgcaagcttaataaaaccccttcaacctccttttccctcccaactttagcctacaaacaaaattcatcaatgatcaaatcattgataagctagcctttggtaactttaatcgtattttatgggttggagatgaacggaagagacttaggctaaacaaacaggatctggttgtttttaatcgtgtacatttggaaccaagagtttagatgaccatcatagttcagtaaggttctagtcttatcagctttgattgttatattttccaaaagacaattggtataaacactaaaattttgttttcttataaggtaaaacacttagatgaccaacgagctgttggcccagtggtaaattttccaagtagaggtgttaggttcgaggtacgttgggagggatctcttctccaaaggagatgaatttaacttggtgtggattctgcctctaggatatgtagggtctttgtgtttgaacttctagaatccagatattaaaaaaaaaagaacattgagatgatccctcatttagaaaagaagaccaagaaggtaatacatgttttcttagaaggtaagaccaagaatttaaaatgcaatgtttcgatccttacattaattgaagtttaacgggacctattgtagtgtataagagacaatgaaatcccatgagacttaacacgtacgtaaacataagcgtaaatgcaaatgtattttgaccaaacaaattgatgaaaatggataatataaacgagtgc

SEQ ID NO: 1131 - DNA, 498 bp, Arabidopsis thaliana
gtgagagtgagatcctctgaaactttgtgagtttaaaatttacccgcagacttgtccccagcgttgtaatcagagcttcggttggagtaagaccaaccaactccagccggtgagtccacaaatagcaggtttgaggctacacatttacaacaatagacaataacgtcaggtgtaagatcaaagttctgttttctctcattctttgcataatattataagaaatagacctttgttccacgacatggagttaatgcgaagaccacgcccatatcctgtggggtaaaatggacctagctcagtgaaagctcctccaccaacagaagaacaacctggacctataaaacaaacctcaacttattcatttcacaaatttgtgatttgtgatatactcaaatgctaattagttaggaagcagacaactaaatacgaacctccattgagccacaaggttaacggttttgtgtcagggtgtttttcagcttcacgaagtagtagaaa

SEQ ID NO: 1132 - DNA, 733 bp, Arabidopsis thaliana
agtaaggattgttgtagtaataccccgtcggtggcggtcccatcccgttgacaggtggcattccgtaagccggaactggaccggtgttcatcttcgccaaactggcttgacctctcatcccatcacgttgatattgctgccatagctgctgctcttggctcagtagatactgcttcttctccatctcggccatttgcacgtacgaaggtggtggaatggttagtgaagctgcgaatgggtcttggttcactttctcaacggttccatctggtgcaggtaaggctaatacttgattgttggttttaccaggtaagggtaaagctacgctgctcgcgctaccacctgtcaattgcgaggtgctaacgtgttgtctgaccattccttgatcatacatcccgttgagcaacaagttatcgaacccaccacccaaagcggctgtctgtttttctaaattgctcgttgtttcaaccaatgccaattcccaatccgctttaccgggctctgcagcgggattctgccaagcagaggtcactccgttcgaggagaaagcttcccattttccgttattacccggtggaccagcaaagagtgcaagcgcaaacttgttcccttggtcatcagctgtgacttcatcctccctcaagttaactaaatcctcggtaaattgcggtttttcgggctgaggttctggttcaggcggaggtggaggagtgtaattctcgggaggaggaag

SEQ ID NO: 1133 - DNA, 596 bp, Arabidopsis thaliana
tcgggtgggacatggagctctaactctgtacctgctggagaatatcttgcgaaaattattttctattgtggtgcatgatttcccagggacaagtgatgagttatcttggaagggaacgcaaaatggggacttcacggttcggtccgcttatgagctgctgaaacctgaggctgaggagaggccactcatagggagttttttaaagcaaatttggaagctggtagcgccggagagggtacgagttttcatctggttggtgagtcatatggttattatgactaatgtggagcgtgtgaggagacacttaagtgacattgcaacttgttcggtttgtaatggagctgatgaatcgatcttacatgtgttgagggactgtccggcgatgacacctatttggcaaaggctgctgccacaaagaaggcagaacgagtttttcagtcaatttgaatggttgtttacaaatctggatccggcgaagggagattggcctacgctctttagtatagggctatgatgggcttggaagctgcgatgtggcgatgtatatggcgaacgcgagtcacgtcgggatagatcgaagttcatcaaggatatag

SEQ ID NO: 1134 - DNA, 1054 bp, Arabidopsis thaliana
atacctaactctattatttgttttaactatcgctaatttttaacaggaattgtaattatatatatcttaagtactttctgattctatagctatgtggatatataataacatctaattatcatgaagttatgttttttaattgggttataaaaaataccattaaaaaactggaaaagaaaagaacctgtaagagaatgaaggttgttctcaatttcacggcaagccataacagcttcgacggcatgaaccctcacgtgctgttgcagctgttctttgaagctacacaacaccattacatattgtgcctgtttccaattaattataattgttaaatgttttatatatcctctcacatttcatataattattcaatgtgtaaacattttccacatatatgcatacacacatataaatatgtgcttctggtgtggtgtgttttgagcggttagatcattatatagtcctattttctacctaacttaaataaatataaataaaaccgaatttttttggaacatttcacaagctaattccaaaattatagttgcaatatcaattccaactttaatgcaattgcaaattttaggtcggagtagaaaatcaatcgtaactaacatgataatattcaaagtttaaatagaatttcaatttaattacaaaatgacatttaacattgactcactctatgtgaaatttagcacctaactatacaaaaaaccatatctacatctatgtgtgtgtattatacatttgaacattcgtgtgaagatacataaatttccatgaaagttgaacaaaaccacttcttcacaaaaatcaggtaaaaaaataccaataacttaaatcattggaaaaaaacataatttgtttgaagtataacttcccacaagaggaattagtaattataaaatttatagaaattgttgatatattgacaaaaggtttacatcttcgatcgataaaactcccaacgatcttgtaaaaagtaaaacacgaaaatcattgaaaaacacataatttgtttgaaacataatttcccacagagattggttag

SEQ ID NO: 1135 - DNA, 480 bp, Arabidopsis thaliana
attccagcaatggtatgtgctgttcgatgtcatgtgtgctgacggcttctatacattttgctttaggccatattctactcaatattgcctcccatgaggttttactgcattcttgttcgatcaggtttgctaggtccggatctggagcggtgaggaagttaccgatccctgaaacacattgggcgtctgtgatccagtcgctgagacggccagtccttatgttagagcataactcaggccaatgatcttccaaaaactttattactttgaggaaggaagaagcataaggcgcacctaggcgagctacatgttctcgttggagaactccacaaagcaattggcagtacatgccctgattagtgtcttcacaaatcgcaattgcatgcgggcttatttgtgctcgatccctgtaaatcagattacgaacacaatggagaacacttgcagtggactaggtagtgaatgtgaagaacagtttta

SEQ ID NO: 1136 - DNA, 724 bp, Arabidopsis thaliana
gttgattggtttaccttttaaatcaacacaattgtcatgagtcatacaacaagcatcaagatcatcacaaggtggctctccaggacatccaaagtaacctatcccacaatacttcccatagcgaataccaagacctgaaaacaaagattggatcaaaacatataatgcatgcacaagtttttttctccaaaatcaaaggaaggcataagaactaagatgataagaaaaaaacaatcttactgttgcagttctgtgcaatgcaggtgttgctgcacttctcctggctgctaacgacggcgaggaggaggaaggcggttaaaccgaaagcaacacgtgacaaagcaagcccggtgatcatctttctaaatctcgctctctggttgaagtttttgggttttgtgttctttcaaattctgtcccaaactatttttggctctctctggaatggaatatcccatttttggttggtcctcctgctttcttgtccttcccctctctctctcttttacgtacacaagaatttaaaaaatgaagaagttgcatgactaccaatcaaatcatcatattttatggacgttccttctcgaagaagcattatcatggacggtaaaaacagagtatcatttttgttactcttggaacagaacacgtttaagctatgtattcgcaacggctaatgattttcttaatgcaatctgttacaaatagattggagattaatatg

SEQ ID NO: 1137 - DNA, 164 bp, Arabidopsis thaliana columbia
tatcttttatgcacagtaaatggtatgtactgtgccatggtgccggtaatgacggcttctatacattctgcttgtggccaaattctactcaataattgcctcccatgaggttttactgcattcacgtgcggtcaggttagcaaggtacggatctcgagcggtga

SEQ ID NO: 1138 - DNA, 947 bp, Arabidopsis thaliana
gttgcacactatctgaaactctgatagacagagaaactgccacgtcagatgatgtctgggtagatttcaaccaatcattttcgttagcgctttatctccggtttttcacttagaatttatataatcagacaatgtttacatgtaatagtttaggcgtaaacaaaataagttaaatgaggaattagtaaatcattttagattacagagaaaactacagagataccaaaagcaaatctgtggtcaaaaaactttactgacaagttttgcttcctttttcacctctcaaatctgaaatctctctcgtttccttcaaaatattacaggtctcaaagctcatgccatctgattatagtttccgacagaatctgaataataaaatgaagaatcataataatatgataaaattcttaacccataatgaatctttttattctatttcctcctcagcccaagaaactgttggatactcaaaaacacctaacatttactatcttgacatctttctctccttagatgagtcgatcggacaagcttggcaaccgccggaaaaaattgagactagccgtaggcattgtgtctcggaacatcggatgccgaagataataaaaccctagagccaccgccaccattttcgcaggaactgcatacagaactattgtgattaccaaacagattgctatgaacagctttgtcgctctcggatctctccagctaaccaacgcttgaatccgttctccttgcgctgcaaaatctcctagaatggtctgaaccctcactgctaagatccttaatcggtcgtacctagctcggattacttctggtcgccttgagcttggtatggtgtcgaattcttcatctagctcatcaggatcgacggtttcagcttgtgataagcggatatccataccagccggtatcttgggtctaaaccggtagtaccaaactcc

SEQ ID NO: 1139 - DNA, 533 bp, Arabidopsis thaliana columbia
  unsure (1)..(533): unsure at all n locations
actgaaaattacagtagaaaatgggaagggaaagaagctttaagggtaaacctacatgcggccgccatcccagcagctagagcaagagactccaagacgccaacaattaaaaatggaagttttggaactgatagcatctcttttgtaacaattccagctcggtatctgaaatacangatcgaaaagtatacagctacatacctgcaaaaaaagacatagcaaaataaaatttgtgttttttgtgtaaatagaaacaagatacatccaggaaatcgattgcatgaacatgacagcgatttatccacattgaagaacaattagaacaaacttcaagcttactttctctttctacaagtccgagatcatgagaggaggagttcaacagtagaataggtcaaaaactgtgaaaacacaaattacacggccaaagtcacatttttactatggactaaatttcggatgcatcaaacacaaaacaatcatatacattctctacaatatatacattacatttcttccagtcccagagtgat

SEQ ID NO: 1140 - DNA, 676 bp, Arabidopsis thaliana
cttgagaagcaagaaaacaatcttgtgacctttctctgcgagcttgttggataggtgaagaaaaggagtcatgtgaccaaaggctaaccacggatacatcacaatactcatgcttgacgattcattcgatccaaaaacacccattttcttggactctcttgtatttcactttaactaccggaagatccttattagactttttttgttctcttttgttaatttctaagttgtgtgttggatgtgtataaatacataaacctttaacggatcagattggtgagtgtcctgatgaatggtgtgtggttattgggtaaccaaatgaccgggcaagtgtaacctcctggtaagtgcaaacacgtgatggtatcgtaacatcaacaaaagcaaaaccagacttcacgtggtaattgatgggcctgaaatattcggccccctttttaagcaaattaatagactctatttaaaagtcgttatttgttcgttacgcttaataatcccacagtcaacgttttatgtcttaattcaaaggttgtttacgaacgattgtcaaagtggtaactctcgtaattaatataacgtttctttacatattacccctataaattgtttgtttattttgatccaaaagcatcacaattaaacagtcgactaatcgttcatagaaacaaaagaaaag

SEQ ID NO: 1141 - DNA, 1484 bp, Arabidopsis thaliana
ttggaaattaacaaagactagttaacaactattattggatctgttaatgccaactaacgtcttgtggattttggactggtcaacgattaagtttgtgtgaaatagccggtcaacgatttgtacatatattaaataaccatatacgaacttcacctattaaatgaaagaaagtttgagtattaaacgacatttttcccattgactaaatattaattttcagaacttcaaaaataaaattaatgccttcaaaatttctcctaattatctccttagtttttcggctgtaaagttttccccttctctatctatcctaaataggctactatctcaaatgagatacttttttaattgggtttagtttatattcgtgtaagggtactagcatgggctttataacacattaaggccttcttgccacatttatgtttttatttttgccgtctaaatttattatttattgtaaattatgagtaaattatgtcgtctaaatttataatttattgtaaattatgtcaatcgcatatatatacatagtattccgtgtttcaaggtttagttgactatgactctggacttatcgatccaaatatcgttgatctacatcattgttatcaacaaataaagaagaaagtgaaataatatatttttgttatacttaggaaagcataatcaagatcaattaataaaaaaataaggtttattatattcatacaattatgacaaaaaaaaattttttgtgaaatttcccaaaaaaagaaactatcttagaaaaaaataagaaagcagcataaataatttagaaaccgacagttttagaaaaagaaaagaaaaaagagaatagaaagaaaccaaactataattttaattagaaagtggtgtcgagactccaatgtagtacattgatctcttctttcccttatcttcccttacgtaattagcgtcgtagtgctatgagactcgtgtacgttgatctattctttgaatctcccgttgaaactttggagtgattatttagtagttttggccgttgcccaaaagtcggcgttagaggcacctttctccatgaatactccgtaattctttaaaaaaatttgtagggagtttgtggaagttgtcgatcgaattgacctcgagtcatgagaaccaagtgagcgctgcgccacttagatgttctacaaaaagttgtcagcttccggcatctcgctcctttttggagaagtgtgcgcaaccgatcacgatgcatactgacgtcaagaatggccttgggtcaatgagcccttcatagttagccagcttgattttgctgatgtgacaaatgcgaacaatggagatgcgtgaagtgaatggagtgtgttgtgtctcctcgaatatcttgtctaactctagtgtcgagctgacggtacaatgcatcttggatgacatatctttcaacgtggttcatagttgttggagttcccgatcacacccacttatatcatcatttt

SEQ ID NO: 1142 - DNA, 494 bp, Arabidopsis thaliana
cgttcttgtgacgagaaagctgtaatggttcgaatattggagacagcttctgcagctagtttactgctttcatcttggcctttgatggcatttctcgacatgcttttgagcagaacgcgttgagtgtagaagcacacaacaatcactggctgcaccgacatcatcactatagagaatcgccaagagatgaccaaaccaattgcacatgtgatgctcactgccgatatagtttgtacgagtaatgacatccgatcaccaaccaatgatctcacctatcataacaaaccattccaagatcaatacatagattagaatagattgttcattgaagttcaaattagaaaggcagaagaaataccatgttagcatctttcgctagtctagagcaaattgcaccactcgaattctcatctttgtcaaaccaattaacttcaaacgttagtatctttccgagcatacgttctcggatacgttttgttaggtattcgaccatg

SEQ ID NO: 1143 - DNA, 788 bp, Arabidopsis thaliana
tgtggtacttgtacacgttctcgaacttctccttgcatttctttgaacttctcttgtaaccaagctccatcattttcctaattcatgtatcaatcaataaactcataattaagaaacaaatattatccaaactttttcttagctagttgtatgtaatacatatacctataagcaaataaataggcttgtagtcatatatttcaaatgaattaccgagatatatgactacacatattatatatacatcccataaatatgtgagacgaaaatatatgatcataaaatttctgcttaaattttctactttataaatatatatgcatgtaacaaaatataacaaacctggaaatttcttcccataagggagctttgagagtagagtcacgaaaagctttatccatctctgaacgtattctcaatagagctaaagtctctggtcttggccaccggtttcctccgctgccggctccttcaccggtttcctccatcttcatatctttttcctcctcgacggaacctcccacgccgccgcctgagctctctaacagtccttctgagtttccagacatagctaagactcgaacttgaatctttcttgagagagatgaggagagtttcaagagaagacgaaggttgtggttgaatttcctttttcttttctttttaaattttttttgtctattgtgattttatcttaggggtatttaattgggtgggatggccattttatctagatcttataaatataatacaattttcttcgtataactttattttgtatatatata

SEQ ID NO: 1144 - DNA, 1464 bp, Arabidopsis thaliana
gtgaccaaaggctattatttcctacacaaaattcccactcaccacacacaacaaaagaatagtgatcgaagctcatggcgtctcttgcaaccgtcgccgctgtgaaaccatccgccgccataaaaggactcggcggcactcactcgccggagctaagctctccatcaagccttcccgcctgagctttaaacccaaatccatccggtaactaaaacttttcatttattcattaattaggatcaaaatgccactataaccacactataaattcaaaatatattaatagatttttgctggctgaagtgtgttttaaacgatagatatagtgatgattaattagcttaaaaaggattaaattctgataatttcatctcttgtttgtgattaaattagcttgaggttgttgtgttcatgtgtaatagggctaatggtgtggtggctaagtatggagacaaaagtgtctactttgacttagaagatttgggtaacacaacaggtcaatgggacgtatacggctctgatgctccttctccttacaatcctcttcaggtttcttcatctcataacctaacttgacttttctacttcaatcaaacactattctgagaagagattctcttctactttcgttacttgtagagcaagttctttgagacattcgctgccccattcacaaagagaggattgctcctcaagttcttgatccttggaggaggctctttgcttacttatgtcagcgctacctctaccggcgaagttcttcccatcaagagaggtcctcaggagccgcctaagctcggtcctcgcggcaagctctgatctatattcatgttacctttctcttcttccttctaaaactcatcaacatttctcaatactgcaaacccttttaagtaattttatgtatattctgtttatctgttacatttgaaacgttttttcttcccctaattttacaaaagaaatattttttttttcaagagtatcgccccgcggttggacttcttgtggttccaagagattcaagataagtagtcttcttgttgttagacatgatcatgcttgacactctggttaaaagtttcttgtcgctcttttctttcctcggttcattggtttcgatattccattgcattacctcagatagtgaaatggtaggcttctgctttttaggtctatcttctaaaagacaaaaatttggctcttcttccttctctggactctctgtttccttcactatatggatcttacacatcgcgagctcagggttttgtgttagctgatcagcttcaagaacatcttctattcttgacattaccgtgtgagccaagctttcaagaattctcgaataactctccactatagctaaccctatatcctgcaaaaaaaaacaaattaatgattttcgtaaaacagaagacaaacaattatatgtctaatgtgactttaatataaagttatatg

SEQ ID NO: 1145 - DNA, 1293 bp, Arabidopsis thaliana
  unsure (1)..(1293): unsure at all n locations
agcaatgcaaatgttgtggtttatggcctccactttactaatgttgctacccatttatttttaataaatattcgtattacaaagtaataaaatatttttatgaggtttgggacctattattttttacttgtattcacttgaaaaaagtaacatgaagctcagaattgtgggtgtaaattgcggatcgaatctactccttctcgcctataaaaagaacacctcctcctctcattttcttcattagtttttgctcagagctaaacgaaattctctcctatttttctctttctttttaaagtaggtctcaagagtatatgatttatttaaaattcgaagattctactatcgagtattgcgataccgatcttattgtgattgtattctttctttttatttttaaatcaggatttcgtgattttaccgttgggtggataaaatcgaatagcggcgtangttagataattttttttcatatgaagtaaatcgaggtttgaatacattagatgaggaaaaatcatattataagcatagtgtaaataccaaccatcactaaacacccacaaaccttaattcatttgttatccgtaattgcttagcacaagaaataatcaaatattatttaaatagaaaattaaaaaatggcaattttgtatagcaaaatatgttattcttttgaaaattccatctgttacacattcctctaattctatcgattggaaaaatagtattagttacaattcccttctaaagcatccaatggccataatttttttatgattgttaatgaagagaaaacagtggacagtgtcatcacatggaattggttgtggataaaacaaaacaccccactccatacatgatccactcttctcctctcaatcttcatcctcactaatgaattaataatacatttaaatataaaattattgaattcattatttgctcgattcggaaaatcgtaattgaattcagataatggaagctagaagactcgcgatcctctgttctcacctgaacccacctggtccgaacccgacccgagacccgactctcagggtctccgattgtagctctggttcttccggcgacgggaaagtggaatcatctactctccaaaacgactgcgttttctgcaagattatccgtggcgagtctccatgtctcaaggtttacttttatgtctctgtttcttctaattcttatacagaacagaactaactaaactcttactttgatgcagttgtacgaggatgatatgtgtttgtgtattctggatactaatccactaagtca

SEQ ID NO: 1146 - DNA, 663 bp, Arabidopsis thaliana
ccaaaaataaaaagaaatgaagaaagaaacaaacctgagcaatgcaaccaccaagacccaaaccttcaaaaatctgatgaaaagaaagcgcacaagtcaaaggtctaatggtacacttattttgtgacattcccattgttactccaattatcaccgaatgaaatataatccctatttcaagaacttgtgacactaatctttgtttcatcttcacaatttcctcctcactattttcttgtatttccaaatcagccccacactttccttctttcatttctaaccctccaaccgccttacccaccggcatatactccatccctccgtcaccaccaccaccaccaccgtgtcccatatgttcactcgccgttaaatcaaccaacaaagccgttatagctccgatcatcgtaactaaaccagcaaacggaaaatctttccatggatgacgtgacgacacttggcaatcagcgagtgactcaaacgcttccggtaaaacgtggactaaagacgtcgagagaatcacgccggcgcgaatacactttatcacaagaattgctttatcgtacagaggtttccatgaaagtatttagcgagtaaaactggtccccaaactccgaaaacgcttgtgagaaagatggcgaagacggcgactatctttagatgaga

SEQ ID NO: 1147 - DNA, 851 bp, Arabidopsis thaliana
tgattgtattaaaccttcaaaactcatccgatctgtctcttgaaatgtttcagggtttaaaagaaagcgataagatacagctactagatgactgctaattcaaatggtgccaatatatcatcaaggtttgaggtcatattacttctttctttcatgaacagggacaaagccaaatctgtctaaaacgtttgttgtttactcttttgaagcaagaagccacgagtctgatagcattgacgagaatgaccctggatttggatagaaagaaggtataggattaataggagtgattattatgtattggtatttagaatagtgtgtcctttgaggcaagtaagaagattgagaaaaataaaaagaatgtgcttttttttccttcaattttttcgcatccaacaaaaaatgaaacctatattttttctaataatatactgcattatgcacaatttgttacaaacaccatccacaacacatacaattctttttgtctttttttttttgtttgttaccataacacatgaacacacacgcacaagcttttctcagcaggacttgccaggtttgcagccaagcgtaccagcatccttggtaagtcttctgacctttgttcctggctgtggccggattgcaaactttctagggattggattttttggggttgcgctccacgcgttcgcctttcctgattgcacaaagtaagctccattcaagaaataatctttctctgattgccagttccatgatttccattcaggataaggtgtgtactctctctttgtaacctgcattccaaatttctctcaattatgtctctcaagtgtagctgtagtgatttgtcgattagagaaagt

SEQ ID NO: 1148 - DNA, 531 bp, Arabidopsis thaliana
cgaatcaacggaaataaaagaaaatcaacaacaacccaattgacttttcttttatgaccaaattaagtcttcttgactagtggacaccatatagatttcatacgaaggttgtaacgttatgacgtcgccggtggaactaccatatattatacccaaatggccaaatgagatatgcttgatggttattggtgacaatattaatgtttgatcttattgcattggttttgtgattaattaggacattatattccggagctagcccaactgatcgtcaaccgtaacaaaggtgccaaaaatccaactatcaatctaaaagggattctggtaagaatttattttgtataactcactcatttatgattcaattattgaagactaaacttaatgaataaatatgaaagatggggaacctcttgtcgatgactacaatgacaacaaaggaatgcgtgactactggtggaatcacgggcttatatcggacgaaagctacaatgacctgaccaaatggtgtctcacgactccatcctattt

SEQ ID NO: 1149 - DNA, 816 bp, Arabidopsis thaliana
  unsure (1)..(816): unsure at all n locations
gactaaacgtatccgagaacagatgctctcgaagatactaacgtttgaagtcaattgcttcgatgaggaagagaactcaagtggtgcaatttgctccagactagcgaaagatgctaacgtggtatattttctgccttattaatttgaccttcaatgagaaatatatttaccatttattgatcttgaattgctttgtcatgataggtaaggtcgctcgttggtgaaagaatgtcattgctggtacaaaccatatcaacagttatggtagcttgcacaattggtttggtcatcgcttggagattcaccattgtgatgatttcagtacaaccagtaattattgtctgctattatattcaacgtgttctgctcaagaacatgtcgaaaaaagccatcattgcccaagatgaaagcagtaaactagctgcagaggctgtctccaacatccgaaccatcacaaccttctcatcacaagaacggatcatgaaattactcgagagagttcaagaaggtccacgaagagaaagtgcccgccaatcatggttagctgggattatgttggggactacgcaaagccttataacgtgcacctcagctttgaatttttggtatggtggtaaattaatcgctgatgggaagatggtatcaaaagcattctttgagttatttttgatctttaagactacaggccgggctattgctgaagctgggacaatgacgacagatctagccaaggcntcaaattcagttgactcagtattcacagtgttagatcgtcgaccacgattgagctgagaatcggatgggtatacttagaaa

SEQ ID NO: 1150 - DNA, 820 bp, Arabidopsis thaliana
gtgttggtatctatcgcttccacatactatgagaagttggcgattacatgcaagatatattcaacatcacagctaaggttgtaagagaagatgacgagtctgttgctctacaggcaattgagttctggagttctatttgtgacgaagagattgacatcttagaagaatatggtggtgagttcgctggggattctgatgttccatgcttttattttactaagcaggctctccctggtcttgtgcctctactgctggagactcttctgaagcaagaagaagatcaagatttggatgaaggggcttggaatattgcaatggcaggtgggacatgcctcggtttggttgctagggcagttggagatgacattgttccacatgtcatgccgtttattgaagagaaaatatcaaagcctgattggagagagcgagaagctgcaacttatgcttttggttccattttggaaggcccttctgccgataagttgatggcaattgttaacgcagcgttaacatttatgctcaatgctctaacaaatgacccaagcaaccatgtgaaagacacaaccgcatggacccttggtcggatatttgagttccttcatggttcaacaatcgagacacctattattaatcaggcaaactgccagcagataatcacagtactcatccagagcatgaatgatgcgcctaatgttgccgagaaggcttgtggggctctgtacttccttgctcaaggctatgaggatatcggtccagttctccgttaacaccttcttccaggaaattattaagtcacttttagctgttgacacagagagga

SEQ ID NO: 1151 - DNA, 1491 bp, Arabidopsis thaliana
ctgtcccgttcatatgcagatacaaaaataagtacttgcggatagatatccgagcaatcaagtcctgggctcggcaaatcttggaagggctagtttatctccacgagcacgaccctcctgttatccatagagaccttaagtgtgataatatctttgtgaatgggcatcttggacaagtcaaaattggtgatcttggtcttgcaagaatgctgcgggactgccactcggcccatagcatcattggtatgtctcaaaaatcgtttgttttcacttcttgtccaaatcatatgcttagacctctttgtgtttcttttgcataggcactcctgagttcatggcaccagaattatatgaggagaactataatgaactcattgacgtatattcctttggtatgtgctttttggagatgatcacctctgagttcccgtatagtgagtgcaaccatccggcacagatttacaagaaagttgttggggtatgtcttacaatctgtgagcatataaatgaagctgtcagatgaaccaggcatgagtcttctaatgttctcttttcagggaaagctaccaggagcattttacagagttggagacatcgaggcacagaggttcatcgggaaatgcctcgtgtctgcctcaaagagagtatcagcaaaagaactattgcaagatccatttcttgcctccgatgagtcctggatggtatacacgagcggtgctgggaatccaaagcccttcttgaacgagaatgagatggacacactgaagttggaagatgatgagttaaggaccgagatgtccatcgctgggaagctgggcgctgaagataacaaaatcgatctggaagtacaaatcgcatatgataatggtaaatgggactaaattgattaagctggtcactttgttattcggtcgcataattgtttttttctttccaggtctggccaataatgtattctttccctttgacatcatgaatgatacttccattgatgttgcaaaggagatggtaaaagaactcgaaattatagattgggagccagtcgagattgctaaaatgattgatggagcgatttcttctttggtgtctgattggaagtatgaggaagatgatgaaacccctcatgatcatcatcgtcatcgtaccgattcttttcactcttcttcctcgcacgcgtcatcttcccaagcttcactctcgaactatatggctcgaggccttcaagatagggtacaaggtatggaaagtaacgccagtctcaacgtgcatagtgtgacaatagtttttataaaagtttttgagatagaaattaaaattgcagatgatttacacgatgagacgtattctcagagttcttcccattcagggtcttactccaacctgaacgagatagctgttgatgagtacagctcccaatctcccgttatgagcagaactcacaacatgacgaggttatgcccgacgaaagctcgcatctacagtcaggacaag

SEQ ID NO: 1152 - DNA, 769 bp, Arabidopsis thaliana
atcttgagtgtcttgttcagaggagaattcaaccaacgcagtgccacaaaagcgtcgcttatcagcgatgttgggaggtagtctcacactgttcacctgaacaagtaaaatcagatgagcaaattcaaaaagctcgtttggacagtcatttgagaagaagaaccttggcatattgggagaagaaagatgagacatcctccatcttaatgctgtactcaaaaggtgaagccgcaagggttcttctgtggacttgttcaagcacctcttccggtttggagagtttagttcctctaccgatcctttgtcctggatcaacaaggttaaagtatatatctcacaccagaagaattgacaaacaaaccaaagggagggaaagcacaagtaccattattggaaactttaagaaaatcagaggtgcgcaagagattagcaacttcctccacaatcctcggagggatgtcttctctattgatgttaccgaggccaaggaggttcctcatacgagagaaggaacaaaccagaggcaaactaaccactagtttcgggcatctaaggaataacttttcaactatatctgtatgctacaacaatatatatgtatacaggatacggccatctttgctcttggtgacttccctgttgagaaatccgtctgtgggtagattactgtcactgaagtagaactcaaccttcaaccatcagcaaaagaagctacgaaaatgaaatcggggaaattagagatgagagtgaaggaagcatagataaatta

SEQ ID NO: 1153 - DNA, 331 bp, Arabidopsis thaliana columbia
gttgtccactgttagattcgcacgcactgattgcaattgcaaaagtctcctctctttacgggaaacccacgttctagaccctttgaatcaccggttgtgctgtcatattagccggcggtcaaaagggctctgttgacggctaagcagttgctgatgaggtgagagatttttctgcttgaaacaatacgtggagtgacatctgagacgtttagatcggtggagccacgtcgctaaagctcagtgtttgtaagcgcgattcttagccacgtttgagcgtcgaagtcagtagaccttctccgggtttttgaagacacgcccttcaacgttctgt

SEQ ID NO: 1154 - DNA, 510 bp, Arabidopsis thaliana columbia
tttgttcctccacgagttgagctcttgttcccagctgagtagcagcccctcgtagtgctcaaccatgttattgaatttgctgtttgcctgcaagacgatataattgattgttattaacgaagtgaaagaaaggataagggattgcagaacatatttacccggactgtatggtgggcatggagcaagtagcgttcgcgaattgtcgggcgccatttgtcaaaagttggcaaaatcgcatctttgcgggttttgaaacagcgaaagacattgccctctttttccattgctaaaaaaagtagtagggttacaacttgagaaatacaaacaaagttgtaactaaaaaataataataattaaccaaacttataagggatttggtttgaggaacaagcacgacctttgacctcgggggagtatctcgatgctcaccaccctccttttgaggaaccgtattgtggtccgttttctctccactccattgtgaagagggggacgtggcgacaggaggag

SEQ ID NO: 1155 - DNA, 1152 bp, Arabidopsis thaliana
gaagatagaaacccggctttcgaggatataaaggagttgaagtacatcactcgttgtataaacgagtcaatgcgtctctatcctcatcctcctgtaagcaatcaagctcatctctctaattattcatgaactaaattttctgattgatttgtttcctggtaggtcttgataagaagagctcaagttcctgacattcttcctgggaactataaggtcaataccggacaagacattatgatttcagtctataacatccatcgttcttccgaggtacagttctcttccttctctcgtccatagtataacataggggagcctaatccttctcgtcaatgatctttgtgtggttcggatatctaacctggagtggacattcctagtattacattcatgcccacatttcttatgtgtgtgatgtatgttattccaaaggtatgggaaaaagatgaggaatttctgcctgaacgattcgacatagatggcgcaatccctaacgaaacaaacactgatttcaagtaaactcagtagaacacatcttttgacacaaactactgaatcaagattagtggttttgattagggaatttaaaagatgattttcttttttcaccagattcatcccattcagtggagggcctagaaaatgtgtaggcgatcagtttgcattgatggaggcaattgtggcactcgcggtgtttcttcagcggttaaacgttgagctggttcctgatcagaccattagcatgaccacaggagcaaccatacacaccaccaatgtatgccaatgttctcacactcgagagattaatgagagtgtctgttttgtttagaatgattccaatttctctaatgctgatattttcaatttcagggattgtatatgaaggtgagccaaaggtaaaaaccagaatttatgttttcatgataattgattggtgtgaatggacttgtttcatagtactcttgagaaataaccacaaaaaaatgaattatggaaaatagttgtaccatcggaaatgtgaattttgaacagtgagatgctagtaccattaaagtttggtaattgtgttatcatttcaaatcaaactttcatacagcttgtgtttgttcccattttcagtaattacgaaacaaaattttattttttttgaat

SEQ ID NO: 1156 - DNA, 680 bp, Arabidopsis thaliana
gtgacaccacgccaagagcaaggagtctcgtcgtcgaatctccagctccgaaaaacgtaaagaggatcgtcaacgattgagtaacggaaagagagaagaagaacaccgtctgtggtcagagcaagagaggttttgtcgcagaggaagaaaagaaaaacggtaatcaggaaaagataacggtggagatcggcggcgactgtcgtcatcatgcttcaagcctacgcatcgatagagaactaaaagattgattttttgaaaaggccatgtgattgtgaacgatatatgaaagtgtttatctttttatggaattcttgatttgagtaattctttataaatataacttttgtaaataaaaaattctatatcctatgtaaattgcacggaatgtgataacaaaagttaacactgttttcctattcgtaaattatgctgacgtcgctttgtcgtttttcacgtttatattcaacgtggaccctaatattggttcatcattgtttacattgatcttcaaagaaacgtaacaaaaccatataaatctggatagttttgttacatttaaatctttgctagacacagaaactatataatatactaattctgttcatcattttgattatgacggaaattgtgacgtgagattacgcatatcgatcatgtgatgtgtgtgaagattgtattat

SEQ ID NO: 1157 - DNA, 544 bp, Arabidopsis thaliana
gttgatgcctctcatcatcaactttgtctggaaccgtaatatcgtcttctccgtcctcttcatcctcttcttcgggaccatagaacttatcttcgttgcatcagccttagtcaaaatccctaaaggaggctggatcactctgctcctttccctcttcttcaccttcatcacatacgtatggcattacggcagcagaaagaagtacctatgcgaccagcacaacaaggtccctatgaaatcaatactaagccttggcccgagcctcgggatcatcaaagtccccgggatgggtcttatctacacagagctcgccagcggtgttcctgccacatttaagcactttctaacaaacttaccggcgttctaccaagttgtcgtctttgtctgctgcaaaactgtccctatcccgtatgtgccgcagaaagaacggtaccttatcggccggattggaccaaaaacatacaggatgtaccgatgcattatccgagctggctacaaagacgtgaacaaagacggagacgactttgaagacgagctggtgatg

SEQ ID NO: 1158 - DNA, 660 bp, Arabidopsis thaliana
agcaattccttaacagaagcttattgagattgacaacatcagcaatcgtgtcggctaactcgggaagacttgtctttgacatatcgaggatcctaagctctttcttctcctctaaacacacttcaagcatctccactaagtctgtagcaccacatgcatcaagaatctgaagattagtcaaaggcctaagctgtggcaatctcttaagccttgtacagtttctcagcaagagccgggtcaagattggcatagtactgaaatcgttagtagagtctttgagatgaaatatcggcagacggatgattttagtctctgagaagtctaggtgttcaagcagctgaagctgagcaaagttcttgttcttgcctttatagtccttccaatctttaactctatcaaagtaagactcaagtttcctagctccgtgaatgtcaataacttcaagttttcttgtttccacaatgaagttaggcagatcttgtagctcagagcagtgccttaggatgaagcaacgaagcatgcttagcttttcgattgtggaaggcgaagatttgattgcaagtcccgaaagattaaggctttgaagctgagtcatgttcttgaagaaatcatcagggatgttaactagagagctagcaccagagacttcaagaacatgta

SEQ ID NO: 1159 - DNA, 507 bp, Arabidopsis thaliana
ctgaattccaccagatcggttggttctggtacgtattcttccattttcatcggtatagaactcatcattgtgttcaagaccagtcaaaaaggtacctgcgggttcatttgcgtatgatttatacagctccaaaggaggttgattttagattggacaaaggagagaaaagtataactttctatacctgcaaagccgcttccaaactcaaatcccttagttgcaggtagcgacatacaagcttttgccagttctgcttcaagtttatcgaaaaccggtgtaccaagcccctgcgaatagtagtttaaataagcattcactgaagttcattaatcaaactacatgaggacgcacagattaagctcatggtatagtgagttcatacacgtggagcattccgaacaatgcaggtcacaacaccaccaacagagttcccttttgtcctgacagcatcaatcgcagctatcatcttttccgcatactcgggattagggcatctgacaatgttat

SEQ ID NO: 1160 - DNA, 898 bp, Arabidopsis thaliana
actcaagaaattcttgaaaaaaatcatcaatctttctaacaaaataatgttttacaaagatctagaactaacgacccacaaagaaatatctcatcaagaactctcaaaatctcaatctttctcatgtgacttcacaatctctgaacatgatgaaaatgattcataagttaccccaaaaggccaattcaactagaggtcctgagcaagaagatactgagttcttgagcagagttagcatcagggttaatgagatgaaacgactccgagtcagagctaccaacaacatgctcataattcgctctcatatacataacctcatcagtatccgattcatcagacccacccaacccggatccagatggcaacacacccgctccaacagtcatagactccaatctcttcaacatcatcctcgtctcttcattagcacttctccgtacagcaaaccctagcttccttccgttacaaaacatcgtccaaacgggtacggatctcagcaagcaagacttcaattcgggtcgggtcgggcattctaaagcgacacgaacaagacccgaacccatctcgtgaactaactggctcgtagctattgaaagctcgaggagaaggattggtttaacagagagacggtcgtgttgaacacagaaccacacgtgtccctttcttctaccgaatatcgtaccaatcaccatcgtcttcgacggtctctgcggcaccgtgacggcggatatgctgtagtcgacggcggaagtagcctcggaggaagaggcggaggaagaagctgaatcttgaacgtcgatatcgtctcttagggaagtactgagacgtttcttggaagctccggtggatgttgttgatacggtggttggattcgtcggagttgagatacatggaagaa

SEQ ID NO: 1161 - DNA, 1030 bp, Arabidopsis thaliana
ttaagtctaaggcctctagcgcatcaatttctagtatgcaaagtaggtaatggccttaaagctgactattggtatgacaactggacttctcttgggcctctctttcggatcattggtgacattgggccaagttctctgcgtgtccctcttcttgcaaaggttgcttcagctttttctgaagatgggtggagacttccggtgtcccgttccgctcctgctaagggcattcacgatcacttatgcacggtgcctgtgccttctactgctcaggaggatgtcgaccgttacgaatggtctgttaatggttttctttgccagggtttttctgctgcaaagacttgggaagctattcggcctaaggctactgtgaaaagctgggcctcctctatctggttcaagggagctgtgccgaagtatgcattcaacatgtgggttagccatctcaaccgtcttctgacgcggcaaaggctagcttcttggggacacattcagtccgacgcttgtgttctttgctctttcgcttcggagtctcgcgatcatcttctactgatatgcgagttctctgcccaagtgtggcggctggtttttcgcaggatctgccctcgtcaacggcttttcagctcttggtcggagctcctttcctgggtcagacagtcctccccggaagcgcctcctctgcttcggaagatcgtttctcaggtcgtggtgtacaatctttggcgtcaaagaaataatctccttcacaactctcttcgcctagctcctgcagttatcttcaagctcgtcgatcgtgagatccgcaacatcatttcctcgagaagacttaggaagcgttggcgtaacgtaatgcttctctggatccgttaatgtcttcaaaaatttcctaaatctattgtagctttgtttttacttttttgccaaagttgcttttgtactggttttctttgtaacgccacaacttcattattaatgatattaacatatttagcaaaaaaaaaaaaagttttgtttggaagtgctatagtatgat

SEQ ID NO: 1162 - DNA, 537 bp, Arabidopsis thaliana
ccattgcactggaatagtaaggtgtcaaatccttgtcactatcactagatgcctcatcatcaatggcagtagctgcaccaccagaaaaacgctgtcgcttgacaggccgctggaaacttttttttgcagaattttgcccagaataagtgggcttgaagccagtggcagcatccaccttttgaaaactctcagagctctgcaaaatttccgattatcagaacgactgcaaaaaccgagttctaacagctaaaacattagaccaactgctaaatgcctcattaaaccaacagctaaatgccttcttttcaattccttcaaccagacattaataaataataaggaagagattggttaacctttttgttgttttcattttggtgatccaaactccaaatttaacagcactgctgaaagttgaagctggcttcacaaaaggttttccttccaccaacggctcccatctacttttgggtcgtcttgttgggctcttattttgtaacgaagagagctgagcggacgttgacctatggcacagtg

SEQ ID NO: 1163 - DNA, 541 bp, Arabidopsis thaliana
tctttgttttaatgtagtcccatactttcttcgccgtgtttagttcaccaacttgtagaaagagcttcgggtatagattggaacaacgaggaggaggccatatcatttttctctatatcagttgagttgttctttatcgtgtcccagaccttatggaccttaagcgtacttttcatccttatggcccatacagtgtagttgattgaatttaacatcggacattgtatcgatgacgatcgcctccccctcctggtttgttcggcatcaccgcaggatcgctcatcgtctttcttgtgtttagaactcaaaaatcgctccgataccaatttttgttttgccaatattattagaacacacaaagattaagaagtcaagatcaataaagaataattttctttattagctttagaaaataactcaaaactaaagctcttaatctcaactgttataattcacgaggaataccacactttggtactctcttttataagagaaggattagataattcctaattctttaggagaacttcatagtatttag

SEQ ID NO: 1164 - DNA, 505 bp, Arabidopsis thaliana
tgtgttaaaaatagaatcaaaagaccaataataccaatttaagagaactatgcaagaccaaaactacaccatcataatctcaaaagtaatcataactgaatataatctcagtgacctagagagttctctgaaaatttaaattaaataataacgaagagaagtagagacagacaccggttgtagtcattaagcagtaattacttcatactcgaccagagagagattgttggcccggttaacctcgaacgaaacaggaccggttatttcaatgcgtccccatctgtcaacagccattctcatagtgtccttgaacaagtcgatcttcgcattcctcagtataactgttgctccagtcttcattagatcaactgcatttgcaaccccaaaagaacatcattaattagtaccatacatattctcacatattgaataggaagttgtataaatgtcaaacacaaacacactaatcaaagcttagagattaatgaagtgggacatattgaac

SEQ ID NO: 1165 - DNA, 610 bp, Arabidopsis thaliana
cgacaaaaattcttctctcgaggaggtccgtgctttctttgttgaagtaagtacaaagggtttgattcaagatttcataagaattggcttagtgaaatcccatatttcatatataagaaaaaggaataattcgccagattcgggattgatctctgcagatcacatgaatccgttttattcgatttcgcccaagtctggcattcttcaacaatcacttagacaaaatcacggaactattcgcatgttcttaaatcgaaataaggagtcccaatctttgttaattttatcatcatctaattgttttagaatgggtccatttaatcatgtaaaacatcacaatgtgataaaccaatcaataaaaaaaaatactctaattacaattaaaaattcgtcgggccccttaggaacagctaccccaatttcaaatttttattcgtttttgcctttactaacttataatcagatctctttaattaaatattttcaacttgataacttaaaatatatttttcaaaaaattaactcttatttaatcgatgaaaacggaataattttaaatctcgacccatatagtaacgttgttttgaatccattcaaattgaattggtat

SEQ ID NO: 1166 - DNA, 899 bp, Arabidopsis thaliana
catcccggtttcgttccaaattgtccgtcgcaaggtgaatactaaattcgatttttaaaactaaacttcactataatcattatttccttaatttgtattattatatgatctgattataatttttgtccttttttataaataaaggtaattttaaattagcggtagagagcgggaaaacatacatgctacgactaataaacgcagcattgaacgaagaactcttcttcaagatcgccggccaccgtttcaccgttgtggaagtcgacgccgtatatgtcaaacccttcaacaccgacacaatcctaatcgcccccggtcaaaccaccaccgccttagtctccgccgcacgtccttccggtcaatatctaatcgccgctgctcctttccaagactccgccgtcgtcgccgtcgataatcgcaccgccaccgctaccgttcattactccggcacgctctccgccacacccaccaaaaccacttcaccaccgcctcaaaacgccacctctgtcgcaaatacattcgttaattccctcagaagtctcaattccaagacatatccggctaacgttccgatcaccgttgaccacgatcttctattcaccgttggattaggaatcaaccgatgtcacagctgtaaagccggaaacttctcacgagtcgtcgccgccataaacaacattacattcaagatgcctaaaacggctctgcttcaagcgcattactttaacctaaccggaatatacacaaccgattttcctgcaaaaccaagacgggttttcgattttaccggaaaaccgccttccaatttagcaaccatgaaggctacaaagctttacaagcttccatataattcgacggtgcaagttgttttgcaagacaccggaaatgtagcgccggag

SEQ ID NO: 1167 - DNA, 553 bp, Arabidopsis thaliana
agatctatatgaaaaccttgatatcaggacggagatgattatgccatctctcacgacattgcttgcctgctcttccctcaagcttctccgagattactgcccatttcctctctccatgttgcatcaccaactttatcaacttcctatatacatatatataatgattatactcatttttttgacaaaaataaaataaaatatatatcatatataatgcaaacacagtattatgtagaagcatgaagatctacatatataattataatatatagtatatatatatacctgtcttcatcggctgtccattgccctttgatgatattcttgtatggttgcttctttgttatatccttgcaagtataatctttagctgcacctttaacgacgatttctccaataacggccaagtttttctccttcctcggaccaaacatcatgttctctttgttttcatttctaatctcaatcgcccttgtcgtcttcacgatcggtcggtctatagaacgttcttgtttcttgaagcacaaggcttcgttcttttggccgttcaaga

SEQ ID NO: 1168 - DNA, 678 bp, Arabidopsis thaliana
gtcttcccttcgttctcaagctcaagatatgaaatgattgcttctgggtacttccgattgaccggatgacggagcaccgtgaagctattcaggtggtggctgacaaggtccctcgccgtgtaattgagagtgtgtacaacatttctcttcctaaacccaaaacctatgagcgtcagtcccgcccgcctcatgctgcagagctcttaaaaagttactgtgcttctcgtggctatgttgcctcgagtggactaccggatgaaacgaaagctgcaaggctgattctgaaagattacattggaggtaagctgccacattatgcaatgccacctggaatgccccaagctgatgaaccggacatagaagacactcaagaactggaggatattctcgaaggttcagagtccgatgactctgcagtaggagatgagacagaaaacgagcaagttcctggtattgatgatgtgctagatgatctgagctcgtttgatcttgccaatgggcttaagtcttcaaagaaagtgacagcaaagaagcaaaccgcgtcacataaacagcacaaaaagccacagaggacaaaggatcggacttggagggttcaaacacagaagatggagatggaatgccttctgttaaagtttccagaaaccagctaacacaggtcctcttacgatgcggtga

SEQ ID NO: 1169 - DNA, 484 bp, Arabidopsis thaliana
caaagatgctaaataaccaactactagtggctactagtctccaaaatgacatggaatccttaacaaacatcaataaagagtttaggatgtcaagtttgcatcaaatatgcccacggagccccaactagaccatgaaaatccgatgttgtatcaggtcaaatgacctagctagaggtgtcagaaaattatgtatgtatactcgtccccaagattacctatccatatcgtgcatgagaaccatccgttccacattctgagtctcaccctcaccccgggttagcttgggaattacggctgtgtagtggagtcggcactatgcaggcaaggggctataaatgtgctcaggggttgtccttacacaaatggaaacgcaaagatgagctactcgctgtcgaaatcttgattttctgcaaaacaatcctagcagcggactttgtttgttgagaagaacttcggtcgatcctgttgccgtcgccgttgctgg

SEQ ID NO: 1170 - DNA, 602 bp, Arabidopsis thaliana
tcggtttcagttgggactgcgacaacatcaaaacctaattctagtgatgtgaaaaaggcatctcgcaacgcccttaatttcttcgacaggtaattggaggattggatgtcatttttctcaactagaacttcattatatcccaagctattatcacccatagaaatggtggatgacttgcctcatcggaattaatttcaaccagacagctcagtgacagaaatcatgactaattgcattttgtctggtaaaaacaggtttaggaagtcaaggaaagattatgaagatccagaggatgtacaaaatcgagcaactgcaaaaagagattcacgtcctcttctcttcaagtttaacgaggtatgtcacaacctccgggatatagcaaccaaccaaaagctcctctaaaggatgattctaagataactatatacaaaccttatgagattcaaacttaaggccaaattcgaaatattgacactgatgttatgtgtatgctttatacgtacagggtttcacaaatgctgtgaagagacccgttagaatgcgggagtttctactatgattctgcaacgaagtcagtcttagattggtgcgtagtagactag

SEQ ID NO: 1171 - DNA, 923 bp, Arabidopsis thaliana
tgatatttcaggtgatggtgcctttcaagtacgaacagttcatacaggacatgacagatttggtggagtcaggggaaataccaatggctcgggtcaatgatgctgttgaaagaatactaagagtgaagtttgttgctggtctctttgaacatcctcttgcggaccgatcttagttgggaactgttggctgcaaggtgaggtatctatagctgaggccactattgtaagatgtacgagagcatgattgactatgttttccacaactgcaggaacatagagaagtggcacgtgaagcggttagaaagtcattagtgttgctgaggaatggtaaaaatgctgagacacgatttctaccactagaccgcaatgccaagaggattctagtggttggaatgcatgcaaacgatcttggaaatcagtgtggaggatggacaaagataaaatccggtcaaagcggcagaatcacaattggtagttgaatcgaattagaagatatcagaaaaaatgatgtggacacttatatacttgtttgttttgaaatgcaggcacgacgcttttggattcaataaaagcagcagttggagacaaaactgaagtcatcttcgagaaaactccaacaaaggaaaccttagcatcaagtgatggcttctcatacgccattgttgcagtgggggaactccatacgcagaaatgaagggagataactcggaactcactatacctttcaatggtaacaacattataaccgcggttgcagagaaaatcccgactctagtgattttgttctcaggacgtccaatggttttagagccaacggttcttgaaaagactgaagctttggtcgctgcttggtccctggaactgaagggcaagggatgagtgatgtgatttcggagattatgactcaaagggaagttccagtg

SEQ ID NO: 1172 - DNA, 1177 bp, Arabidopsis thaliana
gataaggtcataaacgaagggaacactattgtgtcatacgaagagttggagaaaatacatcttgcaccatatctgaattgtcttgctcaaggagtctctacagttatggcctcttactccagttggaactgaagtaaactccattctgactatttcctcttaaccgaacttctcaaacagaaactcggttttaaggtttgcctaaaatctgatttgaatttagctaaataagctacaggtgtgtggttttaggtagttgcctttgcttctgttattagggatttgtcatttcagactgggaagctttggaacggctaagcgagccattcggttcaaactaccgcaactgcgtcaaaatctcagttaatgctggagttgacatggtaaagtctgaaacccctagtcaatgatttttgatcttttagattaataatggagagaagattattaatcaatgttactccaggtgatggtgcctttcaagtatgaacagtttataaaggacctcacagatttggtggagtcaggggaagtaactatgtctcggattgatgatgctgttgagagaatactcagggtgaagtttgttgcgggtcttttcgaacatcctctcacggaccggtctttattgggtaccgttggctgcaaggtgaggtcacttgtacataatgtcattagaccaaagtgttgggacaagcacatgattgactctgtttttccatggcttcaggagcatagagaactagcgcgtgaatcggttagaaagtcgttagttctgctaaagaacgggacaaattctgagaagccatttctgccactagatcgcaatgtcaagagaattctagtcactgggacacacgcagacgatcttggatatcagtgcgggggatggacaaaggcatggtttggtctaagcggcaggatcacaatcggtaattaaagcgactccaatcaaagagactagtagatgttgttagtaaattattatcaaaacgtatctgtgttggtctgaacttgcagggacaacgcttttggacgccattaaagaagcagttggagacaagaccgaagtgatctacgagaagactccttcagaagaaactttagcctcgttacaacgcttctcctacgccattgttgcagtgggggaactccctacgcagagacattgggagat

SEQ ID NO: 1173 - DNA, 599 bp, Arabidopsis thaliana
atggaatacaatgtactatatatagtaggcctacgaggtttataataagacctaaaaaaagaaggaaataaacaaaagcccaagagatagcacatgtgtttagtgagtttgttcttcaattattaaccaattaattaagaattttgagtgtagtggcgtaattaagtgtgacgtgacgtgtcctccagcttggctagataaagagaagtggagtgactagattcggttagagaaaaagacaaaagaagagtatggcagagactgaggagtcttcatgggtttacaagaaccgagacgcgccggtggaggccgtgtgaaggaccttctctctcgcatgactttgccggagaagattggtcagatgactcagatagaacgctccgtcgcttttcctcaagtcattactaattctttcatcggtaatagtgatacaataacaccactgaacggtttttgtttttgttttggtcaacgaaccaaacttttctactttcctttcgaaaataaaaatcacaactttggttttacaggcagtgtacagagcggcgcgcggaagttggccgttggaggatgctaagtcgtcggattgggctgatatg

SEQ ID NO: 1174 - DNA, 1056 bp, Arabidopsis thaliana
ctgagttccgagttatcccccatcgtctctgcatagggcggttccccgactgcaacaatggcgtaagagaatccttcacttgaggctaaggtttcctttgatggagttttctcatagattacttcggtttcgtctccaactgcttcttttatggcgtccaaaagtgtagtgcctacatttgcagacaaagatggattcatactgattaacttttcaacagcatctattagcctctgctagcaatcgttttaattaccaattgtgatcctgccgcttagaccgaaccatgtctttgtccatcctccgcactgatatccaagatcatctgcgtgagttccagtgactagaatcctcttagcgttgcgatctagtggcagaaacggtttatcagcatttttgccactctttagcagaactaacgactttctaactgcttcctgcgccaattctctatgttcctgcacacatgaaaaaatcttagaataggggtagcactctggtctaatggccttcagtacaagagagctcaccttgcaaccaacagtaggcaacaaagatcgatctgtgagaggatgtccaaaaagaccagcgacaaatttcactctgagtattctttcaacagcatcattgatccgagccattggtatttccccctgactctaccagatctgtcatgtcctgtatgaactgttcgtacttaaatggtaccataacctgcaacatggattatataatcttcgcttcttcaatcatccgagatgatgaaaatcatttactaagctgaaatattttgtgtacggggttcacactctaccatgtcaatgccagcattaaccgcagttttaatgcagtagcggtagtttgatccctgaggctcactaagccggtccaaaccttcccagtctgagactagaaatccctagtaacatatacaagcaaactagcttaatgcatacacctctagcttatttttctttctattcaattaaatttacacgaaccttgaaaccaagtttttcctttagaatttctgtcaagagaaaacggtcggcgtgc

SEQ ID NO: 1175 - DNA, 1156 bp, Arabidopsis thaliana
tgtagtcttggagaatgcatggtcttttagctgatggagaggcatctctatcattgttatcagcgtttgattcgcgtttgtgtttgcgttttgaattttgacgtctcttggtcgcattccaatggttcttgatagaattctcagtccgtcctggtatgagtttagcgatctctgcccatttgttcccgattctcatgtgtgattccacaagaaccctctcttcttcttcactccatccatctttctgattttttttttgttttggcagaaacgtagatatcgagggacttatgtcagaaccctagatctagaaaaaactatatgttatgtgaagagagatctaaaaagaaaccttaatatcaggacggagatgattatgccatctctcacgacattgtttgcctgctcttccctcaagtttctccgatatcattgcccatttcctctccccatgttgcctcaccaaccttatcaacttcctatatatatatacatatatgtttgtattaacaaacgcatatactaaatattttgactcttgtatagatgcaataaaacattttatctatatatacctgtcttcttccgccgtccattgccctttgatgaggttcttggatgatcgtttcttcgtactgttttgataatctctggctgcacttctagcgaccacttctccagtagggtttctgttgccgccattaaggaccaagtgtttctccctcgtcggcccaaacgttgtgttctctttgttgtcgcttctagtctcaatcgatatttttgtcttcacgatcggttggtctctagaactctcttgtttcttggaacacaaggcatcattcttttgaccgtataagaatctctccacggctgtcaacggcggcgcagctccatggacaaggcgtcggtcttccatggaaaaaatgaagaagaatagaatagtcaaaaggagaggagagcacaaatcaaaggagatagtttagctagctagtcataaggaatatgagagaacttaatgagttgctatataaattcaaaccaatgaatgacccattaaattccattattttttttttctaaaatatataaaattgaccttatagctatggatttttttttcactttatagaaaaattaatacaattttatatatata

SEQ ID NO: 1176 - DNA, 1595 bp, Arabidopsis thaliana
gttaacttgtattaaaaatatgcgattaccatatgaaccacacgtttaatttaataagttaatcaaattgatgaattttttacataaagcaataatcattaattaagcattttgagtcaaaatcaatgtgtcacgtctcatcttgttatagataaagagaaagtcgtacaacaactacaacgaagaagaagagtaaagaaaatggtcgtcgaggagtcatcatgcgtttacaagaacggagacgcgccagtggaggcgcgtgtgaaggaccttctctctcgcatgactttgccggagaagatcggtcagatgactcaaatcgaacgcagagtcgcttctccctccgcctttacagatttcttcatcggtacacacattttttttttttttttttgaactttcaattttgaaaaatgcatttgcaatttactaaaattagtaactttatggatttggtgtttgcaggaagtgtactaaacgctggaggtagtgtaccgttcgaggacgctaagtcatcggattgggctgatatgattgatggttttcagcgatcagcgttagcgtcgcgatttgggaattccaattatctatggcactgacgctgtccacggcaacaataatgtctacggcgccactgtcttccctcacaacattggcctcggagccaccaggtttattctcgatttaccataagcaaactagaagtgtgctcttaaagctttgttctgttactggtctatctgatggaaacttaccttaccgaagctacttagttgattcaggtctagtttaaatttctgagcttgcttcttaaaacaaagtagaagtagtattgcagtggctatggatgagtagaatctgtttgtgttcaagattggtgcttctattgcagccatgctgtgtttggccgctattaatgtgaaaacagtagtagttattgtggtaactctgtagagacgcagatttggtcagaagaattggagcagcaactgcacttgaagtaagagcgagcggggttcattgggcattttctccttgcgtggccgtaagttcgttcctttttataatttaacaactgaaattgaacgaaatgatttgtaaatattgaatgtgaaagttgttgttttgtctttgtgcaggttttgagagatccgaggtggggaagatgctatgagagttatggagaagatcctgaacttgtctgtgagatgacttctcttgtctcgggcctacaaggtgtgccaccagaagaacacccaaatggttatccttttgttgcaggaaggtatcatatgaatcagtacactgtaaacttatttgggacattaataggtttgatgtcatttctcatggatttgtttattggggttatagaaacaacgtcgtcgcgtgtgtcaaacactttgttggagatggtggtactgacaagggcataaatgaagggaacaccatcgcttcatatgaagaattagagaagatacatattcctccttatctgaagtgtcttgctcagggagtttccacggttatggcgtcttactccagttggaatggaactagactgcacgccgaccgttttctcttgacagaaattc

SEQ ID NO: 1177 - DNA, 563 bp, Arabidopsis thaliana
agagagcccttcttccggtgaagcagcggttgattccgatggtggggacggccgcctctctcttgagcctcggatcctctgtcctactttacgtctcaaagttaaaaagttgaaaccatacacgagagattcaaatcgtagctttttcccgatggttgtttcccctcacttccctaccatacaaagcggtcatgaacaacccgagtatatgcttcattccgacagctgtaagctccctttactccctctcttttggtgcaacaataaaaaacgttctattttcgaatttatttgccgtgcatgcacaacccaagaacatggcagaagctattacgtttgtgtcacatgtggtgaccagttccacaaagaatgtattggttctccacttgagttcaaacaccctttttatccttctctttctctccaactttacagtcctccctccgaccgcgtattatgctcatgttgtcaaaaacgtatcgatggcatgaattattatagtcctaccaacaacttcactctgcatatattgtgtgcatcaaaccaataccctttgttataga

SEQ ID NO: 1178 - DNA, 495 bp, Arabidopsis thaliana
gcaagcttctctagacacatgtacaggtggaggttcacgtactactttgttcttcttgaattttttttttgtccttcctatatagatgactcatcggaagaaaacgacgatgacaatcaaaccagcttgtcttacgaccatgcttcagttgaaatgcatctgtccgatgaatgcaataaggacaagataacctgccatgtgtagtccaacatgatagcattttgtacgcaggaaaatcacttatggtccacttaagcattgcatgcattgtaaagttttgttgttgtgagtaatcaaatgtacgaactccggtataccaaagctgatgtaactcatagatcaaaggttgtaagataacatcaagagaacgtttaggatgcttaggactagagactaaaatactcaaggataaaaattctcgctgcatacacataaatggaggtagattgtatggtgtcacgattaccggccacaaagaatactgccgaccggaca

SEQ ID NO: 1179 - DNA, 594 bp, Arabidopsis thaliana
cctccaaggtggcactcccccattggctcttaaataattcccgccgtttctgctccttaacttcacccttgaaccttctttcaccggctcccactctcccgccggctcatcggcacgaatcttcctagactgcaccaccttatgcccggtcgctcccaacaaaaaccgctcattggacgccgtcaagtatccaccatggcagctctttaaccggatcgccttttcggatcctggtaccatttcaactctccatcgagcctctttagatgacccgtttttgcccattatcacaccctcttcatcgtcatcagcaatcaaatatttcccatgatgtgcatagcttcgtaaacgcaccgatttcgcatcccggaatatttccatcgccgatacattttctactattatcttcttcgaacatttcctctgttacaaaacaaaatacccccaaaatcaatattttaattatatagtatagtatgttgtgataatgcgtgacaaaattatatgaattagaattgaagcgtacctctgttggttttggggacaatgtacccgacattgacggagtaaacataagtttcgaagaagaaactg

SEQ ID NO: 1180 - DNA, 523 bp, Arabidopsis thaliana
taatgatcgcactgcattcatgacttagcaccaccattccttggacttctttgatcctctctgtaatcatgtctttcacatatttgttagagtttggtataagtgcaagacaatcgacaataggcatcgtgacttcaagatttttcaattgtttctcaaggagagctttgtacttctgtatcatgaccttcttgaatcgaccaggaaatgggagtgggggcttgtaaggtgggggaacgaagacgttgtctttggttttggcggcacgtggtttttcaacacgaggagatgctgcaggagctagtggtcgaataggttggtcgagtagaggctcttctattgctttttcagcgggatcttcattctgacaaaaatcctccccatcttgctccacactgtcctaagtgttctggttcggactctcttttgtgggtaattctttatcgcttctaagtgtgatagcatgagcatacgcctttgaatttggcattgattttccggaaagtcctgtaaatttgggtgc

SEQ ID NO: 1181 - DNA, 491 bp, Arabidopsis thaliana
tggaaatgatagagtgatctcaagagaagaatatgagactgaaagagtgaaagaatttaaaaagaggtctgataagcaagatgaaactatagagaagctagcccacactgttgaggaacttagaagtaagctgaatcagttgcagaaagaagctagcccacactgttaaaaacttttaaatcatcattttactcgaccaacaggagctagagtcttacagagagttcaccaagtttacaacagattttaggatttcctgaaattttcctagtgaagatagagtaatgatttagaacaaagagacaagcgagggacccactgctgcaccctatgtctcccacgcacctaaccaagagacaagaaatccaactccttcttctcacaaccactcgacctctcaccttatcccatctccacacaccactcgaacttgacgaaatcaccatcccccaccgtatcacttactcgacctcgttatctccactcaccta

SEQ ID NO: 1182 - DNA, 1066 bp, Arabidopsis thaliana
gctctaactctctagtgctaatatctgttggattatcatcttcttcctccaattcccagaacaaaccctgtaactcactatgaacagcacggtagagattagccatcagaaactccggcgcgtcgggtccattgaaaccgtcgtagattccagcaaagagccatccttgcttctcaaaaacagctaattgcactctatcctctcctgccttccccaatgcccactgcaaatcgttctctccggaagatgctgccatagcttcaacgtcgggtctcacaatgttctccttcttagcaccgacgacgaaattcgacaccggaagaacccatggccgttgcttcttctccccgccgaaaatcggatgccaggaaaggctcttcttcttctttttccgtctcttcttcgagtaaacaccaccgagcggcgctgagaaatgcacaccggcggaattagatctcgaaatctctccggccggcgggtctaacggacctgaagtggctcctctttcgatcggaccggacatgaagagacccgagcgatccggaccgggctgaagcggaagagcactaaacgacgacgttccttcaaagccattggcattcaccacactcctcctaacgccgccgccgaaactgctctcagtggcatcgtcgtaaatatcttcaagctgaaggacagttttggaattggaagtgttggcgctaacagaagcaccagaaatcgctctaaacccggtgtgaagctgctcggatgatccggaacctcggattcgacccggttcatgcggaggagataaccggaaagaagcagtaggagaaacgaatcgatcggaaggaaaaggagaaatgaagcgattagaagaagaaggaacgtaacagtaagaatggcctaaagtctcatccaacggctcacggaaagagtcaatcagatcggaatgagagggattcgcgccgaggagtgacgacggcggttacggtgaccttgattgaagcaaggtaacaaggaggagaaccacttcccatcacatttgattttcaaacactcctttttattttgtttgcagatt

SEQ ID NO: 1183 - DNA, 866 bp, Arabidopsis thaliana
gagggcactgagtttatccggtgaatcaaaatgcttacaaggctatctcatcatcatcccctatgcatatgcaacaatcctaaatgaaacactctagactcgatcctaaatgtgatgcaactacatgaacactcttttttttgtgaaatcattttccgaaaattttcaatttttttttggtttttctatgccttagatgaatgcagactcaaaaatatacacaatgcaacacacacttcctgagccctcccccaaacttaaatcacacagtccactgtgcgaataaacatggaagagagtactcaggacaaatccaatcatagaaacaaaaaaaatgaagaaacaaatcacaatagatggtataatacaatggtaaagtgaggcacttacctcagtcgaagaatgaacgtagttgctcgtcaatggctgcctgtgattgctcccaggccatagatgaaccaccttgttctgtatcagctccagcaggtgggtactcgacctcatcagctatgtggcggctagcaccgctctgaggatactcgacctctctccttctgctgcggccagcaccacggtcgtgtaaactacgagactgcagaagtcgtccgctcctagtgctagatcgagcgagtgtggtcctcctcgtcctctctgatttacgaggctcgaatgatgaatgcctcgcagggacatgcggaatctcctgctctctaggctcatgcctgcgccgacttggctcgggcgcgtcatatctcctcgaaggcatgtcctgagggagatgtcctgcggaatagctatagtagaagaggtgcagctgagcttgttcttcataaacttgatagcctgaggcacttgcgagtacttgt

SEQ ID NO: 1184 - DNA, 1218 bp, Arabidopsis thaliana columbia
cctacaactcgaatcgcttctcctcctctaatttgcgtaaatcggatttcaatttggagactttaataactgtggtgattggaatcttctctgcttcgatcttcttcaaagccgcttcctttgtgattttgttcttgtgtttgtcgtcgatgatcaaacagagctccggcggatcttcggcgaccagatcgatgagaggatgaggaagagggatcatcaaggggttagtacgatccaactgagggattctcttcagtgtcacgattagatagacgaaaccgtcgttctcgagtgattcagagttctcggtcttggatttggagtcccaccattttagcagagacttcacggctctgttaacgttctgcgggtcaaccttcgactggtgtcgctgcggaagtgcagccgtagtagtagtagtactcattctccggtgagaagacggcgcaatgaacacaggttacgtttgcggaattagggttctgagcaaaaattatagggtttacgatttttttcttttttttttcttctttcgacattttattcgatttttttttttgtaaaactcaaaaattatatgcgttttattaatgatgcgccactttatccttttttctgggggtaaaattgtcatctgctcaatcgttttctctgaccgccggcgaaactcttcgcgcttccccgactgccggcgaaaatcgacgctgcttcccgtttccggttaattaagagctttcctctgtacctcttcaactcattgtaggctgcgtcttcttcaatggcaacaaggaagcggaagaacgctgattcgtgtagtgacgctcttctaaatcagagcgaattcgatctccgaggcagatattcttattcaattatctcaatcccttggcaccgtattctggtaatgtttccaaaataaagataaattgcaatcgctttaattttctgattttgtggtgagtgattgaacctgtgtcaattctatgctgctgagtgtttctgaggttgatcataatggataggtgcgccgtgcggtcatttgacattgcgtcccattgtataaagttcttcatgtgacgggccttgatactacttcctacgtaatggtcagtatacttcttcattattttacaagaaatcttgaattgtggtattaacaatgtgttgttacttttgcagatgatgtaaagcttttttggtctactaagaagataaaat

SEQ ID NO: 1185 - DNA, 875 bp, Arabidopsis thaliana columbia
tttcatgcttcttgtattgtgtttatgcttattataatgttttgttttctcaggaaggtttccatctttataacaatcatatagatgttctaataacaacaacagtcgcaaatttagtcatcaaaaatgtaaccaggagtcgttttttgataacaattcagtcactaaaatttccgactaaaggatatttcagtcgcaaatcagtcttaaatatagtgacaacatagtcataaattttaacgactaattacctccaacgactaaataaccctcaagttaatcgataatttgtcgtctaatagtcgctaaatttaacgactaaaatgtcactaaaaaagcgattacttaaacttagtcgtaactttatcgctctttggcgactaaaatacgactacgttatttaccgactctcgattagcgactaagtttaatagtcgtttatttgtcgtaaagaggtgtttaacgactacagagtgactaatactgaagtcggtaaatggcaattttttcgcagtagtctaagtgccaccgcaacatagaccctcaagttaaactagtcccggactcaatcacctctgacgagagcttacctaacatgcattacgaaacaacaagttaaagctaaaacgctccctataaccaataccttggtacagagccaagaatctctagaattagtgattctgacatttcgtcgaacaccttttgggtgcagaaatatctgggctcaaattctagttaatcagaaagcaataggcattaggaacaactaatccaaaagggatctataatcaaactccaccacctaacagaccgaggattctaaactactctaacccatcctcagaaacctagtcactactcagactttattg

SEQ ID NO: 1186 - DNA, 633 bp, Arabidopsis thaliana
tggctttcaccccaggacatcctctgtgtcgagctcctcccatacattgtcttcatctctgaccaagatagcattgctgctcttcctaggattaatatctggattgccaagaagaaaaccatcttgtcttttgatggactgagcagtttgagctacttgaacatctagcttcttcatgtgagagcttagattgtcgatcttcccgttaagatcagtgtagatagcatcaaacttcccattgaactccacaaccaacttggattgtccctcaagaatcttctcaagcatagattccatcttactctctgtagtgggtgaaggatggggtttggtgagaagaattaccataagtcctagtgaagttgctctgaggataggtcttctggaaggaaggttttagggtgaaacttgaagaactctggttcccggtaaacctgttgccactaaagttgccctgttgcagaccaaacttcttgtaaccttgtccatctatatagaagactctttcttatgtctctagatcgggctcaatggtctctgcttcagcaacaaagtgcacatgcttcttccatgtaagcaagttgtgaaatgaatctaacttagcatgtactccagccatctgatttcccgata

SEQ ID NO: 1187 - DNA, 633 bp, Arabidopsis thaliana
taattgtcatcattcctggtctgaagtcgaagctctccttcacaatctttagtatctccttgtctggaatcaatccagtctcataagtgtccacaaagacagacaatggctcagggactccaatggcgtatgagacctgaacaagagccctacgagccatcccgttagccacaacgctcttagctgcttgtctcacaatgtaggctccgcttctgtcgaccttggttgggtctttacctgagaatgcaccgcctccgtgagctccccatccaccgtaagtgtcgatgatgatcttacgcccggtgagaccagcgtctccatggggtccaccgatgacgaatcggcctgaagggttcaagtggaagatggttttctcgtctaggtacttctctgggatgactggcttgatgacatgctccttaaggtcacgggcaatttcgtcgttggtcacagtttcatcgtgttgggtggagatgaggactgtgtggacacggattgggaccatggcacccttgtcattgtagtactcaacagtgacttgggttttgccgtcaggtcttagccaggcgcaagtaccattctttctgacttctgttaggcgagcaccgagcttggtggcaagaacatggctca

SEQ ID NO: 1188 - DNA, 1374 bp, Arabidopsis thaliana
agagggatgtgtgggatttgagtagagtttatgttgcgttggcatgatttgaatagtatgcaagatttttgagattttgaattcgttcatgtgtgtatgtgtgattgtagcttgatatgatttaacctgttagttaaatgtgcatagacaataagtaacatacgaagcgagtcactaagcataagagtcaacttgttttgctgaaaagatatcacttatgattttcgaatcattttagcttttttgtcacttgagcttaatgattcttctgaaattcgattctttgtttggtttatgtcacattctttagaattgagaatctaagaaaagcttacaggatatggtgaaactattcttttaagatagcatgatgcttcttttatgattctacagtggctaagtcattttttttttgttctattctttgtagcagaatggagacttttctattcacatctgagtctgtaaacgagggacacccagacaagctctgtgaccagatctctgatgcagtcctcgatgcctgccttgaacaagaccctgacagcaaagttgcttgtgagacatgcaccaagaccaacatggtcatggtctttggtgagatcactaccaaggctactgttgactacgagaagattgtccgtgacacctgtcgcgccattggatttgtctctgatgatgttggtcttgatgctgacaaatgcaaagtcctagtcaacattgagcaacagagcccagacattgctcaaggagttcacggtcacttcaccaaatgtcctgaagaaattggagccggtgaccaagggcacatgtttggttatgccactgatgaaacccctgagctcatgcctttgagtcatgtccttgcaaccaagattggtgctcgtctcactgaagtcaggaagaatggaacttgccgttggttaagaccagatggcaagacccaagtcactgttgagtactacaatgacaatggcgctatggttccagtccgtgtccacaccgtcctgatctcaacccagcacgatgaaaccgttaccaatgacgagattgcgcgtgacctcaaggagcatgtgatcaaaccaatcatcccagagaaataccttgacgacaaaaccatcttccacctcaacccatcaggccggtttgtgatcgggggaccacacggtgatgctggtttaactggacgtaagatcatcattgacacatacggaggatggggagctcatggaggtggtgctttctcaggcaaagacccaaccaaagtcgacagaagtggagcttacatcgtgaggcaagcagcaaagagtgtggtggctaatggcatggctcgcagggctcttgtccaggtctcatacgccattggagtacccg

SEQ ID NO: 1189 - DNA, 581 bp, Arabidopsis thaliana
  unsure (1)..(581): unsure at all n locations
tgtccaaggcgacgggtgtaagagatgcggtgatcgtggcggttgatgtttatgacccgtggtaaatcgatacactggcgatgaatcatgaaattgcattgaagacaaaagtaaggacttcggtcacctagtttcccgcaagcattgcaagtgaaatcaatgcgtcttggaacgagatgtagttgatgttcatgggttgtaaggctttcaatacgaaccggtggtgcgtttttcatacatgctctacatatggtgaaattacgaacatcacaatggtgaattttgggatgttgttgatcaaactcctcctcgcaaagaagacacttgttgtcggcgtaatcgggtgcttcttcagatgtgatgtgtttgagtgtgtgttgcgggtgagaagtgtgttttgcttctggaaaaaactcagcacattctccatggaagagtgtatcacattgataacaccataccatcgataaccgcggaaaccgcaccgccgcacgctttgcactctctatgtccctccaagagtgccacccacgaagaatcaagtagatcncgtgcagattggattttcaagaataaggagt

SEQ ID NO: 1190 - DNA, 568 bp, Arabidopsis thaliana
caaaaaaaggcagatgcaacacaaacttatttttcatacaaaacattgattcataataatatgaaaaaaagtttttgaattacttgaaatgctggaaacactctttcaagtgcaaaacttcgatcaataagtttcataaatattcaccttttgtaatttctcgaaacaaaacaaaagagattatgtctgaatgaacatcacatctgaatttgttacaaatcccattctcagatttgtttatttcttaagaacccaacaaaaaaaagaaaaaaaagacagaaatggaaatcaaacaatcttcaggaaccagttattgagcggcttaattactcttcagcagctacaacactgatctcacctctctcaagcaagtcatagaaagttctggttttcctctgttcgttccaatggtgcatcttccaaagaccaccagcagctaaaccgagtgccaaaccgataaataactccttgacaacgctaggccctttcaatgtcgcatgtgcaaccttgtgtcctgccatctcttctttcttcttctggttggtgatcgctctagatctagagtcga

SEQ ID NO: 1191 - DNA, 1113 bp, Arabidopsis thaliana
tcgacgttggttagcgagtctcctgttcgaattggacgagaaagacgagaaattgaagaaaccatcattggagtttagtagaacctccattgatggaaaccaaagggataaagctcacttccgagtgagaaaacccccaaaagctgggtttaacagaacaatgatgaaacgtcgtcgtttcttaaacaaacgtaacgcctttgaacaacactacagttgaaaaaaggttcaacattttacattttccagatataaagctcatcacttccaagttccaaaagctgggtttaacagaacaatgatgaaacgtcgtcgtttcgtggacacaacacaagcattacataaatttatgaacactacagttgataaaagtaaaaggttcaacattttacgtttttcctccagatatagcagaattgtaatgaactatatattttataataaaaaaacctccatgacatgagaaagacagagagagatacataagaacaaccccaagtttatcgtcagagaaaaccctaattacagataaccatggttacagagacaaggccaaatcggtgaggttttcaaaatcagtttgattttttgtttttaattttcaagacaagtttgggatacaagctcctccaccttcaccactttgttgttgctctttccatatccttccagtgactcgaagtttcagctctttcctatctccacctgagaagaagagagccatgtttctttgtataattagtccatcatgactgtctctaactttcctgtggctgtctcttacgcttcttggtgttccttcccatatcagcttccgaccataacctcccacttctaaactgtaattgtagtttcgagcttctgtctcgtcccccatgaaacgcaggaacgccatgtagactggagccattccgagctggaatgcctcaaagtgaagacagaagtattgaccgaagcagtgaaagacctgattttcatttttgaaccagaaacaaaaccataacagaggaaaccttgataagcattaaagtatatcaagtcaacatgtatagcgagatggaagattcacaattcacaaccactagattagatgaataactggaccttctctag

SEQ ID NO: 1192 - DNA, 987 bp, Arabidopsis thaliana
cctttagatatcttcctttgaatagagacgtagttaagaggttagacagaaaatggatcgaaattgtacatgtttatgtgtatatatagactccaagtgcaaaccagtagaaattaagagatcaggtagattagtgtgtgtgtgtgtatagatgttttattggttgtcaataaagttttcagctttaggaatcgtgagcattgtgaaagtatcaattatgttagtattgactctatgattaaaatgtgtgctaggttgagaagaaatggcaggacacaaggttgcgcatgccacattgaaaggcccgagtgttgtcaaggaattgattattggtttgacgcttggtttagctgctggtggtctctggaagatgcaccattggaatgagcagaggaaaactagaactttctatgatttgcttgagagaggtgagatcggtgttgtcgcctctgaagagtgaatgggaatgcctctctctcactctcaatgttgttggctcgatttttctgtttttatggtttcttgagatctcagataagttacctaagaaagttggttgcttgagaaataaacaaccactcagacatcaaaattggatatttgttaacacattgttttccggagatacagtggttgaaacttgagacatctgtcttgacttttccttaaacagtgtgtgatcattttattatacttaccagcttattttttctcatcttttttggataaaatacgcaacaggcacttgtatcttagaaaacggcttggatggctgcaaattttcaacatcgtactgcttcataaacgatatcaaatacgtggaacttaattgttggttaatagaggataagaaatggggttcacagaattaaattcacgcacacttcatatatgttgttccctcccaattatctgaactatcttcttttatcaaaaactatattcacaggctgccgtgtacctctccaccaaagatggcactatagt

SEQ ID NO: 1193 - DNA, 745 bp, Arabidopsis thaliana
atattgaatttgaatgtcgccattagcgctgactcggtatgagtttttattgttgaagacgttactcaagtcaccgggccgcgtctggtcccgccagcaactgatggatagcgtatgggaagatgcgcaggacacctacgatcgcaccgtcgatacccacattaaaacgctgcgtgccaagctgcgcgccatcaaccccgatctttcaccgattaatactcatcgcggcatgggatatagcctgaggggcctgtaatgcgtatcggcatgcggttgttgctgggctattttttactggtggcggtggcagcctggttcgtactggccatttttgtcaaagaagttaaaccgggcgtgcgaagagcaacggaggggacgttgatcgacaccgcaacgttgctggcggactggcgcgtcccgatttgctctctggggacccaacgcatgggcaactggcgcaggcgtttaatcagctacaacatcgcccgtttcgcgccaatatcggtggcattaacaaagtgcgcaatgaatatcatgtctatatgaccgatgcgcagggcaaagtattgttcgattcggcaaataaagccgttggacaggattattcgcgctggaatgacgtctggctaacgttgcgtggtcagtatggtgcgcgcacgacgttgcaaaatcctgccgatcccgaaagttctgtgatgtatgttgcgcaccgattatggacggctcgcggcttattggcgttttg

SEQ ID NO: 1194 - DNA, 682 bp, Arabidopsis thaliana columbia
tatatactttattatagcaaaaaccccctcgggtacataatcttaaaggtttagaagcctcctcaggcaaatacttgtacgaaaagaaaagcccccttgggccatagtaaactaattcaaaaaataaattcaaagttttcggacaaccccattaagtggatacaagccactattaatcttcagccacctcggcctcaatgtggacaggctcaagatcggtcaggttgatggcagtcggctcgggctcgattgtttaatcagcaataggttgttcggtggagacccttggttctgaatcatcgtcatcctctatggtcaccgtttcggtgttcgtggacaaagggacctcgggcggaatgactactggttcaggagttttcaccgatgtggcagctattttgggttccatgggttcgctaggacctgaagcgaacattttgaatcagaaaaaaacacaagtataatttatttcaaattgatgttaaggtttcaagcatctaaacttactagcccagtctaaacctgattcactcaaaggaggcgattcggtaaagaactcctcaaattgttgggggttgaaggatgaagaaggaagagcagctaggcgattctgcttctccgttaaaacagtcctcagttcgtacctcacttgttctttggagaaatcttcacactacaaaaa

SEQ ID NO: 1195 - DNA, 603 bp, Arabidopsis thaliana
cggattcaaataaagattgtgtgctcaaagtaatcgatcttagactctcttcagttccagttcacgaggtaacacacgtcttctacgttgcgttgctctgcgttgaagaacaagcggtggagaggccgacgatgcgtgaagtcgttcagattctcactgagatcccaaaaattcctctttcgaagcagcaagcggcggaatcagacgtgactgagaaagctccggcgattaatgaatcgtcgccggattcaggaagtccaccggatcttttaagtaattagactttccggcgattgggtttggtcattgaggggcaaatttgtctttctaattttcttgtcaccgacgtctcggtagtggagttaattacttaattagcccgttgttgtctggttccggttaaggcaacaattagtggtttaactcttaaggttgttgcatttcttttttcactgctgccacaattattcgtgtaggaattttgaatatgtacattgcggttgaattttgcatgataagtggttaatttcaggaaatcgaatttcgagaacattatggcttatgcatatcagcatatatatacatgcaggtatgtatatgatc

SEQ ID NO: 1196 - DNA, 809 bp, Arabidopsis thaliana
tcttcaatctctcttcggatctcggagcctctatgttttcattctcgctctgtttttcaccattcattgtttcctcctcgtccaatcacaagacccacctttgtttccacaatctcctcctccaccaccaccgcctcctcctccaccgttgcctcctcctccaccaccaccacctcctccgccagctgtcaatatgagcgtcgaaacaggcattcctccaccgcctcctccagtcacggatatgattaagcctctgtcttctccgccgccgcctcaaccaccaccgaggtcacaaccacctccgaagcctccccaaaagaacctgccacggcggcatcctcctcctcctcggtctccggagaaaccgaaaagagatggtttaaacaaagggaagacggtgggactagtctttgttgggttaatagcaatgttgcaggttattgttgttgtattcttggttttcaagagaaagcagcttctcagcttgaaagacactaattaagattgtaaccatttgtggattgacattaactcttttgttaatttgaggccattgattagattgaagattagagatgagagtgtattaggaggaaagaaactgcagttttttttttaactctcttataaaattgtttcagaaatctcatgtgtttgtctttccaagatctatctgattcaccaaatggtttggtttgcacgagtatcttcgtcggttatagtcctttaaaaggcttctttccgcaatgtttggatgtgaggtccaaggtgcaggttttataaaataattgatgatgatgagatgatga

SEQ ID NO: 1197 - DNA, 533 bp, Arabidopsis thaliana
caaaacaaatcaaaagtaaaaaaaaaaaaaaaaaactatatacatggataggcatgggacttcctcccaagtgagcttgttttaagtctctagcttgactcctcacactcattaggctcaaggagggtgatagagtagagttgacgtctcctctgcttccttagtagatacaacatcaaattcagcatgctctcgtgaaaggtctgtaattgagtactcaatggccctttcttggtaagctcctttttcatcatctggatagtcgtcttttctagacagttctaatgtgaattcacatccttcttttctaaccataggaataacttcatcatttgggaagtccttgatgtcgagtggtgctttgttggctttcccatggagctccttgacttgatctttcagctctttcacagtgtgtgttagctctcttatagctctattatgccatttagatctctccttgagttctaaccaatcatatgatgtcctcatgcttgactttagctgtttggttgagcactctagtcgagtat

SEQ ID NO: 1198 - DNA, 944 bp, Arabidopsis thaliana
aaattagtgttatatatatgagatttcttaatcaaaatctcacttttatccgatttagtggtagttcataaagtggtttcatgtatatgatacctgaataaccaacatatgtattttaagagacacttggaataataattctaaatatcctaactactcgtgtccgtatgttttgtcacggtgaaacgtgagaggactagtttttgtcacccgtccataacattcttagacatacattactttgggagtgaaaaacattaagcttatctttatccatatattgtcttaccatcaatagacaatatccaatggaccggtgacctgcgtgtataagtaatttttcaagatgctaaaacttttatgtatttcagaattaacctccaaaaacatttattgacacactactactctttccgtattgactctcaactagtcatttcaaaataattgacatgtcagaacatgagttacacatggttgcatattgcaagtagacgcggaaacttgtcacttcctttacatttgagtttccaacacctaatcacgacaacaatcatatagctctcgcatacaaacaaacatatgcatgtattcttacacgtgaactccatgcaagtctcttttctcacctataaataccaaccacaccttcaccacattcttcactcgaaccaaaacatacacacatagcaaaaaatggcaaacaagttgttcctcgtctgcgcagtctcgctctctgcttcctcctcaccaacgcttccatctaccgcaccgtcgttgagttcgaagaagatgacgccactaaccccataggcccaaaaatgaggaaatgccgcaaggagtttcagaaagaacaacacctaagagttgccagcaattgatgctccagcaagcaaggcaaggccgtagcgatgagtttgatttcgaagacgacatggagaacc

SEQ ID NO: 1199 - DNA, 822 bp, Arabidopsis thaliana
tgaccttcgatatcaccaacaccatgaagaagcctacaatagaaggaaatgttttatggattgaagagatggatatgttagctgatgaaatgctagaagagctaggagaaagagatcatctacagagtgctctaacaaaggatagcaaagaaggagatttacatttggagactttggggtaccagaagcttttagatgaacacaaagcagttgagaatccaggagaatatgaagatttgggtgaaagagcaaggggggaatatatactcgaccacatcactcgaccaacagcccattcagtatactcgaccgaactactcgatcacaacccctcctctgaagccaacttagtatccgatgactggtctgaactcaaggcacccaaagtagatttgaaatcgctaccaaaaggtctaaggtacgtttttcttggactaaactctacttatcctgtcatagtgaatgatgagctaactgctgatcaagtaaacctgctgataactgagctcaaaaagtataggaaagctataggatactcgttagatgatatttaggggatttcacccaccttatgcacccatataatccatcttgaaaatgacatccttatcttagtattgaaacttcaaagggggtttaaacccaaacttgaaagagattgtgaaaaatgagatacttaaactattagatgttgggttatctacccgtatctctgatagcacttgggtctctccagttcactgcgttcctaaaaaaggaggtatgacagttgttaaaaattctagagatgaactgatacccgactaggattataactggaca

SEQ ID NO: 1200 - DNA, 597 bp, Arabidopsis thaliana columbia
aatttttttgaatggttacggaccggttcttccatactctgataactactatcctgatgataattatcctgatgataattatcatcaaccccacgttaaaataaaatgcgtcgttcaccatatccacatatggattttctacaacattacccacttcttcaggattagaactaaaatacgtcatatccgtgtaactagttcctatatccatattcaattcttctccatgcttataccaaacataataatcaggcataaatccttgactaaacaaatgactactaactcttctacccgagatgatgtgtttctcattcttgcatacactacaaggacaatgaaatttacctcgactactctgtactataggctgactattagcgaatgtcatgaactcctccactcctgcgacatattcggctgacaaatttcccgttacttcatcaaatctcttgtacatccaatatcgatagaaaccgccaccaccgccataattgaagttcccgccattatagcataaactaaacttatatttgtctttcgaaatcgtttctttttcttttgattgctgtattgatttggtggtgatgagaatga

SEQ ID NO: 1201 - DNA, 599 bp, Arabidopsis thaliana
agtgagctttcctacaatccattttcaagtaggttttctctctttcccaaatagtgacttgtagaacctcgtcggattctgaaccgctttcatcttccctctagttcttgcatcttttttgttgaatccagatttgttgtagttaagaccggttgccagtgcgaaatcatcaatgtaaaatcgaattggtttccctacaaacacccaccacattttgtacttctaatctgtcaccacctgccttgatagaatataatgcaagaacattattgaaaactgattcgtccccattttcaagagacttccaaattgtgaaccctccaactgcttcaaatgctcttgatctagagcagacttgatgatctcaatccacctaagggtaaagtagttgtttatccgctttcggccttcgggttcaacaccaagccgaaacaaacgctctggcaactcgacatcccccattgaacagatagcctgaaaatcaaatgaacaatcatcactgatttgctgcatttaaatacccaaattcaaaatatacaaagcacataatacaacttgaaaaaaatagttcaatagatgtcaatatatgtggttacctg

SEQ ID NO: 1202 - DNA, 1040 bp, Arabidopsis thaliana
cgagccgtccacgtgcagtagacaagttatatcgagcgaatctctcaagcttcctttgtaggtagttcgacgataaagtcaccgaggacctgggattttgcacatgttttgttccgatactcaatgtcatactcgctgagctcaattgcccacttagccagatgacccgattggctgggactatgcaagacagcgcggaggcgatgtatcccattaccacgatggagtgggattagaaatagggtcgcaatttttgagctgacattacgactgctaaggcgagtttttccatttgcaggtagcgagattctgcgccggtaaatatttgtaagacataaaagatcagcttctgttcgcctctgtcttcttggattaaaactccgctgaccgcagtatccgatacgacgacatacaaatagagtgattctccgattacaggtttcacgaggatcagtggggtcccaggtacgagttcctggaaagcctcctcgcatcgggttgccattcgaactttttgtttcccgaagcacgtcgtaaaaggccaagcacttgtcggtggatcgggagatgaatcggttaaaggttgtgactcttccagttagacgctgcatttcgcgtttgttttgagcgatgccattcccaataacgcctcgatttgcttcggatttgcctcgatgctgcgatgcgtgactaaatatccgaggaattcaccggatcttactcagaagcgatatttggccggattaagcttgacgttgtagaggttaagctgctggaaacacccgtgtaaatgggctacgtgttcttcctcttccatggattttaccaacatatcgtcgatgtacacttccattgttttctcgatctgtaatgtaaagatcttgttgacaaaatgctggtgagttgccctggggttcttaagtccgaatggcatcactcgctaacaaacaattccttgctctgtgtagaaagtggttttctcttggtcctcggagttcatcatgatttggttgtatccagcgaaagcgtccatgaacgat

SEQ ID NO: 1203 - DNA, 2104 bp, Arabidopsis thaliana
tcattaaaaaaaatcaacaatatattattgtaaattttcttagcacataaacctttgcccaatgtcattttcgaactgtaatcatagacttataatagtcataagtttgaatgttggttaataagacaaacggaaaaataaggtgcacatattatatagttttacttaaaaataacatcgtgtgtattctataaatcatagacttttttttggtgaacgattctataaagcatagactaaagccttaatattattataatgtttacttgttatggtattcccgttatctactgactactgcaacttaattagggagagggaatctctcatctactgatctagagtttctagacatatatagccatataggtgaaacttgaaagtgagaggtcgatgaaaccgtagacgaccaataatacacatggcatgcggtgattggcttgtacttctaagcaaacgagtcatgattggttttgactcttatgcgagacacgcggtcagacgacctttcggacatcccgttcccaatgtttccgtttccggtatgcttgaaacgcgtcgtttgggtcccaattttcaatcgaacaagaccggttatcgatcctctaaactaattgcaaaccaaaccaaggaagccggtaaggaggtaactgagagaagagaacaaaggctataaacatttgtgggcttaaatctttctcccataggcctaaacagagaatggtcctttacttaagtgtttcttaaaaaattaacgatggttgactcactcaattgtcatcaaattaaggttacttaattgattggtctttgattaatggatttatatctgcagttacgtgcccacttgtccattattgatctcttttgaaccatgtgaaaagctaacaccatgagagttttaaagataaaactcatttgtacttaagcatttataccgaacaaagagagaacaaaagacacagaacaacaatggcgaaattaaatcgttccaacattggtctctcactgttactatctatgttcctcgcaaactttatcaccgatcttgaagcttcttctcatcaagatctcaaccaaccgtaccggaccggttatcactttcaacctctcaaaaattggatgaacggtatgtaacgtaccgatcttgatctggtttctttataatctctaaaatccatcgatgtgtgtattcattcatcctcaaaactaacatcttttattctcttatggattccgttatgttcgatgaaatctaattcgaccaacaaaaataaaaatccagatcctaatggttagttctctttattcatatttctaaaaatattattaaatcaaatgtacaaaaagatacaattatacgtatttgtttttgttgggtacgtaggaccaatgatatacaaaggaatataccatcttttttaccaatataacccatacggtgccgtttgggatgtgagaatcgtgtggggacactccacgtcagttgacttagtcaactggatttcacaacctccagcttttaatccatctcagccgtcagatatcaacggttgttggtcaggctccgtcacgattctaccaaacggcaaacctgtgatcctctacaccggcattgaccaaaacaaaggtcaagtccaaaacgtcgccgttccggttaacatctctgatccttatctccgagaatggtcaaaaccgccgcaaaatcctctaatgacaactaacgcggttaacggaattaacccggaccggtttcgtgatccgaccaccgcgtggcttggacgtgacggagaatggcgagtaatcgtcggaagctcgacggacgatcgacgaggattagcgattctttacaaaagcagagatttcttcaactggacgcaatcaatgaagcctttacattacgaagacttaaccggaatgtgggaatgtcctgattttttcccggtttcgataaccggatcggacggtgtagaaacgtcgtcggttggtgagaatgggattaagcatgtgcttaaagtgagtttgattgagacattgcatgattattacacgattgggagttatgatcgtgagaaagatgtttacgtactggatcttgggtttg

SEQ ID NO: 1204 - DNA, 860 bp, Arabidopsis thaliana
caatgacaacttcgtctttttttatctccattttaagaaagagacatgcaatgtcgaggaatactttcttttcttcatcgtctaaagatttgaaactcagttccagaacatcctgaagattgcctggttgagtctttttcagcttatccagttgagtttgccaatccttttcctccttcttgtcatacaaaagagatccaaaaacttcaactgcaagcggcaatagtcctgatatctggacaatcttcttggataacgccaacagattctttgttggttcttcttttcgtagtgaatgataactaaagagcttcaatgcctgcggctcagtcaagcacttgacctcatactgttggttcactgagagcttactcagaatctcagaatctctggtagtgatgactataagacttccttcaccataccagcttgtttcaccaaccagcgcattaacctggtctatgtgatcaacatcatccaaaaccacaataatcttcttctcatgaacattctcttttatcttttccaggcctatgctaacatcctctatttcaggtaccaaacggaaaagttccttgatgagagttttttgtagattgactaaaccatcttggtctgacgatttcccctaacgctttcgatgaaaactcgatgacggttgaagttaacaatgatcttgttataaaaggcttttgcaagggtagtcttcccaataccgcccataccataaagtcccatgacttggatgccagaactggattcagtgttgaacagtttcatcaaatcctttataggtgatccagaccaacagtgtagtctgcaactatctctggtctatcctcacagcagctacaaccttt

SEQ ID NO: 1205 - DNA, 855 bp, Arabidopsis thaliana
cttcactgcttcagcattgaatctagcagtatactaccataagtaaaatagtcagatgaatacgattaaagacgaaacaaaggtgaaaatgctattctacaggaaccatgaggagcacctgaaccacaaccacatagtattttgagttgtttggatcactgcaatccaaaatatttgatgcagcttgagtattaacctgtaatatagtcagcatctagtgaggaaacaaacacaggcacagagattcaatgtgtagtgtcacaatcacatatcaacgaagattttaaaattgttccataaaatacactaaatccgatagaattcaattatatagcaattgaagtaccagaacaatactcttgcagagatggtcgactgaggaagcgccgagaacgtcgcgacgagattcgagaggccagtcatagtaatcggtagcaactctcttgaagcagaagtcgttaacgccgccggactggagaatggtggagaggcgagtcacagtttcgttttcatcaaccggtagagaaggcgacggagcagcagaggaattctgtgggagaaaagagctctcaagaatggagattttgtggaggatttcaatttggagtctctcaagctctgccgctgcagtttccatgccttctccgtcgtccatttcgaattgccgatcgtcgccgcagcaaaagttttgtttcgtttcttacgtttgatttcgtaatcatctgtgctcgtgtctacggtaaattagaaaggaacaggatgatctgagccgttgaatttgtcttgcgtcttgtggaaaataaaaactctgggccagaactaggctcggaaacactagacgttatatgtagatat

SEQ ID NO: 1206 - DNA, 566 bp, Arabidopsis thaliana
taaaagtctcttcaattgtctcttcttgagtatatcaatggtctctcatagtttcaacaacaccaataaactgtcatcttcaagttggagtttattacactcgttccttcaagaaactgtaccgtcgactttcagatttagccatttaggacttctcaagattttgaaaatggcgcatcaacatttcttcaagcctcttcttcctggcttccacgcctccttggtactctctttctcgctctttcccttcttctatctctgtctatgtctctctgagaagctaaagatgagtctggttttgtatttgcatgttgcttcagacaattcctgtagccttcttcttgaagtatatagaaggaagatatgagcagaagacggcgaacgtgagatcagacgcgtcaaagagaacttgggaagtgaagatagatggccagagactcaccgacggttggaaagagtttgctgtctcacatgatcttcgaatcggtgacattgttgttttcagacaagagagtgacttggctttccatgtaacactgttgcgacctagttgttgtgggatcaat

SEQ ID NO: 1207 - DNA, 590 bp, Arabidopsis thaliana
gatccccaaaataaacagatgtgtactcttccaaattcttagatgccaaaaccattaaaccgaatggacctaaaccagacttaaccgatacattcatcttgctacaaatcaactgcggatcagtccaacttggttctatcacatccgctttctccaagtctctcactttgaacaatacttctacatccgcctgtacaaatcacaagacttttaaaaccctaattttctcatacctactgatttttcaaaaaaaaatgataataatcaaacctgtgcagctgtcacaccatagacttcaagcctagatcctgactttagaactttgttgcgtaagtttttgacttgttttgtacgtaatctttcaacttccctaaccggccactgaattaattgtttccctgatctatcaagccatattttccttggaatcgtctaatcaagaaagaaacaaaaaattgattcaatctctaacaattatattcacattattagtttcagttaagcgtaactaattacctgaataccggaccagcctttctcaacatcatcctcaaccgacgatgactcgttagtccaccccacaagattct

SEQ ID NO: 1208 - DNA, 1264 bp, Arabidopsis thaliana
cttcgattttgttagtcgcttttcgatgtttcggttgttctagtggcagctattacggctggatcaggcggtcctctagctattggatagccaccaccaccaccaagagactgcttcgcctttgcgtagtccacaaatatcgtccggccgtttaattgctgaaagaaactgtcttttgttatcataaagaaatagttttaagcaagtgaaagcagcaagacaacaacaaacacagtatacctgtccgttgaactccatcaaagctttctgagcttcgtcagcagaagcaaatgtcacgaaaccgaaaccttttgatctgtcagagactctgtccataactatttgtgctgataagaaccagacaaaaatatctcaaaaactctcagatatacaataagcagatcaaacacatgtgggatcgatattcatctgataccttcaacaacttggccacatttggaaaatgcctcagacaatccttgctctgtagtgcaaaacgataatcctgtaaacagaatcgaattattgggaattaagcattattggagattgtaaattcaaaatgttcagaaagtagagaacatcaggttcataatcaatttactacaaaccgaacaacatgtgagcacaaaaagaccaaagtttcacagaaacatggctttgaagagaaacacaaagtaaaaaatcaaagccatgagaagaaatggttactggacaacagtgaatagaatagctcgcagaagaaaataactttcaagacttacaacatcattacagaagagatttaccaattttcaattaaaatgaatcatattcaacaaatttgcatccgctaaaaccttaaaattctacagcctagaaatggattgtattaatcacagattcaaaaaggaaaaatgaatagagagttaccaccaataaagagcttggaagcaacaccacggcgttgtgtgaagaaacatgaggcggaggagtttattaagcagacggatttcaggtgccggccaccgatccttgcgagcgccgccattaaaatttatgcgtcgcgagaggactgttggagagactacgaataagcatgtcatgaatcggccaatatgggcctggcccggtccatttggagagggaacggatttattgtatggatataatccagagatgggacaaaatcaaaactaatctatacgcttaagttaactaacagattttcaaaatttaaacaagaaaaagtgacaattaacttccattcattttgctgtctttc

SEQ ID NO: 1209 - DNA, 513 bp, Arabidopsis thaliana
atgtcttcaaacttaaaccaccaaagtgtgattaattatgtcttaaacttaaaaaacaccaaagtgattatgtcttaaacttaaaaaacaccaaagttaaaaaacacgacccatctacaacagcacttctcgtcattcctggggaaaaaaaatgaaatcagttgttgtcatcatatttttcatacatgtaaacttaaagtatatacaaaccattgcaattttatcttctggccaggcaatagaagttccaagtgcatcttccatatactcgatttcagtagattgcctccaaactgcagcatctttaacaatcacaacatccacccatactcgagaagcattaggccccaaaggaacgtgatgtacacattgatcaggactgttagacgcccaacgtccttcagcaacaacacgcttctttccggatatatccatcaacttgcatttttgatttgctttgaaggcaagacgcttcaagaacaacaagcaatgaataaacacagaaatgaacaa

SEQ ID NO: 1210 - DNA, 441 bp, Arabidopsis thaliana
cctaatgacgaattcggagagctcagaaggtacttgtccgagcattgggtcttcatactaggaggagataaatcaagtggatggagaaaaattccttgcccatctccccatcttcctataacacaaatattaagtatcaacgggcgtatgcattacctcgcttgggtacagaagtttgatcctatgcttgtgactttcgactttagttctgaggaaatcagtattctccaagcacctgaagatatccgttggtttaaatctaaccctatagaatactatggaaaagtagctcttttaaatctttccgatcttacaagagaatgtacgatgaacctatgggttatggaagacgtagagctgaatatgtggtcggagaagactttagtagtgcatccctctcaaatggatatagtcaagagctctagtatgagggtagcaggt

SEQ ID NO: 1211 - DNA, 612 bp, Arabidopsis thaliana
caatttcccaagcgaacaactgagtgttttgcgcagcaataccacgctcaaagctctggatagcataagcatcctacaaagagaaaaattttgtacgtcaaggaatagagaatcagcgagacagtctcatcatcacatcagtcatgagtccatgggaacaaactggaaagacagatcaagtttgaacatgagtgacctgttcttctcttgtaatacggtactggtcagcgcatatttctccacaaactcccattccaaagtcattatagacatcccaaagtccatctttcatcataccatcaacaacagtatcatgacctaatcgagaaccccttctgctaacagaaatcagagtaaagaataaacgagatgataaaaacagatggaatatgcctctcttgggtttgtttctacaagtttgagttaggaaactcaaaaagcaccttgcgtccgggaggtacttaggtacgtttgacatgctctccatcccaccagcaacaacaatatcattcaagccgagctggatactttgagacgctagcattacagctgaggttacaagtgaagtaaaagcagtgatatatcaccgttcgaatgatcatctggagtaga

SEQ ID NO: 1212 - DNA, 771 bp, Arabidopsis thaliana
ctgaccccagactccatcacctcatgggtcgattgtaagaaagcttttattgccaagttcttctctaatgctcgcacagctatattgaggaacgagatctcaggcttcacacagaaaaacaatgaaactttctgtgaagcttgagagagcttcaaaagctacaccacacaatgcccccatcacggttttaagatagcatcattattgagcacactctacagatgagctttaccaaagatcacaatgctactcgacactgcctcaaacgaaaacttcctgaataaggaagtagcagaaggatgggagttggtcgaaaatctggcacaatctgatgggtgctacaatgaagactatgatcgctcagtgagaggaactagaggcactgagaataaatagagcaaagatatcaaggatctgaatgaaaagctagacaagctgttagactcgaccccctggtagagtagatggttctatgacttcaacaaaccactcgaccccctggtcgagtagatggcctcatcactgcacatcaccgctcgacccccaggtcgagtaccaccaagacaaccactcgatcacatcactcgaccccctggtcgagtatcatcacgtccaccacatcaccttcactcgatcatactactcgaccacatggtcgagtacctacatcacctccagctcatcactcgaccactcactcgaccacctgggtcgggtacattcttaatccgcccaatactgcgtcgttttgagtattagggttttgaaata

SEQ ID NO: 1213 - DNA, 898 bp, Arabidopsis thaliana
  unsure (1)..(898): unsure at all n locations
gcttggattactggaggatgttcagcacatgtaccagagttgtcacctggacactctgatggtttacccatatgtagcctatgaggaataaacgattcagttcctctccacactacaagtggagctttaccaagttatgacctctgatgatttggaaagtgaaggattgagattcttgagattctttgtgtaaggtcaggattgtatgatatcaatcaagcgcttggaatgattgtttggtttcgccagtggaacggaaactaagtccaagtttgacagagaataattgaaggatttatggatcaccattggcagctctgtaccgctgaattctactagatctaagagcaatcagaaacgcaatcctatcatcaggtacttccagcgttctgtagccaatgtcctctactcccgagagataacatgaactgtcaccaattctgatatggagatgatcgctatggctctcaaaggcactctccgccaaaccaagaaaaatatgtctctccaaggagaaaccaatgacacacctctctctatacttcttctgatctacctgtgtggatacaatagctggggtgtcaccaataaccacaagagagcacgagacactctttgcataggaggggttgtgacatcgattctgatcgcttatggagtcccaatcacatctgatggacttgagccacgagcaatggatctcgagcatctgcgccactgcgaaatccttgaatttgaaatgatcggcaacatgcattgtttcaagtttgagcactctacagacaagaaagctaacatccttctccccagtcctgaggtcacacgcataattgagggagataaccgtggtgctggccgcagcagaagaagggagattgagtatcntcatggcggtgtt

SEQ ID NO: 1214 - DNA, 616 bp, Arabidopsis thaliana
atgtattcttgaggtaacgtttgttgaattcgtattttattgttttactttatcatttatagatctatatatatattgatacttttcttgtatttatttttgttgtaggtcatttatgttactcaagatgtgaacaactgccgttgtttcctaacttatctttcttcagtgttgaattctatgagaaaagatgggaaatgtattgccattcttttttaagagctgcccgaatctaaaatccctggtcttggtaaggatttgtttacttaaaacttatgaactttcttttggtaatatcaattactcaaacttgtttcgttcacttaggtgttatatcaggaatctgattactttccaaggaagagaactaatattatatctggacctcggtgtctcctatcatctctcgagtatgttaagatagaatttgcattggacaaggggaagatggaattagtgagatacttacttgagaactcaccaatcctcaagaaactcactttatcattggatcattgttctagaaagaaatgttgtgtcacctcagagactccttaaaatccaagatgccgagctcttgcgagttacgtccctgacacgttgaagacatcaaggt

SEQ ID NO: 1215 - DNA, 1157 bp, Arabidopsis thaliana
cctcctgcgccggttagtcccgatatgagccctagagagcggcgcgagacaaaaggtgcaactccgaagaggcgtccgcaagctgcttgtgtaccgattgagaagagcatcattgctaggattgctatgggaagtgaactagctcgacctagccagatacagaaaagagctcctacggtttgaaagatccataaggtccataaccggcctctcatgccaaaaacccgagccgctacatcagaagcgtaaccaccgaagggacgggcgatgaagttagccattccaaagctggctgctactataccagctgtttgaagcttaaggttaaacctgataaatacgtagagaacaagaaaacaaattaaggttattaccttgtgacagaagtaagtaagttcatcagttgggttttaacgaataagaaatcgaacctgtcgtaaaaatatccggagataacgttgttgatagttaattcaattcccatggaagatccataaagaacgaataaaatccatgttctgtagttcttcacagcaaaccagaaaacctataacaagaaaaacctttagacactagaaatttatttaactaaataaacgaaatagttcttcacgaatttattgcaaaacttcatgagtatgtttaatgtttgcaagattcttttaatgagagccatattcttcttggtctggatttgttatatatttgaagatgagacagaaatatatatatatagaaaagtaccttggagaatttgtctttagagacttgaccactcttctgaagggtacttaggttaccgtcagggagatcttggccgagactgaggacgagaatgcccataacaacttgaagaaatccgggaacgaagaaagctatccgccaggccatgaacggagtggctccggcaagtttgatgacgtggaagaccatcggcattaggagttgagtcactccaccgcccatatcaccccacccgcctgcacagccgttcactagtcctatgatcttaccgttgaacataacgctggtccaatactggcatgatacaaacgtggcgagacagaatccgatcatgaaccggacgcctaagtatccgctagggccacccacaaacgacattgagaagacggttggggcggttagcatgagtgaga

SEQ ID NO: 1216 - DNA, 902 bp, Arabidopsis thaliana columbia
cattctggagcaaaacagacaacttaagccgcagtagcagttcgcagaccaaaatccgcgtaggtgtcgatcgacacaacccctggtgtcgagcgacatcaatacttgacggcaattcaaaaacgtaacttattgatgttttgaagattttcaaattcgccccagaacttcttccttttttcaaagaaggcccatcacgttttaggtcgtatatatatcgtttttaaggtcattgttttaactctaactcttattatctctttattattgggagtaaaacgctctagagactctctttagagaagatctttctaaactctattctcttcctgtttcttacattgatttcttattcaaacatgttttgttctttgataaccatgtctgagtagatctcttgttgggtttagggagtctcattagagatttggatgaattagtacatcgaaaatcctgttaagataatatatttagaattcttcatctttgaatgttcttaatgttagttctagagtaattaactagaacttgaccttaggatattaggtatacccactgaaggtatctgttagtggaactatcttagatgagcctattatttaaatgcggactaacgtcgatttacatacttaggtgaacttctcaaaccagattataatgcttgcttagttctagggatttacaagagagttgggatcaatactattaagcttagtgagtagcacagaacgccaccagttactctatattagtgatttgagttctagaatggttcgataataatcctaatttactgcaagatctactattctgatttttcttagaatttcactaaacccgacgtcttaatcatctaaatctacaaccaatctcttttattgctttcttgtcttttactttta

SEQ ID NO: 1217 - DNA, 816 bp, Arabidopsis thaliana columbia
ccttatgtttactccctaaaaataagaagtctcggggagagaaagaataccaaagaaaaaataaatgaatggtcgatttatagtgcaagaatgagtctagaaggatcttgaacgttagcttctttgatgagacccaacaatgaaagcctgatggatatagttgtggaacttaggtatggaatctagaatgttgtgtaaacttatagagaagtacatgttggttaggatttgattagaactgctaggcatatggatttggttaggatgatcaaggcaataagctagagaatgttgagactcctttgttttcaaacctcttccacgggttcggcttttgggttttgcttgagggcaagcaaaggctaagtctgggggagttgatatatccctatttttaccgttttagctatgttttaggtataggttttagagtctatttgttatttctagagtcttttctagtctttttcaggtctttacatgtttgggatgcatttggagattatcgagcattctagagcaaaatagacaacttaagctgcagaagcaagccggagaggaaaatgcacgtaggtgtggaacgacacaacccctggtgtcaagcgacaacaatacctgacggtaatttcgagacgcaatttattgatgttttgaacatttccaaattcagcccagaactttctcctatgtttaatgaaggcccaacacttttttaagactatatatatatttttaaggtcattgtttagacctaagcttggagaggctattctcctttttctcttttgttcttgggagccaaaaccctatggagac

SEQ ID NO: 1218 - DNA, 509 bp, Arabidopsis thaliana
ccaggtttttgaatctctgcaactctgtttgcacaagctcttccaaaaacaacaatgtcaagaagtgaatttgcaccaagtctattagcgccatgaaccgatgcgcaactgcttctcctgcagccattagtccaggaactacagcatctggatcatcacctctaagagtaatcacctgagactcacatagatgcaccaaaacacttttaaaaactgaacatatccatttcttcttacactaattaaaatcgtttagtttacctctccatggtagtttgtgggaataccacccatattataatgcacagtaggcaatacaggaattggctctcttgtaacatcgacaccagcgaatatagctgcggtctcagatataccgggtagcctctctttaagcacttctggtggtagatggtttaagtaaaggtatagataatccttcattggtcctgttaaagaacaatgttgcatatactcaaactaatttcttatacatgagtctcaaagga

SEQ ID NO: 1219 - DNA, 555 bp, Arabidopsis thaliana columbia
gaagtcaatcccacaaaatttatgcgtaagaaaagccatatttacgatgagtatcaaaaagagaagaagaggtgattttttctctcttcaacattataacaaaaaacattgtctatctattagaaatgtggcctaacttaacccaaaagctagctcaagagttaagaattgtgacatcgtttatataatacttaaaaatcttaatcccaaacaatgtgaaaaattctgatactatccgatcatgtatcaaccatgcaaagaaagagagtactcgggagttgcataagagaaccatatatatgtctttgggccaataaccccacgtatatgtttctttcagttcatagttagctaagtttatgcaggaatcggctgttttgtcagatttttttacccagtttttctccaaaccagagtataaaactgtgagagttcaactcgaaagtaaaagaaacttttaaaatgtcaacttcaatactaagacggatactcgacccgacccggaaacccaaacccgatgcaatcctctcaatctctctcctcactaccgtctct

SEQ ID NO: 1220 - DNA, 429 bp, Arabidopsis thaliana
ctcgagagtaccaacacaagtagaagcaagaagaggagtgaaaaccatatggtttctcggagaaacacaaacgacgtcgtagagattcgtatcgatccctttcatcaatcgacaacccgcccaacccgacccgagaaccactactctcggcttctctccttctctcgtcggtggcaaacctgaatactgactccgatccacatcatttggaattttagctggagattgaatctgagtctcttgagctgtgcagaaacgagaagcgagagtgtatgataatgatgatgatccggagtttctgaatctggtgatgattgatgatgtatttggtgaaattcgtgtgaggtttttgatcatgaacatcgcttcttcttcgtcttcgtcttcttcgtcttcgtcttcttcgttgtgtgtgtgtttgaattgaag

SEQ ID NO: 1221 - DNA, 590 bp, Arabidopsis thaliana
attattgtaagtaggcgatattgtttatctcgtccatgaactgctcacacgaatcccgagtctcttccgtgcccaatggataatgatggcgtgcgaatagctgaagaaacataacgcccaaataataatttccgtcaattatgaatagtataccggaagcaagtgttgcatccgcttgtgctggagcatgacgacgcaaaagattaatggctccctggatgtcacgttgatgcgttagaacacgcataacctcgtaatacactattgtgggattgtcagcagcaagacaccttaagcaaaatggtcgatgacggccttcttcctcgactccggatggataatggtcacctctagcttgaatgtcatcgggatcgccgcacaagctgaaaatgtctcttccacgattgcctgatcgtagtagtggctgaaggtcccaccagcatttgtctgctattttcttagctatcttagcgagtaaatcgtcggagatagttgggttgaccattatagagatattgttggggaatttatggttgcattcaatgtcatttacgtgtccgtcactgttgggattcaattcaatgtatgag

SEQ ID NO: 1222 - DNA, 876 bp, Arabidopsis thaliana
gctccgaactctgtatgtggtgtttgtcaccagaaggtagattggacttggggtgggtattcttgtcagaggtgtcctcaatatgtcgttcactcgaaatgtgctactagaaaggatgtgtggaacgggaaagaactcgaaggagtgcctgaagagatagaagatatagagccatatgtggtaattgatgacaacacaatacaacatttcagccacaaagagcattacctaagattccatgttaatggtcttctctgggaagaaaacaagcgttgcagtgcttgcacccatcccgttcgtctccaatcgttctatgcctgtaaagattgtgatttcattcttcaccaacactgcgctgaatctcctaaaaaagaatggcacgtgctacacaatgaccggcttactttagttacatgcgtggccaacttcttctcgtgtacagcttgtagtagattgtctaatggcttcatgtatcagtgtgattttatgaagttagatgttttgtgcggtttagtctcggagccgtatatccatccaggccatgaccatcatcatttatattacatcccacaagtggaagacaaacaatgcaatggttgcaacaatcgggaggttcgtgtgcttacgtgcatcggaaagtgcttgtggatatgtcttatgcttcgattgcgccactttacgaccaagtggtaaagcatagagtagacggtcaccctctctcactatgctacggcgaagaggcaagtggcaaatactggtgtgacatttgtgagaaagacacgtatccaaagacatggttttacacgtgtaaagatcaccgagctagtttgcatacaaagtgcgtgctgggagacttagtaggactcatgccaagaa

SEQ ID NO: 1223 - DNA, 878 bp, Arabidopsis thaliana
tcgtattaaagatattttccttattcttcggaggcttcggaaagatttcttgatccgacattatcttcaaagattctcctttatcatttccgaaagtcccataaaagatcctattttactggaaatgatcctttgagaatgaatggtttttacaagtctttgtctcgggtgttcttcacggctcggtggtcgtttgaaaggtggcttcgggcaaacggtatgtaccggctcgggcgcgcttgatgactgtccattaagctcaattgggtgtctccctaggcgatatagatgttttccgcagcgttctcacgattggctcggattgtgttcataggattaacacccgagccattttacgaactccgtgacggttgatcgaataaggtcccgaggtgctttgttctaggctaggggccaatcacatgtttaaccatgaggtgattgttattcttatactgtttggctcggtctttcttgtgggggaattcgaccccaacaataagtgcttctgcaccacacattccaccccccaactacgccacataaatgagtgaatatatacactaacaatattggactatatatacatattggctatcaacatctccgtcaataataaaacgtcctccggcctacttacacatgcttgcaagggtagaaatgagatagtatcgtcagaatccagtactcatgcgggtggatgggctgttcagaaaacaatttgacgacacattggaggcaaacaacccggaagcacattatcttgaaagactaaggtatgatttagtcatggcaaaaaaacacatttttaaagctgtaaacaaggtagatgaggcgttgtttgttatggctatgttgtctatttgtggtggtgagaa

SEQ ID NO: 1224 - DNA, 530 bp, Arabidopsis thaliana
tacagagagaagaagaggggttcctaagcttaaagaagatctgatgaaattctggatgatggctcacacttctagccctcagtttgtgatggctcgctctgttacttgcaccaccactggtttcctctgtttcttgattgcaatcacattggctgaagccatggtccggtcttactttcttcaaccccggtcactagggttctgcaatggagattctgattacaaatggtcaaccactttggttctagtctcccagacagctgcagtggccataggaaccgttgctccagcgagcagatggctcaaggcagtgaactttaggtgtccatttagaaacaagaaatctttgaaagatgagttaagagtagagagttattgggtagagtgtctcgctgagaagaaagaacgtcccttgaacttttggatgctccatggtcgctgcagcaggaagcttgcacacgacttaaaccggttgatgcttgatatctgcattgcaacacagtatggtatagtgctggctagcaagtttc

SEQ ID NO: 1225 - DNA, 555 bp, Arabidopsis thaliana
cgtatgttgacgcttcataccaggattccggccacaacatgtctaacttgggtaaaaaaaggtacaaggttctaagtggagcatgtaacatccactaatctaatggcaatcataatagacgtctttttttatcagcagaaaatactaggtaacaaaatatggatcagtcacctagaactttttaatggacgttgtgaaggtaaaccacatttttataaattcaaagaaatttgcaagggttaagagacttgaaagaaaagtaccgctttgcacttcttcccacaaaaagaggtgattggttcagtggtatcagctggggtaacatttgccttgggcatgcatgatttgtgatctagaaattgagaacgttaattacatactacaaacaaaactgagtgaaaacaaaaatgcaatattcaaggcagggaaggaataatgacatacattttttctcacacattttgcaggtatttgcacccacagtctgagtacatcttcaataactgcattacagaatttgcatgtacaattggggcaatccaatcaccaagagga

SEQ ID NO: 1226 - DNA, 2267 bp, Arabidopsis thaliana
cactcatctgtggtctagccatggccgccgatcttatacacggcttccgacaccgcaaattctggtttccctgtaagttcttctctctcaacgccacttctctgactttcatcgctgtcggaatcaaactctctgtggatctcaacacttccatgccgagtcgtcaggatcagttagctaaactcagcagcaccgtctttgtatgtactgtgatgggtaattcgatgccttctctgggtattatggacaacaatgatctcctcatgaatcttatggctttagggattcttgtcatcactgatgttgttaacatctgtattcagttgggtactggtgcgatttatgttttctctgaggaacattttctggtcgtacttctcatgcttcttatgcttatgatcttgtgtttctcggccaccacagttcccactacgaaaagaatcttggagagtaagtacaataagaggtacgacgttgctatgaagtgtcctttggctacagagagaacagttgctaagaaaattcagcaagatttgtcaaagttttggatgatggctcatactagtagccctcaattcgtgatggctcgttctgtcacgtgcactgcttctggtttcttctgtctcctgagtgccattacgcttggtgaagctatggttaggagttactttttaagaccaaggtcacttgggttctgccatggagattctgattacaaatggtcaacttctctggttcttgtttgccagactactactgtagctatagggaccattgctcctgcgatcagatggttcacggctgtgaacttcaggtgtccgattagaggaaagaagtattatagagatgagtttagaatagagagttactggacacattggttctcagagaagaagcaacatcccttaagcctttggatcctcaaagaacgcagatacaggaagactgcacacaatgcaaaacgctggatattggatgtatgtattgtgatacagtatgtgattgtgtttggtagcaaaattatccgttacatctcggtatcctgtgtgggtaagatcttgctgtgctgtcatgtcgccttaaggaccagtattactatcacacacagtgagtcagaaaaatccgattcaaatccaagctcgagacaggacctagcgagttttgtcctgcaccttgaaggagaggacccgctggtggatgtgatggtgcggaaacctgggaagcgacagatcattggatagagaagggcagaaagaaacaaccagtgaatctgatagagcttttggaagcaacaacacccatttcaaaaggatttgaagggattgcagagttcgacagcaacaaggtggcttctctggcccacggagaaccgcccaattgttgggctctcccgcttgtaacactcacaagtattgctgttgcacttcccgacatcaagccctcctccctgaagaagttactcaatgctgtcaacgaggcactggaatatgtcaacaagtttgaatgcgtcctggataccggaggagagtcagttaacctcaggaaagctgctgaggtcgtttggctaggtgttgatctctatcacaagtggtttgatgtggatcttcggaaactatcaaagcaacaaagaaatccagaagaaacccttcgggagctgatggaaatcgcgaagaaagagttctcagagtcatggcagatgaacctgatggtatgcatgaagcacaagccctctcactggcccatcaagactctagcagccaactccatgtaccgaatctgtcaaacaattctactaacttacgaatcaagagactatggaacaggggaagctctgttgagaaagctggaaagcacaatatcagacatagtgtcaggttgcttttgcaacgtagcacaagtgatatccgtcaagtgtttggtgtcagctgtagaagtaagggaagaatcagtaagaggagcagctctgcatctgggaagaacagagaagattctagagatcttagagagaagaaggttacctaaattgagatgtgatcagatgaagaacatcgacgaatggagagcattctacaagattaactcttgcgaatgtgataataacaacaagacagtttatcccgactcggacgaactgcgcctcactgttgagtagtttatagatatgttacaggttgtagctttttctgtttttgtacctttgtgtattcacacatgaatcctttgtatatagtaagaactgaagctttttgcacacttgaagtgtatgt

SEQ ID NO: 1227 - DNA, 550 bp, Arabidopsis thaliana
aataactgccttacagaatttgcatgtacaattggggcaatgccaatcaccaagaggaaacatctgtaattgaacctcaaaaagatccaatcaggcatcagatgaccctaaaacaaccgttcaaacaaccctggtgtaattaaaagtcaacgacacttcagctcaatagagtttacatatgtattgagtcttgtccgttcatttagctaaaagtattattgttctaaaacctgtttatacagagcaccttataaactattgtacctttgtaaatttgcatagcttagcactgacttctcaaaaataaccaaaataagacatatacacagcaatatcagcatacccgtatgtctaggcatctttggtggaaagttgagggacaaccatcacagcagactagatcacctccatctccacaaataccacaagcatcgtcatttggatcatcagcaattacatctactggacaaaaaccaatgttccagcacccttttgcttacccatgcatctatttggcattgaagaagagaaccccagagtcacaaatatg

SEQ ID NO: 1228 - DNA, 2219 bp, Arabidopsis thaliana
tctattgttcgagtagaatcttgctatgttgttttcatttcaccttcaaaagtgattctgttgcaaacgctgagtcctccggttcaaatccatcaaccagacaattcgttctgcatcttgaaggagaggaggagatggtggactacatggcacgtagcaaccgtgtggccacagaccacttgatacaaaagggtcggaagaaacaacctgtaaacttgatagagctcttggaggcaacaactttcatctcaaaaggatttgaagggattcgagattttgacagcgacgaggtttcttctctggcctctggagagccacctaatagttgggcccttccattggtaacactgacgagtatcgctgtcgctcttcctaacatcaagccttgctcgctcaagaagttagtgaaagctgtaaacgaggcattggtctatgtcaacaagttcgaagaggtcttagacatcgaaggagagttagctaacagcaggaaagctgcagaagttgtttggttaggagttgatctctaccataaatggctcaacgtggatcttcgaaaactatccaagcaacatagcaaaacaccacaggaagttcttaaagagctggtagatatagcacaaaaagagtttacagagtcatgggagaaaaatcggatactatgcatgaagcataagccctcgcactggcccatcaagactctagcagcaaactcaatgtaccgaatcagccaaacccttttgatgaagtacgaatcaagaaacattgaaacagaggagactctgttgaaagatgtggaaaagatggtatcggacatagtatcaggatgcttttgcaacacggcacaagttattggaatgaagtgtttggttacagcagtggaagtgagggaagcgtcggtgagagaagcggcaatgcatttggggagaacagagaagatacttgagatcgtagacaggagatgcatgcctgctttgtctcatcacaaagtggcaaagattgatgaatggagagagttttataggaccaataaatccatcactttcactcatccttcgtcccagtgtacgacccgtgaactcattatcaacctagaataacacattttcttgtcacatttaaagaattaattacgttttgtacatgataaaacctaattagcaaataaaatcctttctttgtcggttgatctaactattaacacttgatgccaagtctaaagagtttattagtttttaaaacccagtttaccaataataagtttcctttgtcggttgatgcactagtcaaactatcaaagtcgtcaagtttgctttgttgacaaggcaaagctactcttccaaaacattgatccattcttctggaaatttgcaataacgtctcaagaccaatgcaagtaataatttaaccatgccatgttatcaacaaaagctgcttctctgatttctagagtattattttttaaccattattgaagtttgaagatttcttattattgctaaatggtaaaaccatcttgaggggaacaatttgataaaactgtgtgctgcttcctgctccgaccaaaacatgtttaaaattagattcggaccaaacaagttgtcaatttttagtacaaatcaaaggttcaaatgtcaataaataatcattacattttaaaatttcgaaataaaaggacaaacatgtaaaaaccaaaaaagtgaagcactgatatttgtcatttctgcctataaaatgtacacttcccactcacacggtcacagaaaccaaattcgaagaagaaacagagaatcatcaaatcaaatccctaaaaattgatttttgaaatggagaagaacgcatcgacttcgtcgttgaaggacttgggtccgagtggtctagatctaaccagcgcctttttcaaaccgatccacaactccgatccttctctcccttcaaaccgacgtaccaaagtctccgtcgtcggagtcggaaacgtcggaatggccatagctcaaaccatcctcactcaagatctcgcagacgagatcgctctcgttgacgccaaacccgataagcttcgtggcgaaatgcttgatctccaacacgccgctgctttcctccctcgaactaagatcaccgcttctgttgattacgaagtcaccgctggatctgatctttgtatcgtcactgctggtgctagacagaatccaggcgagtctagactcaatttgcttcagagg

SEQ ID NO: 1229 - DNA, 690 bp, Arabidopsis thaliana
cttccaaagaatgcgaagcagaataaagtgtgacaagagttgtggtatttgagctttgtcctaaagattgagcaatctgtccaaggttgtgctgtacacaagtccaatggttccaccgcagaagtacgtgatatagtataaccaaaaatctgatctggttaagagcagcgacaaagaatgttcaatccccaaaccttcaagctgatctcttgtgataagtttcttgcaacatgactcatcactatcctcttcctcaacagctacggacttaaccgggttttgcaccacatcgtcactcagcaattggtaaccttcacggtttgcttcatgtgcaagcatccctttatgcaactcaagctcatcaggatcaacaagaatgaaaccagaaccttctagacggaaactagtgtggattgtgcggttataccaattccgggcgatgactaaaccgggaatacataaagggaataccaagaggaggattgctccaccaaagagtagacgagcagaggttaaatcagaggagtttgatccaaagagaaggagataaacaccgtttaaagcagcgagtatgttgagcaatagaaacatgagagagtcacgacgaactccatctggtggaagaggctcaaaaggcggttgacgaagaatcgggatgatagcagtgaaagagacaatgagcggtataag

SEQ ID NO: 1230 - DNA, 1066 bp, Arabidopsis thaliana
tttaattaatatgctttgttgtaacttactaggatggtgtttttagttcatattcttgtattacattgagtaggcgttgggcatcatggtacattcagagtcatcaatacttagttccttgcgcggtggtgatggcggtggtattccttgttctaaggatgaactagcaataaatggtagttacaccgatcctatggggcggaggaagtccaagcggtttaaggttgctgcggaaagtgagttttcacctgattttggatcgattaccaggcagctcagatcgagaagaatgcagaaggagttcacagttgagacttacgagaccaggaatgtttctgatgtttgtgttctctcttctcaagctgatgttgagttgattcctggagaaattgttgcagaaagagatagctttaagtcggttgattgtaatgacatgtcggttgggttaccgaagagctgaatctcttggagttacatgcaagaacctatgaaagataggaatatgccagagaacacaagtgagcaaaatatggtggaggtccatcctccaagcataagcctgccagaggaagatatgatggggtctgtttgcaggaaaagcatcactggaacaaaggagcttcacggaagaacgatctctgttgggagagacttatctccaaatatggggagcaagttttccaaagattggaaagaccgctaaacgttctatatcggtggaagaggaaaacttggttctggagaagtcagattctggagaccatttgggtccatcaccagaggttttggaacttgagaaatcagaggtttggataattacagacaaaggggttgtaatgccttcaccagtgaagccttccgagaagaggaatggagattatggtgaaggatctatgaggaagaatagtgagagggttgccctggataagaagagattagctagtaaatttcggttatcaaatggtgggctcctagttgcgcaagcagtggggatagtgctcggtataaagttaaggaaacaatgcgtctttccatgaaactttgtaaacaattatgcaagaggaag

SEQ ID NO: 1231 - DNA, 502 bp, Arabidopsis thaliana
atcgcctttttttttaattctttcagatgctcgatgatttcgttgatgtgactaaagatgagaaacagatgatgcacatgtggaactcgtttgtgaggaagcagcggtatgtcttatctcttttcagtacatgtcacgtggagttttccagtataaacatttagagtcgcgcatgtaaaggttgtggataattcctgcatgagttcttctggttaaaaaaaaaaaactgaacaattagataacatacgcatccatgttctctgactcattataagcattaccttgacagtggttttggaccctttgcagagtattagcagatggtcacattccatgggcatgcgaggcattctcaagattgcacggacccatcatggttcgaacaccgcacttgatttggtaattcaactctcatttcttccattgttttttccagtgtatcggagaagaaagcggttttgttgataaaagtgagctttttttgtgtaggtgctggagagtg

SEQ ID NO: 1232 - DNA, 504 bp, Arabidopsis thaliana
cgctaagttcttgcaacagattatgactaaaaagtctaatattgtatttgatcagcctggtgatgactcatatgactcatacatggcagaaagagatggaattctctcatccatggctaaacgtgcaaaggttagtcgaagattacaataccctctaacgacatttttcagtctctttgtatataatgtcacaagcttgaaaatgaacttgcagactttggaagacgctctcaacagtttagaaggtgttacatgtaacagagccgaaggagcaatgtatctcttcccgcgaattaaccttcctcaaaaggctatcgaagctgctgaggctgaaaaaactgcaccagatgcgttctactgcaaacgccttctcaatgctactggtgtagttgtagtccctggttctggctttggacaggtaaaatataaccaaatcttcataactttaaatgtcttacaaaaggatcgaacttgaataatgggttttggattcattgtggttta

SEQ ID NO: 1233 - DNA, 407 bp, Arabidopsis thaliana columbia
atctaggtatcatggaggataaaaccaaatatgatcttgtctttgatgagttagttcgtaaagagagactaaacaccggtcgtgttattggcatcacttccttcaatacatctcttcaccgatatctattctctcagttttgccaggtcagtctcttttatcgtgattgtgttagcgtttacgtttacagattagacagtttttaatgataatgtggaagagattttgtggaaatactaaacgagaatgtgttaactactaaatattgaagcagccatgagtagaaactactccatatatgttgatatctatattatgacttgttacagtttttagatatatgatgaccgagaattagtagaaagcaacatagcatattagattgtgatagtagtgacggtgatgag

SEQ ID NO: 1234 - DNA, 815 bp, Arabidopsis thaliana
atcataacgtttcttaaatatctataatagattatttttattgagtacagacgatctatcaatggtcctgtcacctgcttaggaccgtggacttgcttagttagcggcttgctcggagttaaaagttttattctagtttttccgtttttttaggcaatgattagcaactatagtaatttactaatttatttacaattatgattaatttatttactttccattttccactaaaagagagattaattaatctcgcaaaattttggttcattgaatatacatgcaaatttattttccctgttaaagatctactaaactcaaaatgtcatcatttttcatgtctatatgttggggctagcctctattccttcgcaagctgggcgatactatacggtttacttatgattccgtcgaacgagcccttcgccactaccatattagtggcttccgtgctgtgaagatcatcccaaaagacatattcagtcctgtttgcacaaaccggctggtttgggacacaaagttcttcccccgggtttactgtgcaacaactcttacctccaaccttaaatcctatgaaattacgaaagcgtggtgagttcaattgttatttaagaattaaaatattcttgtactttgcatacatagttattggatcaaagttaacttgttataagtcatgagttcaatatgtttacctaggaaaatgaaggcttggggatctcaccggagaaaagatcgacgtaggtaaactttgcacctctgaccttcttattgaaatccatgacaaggtcgtcaaggttcttattaaaaatcttcac

SEQ ID NO: 1235 - DNA, 538 bp, Arabidopsis thaliana
ctgccaaggctgttaggatctatcttaaagaagtccgtcaaacacaggctaaggctcgagggattccttacgacaagaagaaaagaaaacgtccgcatacagacacggcaactccaatcgccggtgacggagacgatgccgaagaagtggtggtgctgctttggtcgttacggctgcaactacggtatagtggagacgatccagctactagctagatgctaaaatcttaaaagaattacggtatagtaattcttgagttctttactttttttataaattatatatttcgtttagttaattatttgagatgtaaattgcaatttatatagatggaaaagacgatcaccgattattagtaaaatgagatcttatttatatttcatttattatctttcaccgtgattgatagatagatcagtacgaaagtgtgtaatggtgatgtgtggacgtgcgaagtctcgggtctaacgtgagtcgtgatttctctgaaaagtcataaatcttcaggtgctttcttttaaaagctttaggaatgatg

SEQ ID NO: 1236 - DNA, 612 bp, Arabidopsis thaliana
acagaagaagtgcgttgtgcaggattagaaaaaggttgaagaagaatctctgatacccaaaaaccacctaaaccaaatcgaaccgattcaaccacactcgaaccgaaacaaacccaatcggatcgatttcaatcacactataaccggaccgaattgtttaaacgacatcgtttcgaagagaagccaaagaaaaagaaaggagagaaataaagcaaattcgttaccttcacttttcattttctgaataagagttaaaaaaagacattaatggccttaaggccttgtactggattcacaatctcctctcttcgcaacgcttccgccgccaacaacaatctcttctctctcctctccttctcttcgtcgtctccggcgaagaggaatcttcttctctcttcgctccaggacaatctccgtcgtttcgcatccagcgcttctctttaccgtcaacatctccggaatcaacaacaacaacatcagcaacaacagcaatcgcgcgtgaaagaaaaatcagaaacgctggctcagaagatcggtaaatctatccggcgtgccggtgcgccgtcgaaagctagggtttacgctgatgtcaacgttgttagacctaaggac

SEQ ID NO: 1237 - DNA, 1179 bp, Arabidopsis thaliana
ccatgtccaaaactcgattcacggaattccgacaaaggtgactgaggctttttgaacctgtagtattggtttgcttatacaattcggttaaagaaccaaaacaattttacaaacaaataaaacaatttaattgggtgaacatattaattatactagtaatggcctaatcggaggtggcatacgtaccgtaaagcaaggccttctcggttgccaccgtcaccaatggttatgtacattggtccacatggatcggctttcttgttgtatatcggcttctgcattgtccataattttcatataatagtaaaagatgtgtaatgtacagtattcacttcattctaaccactaaattaaagaaaagttaatgaagatgggaggcacttacgaaacgttcgtaggtatgaacgtggccggcaaaaacgacgtctacttgagcacgatagagcaaactctccagggcacttctcattttctctccttcaccataatgcgccttgtttgtactgtaccatggcgtgtgcatcaccaccaccaaccatggcgtctttttacggtcaacctccctcacacacaaaaaatttatacttttcaagaactaattaagaggaacagttgaattgtttttacttttaaaacatgaagtctcgtgtaaaaatccagaatagtcttcgtgtggtttctgctatgtaaattttgcaatgactaacttagaaatgttgcaaacaaatagtgcaaattttaatttatatatcccaactagttacctttcttaaatcagcttggagccaatgatactgatcggagtgggactcatagggggtgtaagaaccaagcataacggtgtggacgcctgctacatcaaaagaatagtaaagattggagtgagagagactctcagcgtgaggcatgagccatcgcgcattgtatgacttgaagcttatgtggtcattggttgggaaagactcgatctcgtggttcccctccgtgaccatccacgggcgggtgctagctaaagtctctaagaggcggccaaaggagtcccaaagtggctggtgggtgtctgcgtaggagaggtcaccgggaaggaggaagacatcgaagtcccgtttccgtatctgatctaatgttcttacggtccaatcggtttggcctaggtcacttcaatatcacatcaaaacc

SEQ ID NO: 1238 - DNA, 485 bp, Arabidopsis thaliana
cattcactataaacatcattcaattagtattaacaccatcatgcaaaagctttcatgaacatatatatttattcattatctcctctaataataccaattaactcgaaataaaaaaatagacacttaccagacaaaagcagacccaaagaaaaaggagagagacacttgacacctccatcttcttccttgctctctctctctatctttctccaacaatcaaataatgggttcaacaggaaaccctaatccatggggtacaacatacgattcatacagagactgttctcaaggagtatgcagtgtctattgccctcaatggtgttacgtcatcttccctcctcctccttccttctatctcgacgacgaagacgactcttcctcctctgatttctctcctctcctcatcgctctcatcggaatcctcgctagcgccttcatcctcgtcagctactacactctcatctccaaatactgccaccgccgtc

SEQ ID NO: 1239 - DNA, 484 bp, Arabidopsis thaliana
ctcagcccgaattttgatgatatcttgataaactcggatgcgtttatgatcgcaagaggtgaccttggaatggagattccaattgagaagatattcttagctcagaaagtgatgatctacaagtgcaatttcatggggaagccagtggttacagcgactcagatgcttgagtctatgatcaaatccccacgaccaacaagagcagaagctactgatgttgcaaatgctgtcctcgatggcacagactgtgtcatgcttagtggtgaaacgcagctggagcatacccagagcttgctgttcgtacaatggccaagatatgtgtggaagcagagagcacacttgactatggagacatcttcaagaggataatgcttcacgctgcggtccctatgagcccgatggagtcacttgcttcatctgcggtcagaaccgctacttcctcaagagccactcttatgatggtcttgaccagaggaggcagcac

SEQ ID NO: 1240 - DNA, 607 bp, Arabidopsis thaliana
catcactcatactcgaccaatgtactcgatctataggccatcagtagagtaaaagttttgaatttttactctgccttcacgtttctcttttttcctgagaaccacaaacacaactaaaacaaatcaaaaatgacaagaaagtaaaaattatttacaaggataatcatgggacttcctcccaagtgagcttgtttaaagtctctagcttgactcctcacacttatcaagaagaaaatgaactatagagagggtctgcataatcctctctgatatcatcatcatactcagcgttctccctggagaggtctgcaacagaatactcaattttcctctcttcaaaatatgcttctttctcttcgggagggtaatctatctcttcagaccatcttgaagtgaacttctttctcgggatagtgtcaatcccgcctttaggttgagcttccttctgcaactgattcagcttacttctaagttcctcaacagtgtgggctagcttctctatagtttcatcttgcttatcagacctctttttaagttctttcactcttttagtctcatatccttcttctgagatcactctattatttccagaagtttttccatcttg

SEQ ID NO: 1241 - DNA, 771 bp, Arabidopsis thaliana
gaagctaggttaatgttttggagtcaagtatgacaagatgtcatgtgtatgattgagtataagaactagaaccgcaaccggttccaaaaaattaaagtagtgtttccttgttagaagatacaaaggcaaagacacatacagactttggctacaccatcaaaattttgagaagcaataagaagcttgattagtgttttggagtcaaatatgactagatgtcatgtgtatgattgagtataagaactagaaccgcaactggttcccaaaagctaaagtagtgtttccttgttagaagattcaaagccaaagaatcatacggactttggttacaacatcaaagctatgagaagcaataagaattttggtaagtgttttggagtcaaatatgactatccgttagtgtcgctctcacggaaaagtgactttgtcatccggtccgttgaacggttgcgcccagttacgatttgaatcgaccttcgtttgagaagccttgattgaggctgttgtatcttgacaaaaggttgaacctcccaaaatcgtgaagattttgctccaagtagcttcttcttcatcgtcatctgcctcggggtcgccctaacctctcttgggcccttcagggtttgccgcggggactgcctactcgagtttcgcacagcattcacctgctcaactctggctttctctacttctaaatattcgatggtcaaccccatccaatttcaccactaggaacttggccgcaatttaggccaagactatgacactggaagt

SEQ ID NO: 1242 - DNA, 764 bp, Arabidopsis thaliana
tcgatatcttctctttacccatttatgaagtggtccatggatgtcgtaggtcccatggaagcctccggtgggaagaagagactaaaaaacctgctggtcatcaccgactattctaccaaatggattgaggctaaagccttccaacaggtaaccgagaaacaagtcgaggacttcctatgggaaaatatcgtatgccgacatggcataccttatgagatcgtcaccgataacgggactaacctcacctcgggaaaaatcaaagcattttgcgacaagtggttgatccgtcttaccacatccaccccccagttaccacactaagtaacgaacaggcagaagccgccaacaaaactatacttagcaacatcaagaaaagacttaattccaaaaaatcaatgtggtccgacgtgctccacggagttctctgggcctaccgaaccacacctcgcaaatcaacgcaagaaacactgttctcccttacttatggtttagaagcagtaatccctgtcgaaaccatggtaccaagcgtgagaagaaccgcctgtcctgctaacccggacctgaagacgcaaatattacaggacaacatggacttcatcgatgaacgcagagatcaggcaattatccgagttcaaaactatcaacaagtgccgcccgctactataactccaatatcaaaattcggagattcgaagtgggagagcttgttttacgaaaagtgttcagcaacacgagagagctaaacgacggcgtttataagctcg

SEQ ID NO: 1243 - DNA, 521 bp, Arabidopsis thaliana columbia
gctagaggattcacaggataccatcaatgaaaaacgggatcaagctttattacgaacccaaaactatcagcaagcgacagccaatattagaacaccaagattaaaagtagacctttttcgtaggagactatgtcttgaaacgagttttcgacattacaagggaagaagaagcagacaagctcggaattaattgggaagggccttatatcgttacttaagtggtgcttataggttaaaggacttagagggcaggccagtccaacgaccttggaatgttattaacttaaagaaattttatgtttagtgacatgcatttttatttgagatgtacatgaactacgatgtggcttgatcccgcaaagggtacgcaggcatctcggaaacgagttcagctactaataaaaattcattttattgataagggggttcgaatgtgcaaacgtacaaagcaaaaaggagttcgactgtgcgaacgttcaaagcaggaaacaaatattattcaataaaaccaagaaaaacaa

SEQ ID NO: 1244 - DNA, 860 bp, Arabidopsis thaliana
taaggacaagctactggagctatggcttttgacaagaagatagctgaattacacaacaatattgattgttcttacaacgatctaaatatcaagtttgaagctctaaattacaaagtcaagtatgtggagagtcaatttgcatcaacctctgcgctgaagcatccgttgcaatttccagggaaatcagttcagaatcgtaaggactatgctactgctaatgttatcaccatccgccaagaagatgagtctccaccaagtcattagactcacaatactgaggacattatgattcaagaagggggggattcaactcaaattgctgaacctgccacccaacaattcatcaggactatagagcacacacctttgctgaatactcaccactttgaaaaaaattcaaaagagaaaaactcaagaaggatcagaatcaagaaatgattagtagagtcatgactcaataaacttacaagaagaaagtcctctaagaaaatcttgatgatctcggttcattcattttgtcatgctctctaagagcattgacattcaataggtgcctttgtgatttgggagcatatgttagccttatgcctctctctacagctaaaaggctagggatcatggaatacaagttctgcaatttagctttactcttagctgatggttctgttgcacatcctcatggtctaatagaaaatctgcatatcaagattggaaatgttaagatactacaaattttgtggtattggacacagatgaagaggaaaagatccctgatctaggcaggccttctgacttcactggagcagcatagatgtaggaatgaaaaattgatctaaccttgaaaatggtacaagatgaga

SEQ ID NO: 1245 - DNA, 625 bp, Arabidopsis thaliana
attactgtaaccactatagatacaaattcgaaagtagagagaacgaaacacatatttgtactttttaaatatcttattggattcagaagaagagaaaacattacagaagtggattcaatactagcaacaaatagaggtgcagaaataaataaataaaatcgtcaaaacaaagcaaattctttggagtaagtcatttaagtgatccaaacaaagcaaagtctaacacatactttatctacacacgtttccaacataacatacttctggcttcttcatcaaggtgttggtgaagatcttttatagcttgcttgggattataatatggaagaattaattgcttaacattacttcttttaagccctgacttctcgaccaaaaatccagctgaatggtatgttttttgctgcttctttggttctcccttgagccctctcttcaagtttgcggattctagcaggtaatccacagaggtagtcctgttcgaagccattaaaacaaagcgaaaagtcagagtagagtgtaaagaactcagattccaatttgatgaatctccaagagcacaagagaagttacaatgcaattatagatatgataggttctgtaagttccttaatgcaaggtgagg

SEQ ID NO: 1246 - DNA, 943 bp, Arabidopsis thaliana
ctaaaggctttcgcaagctgagtaacatcgtcaatatccgttttatccagcagttcataaatgcgctggtttacgccgctttggtccagaaactggttaaacgcgtcggcggttgtggcgaaaccattcggaacggaaacacccattccggaaagattagtaatcatttcacccagggaggcatttttgcccccaaccctgtctacatcattcatgccgagttggttataccaaagcaccagcggtgacgagccattgttggacatcgaacaatccttttgtgataaatgaacggtttgagaaacacatttctgcgcatttatctttgcatatttaaccggatgaaaaaaacggtgaatcgttcaagcaaatatatttttttactttttaagactgatcccagcgttgcgcaaatctgctctcttcgacaatttccacataaaccatcggtataaacgaaaccataaaaatgaaatgctgttttcataaaaaataaaattgaaggttcattttataaaccagacataacgttctacgcttctgtgcgtttttaatttatgctttcatagaattatgtctgcatcacgggaagaacaaaatggataatgctgttgatcgccacgttttttatatttctgatggtacggcaataactgcggaggtattaggacacgcagtaatgtcacaatttcccgtcactatcagcagcatcacgctgccgtttgtcgaaaatgagagccgtgcacgggcagtgaaggatcagattgacgcaatttatcaccagacaggcgtgcgccgctggtcttctactccatcgtgttgccggagattcgcgccatcatcttgcaaagtgaaggcttttgccaggatatcgttcaggcgctggttgcccgctacaacaagagatgaaactggatcaacgccgattgctcatcctttagag

SEQ ID NO: 1247 - DNA, 334 bp, Arabidopsis thaliana columbia
atgatccctaaaattagaagaacataataaacagcctagatggaactctgaccaaatcagggaatgagaaggagagagtttcacaagcttctttcattcctcaatgaatacaaaggaacacaacattcgaccataatctattcaagagatatcgaatactagaacacgaacctgatcaaggtcatccatatgggcatgaacatgatcttcacttccaagatcttcttggtcaggtacaaatgtcatatcatcctcctcctcacagtcctcctcaacaaacggagcaccgtacggctctccatttttaggtccggagccacgcttctgaaaaagc

SEQ ID NO: 1248 - DNA, 833 bp, Arabidopsis thaliana
atctaaaggagcatttaacatcttttcaagtaatcgcggtcgggtccactcgaaccgcatgaggaagatgccggaacttgtcagggccagctctcacctggttcacccagcttgaagaaggttcaatcgataacttcaagcagctctccaccgctttcattaagcagtacggatatttcatcaaaaacgaggtcacaaaagcccagctttggaatctctctcagtccgcggatgagcctcttcggacttatatcatcgcttttaaggaaataatggtgcagttacctggtctatctgactcggcagctcagtccgctctcaagaatggattgtggtatgagtcacgtttccgcgagtcattaactgtcaaccaaccataaacaattcaagatgctctccaaagtcttctcctccccctgttccgaaaaacccggccgaactccaaaagcccgcagcaggaactttctcggtagataaagaatcgccaaaggcttctccaaaagcttctccatctaaaccgcctttctctccgaagggcaaaaacggcttttccgagtaataaatggatcagagacccaaacgcttattgtgatattcacaaaatgaatggtcacgccaccaaggattgcaaagctctgggaagacttttggctgccaagtacgcatcaggggaaattcccgaagtcaatgtcacaacaatcgagcaggcacaagcagcatatgaagcgttggagtccgaaaaaacttcacccccgaacaagaagcagaagagtgaatccacttccgaaacctccaaaggccctaagagaatggtcaaagtcattatgggagga

SEQ ID NO: 1249 - DNA, 594 bp, Arabidopsis thaliana
tacgaatatctagcccacttgaccaaacttccgttaactccagattcgatgtcctcattactggaggaacatttaccggtgaggagatgaaggaggaggattccaaaaccatagatgtcacttttacttgtcatctccttgtgctctctcgtttctacgttacaaaacgaagaactagcattagaggaaaatagaaacacaaataaaatccatttaacatgtaacatgaaaacaaaaacattttaagacatccattttttctagattaattagtggtggacacgcaaacgggaaccaaagttaagatcatcaattagaagccggatccgaattttgtgcaattaaactgaatcaaccaaaattgtattgaaaatttgatcttttagcaatgtatatagaaaaggtacattgagttatactgaaaatctataatattacataacttcttaatatttttatacaaattatttatccaaatctcaatggaagcaggaaaaaaaaaatcaagatcaaactgaattaatttttggatcgattttagagtatatttccaaaacgtgaaaacgatttgtttttacatgggttgtaatattt

SEQ ID NO: 1250 - DNA, 526 bp, Arabidopsis thaliana columbia
aagaaaaacatattctaaacaactataaacattatgtttatattgaaaaacagaaattggatgttttctacgtttctttaagggaatcttgcaaaatctgccatattccactctatttctttcaatctctgtcatattctgaaactcctttcaaaatctgccacattttggtccacgtggaattcagtggatgaaattacccttaagatgggtcagcgctctgacgaaaatggtgacataacagcttttggctgatgtgatgatacaggacgaaaaatcatggtggaagcataaaggattaggggacagaatagtggagaacagctggtttctactgttgttattgggtatttaaaaatgacttgtttaaacaaattggttatctaaaattctgcgggggacaacgtaatatataatacattaggagacatgattacctgataccgggggacaacgtaatatataacgcattaggggacatgattacctgttagcagagaacaattggagcaagacttttgtttta

SEQ ID NO: 1251 - DNA, 555 bp, Arabidopsis thaliana
  unsure (1)..(555): unsure at all n locations
ggatttnnnnnnnnnnnnnnnnnnnnnnnttaaagttgtttagtacaaaaagtgaacttctgatgatctttccctgtgtttaacgcagccttctttcttttcctcttcacccttaatgtctttgcaatctcttaataaattcagtgccatcttctttattccagatattatttaggctgcgtttcctcttcttatccggctggcatcttcattcatttttacatctaacacccaatgaagactgtgctcgatcagccagtgcgctctgatagcatgtgcaaattctttagcatccatatcctttgatgaaatataatatcggatgcttacaccttctgctgatttatcttctttcttctgcctgaatgacaatgctacacaaagcttttttaatcccttccattcgaattcaaaatcacaaaagttcaggcgttacgttactgacaatatgcaaacgtgtttcttttcttccatgacttatctcctgcgtactaaacgaatcgcctttataattagaaaacacatttacaggaaatttttctcgaatgcatgatg

SEQ ID NO: 1252 - DNA, 706 bp, Arabidopsis thaliana
ttcttaaaagcatttttattgttgtatttccttttttcttgttggtaaaacatatcttcaaaaataaaataaataaaataaaacatcctatgaccctgtcacaacttcctgattctagcttcggacctcaagttgttgaagaattgacttaataaagattaggatggacttgtctacgttggctctgtatcaataacgcaaacctcagaaccaaaggtaaaaataaaacagtctaaagccaaatatagaggtaacaataaagtcatgttcaaatttagccaaaacaaatataagtaaatgtctctccaccattaatcttgagctcctcttaaggtctgtatatatacccaacctgatcctcttattgcaaactcaggctttgaggtttgagcttttactatagaataataagggtaataaacaaagacacccaaagatgggtctcaaggtctcctcttctctcctctgtctcaccatcttactcgctgtttcatccatggtatcagcggttaacataacccgagtgctcgagaaataccctgaattcagcaccatgaccgagcttcttgccaagaccgagctcacaccaattatcaacaaacgtcagaccatcgccgtgctggcccttaacaacgatgctatcggttccatctctggtagacccgcggaagaggtcaagaacattcttatgaaccagtgtggttct

SEQ ID NO: 1253 - DNA, 444 bp, Arabidopsis thaliana
atgccttctctagaacgaaatctatgtgtcattaacgctacaggaaattacatttgacatatctatggttgtgttcactaatttatcttaggaattcagtgatgtaatctgaaatagccttattcaattttgataaagtagattgttctctaacgcattgaaaaataatgatttatagtatgctcttaactgttttaagatgctgatttaagaaaacataagaggtgctggttatagtggttaactgcactataaccagcaaatttaaccaaatgattgtaatgcttagccattatcttctgaattatcgtttaagagttcaatatatgcctgcgctttactcttaacactatcatcctcacaattgttaataatgtgatagaaacattgcattgcgttatcgatatttttagccccaatctgacattgacccatacgataaat

SEQ ID NO: 1254 - DNA, 514 bp, Arabidopsis thaliana
gtttaagagaatcactattttaatcactgagtggtagtcatatagtttgcatgcagtacaaatttggactttcttgaatttgatgattaccctagggacttggtcaagctggttttctctgttggtgacatcaagaacaatgacaatgacggcatcggaatcaccgcggttgtaccaccactgtgaaactccggcaagcgaacaaacacatcccctcgccggaaattctccaacttctggtgcatgtcctcaaaacgtcgacccgggtctcctcctcctcctcttcctgatgatccttcaacttctgcaaaagtctcaggacaaccagaagcaatcgtccccataactccttctcctgaaaacaattaaaataaaagaccactttttttagattttctataggttgcgagtttttaattaggtcttgatcaaaaagcgtatttatttattttcttaccttggacaacgtaagcaagggcaggtgggctaaagaaagcgggcaagaaaatggaat

SEQ ID NO: 1255 - DNA, 1095 bp, Arabidopsis thaliana
tcggaaagtattgtcgaacctcgtccttcctagactgctcagtcactgctgcatcttctcacggttggagaggcatttgtacgggcaaagatctaatcaaatctcagctggggaaagtgattggatcgggcttggatactttggtttggaacgaaccgtggctatctctttcaacctcctcaactccaatgggtcctgcacttgaacaattcaaatcaatgacagtagctcagcttatttgtcaaaccacaaagtcttgggatagagagaaagtaagattgttacttcccagctatgaaaaggagatcttccttctaagacccagcaaatttggagccagagatcgatatgtttggttacctaataagactagagactactcggtcaagacagggtatcacgcagctgatgctctttctcaccaaggtactcaactagaagaacctccattggactttaactgaaataaggagatatggaccaaacactgccccccaaaattgaaaattttcctctggaaagccatgaagaatgctctcccagttggtgaaaacctgaggctgcgtggtataaatccgcttgctctctgtcctcactgcgacgaggctgaatcaattctccatctgcttttcctctgcccatttgcttctaaggtctgggatctttctcctttcaaaaccacgcttcaagcttcccggatcacaagtatgaaacagggtttggaagtctcaaagctcctcgttacccttccaccaatcggaattggacaaggacaacttcccatttggatcttgtggaacctatggaattgcaggaacaagctaatttttgagcaaaaacacatctcgagtatggatctcatatcccaatctatgagtcactccacagaatggataggagctcagatccaagcatcgaaatctaagatcgtgactccaggtctatctccctcagagatcgatttagacacgattcaatgttctacagatgcttcgtggagagaagagaccttacaggctggtttcggttgggtttttgtggaccattcgaaccatttggaatcccatcataaagctgcagcgatgaacatcagat

SEQ ID NO: 1256 - DNA, 988 bp, Arabidopsis thaliana
tccatttggcatgtggcgaaatcaatcgttgtggcctgtgatcctgactccatataatttaccacccggtatgtgcatgaatacagagtacttgtttcttacaattctgaattctgggccaaatcacccgcgaggtagtctggatgtcttcctccgacctcttattgaggagctaaaagagttatggtctatgggaatcgatgcatatgatgtgtctttgaatcataattttaatctaagcagtgctgctgtggacaataagcgacttttcggcgtacagcatgttatccggatggacaacccacggtaaattgtcttgtccaatttgcatggaaagtactaagtctttttatctacctaatggaaggaagacgtgctggtttgattgtcaccgaagattttttcctaatggtcatccattacggaagaacaaaaaagacttctaaaaaggaaaagaagcttctaccgagtatccacctgagtctttaaccggtgagcaaatttatcacgagcggttgtgtggtgtaaatccaccaagaaccaaggatgttggtggcaacggtcacaaaaagaagatgcctggctatgggaaggaacataactagcacaaggaaagcatattatgggagcttccatattggaaagacctgaatctccgacattgtattgatgtgatgcatacaaagaagaattttttggataacataatgaatactcttatgagcgtgaagggtaaatcaaaggacaacatcatgtcaagaatggatatagaacgatttagttctcggcctgacttacatattgatagtaagggaaaagctccatttccttcttatacattgacaaatgaagccaaaaagagtttattgcaatatgtgaacatgcaatcagatttccagatggttatttgtctgatttgggtagttgtgttgatatggagaatgggaagttgtcaggtatgaagagtcatgattgccacatttttatg

SEQ ID NO: 1257 - DNA, 584 bp, Arabidopsis thaliana
gggtaccgagctcgaattacgttcagtcaaaacaatactccattcaccgcgtcttcttgcatatgtgcatttgttcaagtgtttatctacttgttgaagcatcttcaccaccgttggatctaatggttcctccactgaatataaatgtatccctgcattatccacataacctaatctgcaaaccaagtaaagaccaaactgattatagatatcttttctcgaccaacattctataataaagattttgatgttacctaagaagcaatgaggctaaacggtgatgagcccttgcaaagtttggatctaatttgatagctatttcacattcattcacagcttcaccaatctgacccaaactcgacaatgcagctgcacggttgctatggtaagtagcattactcggtgatagctctattgctcgatcatacaacttcaaagcctcagcgaaacaacctttcctgaacatttcgttaccaaacctctttacttcttcaggattagaaccatatatagctatcttccacgatgtatatgcatcaggaccaccggtagagttattactgagagttaaaggcaaaacagag

SEQ ID NO: 1258 - DNA, 666 bp, Arabidopsis thaliana
caatccctaaacaaaacccacagaatctcaaaccagttagcaccccttggtttcaccccacggtttgtttaacgaacaacagccaaccaccaaattactattataccctcatcaccatttgactatttattagtccacactctatagtagttgttacattcaaagaactccaaagtaaattaaagtcttctctacttcaccataaaaaatgcttgcgcacaagtctcttctctcctttaccacccaatgggctacactaatgccatctccgtctacttttctcgcctctcgcccccgtggaccggccaagatctcggccgtggcagcaccagtgaggccggctctaaaacaccaaaacaaaatccacaccatgccaccggagaaaatggagatattcaaatctttagatggatgggccaaggatcaaatcttgcctcttctcaaacccgttgaccaatgttggcaaccgcttctttcttacccgacccggccttacccttctccgagtttccgaccaggtacgttatatcatcatgaatcttgttattctcttatttatgaagaagtagaagttattcaaagtttatactttgtcatgaaatgtataaacagaatactatactatataatatgacattaaccaagactaccaataatgaaagatgt

SEQ ID NO: 1259 - DNA, 574 bp, Arabidopsis thaliana
cctgcaattccataagttccacataatccaaatggagagatgaccttgtccaattccgattggtgggagagtaacgagaagcttagatacttccagtcccatcttcaagcttgtgattcaagaaaccgttattggggtcctgaaaggtgcgttctcccaaacctgagtagcgaatggacagaagaaaaacggatggaggcttgattcagcttcaccacagtggggacagagtgaaagcgggttaataccatgcatcctcaggttttcgccaacaggaagagcattcttcatagcttaccagaggagaaatttcatttttggggggcaaagtttggtccaaatctccttattccagttaaaatccaatggagggtctagcagttgagagcctagttgagataacgtcgcagctgcgtggtatccagtcttggttgagtaaacaccagacttattgggtagccagcataacgatctcgagctccaaatttactaggtctgagaagaaagatctccttttcagaaatgggaagtaacaccttacttctctctatccaagtttttgtggtttgatcat

SEQ ID NO: 1260 - DNA, 405 bp, Arabidopsis thaliana
tgttgtatcgagactaataccaatccaaaccctttgcaggaataaaatgtgaccaattaaccaaccaacgaaactacttgttacaaataacatcttgttgttgtatcgaaacatataaatgttgactaatctagctaacattaaacttatttttgccgtcttagatttattatttattgcaaattatgaaaactgttacatagacgattgtactacgggcaattccttcctcccttattagatccacgacagacgacaccttcttctctttctccatgctcttgatggacaccttcaatgatcttatctgtgtagaatcctggtgaaccgctataattgtacatcgttggagattcctgcacacttgtctccattaatctgcaaatttgctaataaaccgcagta

SEQ ID NO: 1261 - DNA, 783 bp, Arabidopsis thaliana columbia
tgtgaaatcatttttctgaaaaattttcaaatttttatggtttttttctatgcctaagatgatgcaaaatttgaaataagaaaagagaacacaatgttaaacatgtcttgaatcctcccccaaacttaaattatacagtcctttgtgtaataaaaatctgagaaagaattcaagaccaaaacacaaaacacacaaagaaaataaaaagatgatgttatatacaatggttgaggtagtgttacctcaccggtcaggtgaagtagatggaaacgtaatcgtccatactctcttgagtataagcaggggctgaagttgaggcgggaggattttgctcgttctgtccggtcgagcgtatggaagctcgtctctgcctacttcttggctctctcaactcggaggtcacttcccgaggctcaaaagataaagctcggggttgatcgatcctttcagctctacttgtagctgagctcgtggaaccgcttcttcttacttcgggggtgggagagaatggcctaggcttgctctggaagtccttgatttgagcagccatactcttcaacgacttcttcattgttctcatcttcttcttgaaacccttcattgttttgctgtgaaggttcccaagctcttcaatcacactgagcttcttatgaacttcagctatctcatctcctccttggttaacaccttcttcataatgagcttgctcttgttcgctggtcccttgttccggttgatcgttatgttgctcaaactcgatttgctgctcatagtcagcttgag

SEQ ID NO: 1262 - DNA, 733 bp, Arabidopsis thaliana columbia
gtctttaatgcgacggttgccattttccttctcgtgaaacaggaaaagcttcacgctttgaggcaataattgccttttcttgattcccaaaaatggtttaaaccagtcggacaagccacagttattaaatttctgccaccaaattttccaagtatgatttcagaaatttacttgataaacactacaagaatggaaaacaaaggagcctccaccgtttgtcctctcgatcctggcagtccactgttctttcctcatgccgctttccacttccccccgaaggataagaaagaggcgtacgacttcatcgacaaggtagggacttacccttccttccttcgttaaaattcttcttttttcccttatgctaaacgatttccgtgctaggtagtcgacaaacatcaccgcttgtgcgatgagaggcagtgtctaggcctcaaaaggcaaacgctcgaggcctgcatcgctcgtgtagaaaggaaggtgagggccatggagaatgatcattttcaatgggagtggagaaactttgactgcgtacgtaggatcccgactatgctctggatgtatctatgctcgcgatcaagtcctcggacccgtgaacgctcctgtcgaggtgatcccatccgacagcgaagaagatgacgacgaggatgaggacagcaaccctggaagcgtgtgaaaaatgacaagaaaaacgaagcgtccaattcgaaccttgagccggcgatgaagg

SEQ ID NO: 1263 - DNA, 663 bp, Arabidopsis thaliana
atggattaagttgggaatggatgtccttaagtttgttggttggtcttctggattttccattagtcggattgatttgaatcttcaatacttaagcaatccaagcaataaattcgaaagagagatcataattacagagaaaagttttgactcaatgaaacgactcaaaaataagaaaaagaagagtaagaataagactcaaaaagaaaaacgtagttaataactgcttcccccagacttaaacgtctctgtcctcagtggcattcaaatccagagtaagcaagaaaaaaaaaagaaaaaaaaaaaaaagaaaaaaaaaacatatcagtgggttaccttccactaagcgcttgtttaaagtcaatagcttgacttggttggagttcaggacttggatggaggaaaattggacttatgctgcaatctcgccttcaaaggcgatgtgtaaacatatcggctatgtgcagcatctggtgtcgatcgacactaattgtgcagaaccatctgtctgtgaaacgcgatggtgtcgatcgacaggtgtgtggtgtcaatcgacactgattctatgcaactctcatctgcacgtgaattgacactgccatgattttcctacaaacttgtctcaaccaagtagatactttcttcaagtagaaaatcattgatagg

SEQ ID NO: 1264 - DNA, 610 bp, Arabidopsis thaliana columbia
gacaattttctcaaagacaaatctgaaacttgcaaaatgacaatagtaactctgataaatcaaggtatatatgtagcttagtattatgatgtttcgtggatacttgattatacgatttgattcatatggttctaatactggtttagaggagttgaaataccgtgggaatgaaccatttatacttttaggatttgtcaaagataatatgtttttgttttggttagaacatgactattcaaatcggtttctaagcatctgaaagaatctcgggtaggctaatgtatttgattgtttgtgcaatttttttattgagacgagtgctactagatttggccaaaaagggtcatccccatgcccgagaagacgattagaggaggcgtcaaaacgttactaataaacataaggaagaccaacaatcaaatacattagcctaccatgagaatgtatttaatctatagcgggagaagatagccgcgaagaccatgaggaatcaagtcctctattgaagggaaacgagaacgacaacaagatctgctcggagggagatgccacgcggatggagtgcatgcgagcatggtagcgtatttaattgttgtgaaacgaatgatga

SEQ ID NO: 1265 - DNA, 531 bp, Arabidopsis thaliana
atctaaaacacatgatctcaacatatcctctagtgtttgtatagtcctttcagactgtccatctgtctgaggatgataaggcagtactaaaatgtagttttgtacccaatacctgatgtaagctactccaaaaatgtgaagtaaactttggatcacgatctgagacaatgatactcgggacaccatgcaacctcacaatttcttccacgtagatcttttctagtcgggctgaagagaatgtcttctttactggtagaaaatgggctgacttggtgagtcgatatactattacccaaatcgagtcatttcccttctgcgaccttggtattcctgtgacaaaatccatagaaactttctcccatttccactctgggataggtaatggttgtagtttaccactaggcttctgatgctcaatttctacctgctggcatacaaaatatcacccttcataccattccaatgataaaaaggtttaagtgtttgatacatcttaggcacacacaatctacctttaaaagataacactgc

SEQ ID NO: 1266 - DNA, 543 bp, Arabidopsis thaliana columbia
tctggatatgtcacttattattcatgtgagattcattacttctcctcctcgagaggatgaaacttcaagttcatccatctcgtattgaattccactctagaatcaaaattttaggttaggtactttatatctcatcatattaactttgagatttggggaactatgccccgtctgatcgtatggtttcgcatggttttgcactttcaatccaagcttcttgaccatagtttcacttgccacataagtacaactccctccatcaatgatgaggttgcaaactttcccgtgcacatgacaacgcgtgtgaaacaagttttctgtctatttttgctcatcggtctttgtttggacactcaaagttctcctagctaccaacaactcaccctgagccggcagctcctcattttctttcaatgaagaaggtgaatctggaatttgctcctcgggctctatttctccattatccaagagaatcatgactctcttatctggacatcattagcataatgtccttcccttgacatttgtacacctaacatcacg

SEQ ID NO: 1267 - DNA, 537 bp, Arabidopsis thaliana
ctcctttcatgtcctccttatgaacacgtacgtgggctcgatttacccaacccaatagtgaattggctgctttcttattgtactaaagtttcgttttcctgacattgttgtttgttttgatgcagcaaaaaaggctttctcttctgtttgtgtctgctgttcttgaaggtgcttctgttggccccttgatcaaagtggcaattgatgttgacccaaggtgtgttatggttatgcaatttgattcttgttgttcaatgttaattttctgttagactattctaggagctgacctttatatctttcttttggttctccagcatccttatcactgcatttgttggaactgcgatacggtttgtctgtttctcagcagcagcaatgttagcaagacgcagggagtatctctaccttggaggactgctttcatctggcttgtctatgctaatgtggctccagtttgcctcttcaatctttggtggctctgcatctatctttaagtttgaggtaaccgaatgccctgttttagaatgactgttc

SEQ ID NO: 1268 - DNA, 461 bp, Arabidopsis thaliana columbia
tattcagtaaaaaatcagtatcgataatatagtaaaataataaccttcacgcattccttcttcttctataaatacacacatttgcctccacttactctcgttcaaacaattcttcgtcctattaaatacaaaaaataaaaatccttaaaaatatatccttatcttcaaccaagaatgggagaggtccaagaaggtcccaaagttgaacaagagaagaagccggctgccaccgtagtcccagttgagactactgacggcaagccaaagagcggcggaggagattccgcggcagcagcagcaccaccggtcgccgcggttgtctctgcctttgtttacaaagtggatatgcactgtgaaggctgcgctaagaagataaagcgaatggttaagcactttgatggagtgaaagatgtgacggcagatactggtggaaataagcttttggtggtcggaaagattga

SEQ ID NO: 1269 - DNA, 915 bp, Arabidopsis thaliana
aaatgttcagtttggcggtggaataccaatacgtcacagctgagttatgacagaagattttgtggtttgatcgagttatgagaaaccaaatgttattatgagatttcaaactagccaaaaaattgttggctctattagtgtcaagatctataatatcaaaacataaaataaagacacaatgcactaagtgtcgattgaccaactatgttgatcaaacttctaagaatgatgttgttgggtatgatgttggataaagtgtgatgttggataaagtatatagaatatgagctagtttcatgattccactagttagaaattgattatgatatgtcaattacttgattgtaccaactgatggcttaaggaaagcacttttagggtttggccgagttataacagttatgtggcttagttatgcttacgtcacgactgagttatgtcaaaatacagagaaaaagtgtctctgttattgaccagatacgacgtcggttgtgaaagagtctccattagtgaccacataagacgtcattgtgacataaacgaaagatccccacttataaatctccaaaatcaaaacctaagttagaaaaatccaatttctggtttcagatctggagcttcattctttcttatttttcttctctgaactcccaagctatagctaaagaaatgagtagcaattctgagaactcgatttcgagtacgcaatccgtaagccgttggggacgtgggttaccatcaaagtgtcatcatggattagacgtggtcatctatacatcgacgtcagcaaagaaccctggaagaccatacttccgttgtcatacgcgtaaagatgtaagtataattgattttgggttttattggtttcgttgttaactggttagtgattgaaaatgcaggaccatttgtttaaat

SEQ ID NO: 1270 - DNA, 582 bp, Arabidopsis thaliana columbia
gttccaggaaaaaaaaaaatagttgaaagaatttgtttcttacattttcgtcaaaaaaatattgatcagatctgatatctctgtataccactgatatgtcatcacacaatttttagaaaaccaaatttaccactaatattgattattaccaaactcaccattgtaattagtgttttttttcgggtatggattcaccaaataactcttgcaagttgtaactatactttagcgccgaaattagaagaaagaaaacaaaagtcacgacatgagatttgtaatgggaaacccaaatattgcactagagacaactcccattgttagcttcgatgcaatcgtaaacattctccagcccttactcggagtcgagttttgactcgccccagccattggtacctgacccggattcatattatacccgttcatgtaattgaaattattgtaattatagggatgataattaaaataaggttgttgttgacccatcggcccatacgcatacgggtaccaaaatgtggttgttgccactgcgtggcggtgacggttgccaccttgttgcttgagcctctgctcttagtacagacg

SEQ ID NO: 1271 - DNA, 747 bp, Arabidopsis thaliana columbia
taaccgtatattcagcggttaaggttaaggttaaaaaaaattttataaccataaccggtggttaataaaccgtaaccgtaaccgtggtcatgcctaaccataatcatggcgtcataatccgtgaaatcaatgaagatgaacctatggagccagaacatgaaggaaactaagccaatgataaccgacaagagaatgctccaggagaaaatgccgttgcaaatgagtatgaaacggatgcactttcagacattgatccaacccatgatgccttggtggactttggaagctctgacatgtctagtggtgaaaaacaaaatggtgaaacatatgatgatccaatgggtgctgcaaccagaagaggtacttctgcagagtctcatatcatttatcctttggccttaatggaatctgcaggagtcatcaaccctgatacatgcactgcatctgatcggggaaaacgaaagagagaggacactctggaaaatgcagaaggcgacggattgcacaagatcaccgtccgtgaagcgggagaaggtagcggctccaagataagtgagcctaacttggtgggaggcgcggtgggcccagaaccaccacttccttcatgaggacaacctgctggaactgtcaagggcttggcaatgaccttacagttcgacgcccaaaggagatttgtcggaagaatctcctggacataatttgcctatccgaaacaaaacaacaagatgatcgcattagggatgtggg

SEQ ID NO: 1272 - DNA, 527 bp, Arabidopsis thaliana
gcatctagacaagtacataaacatgaggtcaactatcctacacatgacattgagttggctgcaataatttttgcacttaagttgtggcgtcaatatctatatggtgaaaatgtgcaaatattcacagatcacaagagtctaaagtatttgttctcgcagaaggagttgaatcttagacaaagaagatggattgaattgctaagtgactatgactgtgaaattctatatcatccaggaaaggctaatgtggttgctgatgctttgagtagaaagcaagtaactgtggcatctcttagatcgcaatggaacttaatagagcagatgagtcagtttcacatttctatccgagaggaaaaatttggatttcttgcaacattgggtattgagtcgaatttactagcacgtattcgggatgctcagaggcaagatggtaaattcggtcctgtttgtgaaaacccgaggattttcgtcagctaggatcaatcttagagacgacgcagtgttatcttttaaaggtagattgtgtg

SEQ ID NO: 1273 - DNA, 840 bp, Arabidopsis thaliana
ctgtgttctaatcacaggtaaaaccgagaaacccgaaccagagtttctttgtcatctcttaaacatttcttgttgttacagatgagagtgttgtggctttggcgaatcggtgcattcacttgaggtcattggggttatactactgcagaaacattacagacagagcaatgtactctttagctcagagcggagtcaagaacaaacacgagatgtggcgagcggtaaagaaaggaaaattcgatgaagaaggactaagaagccttaacattagtcaatgcacttacctaacaccttcagctgttcaagctgtctgtgatacattccctgctctccacacttgttcaggcagacattcacttgtcatgagcggttgtttgaatctacaatctgttcattgtgcttgtatccttcaagctcaccgcactcacaccgtttaccctcacccggcgcattgaaacggtgtgtgagccagagggtctactactctctagtatgtgtgtacatacatataaccatatggtgttaataaagcttctttgagttccttctttgtctttgatgcaatcttaagattttaacattacctagtcttgaaaatcttgtaatgaatcgcgaaatacttatttcttctaacaatttgtttaagttgcatccatcaatcaataatcatatcattaaagaatgaataacacagaaataagatgatgctgctttgcatgtgagactaaaccggaaccggaaatggttaaaaccacatcggaaaatgattttgaagtacaatagtagttacaggttttatctttcaagtagttttcccaaagctatggaagtagattgtcg

SEQ ID NO: 1274 - DNA, 553 bp, Arabidopsis thaliana
cgttgagagtccaggtttaaggcaaggcttgtagccaaaggttattctcagaaagaagggatagattaccaagaaatcttttccccagtagtgaaacatgtctccattagtttttttctaagtatggtaacccattttgacatggagcttcagcagatggatgtaaaaaggcattttttcatggttttttggatgaaacaatatacatggagcaacctgagggctatgttgatgagaagaatccagaaaaggtgtgtctgctacaaagatctctgtacggcttgaagcagtcaccaaggcaatggaacaccaggttcaaagagttcatagaggctcatgattataagcggacgtcatatgaccgttgtgtgtattttaagaagtctgtaggtggtgattatgtgttcctattactatacgtagacgacatcctgatagcctcaaagaacatgaagcaggtaagtgatctcaaagagttgctgggatctgaatttgaaatgaaggatctcggtgaggcaaagaaaattttaggtatggagataaacagagacag

SEQ ID NO: 1275 - DNA, 539 bp, Arabidopsis thaliana columbia
tgtatatgcgtatcattttattagcgttgttcgctgttatcagggaggtccattggcagtgaggtttcgttaagtggtgataatgaagagttgaatagtccttcatgctctggtgggtcagatccagagaaaattgaatctccttgtggatcaggagttggttctggtgagcctggttttgtagataattgcagttctagttgcaatagtttcccttttatctttgatgcaaagtctgttgcttggggtagttgtggggatacttacaatcggcacaaagatcctttgtttagggaattgttgtttgtatctggaaatcatggtgttacggtccacgctttttgctgtacaaaaggtttaagtgacaaagccaaagcgaaaccaaatggtgagctgaggcatggggagtgggttgagtggggacttctaggcttagtcagaaatcagaaccggaaagagtctcttcttctgatggctcaaagcagtggatgcaatatgttttgattgatttggaactactgtaattgatggtacagaca

SEQ ID NO: 1276 - DNA, 509 bp, Arabidopsis thaliana columbia
tcaagatttggtaacagagtagtatcaaactaggatctaaatgtatattatagattttaacataaaattcttacatgcacagtcacagacacacatcacatcacacatatgtttttcattttcccggttgattacattaccttcattgtgttttgtagcaatatttaggtcacttctgtacgaggcttgtggtcggatcgtgaaccctgtagatggttcggttggtttgatgtggtcagggaactgggctcagtgccaagcagctgttgacgccgtgctcaacggcttacccataactcacacacctcttccaagtgcatccgcgtcgcaccagatcattcctccccacaggacttacgatatacgccacgtggctaaagatccaacaaccggcggcgacagttcggagaatctggccacacgtgtaaacgctaacaagagcaagacgcaaactggccgattcaaacgtgtatccgtgaaccaactaggtgaatgtagtcatgacatgt

SEQ ID NO: 1277 - DNA, 534 bp, Arabidopsis thaliana
aaccgcaaccgcaaccgcaaatcgctaacataatatcgaagactcgaactaacggttttgttttcagcttgtttgcttctttggctcttgcaccaaaagggactctttgatccatgctacgactggtgggaagatcatttcgatttagaccatcatcggagattattaccctccagagcagacgttgttaaccgccatcatcaccatcacaagcatcgtcatcaccataatcaccatcgtaggacacaccagagacacaaacatcatcatggtcaagacgacgacgtattgcagaagatgatgcttgaacgtgaccacagcgactctcactactaccaccaacttcatcgagtccataaagatagcaagcagaagcagcgtaggcgagccaagcacgggatcgtcctgccacgtgatgtgcacgtggaaagacagaggaaacaaagactacgtgagagttaaagagttaaaacttaaaagtgataatgtcagatttgtatatatgtgtattaacggaacccaactggattgtga

SEQ ID NO: 1278 - DNA, 475 bp, Arabidopsis thaliana
gtctctcgttattgatggcaagtgtttaatgtatgcattagacccgagtttacgcgtgatgctgctcagcttgagcttgaactgtacttcagttgtatgctgtcgtgtatctccgttacagaaagcacaggtaatttcaaattaagttcgtctagccaataccttttaaaggggtctatatattattgttctagggcttttgttgccaaaattggtaatcacatattttcttgggtttaaattatggcactcatattcaatgagtaacttggttctatgggttctttgaaccggcttcttaattttaatatatgtgatctaatttcaggtgacaagcttggtgagaaaaggggcacaaaagattactcttagtattggtgatggggccaatgatgttagcatgattcaagctgctcatgttggtataggaataagtgggatggagggaatgcaagctgtgatggctagtgatttt

SEQ ID NO: 1279 - DNA, 752 bp, Arabidopsis thaliana
acgtgttgggccttcattaaacataggagaaagtactgggaacgatttgaaaacatacaaaacttcaataagttacgtcttccaattgccgtcaggtattggtgtcgctcgacaccaggggtggtgtcgttcgacacctacgcgctttttagtttccggatttcttcaccagcatgaattctatgttttcctccagaatgctccattatctccaaatgaatcccaaacatgtaaagacctgaacaggactagaaaagactctaaaaaagaaatagacttaaaacatatacttaaatcatagctaaaagcaataaaaataaggttatatcaatgtgtttttagacaactaagctgtgtgattccggatgatgatgggctagcgataatatctgataggcataaatctatagggaaagctataagaaatgtgtatcctctagatagccgtggtatttgcacataccacttacataagaatattttgcttagattcaaggggagtgaatcatttgggttattgaagaaggcagctacagcttttcaactgtcagactttactgttttgtttcacagatcatgaactaaatctagagctacatagctttttggtacgaactgatttaagtatgtggactaggctacactttccgggcgatagatacaactcacaacaagccacaatgctgagacaataacaaagtcttaggcgtacagatactaccctatgttgcatgcttgatgagtgaggatga

SEQ ID NO: 1280 - DNA, 497 bp, Arabidopsis thaliana
gtctccatccagctggcccgcgagcgctgcgcgatctgctgagcatccagaaccgccagatcagcgtggaaaacatccagaagaccgtggccgactactacaagatcaaggtcgcggacatgtacagcaagaagcgcccggcgtcgattgcccggccgcgccagatcgccatgtacctggccaaggagctgacgcaaaagagcctgccggaaatcggcgagctgtttggcggccgcgaccacaccacggtgctgcacgcggtcgcaagattgccgccgagcgccacgagctgaccgagctgaaccagcaattgcatgtgctggagcaaacgctcaaaggctgatggaattttcctcgcccagcccgggcctaccgggcaaaatgagggggtttgggtggccgcgagagggaggctgcccatccacaagagacccgcatcctgaaacacagaggttgacatgatcgtcctgaaaccacacaagacaaagttctcgcgg

SEQ ID NO: 1281 - DNA, 756 bp, Arabidopsis thaliana
  unsure (1)..(756): unsure at all n locations
gatgtctttttttttttactaaagcgtaaatcatttagatgcatttagataaaatatttcaatgatgttattaaaatattttcaattggattaaactacatgagtttgatgaatatgcgatggagaaatatgggagatcagatcatccctttttatttctcatcatattaataatctcataagatataaaatttactctctcattgatttaattgtgtccgtataagttgtttgcgatttggacttattgacgaagtacgaactcataatgtcgacaagtaaaaatcaaataatggacaatggtcgaggacataaatgaacacatgggtagtaagcctactatagattttcgtcgtttttttctagggcttctaaagtgtgtcctagaatacaaataactagattttaacccgcggtatactgcggagacaatttattttttaaagttagtatatataaaaatttgtaaattgtatctatctataaaatatttttattttatagttcaccactgttattaaataacgtcctgccaaacccgtcccgcaaaacccgtcctgcaaaaaatccatttattttattaatattgatcttatttatgaattattgtctgaatattttagtcgatgcgggatgttgaacccacacatttttcgccaattggtcaatatatgttcgtttttaaaatttcgcatcacntnatatgacggaaatgtttttgagatttttttaaactatatattgtataaagatgtt

SEQ ID NO: 1282 - DNA, 534 bp, Arabidopsis thaliana
cgactctagacctcgatggttcacgggagtatatatgtgaagcttcaagccaatgtcgaaagtaaactgaagagccatgagctgttggaaccttttgccaccaaagagttcatttggtttgcagtatgttctctcgtcttgcactctaagacaacatgcttttttgttgcttcctttatcagcttaaaattgataaactgttcactgtaggcctctgctttgttggccttacccatcttcatagtgtacaaattcctctgttcgctcttctggcaagtttcttataacgaatcattatttataagatttaaattagttttcagtatattgctctgtagttcttaaagatgctccatccttgattccaccaaatgacctttcgtttgtttgttgtatgtttattgcagcacaaagacgaagaagcctatccgacagtctcatcaacatactcgccgtaacgcagaaggggtcattctgacaaatgaagtcacatgctttgtgttgttacacttcctcgtgctataaatattagag

SEQ ID NO: 1283 - DNA, 606 bp, Arabidopsis thaliana
cttgaaatattcgggaatccaaaagaaaaagacaaacatatgcatgtcccaatattgttttaaacatgatgattaattccaaaagcatgatcttaattaagagccgattcattaattagtagggagggatagtgagacggatgacaccatgtttggcgattatcttgatccgacgccagtcatagcctctagggacaatggcgaccttgcatacgtaactacgcccacttgagtcgtgcatagtcgcaggagctcgtcccatgatggtgacgacaccattgccgtccactgccacaatgaagccgtcgctagggacaccaggcatgtcaattcgcagatacagaccaccgtttgagagctgctttgtctcgtaagcactcgtggatccctccaacactgacgggtgtggtcgtatggtcggaccagtgaacgccggatctgtccaacgttcaaacacaaaatataaatcagtaagcatctcttaagtcttttgtttgcgcatagtaattgatacatataactacaattactatatttggaaattatgtcacaatggagagattaagttcataccaaaagggtcagtgcccgacaacctacgatgat

SEQ ID NO: 1284 - DNA, 540 bp, Arabidopsis thaliana
tctccttctcactcgaccataactcgacctctccctcctcaccgttcaagcctcctccaatccactcgaccgctcatctctccacgcctctcaatcggtcaaccggagttcacctactctcatcacctccatttactcgaccacatcgttgccgtctctcattcgctttctctcgaccgcaaaaccgcaaaactcgaagccacaatttcaatgtactcgactagtttactcgactggtatactcggccggtttagtatttgcgcttattgaaactaacatattgacgtttagtttgagttgtatttttttcaggaaatcaatatgagtcactacagtggcgagtcctctatggatgcggatctcaacgtcgaggaagctgagtcttggtcaactagaccggagagagagcaacaagcttatgagagtctcagagctgacacccaacgctcagtagctcgacgcaatgccaggagggctgagattgctagacgaaaccgtgcaatgaccagtagatatgaattgcttgacgaagatattga

SEQ ID NO: 1285 - DNA, 440 bp, Arabidopsis thaliana
ccatgaattcattgaacccggtgttcccttgccttggtgactgtttcaagccatagaaagacctatgtaatagacacaccttttctggattcttttcatcaatataaccctcaggttgttccatgtatatagtttcatccatgtatattgtttcatgaaggaacgccgtttttacatccatcagatgaagctccatgtcaaaatgggttaccatacttagaaaaaatttgatggagacatgtttcactactggggaaaatatttcttggtaatctatcccttccttcttagaataaccttttgctacaagccttgccttaaacctgggaccctcaactcctgctatcccagcatatctcttgaacagccatttacaaccaataggatactgtactttaaatctgtccaccagtatcaaggttttgtttttcatgagagat

SEQ ID NO: 1286 - DNA, 848 bp, Arabidopsis thaliana
cagtcacagagtagtcccacggaggttccatacttgcggttagaagcatcgtgtttgctgctcttagctgcgtctccggtcacagtaacagcttttttggatggttcgagaagggtaagtgggtaaccacagtctctttcttgactccaggcaaatcaagcctcacgaatagatcatgggtatcttccagatacttgaactcagcaaacccttttggtccgttcgcttggtacggattgttcatagcgtaaaaaccatctacacatatacaccaaaaaaccagaaatgtatgcatatcagtggagaaaaatctaagatttttaagaaatggtgaagtaattgtaaactttgggtttaaagatcgttactatgagcgtgaggcgccggagctatgggcgtgataggcgtgatcattcgggggctggtagggatgttgattctgactcggcggcggataggcatgatgatgattcggcggccgaagatttcggtttgggtttttttcttttgctttttgagatctctcaatctctctctgtctctctctggttctagggtttttagatgtttaatgaagcgaagctttcataaagtaaatgaaggtgagagtatggcggtgtcaggtgagaaacgacaaacagtctctagactgacacgtgttctattttcatttgctgacattttctagtgcatcattttttattttattttcattttaaccatgcattagacgaagattaaaaacatacgagtgcgacaaaaaaaaaacatacgagtgaatattttcatacacgtcttatacgtacatatgtattaaagtccatttaattagtgttcttgaaatattc

SEQ ID NO: 1287 - DNA, 936 bp, Arabidopsis thaliana
tcgttgttggccaagcttaccaacatcttcccaagcaagtaagccaaaatcctgacgtgggtggatggagtttcttgcaatatttctctgagccaaaaggcattgtccagaacagagaagacgacacaaagaaaacagcttatgtctacccgatcgagaagcgttccgtagctaaactgagccttgagatgtgcacagagagcctcgggaccgagaatgggagtgatagtggagacgagatgtcgttacttgcgcttgaagcaaccaatatttcaaagagtcctcgtcttactacgaaacctcaaaaagaaactagcttcatgacccgtgagaacagttttcctccgccgctaaactccgtcaacggattcaacaatagccgtatggtgaaatcgtataaagaagacggtcgtcttgttgttcaagcaattagggtttgttctccacctcgttgctttgtatctgaacgtcgtgaaggaaggcttcgtctctgtttatcacagaattcattgaatagccaagacgcagaagaagagtttgaagaagaagatgaagatgatcaatacgatgcagaggaagaagaagaagaagaagaagaagaagaagaagaagaagaagaagaagaagaagaagaagaagaagaagaagaagaggacgaggagggcattgtggggaataatgagaactttgagggtaaaagtggaaatacaaaggttagcaacaggccaaaaaggagatgcaatgaaaatggatgtgagcctaaaactatgcttaattggaagcagcagcaattttgggtgaccacttaatgggaattactcaactcagcaaataattattttttacggcttctaattctacatatataaatgctaaaatgtgagttaattgttacttaaactgtttaacacatagagaactaatcttcattatctg

SEQ ID NO: 1288 - DNA, 644 bp, Arabidopsis thaliana
caatcagtaactgcgcaatctcttcaaagccccgttcccgcgccagttccagtggcgttttgccatatttaccggtcagatgcgggctggcaccgtgttccagcaataactgcacaatcgcctgctgtttaataccaccatcattaagcacaatcgcttccagtagcggcgtccagcctacatggttggtctggttaacgttaatctccgtatgcgccaaaagctcttttacaatacttaaatggcctttttcacaggcaggcgtcaggccgacaccgccaaaacgggttacgcaattaagatcgggtttagccggtaaaataattcgtagtagcgttaaatcatcgttcagacagctaattaaaaaaggatttaaacaggtatgatcttgcttattaatatccgctccggcatcaattaatgcctgaacgcaagcatattgctgatataaacttgccagcgtaattgccgttttcccctgacgatcgcaggtattaatatcgacacccagcgcaaggcaggtttttactttatcgatatcacctgttgtgcagcaataaatagtcggcaggtagattttttatactcattcacattccccatggtttttgtggctgttttcgatgaattgagaatagcacgat

SEQ ID NO: 1289 - DNA, 766 bp, Arabidopsis thaliana columbia
ggaagccgataaaaaattatacttatacatctcattttcaaatcataccgttagtggagtaataatttgtgaagaccaaggagagtgaaagccgattcgttacatgggcaagtcatcaaccagtccggaattaagttacacaatgatggagaaacttgcgcttgatgtagtcacttcaacttggaagctgcgaccttatctatgtttcatccaatcatagttcaaactcttgggaaaatttgttcatttcatcggagtctaagtgttcaattcgctcttcacgaaactagatctcaccccgagaagatttttccaagttccaattcttggaaaaataagattattttggtggactataagtgttgaggtcactcttcacaaaactatctcgagaagaatattccaagttccaactcttggaaaaataaaatcatttcggtgaaatctaagtgttgaattcgctcttcacaaatttaaatatcacttcccatcaacaaccatttgtgacgaaatctttgagtacaagctcggaagaagatcttcagttttctctctagattgcggctcaataacctgccttcgtattctataagcagaatacactttgtaaactcaagcttatagctcccatgcgatagtcgagttcactttgcaacaactaaactcgaagtcagctcccatgcataactcgagtttaattctcatactaaaactccatgattaaactgacgagttcgagtcaataaaatgaattcagtcctcttgg

SEQ ID NO: 1290 - DNA, 526 bp, Arabidopsis thaliana
tgtggttgaacttctggtaatggcttcttctgtgtctcaatacgcacacatttccttccacaatgtcttctcaatccatggcggtcgctcattggcacgtcttgcgcaactcttagaaaccatgtccttcatacgcgtttgacatattttaaagaactattattcaactacaccggtcactgatggatgccatgtgtgtgtactctacaaaacaagaggagagtttgatgttagtgatcaaacaaccaaaccaaaccaaatgtaagagattaataagagatagaacttactttacctcgaattcgaggaagtatatgtgtcttctttcagtaggtacacatctccaactgtaaaatggcccatcaaacttgtttatgaatacctttgtgatcttctgggtcagcttaccattgtcgtgaccaaacctacaattacataaaccattagcatatacaaacctacaattacaatgatctgaatgtcaagtttgaagctgtaaattcaaaaatcaagtatgtggagagtc

SEQ ID NO: 1291 - DNA, 542 bp, Arabidopsis thaliana
gaagcatgtgcacttccttgttgatgacgagcagtatcaagtccaagatgaggagggtaaccagttagaagaagttagctacatcaacaatcaaggtggctacaaagggtacaacaacttcaagatgaacaaccctaacctctcttaccctagcaccaacgttgctaatcctcaggatcaagtgtatcctccacaacaacaacaaggtcagaacaaaccttttgttccctacaatcaagattttgttccccagcagcaatttgaagggaactaccagcagcaaccaccacctgggtttgcacctcggcaaaaccaaggtcctgttgtacctgatgctgaaatgaaacagatggtacaacagctgctacagggacaagcatctagctccacggaaattgctaagaagttatctgaattgcattagaagatgaactgcagctacaatgacctgaatgccaaagtggaggcgttgaataccaaagtcagatacttagaaggacaatccgcatctacctctcctcccaaagttatgggacttccag

SEQ ID NO: 1292 - DNA, 676 bp, Arabidopsis thaliana
tttagtctgaggacctctctcaagtcttgtggtatagaggtcctcgtcgaaagtgctttttactccaaacagtgacttattcacctcaaactgattccatttcctacaagcagaaacggatcagctgagagatatcaaggacagaaaagacaggtaaccacacagcaaagattactcatatataagagacataactatcaaaacaatattcttcctaatctttgagacattcaccatgggctgttcctcacaatataatatatgctttcactaaatagtagaattctagctttagatatagaaagagaattgctttccaaaaggaatatacggaatttctaaagtgcaagcacaaacataatctattcattcccaccatctctcatctaaattggtcagctaagaaaccgtgatctgaaaatctagctgacaaatcaacataccaaacattcaataagtataaatttgacaaaaaatttaaatatatatgtgcgtgtgtgtgtgtgtgtgcgtatattacctattccaagggttatcaaacacattctccaaatctgcaccgtgtggaatagtctcatcaggtacccagcgttgcagctgcctttcccgatcaacatgataagactgtgatatagaagagtctgtcaacagctccgatggtttctcaccctgaacc

SEQ ID NO: 1293 - DNA, 997 bp, Arabidopsis thaliana
cgtcattatctatggtttgtttatattaatgatgtgttttatatcttctattattttccggttaatagatcagagatatttgatatttcttatcatttgagattcttttagaaattagtcttggttgttttatttagtaacgtgtatatatatatctgacattttttcatgggtttattgtgtttgattccaattggtgcagttgcagatggcactccttatggtatgtaacatcaacttttgactaatcctttttagtttttaccatttttttttctttttcctttgacatgttttctaaaatcttcttctttttaattttgtagtgaatctcttagctcattttcgtggacttatcccaaaaggtatatatatatttgatttgatatttttaccactccataaaactttgtggttgattaattaactaatctacttcattatttgttcatcataggtcgccgttgcactgaccctggtggtatgaacttaatctctccactgtaacataatttcccaatatattagtttcattatagtatgtttatatcacatgcatgatttctataaatagattcctctatactgaaacaaaagacttaattaagggaggcttaatggtatatgttttgttgcttcacgttggacagatccagcgttcactggtccggtcgtactaccacacccgtcagtgttggagggacccatgatgccttacgagacaaagcagctctcaaacggtggtctgtatatgcgtgttgacatgcctggtgtccctagcgagaagttcatggtggcagtggacggcgatggtgtcgtcaccatcatgggacgagctcctgtgaccatgcacgacacgagtgggcgtacttacgtagccaaggtcgccaatgtccctagaggctatgacgggggtcggatcaaattggtccccaagcatggtgtcatccgtctcactatcccttccaactaatttataaatcgcatcttaagatca

SEQ ID NO: 1294 - DNA, 450 bp, Arabidopsis thaliana columbia
tgatggctcctgatgcatccctatagagaacagagcttaacatctcagactttttgattccaaacatgtcagagagtttccgactcaattcttcgtatgaaccaagaaccgataggtctaaggttcgacctacatcgtctgaatccataaacactttacaatgccctgtatccaaacctgatgcatcatgaactttcttagagcaaggtgatccttcatctgacgatgaaaactcccttcccgcaacgccgttttggttcgacccgcctgatgaaatctgcgttttctctatgtttgcggtatccgttgagcctttttctgatagctgttcctcgggtagtataagcttgccgaacaatacaatatggggcttttccgatttggtatcattgcctggtgttgtcccattgtcaacccgcggaatcctttttcgtttttggtatcgctgtt

SEQ ID NO: 1295 - DNA, 524 bp, Arabidopsis thaliana
ccccgagagttttggtctaactctgttcaatgcttctctaatcacttcttcccatttagcaacaggacgatcatcttcagctccaagaatgtttccagcatttaaaggaacaatctcttgtaaccttcacacccaacaaaacaaaaacaaaacataaataaaaatctctaacaaagaacatatctgaacagagttagttttgtccatgtcgctgacaaagaaaagtcaagttttacccaagaacgtagatatcagctggttggttaatttcaatccagtcgtcaatgtcaagatcagatggtggtgagatcctccaacgttccacgtaccaacacaaactctacaatatacataattccgacatgttaggtctccttttacccaaccaaaaaaaaaacttacatgttgaaaaagactatgataacatccgaatcttttactatatagtactgctatatataagagactcaaatacaaaattgtaccttatttctttgttgttaatgtactgtgctcttaatgtt

SEQ ID NO: 1296 - DNA, 479 bp, Arabidopsis thaliana
tgaatttcaccgacgaaacaaaaaagagagagagagagagagaaacgatgagttctcagatttcggagattgaacaagagcagctgatcgagaagcttgagatcttcaagatccatggcagagacaaacgtggccgtaagatccttcgtattatcggaaaattcttcccaggtactgatatatcaatcggatctgtttctttttctctctgtgtagatttgttcttatatttgagttttttttgtttctgaaatcagctcgatttctgtcactggatgtgttgaagaagtatctagaggagaagatatttcctcgattaggtagaaaaccattcgccgtactctacgtccacaccggcgtacagagaagcgagaacttcccaggtatctcagctctacgagcgatctacgacgcaattccggtaaacgtcagagacaatcttcaggaggtttacttctccatccaggtcttcaatcacg

SEQ ID NO: 1297 - DNA, 1210 bp, Arabidopsis thaliana
caaagaaaaaattagtacaatataagagtcaagtaaatttactggccaaatttttttttaatctaattttgtattcatacaaaaaaaaaatgaaccatcaagataataattaaaaagagaaatgaagatggaaacttcaatttcatcattgcattgcaatactacattacgcaaaaaagttttgtatttgacatctttttttagcttatgttgttggctgcagaatgtatttggttatgaatgagttcttcttctacacacctacttgaggaagaacttccaaatatctctgtctgtagtttccttcaccaaatgagctcctaagatagtttcttcatccaccaagttcctcaaatgtttcgctccactgttgaatcctacgtattgcttcttcgccgccaaatacattacaccgtatggcggtctcaggcactgtctccacaacaaagccatcacaaccatcattataaccgggaacaaccactgaggaactacggagagaaggattaaaaaaaactaaccttctttatgagagaatatagtttcttcagagaagtaatagagtaagggatttcggtcattagtataacatcatatccatattctccttcttgaccagtctcgttggctctttcccacgctctgcttcctgagagcttccttgatcgcctcgaggagaaatctggctgtcctgtaatgcttccgtcttggctgctacatccatccatgaaatcttcctctgaaaagctcaagttcattgcggggatagatggttcaaggacatctgttctaatgatggatagaacggtagagagctcttcccattctcctgcatagaaacggacagatgcagagatagcttgtcttgatggtgtgagtgggctttctggctgacggctttgcctgtctcgtgcttgctccaggtttgcaagaacgtttgggatggttgtgcatcttatcgtttctgcgctgaggtcttgaaagtggactgaggaagcaccctttagaaaaagcaatcaagattcaacaataagacttttttttctagaaatgtgaaagtaacagcaatcttgcagcgttagtttacttactttcaaacaggcaaatatcccaggaactccaaagttgcaacctagctgttcaagtcacgatacaaaggaaaaataaagagtcaagtcagacacaaggaattggagtttgttccaaaatg

SEQ ID NO: 1298 - DNA, 633 bp, Arabidopsis thaliana
tggacttctaatcattaggccaccaccattgatagagaaatttggtgtggaggagcctcagtcaccacctgtggtttctgagatcgattcagaggaagataggctgtgggaagaactagcatttttcactaaatctaacgacatcggcggcaacgagcttttttcaaatgtaatttcttgttttctccaaaacagtatattcatctccttttgttaggaacaaggtaaatctagcttgaaatgtttgcaggtagagaaaaatatatcagctaatgaaactccagcagcacaatgtaaaaaagggaaacacgatctatgtattgatcttgaggttggtttgaagtgtatgcactgtggcttcgtggagagagagatccgaagcatggatgtatctgagtgggtaaggaatttggagtattcagtaaaatgattgaaacgttaaactaaaaggtttgatggtaactctagtgcatgtttcttcatgtagggagagaagactacaagggaaaggagaaaatttgatagatttgaagaggaagaaggcagcagcttcattgggaaacttgggtttgatcacctaacaacagcttaaatgagggatgtgtttctcgtgaaggaactgtttgggataag

SEQ ID NO: 1299 - DNA, 476 bp, Arabidopsis thaliana
gttatttaaaattcagataaattttttaattgtgtcatacgtcttcgctaggtaacgtggaccatggcgtcatatccattgggtaacttcccagcaccctgaggaatgacgtgtactcttgcacctccgctaacgcgttttgtgcacgcgcctccgccatcgacgcttcgaagtcgacgtagaatgtgtactcaaagtgcttcgatgttccaacgttttcgtcgcctacgactctaacgggacaattctgatgcggccgcgattcgattttcgtcaaactaatgtttcgaaacgcaaacgcggaaagcactttgaataaaacgctagttcctttatgttcttgagctgcgaaaacgatactcgttttaaacggacgatcggtacggggaatgatcggatcacgcgccaacataaggaagcgcgtgacgtttcctgcgtcgtcttggatcccgtcggcgagaatctgaagtccgtag

SEQ ID NO: 1300 - DNA, 528 bp, Arabidopsis thaliana
  unsure (1)..(528): unsure at all n locations
ctgcctttatataacttagccgccactttaattctcgaaagtcatgttctttcacttttcttcgctggttcttcttcgcgctctctcttcttgccatggttggatttcccgctaatcaagcaaaaaccgttgaagaagagctacctttgcaagtcgtagccgatcaagaccccaaggtaaaccctttcaaggactctcttcacttcccttccatcgattcctttccggatttcgattctctcacttggtctgagagtcatcggaacgttgaggattttagcatagaagatacggactttgatttctttgagtaccacatggagatacctcaagaagatgttgttactgttagcgatgtaatgtgtccggagaatcagactactgttaattctgagtcgattgagggaaagcttgaggtctttaatgatgacatgtctggggaagttggtgtgagttnggttaggtctgagtcgatggttgaagtaaagcctgtgctttgtgatgtcatgtctgaggaagttggagtga

SEQ ID NO: 1301 - DNA, 597 bp, Arabidopsis thaliana
catttctttggattgaagatttgaattccttttatagcagctcgatcttgggctgaagctatggctcagagtaattgggaagctgacaagatgtaagttaattttgtattcaataaaagcttattttttttcaattccttactttgatatctttgtgtttttgtaggcttgatgtttacatatatgattatttggtgaagaagaaacttcataatactgctaagtcgtttatgactgaagggaaggtttctcctgatccagttggtaatattacactttctttgttccactttgttctttcttaattttaagttttgatatgtaattgttttttgttgtgtgaatgattagcaattgatgcacctggagggtttctttttgagtggtggtctgtgttttgggacattttcattgcaaggacgaatgagaagcattcagaggctgctgcagcttatatagaggtgaatgtcttctactaacatctgggaatatgttttgttagttttgaattacgtaactgaccagtggttttgaaattttaggcacaacaaggtaaagcgaaggagcagcaaatgcaaatacagcaactgcagatga

SEQ ID NO: 1302 - DNA, 539 bp, Arabidopsis thaliana
ggatgcttcttgataccgcttctaacgggaacttcctcaacaaagatgttgaggaaggctgggagctggtagagaatttggcacagtcgaatggcatctataataaagattacgatagaagcatccgccacagctcttattctgatgagaagcaccgcagggaaatgaaagctatgaatgacaaactggacaagctactccttgtgcaacagaagcacgttcataatctgggtgatgatgagacgttccaagttcaggatggggagactctgcagtcagaagaggtcaggtatgtgcaaaaccaaggaggttacaacaaaggtttcaacaacttcaagcagaaccatcccaatctgtcttatagaagttcctcttaacagtcactctagacggattagcataaaattcgtcttctgaaacttgatacatcttgatcctttccagaattgaatttctcacatatttgtgaggatccgggatcaggttgagaacttctattagaggcatcaccacttccatctcatcaagctgcttttctg

SEQ ID NO: 1303 - DNA, 557 bp, Arabidopsis thaliana
cagttctgcggaacataaacgatgcaatttcttgatcatcttccatcacctacagtatattaacaagtaacatcaaaaataaaataaagctttcaacgctataacagtaacaccacaaagaagttaatatgaaaacatattcttactagggtctggcgtccaatataacggtggatgatatttccaacttggaagcatttcttgctacgcaccaaatccgagattgaacagatattggaaagaactgatgcagcctttcggcgattactttgcatgactgacaatatactgactttgacgctttggagaaacttatcagctagatctccaggttcagcaaccacaaatacatcattttgccaactaaatgaaaccaaaaagcaaatgtaatcaattcactagaatcaacctttttagaactgagtgtgatatggtggaaactgaaaagtttggactaacctcagtattgaaccattagaatcattttgaagtgagagatgtagatccccacttggggtaaattctgtaactttcatgcatctgtcgtagtggaagat

SEQ ID NO: 1304 - DNA, 501 bp, Arabidopsis thaliana
acaaaggaaaggctgaaatttctacatctagagttcgtgatgttaggtgcttcaaatgtcaagggaaaggacattatgctaatgaatgtccaaataagagagtcatgattctcttggataatggagaaatagagcccgaagaggatattccagattcaccttcttcattgaaagagaatgaggagctgccggctcagggtgagttgttggtagctaggagaactttgagcgtccaaaccaagaccgatgagcaagaacagagggaaaacttgtttcacacgcgttgccatgtgcacgggaaagtttgcagcctcatcatagatggagggagttgtactaatgtggcaagtgaaactatggtcaagaagcttggattggaagtgcaaaaacatgcggaaccatatgatcttcagtggctgtaagacagtggcgagatgagggttgaaatcaagtggttgtgccattgtcattgggaagtatgaagatgagatcttattgtga

SEQ ID NO: 1305 - DNA, 870 bp, Arabidopsis thaliana
ccctgcatgaccctaactaatcatcactgtgagacattcttaaatctatatgtaagttaacatttccatgagactcaccagcttcagatgatggatatgggtgcacacgcttatgaagcccatgttctccattaccataacctcctccaactggaaattctccactatgaccaccagctataacaggtgggaatctcccattctcatcatcctcaggacctcttccatagctcattttcccataaagcatagcctcagcagaatgcttatgcttatcttgttcatgttcgatattaaattcatactcaatatcatcaatatcttcttcgtcttcatctccctccactcttgggcttccttcagaaaccaaaaaacagatcattactctccaagttcaaactaaaaaaaggaacagcctttttaaattttcatagaggcatttcgtcgaacaacacaagagcagagggagattaataaataacttacctctgagacgcttgtaacgagtcttacactgaggacagttttgtgttccttctcttctctcgtactcatagcaaggtctacacgccggaaaaccacactcattgcaagctacgaagaggtctccttctactgttaaaccaatctgatctccacatatctcacagaattgtccatctagattcttcagaggctttggctgttataattacacaaaagtttaagttccttaaagacgaaataaaacctgaaatttctaatcaacaaaaaaagattctaatgaagtaaagataataaaaaaaatgacagcgattaaaatggttaaacctgacttctcaacttaatattaccgacagaattattatgtttgctaacaaagatatgaat

SEQ ID NO: 1306 - DNA, 789 bp, Arabidopsis thaliana
tagtaacgtccgccagtgtgctctaaagcagttatcaaattcattgcgtaacatagtttcccaatgacgtcggttatacacgcccgtcatgccgtcgcgggtactcatgacctgcaacctgcgtttatgttccgccagtttggttgccgtctggtagctgacccagccaaacagcagaggataaatgacaataatgggaagggagagccaccattccagcggcgcactattgaacgacacggtaatgcccgtcagctcgagggtgacaaggcaggaaaccaccatcaacaccagacccgcgacaaacagacgggggccgcctgcccccatcaaattcagacacataatcatcaacatcgcggtggaaggcagcacgtttacgcccattacgcctacccacattcccgctaatactgcatcggtttttaagttgtaaatttcccggctaagcggatcgacggccctgctcgctatctgccaggctaaatgcggccagacgaacgcccagccgaccaacaccagccaccaccagcccggcggcgggtgtgaaaccagcgttgaagcaatcggtaagaacatgccagccaggccaaccgcacggggtagtctgacgcgacgggcgacgcagccctggaccgctgatgttcgttttgaggagttaaaggaggttcctcccgtgcgccgcgcttttttgaaaaagttttcacattcattatttttgggacattcagaacaatttcccaaattatagagacggactagaggcagaagtatgatatttcgggtgag

SEQ ID NO: 1307 - DNA, 642 bp, Arabidopsis thaliana
caagcaccttggtttccttcaaagctcggtgtaaacttcaagacaaggatttcgcagcactcaacaagaagtttaacgctctccaactcaacttcagctgttcttcttctactacggcgatgccacatgacatgccttttaggagaagcggatccactcgacatgaacctatgcaatatgatccgccttcgccaccaagacaatcttcatataagccgagagaacaccatgctgcatcttcaccaccgaggtaatcatcctttgaacctagggagaaggagcggaggagtaacataaagaagcgcagaaggacaacgaaatcggacgttggggcgggccactcttccgcaccactcgaggagccactcgatcaacagcccaagcaaagggtaaagcatccaaccaatccaagttcagcacaacccgctccttggaactacacaaaggagagtacggatgaccttgtctccgcctactgtcacctgaccgctgaggtaacaacatcaccaccattgcatataccatagcatcatatttatcgtagtatgactagcgttctggtctttaattctccttaggagttttattacacggaggactgtataatttacggttgcgcgagggttcacgacgtgtttgaca

SEQ ID NO: 1308 - DNA, 596 bp, Arabidopsis thaliana
gcacttcttattatttgatgtcaacaaaaaagaaactaaagagttttaattttggcttactagagtttagtgtaactaaagatgatcacgaatacattgtgaaaaaaagaagttaaaacgagtagtactatatactatctactctgtataaaacagagcattctctgttattagtacatttagtagcttgacaagttacaagcaaaggcaatccaactttaaaaacactttgattgctctaatagtaagtatatacgatttttgaaatgttttatataggtcgtcaaataaagcccttcaggggatataatacattggatttgcgagtttgaaagatcgttgagacatggaggtacccaacaaatcactccattgatcacctgaattgcctctaatcctatatccctctttcaccatctcatctctcttctcagatttgtatagtgtcgccattttgtgctgttcctctggagatctgcacatcacacacagacacgagggcaaagcaaaacgaataaacaaaggatgttcaaactgatgatgatatgtctaagatacttatcaaaccatttgcagagatccagaattctatatga

SEQ ID NO: 1309 - DNA, 521 bp, Arabidopsis thaliana
ctctagaggctagaggatccccgttgtactttatttggcttctttgtaagttggtaacggtggtctatatatggaaaaggtcttgttttgttaaacttatgttagttaactggattcgtctttaaccacaaaaagttttcaataagctacaaatttagacacgcaagccgatgcagtcattagtacatatatttattgcaagtgattacatggcaacccaaacttcaaaaacagtaggttgctccatttagtaacctgaattgcctcctgattctagttgatccccttcaggggatataatacattggatttggaagtttgaaggatctttctgacattgcagaacccaacaaatcactccattggtcacctgaattgcctctgatcctatacccttctttcaccatctcctctctcttctctgacttgtacatggtcgctgttttgttccgatcatccaacgatctattaacattaagcagcaaaccaaagcgtcaatcatccattcaaacccaagatta

SEQ ID NO: 1310 - DNA, 1315 bp, Arabidopsis thaliana columbia
atcaacaaaagaagaagaagagtgtggaagctgcgatgattcgagccctgtctcggttcttgattatgaccggtatgctggtgttcgagaactccatcaccaggttggtaattcttcagtattgaaaattgaaatgtcctttcttgtgttattaaagcatacttgtttccttgtaacaggaaacatttcaagaagacggttgtcttcagaacttgaatctagtaagctcaatgaaacgattgaacaagatcacatcacattgacaagtagatcaaaagaccaagaaatccgacttcatggctaccaagagatgtggctcatgatctgcaaactcactgtatctgaccttgaaggttcagattggtttaacggaaaagctttaaagctcgaagatatagaaggaatcataagcgaagatatagtctcaaacatcttagatcaactcttagaagaaacaattacaacactttccctaacttcacaagtgtaaatacatttctgtattccaattatattattactaaaaaacatatatattcagcgtgagagtgttaccaagaaaaaaaaaaatcgattactcattgtgaatagtaaagaatcaaggaagtgaggtgaggtaattcaaggtttcttaggttttgaaaccttttttcacctctgtttttctttggagacagagagagagacaaacgaactctcttttgtcccctaagaattttttctttttattctaaagaaaaataacaaagcattaaacaaataaaatgaaatagattagcatcgacctctcggaatctttctgactttgcttcttgtggaacggttaatgaaagttcaaaacttttgattcaagccacggtctgttctgtctccatgtatgattgctccatccaaaccggagctagtcttgtctcctgtggctctttcaccagcggctccacccatgagacatctggctcttcgagcccagtcccttcgttaggcagtcttgattccatgccaccggctctgagacggaaagaagtggattttctgagcttctgtagctcgtctccttggacgctccagtcaagcttcccatccaatgagccccaatcgtttaaacaagttgtagtcatggaagagattgcgggatggtgattcagtccgttgttgcgttctatgaagctttgcgttcgctgtttagcaaattcagccgctcttgaagccaagactgcggaggaatccatcgaaaacagagaattggctcccacaggtgatgaagaaagactgttggaatgcagctgcgggttaatgacgctgcgtcggatctgca

SEQ ID NO: 1311 - DNA, 495 bp, Arabidopsis thaliana
ctgacgtcttcctcaagatttccttgtacatattcttctactattacatcgttccacttgttctaaccgtattcttcgccaataccttcactaccgtctgtagtaggatacagggtacttcccccaatagatccatccacaccaagataatcatcacacccatcatcatcttcgttgccctcctccaattcatcctcttctgttgtatcgtcttcaacatcggcttgctcctctgcatcctcattattttcatcaacatttgtagcactatcaaacacacggtcactttcagaaacttcaccatgagacctagagacagtattcccgaacgcattcactgtattattgaaagagacgaacaagttgagagaaagatacccaccacaaaccaaaaaaaacgtctcgagacccatctgactgtcaatgtatacaggagggcgtttagtatctatcagcactgacatttctcccggcatccagtagctaattatggga

SEQ ID NO: 1312 - DNA, 579 bp, Arabidopsis thaliana
ctagaggatccccggtcctactacatctgctctgctgattcacatcctttccaacgtacctaggaagatcaaatcaaccgaactacccgtatcgacgagaattcttgatattttgaagttagccacgtccagcgtaatgattagagcatcatcgtgaggtctttcgatgtgccgcgtttcttcctcgtcaaatgatactgaagagcattggtagttaacctcttcactcaaacttgatttaagtagaacatttggccgatgctttttgatagcgctaacagaattatggcaaagtttggaacctccaagaatcacgttgatttttcctttcgaacttcttggttcctcttcgttagtcaaccttggccttttagagttttgagtttcggagttatcccttgcttcgtgatattgcttcacgaaatcatctatgttgaatttggaaagatctccgcttgcccatagttccgcgagataccttttaaggacgatgcagtccttggttagatgctcggttactctgtgtatgtcacaatacagactttcatctcggacccaagtgtttgacttccctttccc

SEQ ID NO: 1313 - DNA, 925 bp, Arabidopsis thaliana
aaaaagcaaaaaaaaaatccaattccattagagagagagagagagagagagagagagagagacttttttaaaaagtacaaaaaaaaaatgaaaaactagagagagaaacaagtggctagctagctcgccaaacttcttcaacaatggcggtttcctagggtttgatgtttatatgatcgggaaactctctcatctagatcgcgataactctcttttccatggaaatgcccggtagaagatctaattacactttgcttagtcaattttctgacgatcaggtgtcagtttccgtcaccggagctcctccgcctcactatgattccttgtcgagcgaaaacaggagcaaccataacagcgggaacaccgggaaagctaaggcggagagaggcggatttgattgggatcctagcggtggtggtggtggtgatcataggttgaataatcaaccgaatcgggttgggaataatatgtatgcttcgtctctagggttgcaaaggcaatccagtgggagtagtttcggtgagagctctttgtctgggattattacatgcctactctttctgcggcggctaactagatcgaatctgttggatttcctcaagatgatgggtttaggcttggatttggtggtggtggaggagatttgaggatacagatggcggcggactccgctggagggtcttcatctgggaagagctgggcgcagcagacggaggagagttatcagctgcagcttgcattggcgttaaggctttcgtcggaggctacttgtgccgacgatccgaactttctggatcctgtaccggacgagtctgctttacggacttcgccaagttcagccgaaaccgtttcacatcgtttctgggtatttgttcctgttaagctttgtttcccaaaattattgaatcgtggttatagagatatg

SEQ ID NO: 1314 - DNA, 542 bp, Arabidopsis thaliana
tgtgagccacaacgtcgagcatggtcaccattcctatgtactgttttcttgcacttccgctctgtttgtccaactctactatcattgatcccccggctcccagccattggcctggtttggcagccaccggtacagctctaactcggtttgccaccggtttgataccaagaatagtcttgttagtaattcttgatacttaaaacggttgactccaaccaaaaaaataacaattatttagccgtggtttaccatagtgttcaaggcgtcccctagagtggcattatcaggaacttcgaccagccgccgcttgtcgatcatcagatctttgaccttgaactgcatcagacggctgtacgactgcatgaagatttgtatttgggtgatagtcaaagtctcaaagaaaatgggacgaggcttatgaacttctaatctttgttttgatgctttcgtagttacttcattattcatatatgtcatgttactagtaagatgacaagtattacatgtgttggccatgggcatgtgcttttcgtatgcacaga

SEQ ID NO: 1315 - DNA, 532 bp, Arabidopsis thaliana
cgattacgattcaccctattatctcgagaaagataaacatctgtaccaacaacgctccactattatactcagccaagccgaagacaacttcgctatctggaaactttctttcaaacatctacttcgaatcacgaacaaattcgcgttcgtcgacggtaaacttgagaagccagacgcttcctcgccgctttataatcgatgggaacaatgcaactcattggttacgtgctggttgcggaattcgatgaccgaagaacttggtaaacgtgtaacgtttgaggaaacggctcaaaaaatatgggaaagtatccgacgtatattcgtcccaagcgttgatttgaagatctaccagactcgtcggaaaatcatggagctgagtcaagatggtgactcggtaaagaagtatttcgaaaaagtgagcaatgcttttctggagttgtcggagtatgctcctgttaaagagtgtgcgagatcactaaacgagcaacagaggcgagagataaggaggagagttacgcttttctgatgggtt

SEQ ID NO: 1316 - DNA, 572 bp, Arabidopsis thaliana columbia
  unsure (1)..(572): unsure at all n locations
catgatgaatataaagaaaagtacctacacaagcatagtgggatggattcagaaacataccaactaataacagatatcgtcaatgcacccggtaaacgattagctgactgtatgaaatctactaagatgccaaatgtcctatttgcttcagacatgagcgttgctggattcagaatggggtgaccgccagcaagccaggaaatattgaacatatgtctacttcctgcagtagagtaggaaaagttgacatgcgcgcaacaaaatgaacaaatcatgtatggtgcagttcccggttaaatacaatattatcggaataataataataaaaactgcatgattagagcataataccttcgctggaagctttctcaggatcagatgcatcaggagtaaagagtaaaataaaagtctccataaactttagagcaagaactttcacccctacacaaccaggctattgtgaaagaaacaacggacttgggttagaaaccttaaattgagagagaagcagaacaaatactcaaccaaagatcatacctcgcgagaggaacagacagacnaaaaaaaagaga

SEQ ID NO: 1317 - DNA, 309 bp, Arabidopsis thaliana
tggttgaaattaacatatccataaccaagagacaagccagtgtttcggtcgcaacaaactttcactgaagaaatatcatgagtgaactcactgaatttggtgtataagtcaccctcttcgacactcgaatcaagatctcctatatataatgtatgcttctcaaatttgttctctgaggttcttatagttgaaacacgtctttgttctctgataattttttttaagtatatatctggttctaaagtcatatatattaaaaaaaagagaaaaaaaaagtcaattccttactaggattagctttttattttt

SEQ ID NO: 1318 - DNA, 551 bp, Arabidopsis thaliana
ttttttctacaactttactcttcagaagcacggcaacagatcttttctagctgtataggccattcctctccaagaacccggggattaacctccatggcggcatggaaatccaacatcgatacattagacaccgctcgcttttgttgacttgctaaactcaaacaaggctcgatcagccttctcatatatgcattcaacccacgattaagaagattagcagagtccatagataactttatcccttccatctccaatttcttctctaaccgagctctcaatgttatcatatcaggtaactccccgctgctttgacacgtctcacggttgataccattgtacgtactaaatctagctttgctcttaagatggaaagaaacaccgagtggagcggttaaggggcttctgctttgcacactcggactacccgtcatttgctcaacttcttctccatcttcaacagagacaacttccataggaagtctttgagcctttgacattgactcatcattcgtagtagtgagactttgaggcttccaagtggacaagaggac

SEQ ID NO: 1319 - DNA, 566 bp, Arabidopsis thaliana
atcccctatctctcgccagatacatctccttggttttcaaaatgcctgtgagaatctcctcttcgttagcagctccatagtatatcatcaacgaggtcagtttctcaccatacatgtctctatgggctttcgctgtctctataaagctctcaaagccagcttcttcaagtgtcacatcataagctaccgtgtcctcgctctcagcttctggcttttctcctgtgctagagagctcttcacagcacggtatagtttcccaaacacagactcagagatgtatgttggtttctcaaaccgttccagaaaatcagggaactctctgggctttaaggcataaggcatctcagctggagctccagtttttgcaaaatcaacagccctagagtgaagatttgctaactctagacacttctggctccgggctttttcagggtcacggtctgcgtgaaccaaatgtgcagttgagatcccccaagcgtgtcgttatcatataatcacaaaaaatttgtggattcctacaaagcagagtgaaagaaagagaatcagcttagctccaaagattagga

SEQ ID NO: 1320 - DNA, 1026 bp, Arabidopsis thaliana columbia
  unsure (1)..(1026): unsure at all n locations
ggtaattttgagacgcaacttattgatgttttgaagatttccaaatatggcccagaactttctcctatgtttaatgaaggcccaacacgtttttaagacatatatatagtttttaggtcattgttaagaccctaagctttgggaggctattccctttatctattctgttcttgggagcaaaagcctgtggagactccctttagagaatattcttcttaactctactctcctcttgttttatgcattgatttcttattcaatcatgttttgttcttctatgatcatgtttgagtaatcttcttgttaggtttacggtttctcattagggttatagatgatttagtagattgcccccttgctaggttatttgtaggattcttcatcttgattgttcttaatgctagttctagagtagctaattagaacttgatattagataataggtctatgcccaccataggtacttgttatttgaactatcatagatgagcctaggcatttaagaaagaacaggtaggctcatagaagggctctagtttagattctaggtgaattaatcaaacttgataagaatgcatgctttagtataggatttctcggcttctccggttatcttagctctaagtatagagagtttcgtggaacgccacctgttactctaaaatcatagtttgagttcgagaacggtttgataacaacttagctatttctatatctactatcatttatctcctgagaaaccctaagcctgacgcttttaatatcttgtttcacaacgaaccaatcttctattgcttacttttgtttctctttattttatntactattntacttagcgtaattcgatttgccattagtctattgcgtgatccgagaactttgtgaattcgatccctaattgctgcaattgacctctttatttgagagagtggtcttaggattaatttgacatatatcatgatgctaaagtgatgacaaatagatgctcaaaacatgtaaaatgcacacttatcagcaagcatggag

SEQ ID NO: 1321 - DNA, 522 bp, Arabidopsis thaliana columbia
cagatcaacattcaacatcagacactctcagcttcaaatttcaatcactataagacaatgcatcagagagaagcacatgcaaaaattccagaaaacagaatttttgcagaaataagccaaacgatttccacaattaagaaccaaactcccttagaacatcagcattatcatcacacccaaaagcattgtcttttacccatgaagagaacgaatcatagataccacaaacgaaagtaatactaaaaccctaaaccctcaatcaaagtcctaaagccagaaaaaaacctgattccagatgaagctcttgccttggagagctttaccaaagagagagacaacagcgacaggacccttaagcttctgaagagcgccgatggcttccgggtccgttttcagcttcccattttcatcaacgtaaaccaattggacggcccgacccgactcgtccgttggatttctcatgaaaacctccaaaggcgtctccttttcttcctagtgatgagtcctgaatagcttcggttt

SEQ ID NO: 1322 - DNA, 1029 bp, Arabidopsis thaliana
tagtaacggccgccagcctctggaatctaatgtaagagtagtctaaaaacagtaacaaaagtaggaaacaaaacactcttttgcgggattgcgaaattgtataaagagagagaattacgggacgttcattacctggattgattgcagcatgtccgagactgcgatcacgaggtcaccagatttgatcatacctcttgatttcagtaacgagaatgttttgttcaagttgctttccatgtcgtctgagaagctgagacggaatgggataagtccccattgtaggtttaagcgtcttctcactgaggttgtggttgtgaaagcaaagatcgggcagtccgggcgacatcgggagaccagtgatgccatgtgtccgctcgttgtgtaaacgaaaaccgcgtccactccaagattgttagctgcaagtttttggatagtaaaatgagacactaaagacatattgccttctatggaaaacaaagaacctaaatttacccattttagcagctgagttacagatctcttctgagattttgtctgaaaatgaagagcctatggcttgaagcggtacagactcatggcgtttctcttccctccaccatctctcgattcttaaactgacagtccttagaaccgtgagcgccttgtctgggaattgtcccatagctgattctccagagagcatcaatgcatctgatctttgtcttactgcttcagacacgtcggcaacttctgctctggttggagttgggtactcaatcatggactccaatagctgtgaagcgacaatgacgggtttgttaagagctctgcatacttggacgattctctgttgagctgctggaacttgctcaagaggtatctgagctcccagatctcctcttgcaaccatggccccatctgatgctagaataatttcttccaaattggtcagtgaatcgatactctcgatctttgcaatcactccaatttccctgcatcatagttgaatacaacatcaaaataaaactataactaaagatggtgaataca

SEQ ID NO: 1323 - DNA, 631 bp, Arabidopsis thaliana columbia
tccctctcttcactatactaagatctgaatcaatctctgaaaactttcgatgaatagcttatgtctctcagtaacatggtttgcaaaaagcttgataagaacttgatagaaaacttgacaataaacttcacaatatgaagactaggtctaaaaacaatataaagaccctataaaacatccaaggactaataatgcaaatagggaagtcttctagggcaaatttcctcttctgtaaacttgaaagcgtctaggactttgctgggccgaaactggtgttgatcgacaccaagagtgtgtcgatcaacactcctcgctgattcctgaatccaaaatcgtctttagcttcctttcctttagctcttgctccaaaatgtctccttatatccattgttgtctcattgcatagtatacttggaaagacactataaagactcgagaaataacataaaggctcaaaatcctatacctaaaacatagataaaatcaatgaaacatagggttatatcaataagttaagagatcacaaacgttttcaatcttttataggattatattcacagtaatatttggcactaatgaagttgttttacaaatttcaggtcacaggattagttgcatcaaatcaaggaat

SEQ ID NO: 1324 - DNA, 963 bp, Arabidopsis thaliana
aagttaatgacgctggaagatatcgtcagtggttattccaatgtgttgatttccctggcagatagtcagggtaaaacggtgtatcactcccccggtgcgccggatatccgcgagtttacgcgtgacgccatacccgataaagacgctcagggtggcgaggtgtatctcctttccggcccgacgatgatgatgccaggccacggtcacgggcatatggaacacagcaactggcggatgattaacttgccggttggcccgttggtggacggcaaaccgatttatacgctctacatcgcgctttcgatcgattttcatcttcattacataaatgatttgatgaataaacttattatgaccgcatcggtaatcagcatcctgatcgtctttatcgtactgttggcggtacataaaggtcacgcgccgatccgcagcgtcagccgtcaaatccagaatattacctcgaaagatctcgacgttcgcttcgacccgcagaccgtgcccattgagctggaacagctggtactgtcgttcaaccatatgatcgagcgtattgaggatgtctttacccgccagtccaatttctcagcggatatcgctcacgaaattcgcacaccaattacgaatctcataacgcaaaccgaaatcgccctcagccagtcgcgcagccagaaggagctggaagatgtgctctactctaatctcgaagacgtgacgcgaatggcgaaaatggtcagcgatatgctgtttctcgctcaggccgataacaaccagctaatccccgaaaagaaaatgctcaacctggcggatgaagtcggcaaagtgttcgattttttcgaggcgttagcggaagatcgcggcgtggagttgcggtttgttggcgacaagtgtcaggtcgcgggcgatccgctgatgctgcgtcgggcgctaagcaacctctttagagcacactggcgaccgttacta

SEQ ID NO: 1325 - DNA, 1392 bp, Arabidopsis thaliana
acgcctctgcgtttaccgagtgcatctgatggagctttctgaacggtcatcagcgatcgcgatggttcacaaagctcgaaacaatggtctcccaatctggaataagatcgagagatcaacggaccagatggtgattgccttcgaggcttaccagcatctacgagcagtagcggttagacccatgactgcaatctctggcctcagcagcatccacgaggacatatgcacaagcgcgcatcagaaacgagtagcgatgatactgcttccgtttcacaagcatcagagaatggacggagcgatggagtcaataggacataggttccatgaagtgaaccaacgggtcttgcaacgagctccttgctcagtcgggattcttgtggacagaggactcggaggaacctcacaggttgtagccagcgaagtggcttacaaagtcgtgattccattctttggaggcctcgacgaccgagaagctctcgcatacgggatgaaaatggtggaacatccaggaatcacactaactgtttacaaatttgtagctgcgagaggaacattgaagagattcgagaagagtgaacacgacgaaaaggagaaaaaagagaaagagactgacgaagagtttgtgagggagttgatgaatgatccaagaggaaatgagtcattggcttacgaggaaagagtcgttgagagcaaagacgatatcatcgcgacacttaaatcgatgagtaaatgcaatctcttcgtcgttggaagaaatgcagctgttgcatcgttggttaagagtacagactgtccagagttaggaccagttggacgcttgttgtcgtcatcagagttttccaccaccgcgtcggtgctcgtcgttcagggatatgatccagcagcagatacacgaccgctcgttgaggaagatgcagagtacgatcagtcttccagagatatttcagacttaactgcctgaacggattttattataaaaacaaaatttctctgtttttttttttgtctcatgaaatattttgatattctttttggttgggacttggagtgtctccattgttctttttctattttccttaaattgatggttgacattagatttgtgggcatgaaaatcgacctgtaatttcttaatattttgccttgaatgatcaaaggaataatatttttaagatccaacatttctagtcatcaccatggaatgtatccttgcccatgatggtgtcacctacatacctttttagggtgtaatgtgttcattgttattcagaaaaaatgtaacaaacggaaaaatgtctaatcttaaattacctcctgaagagatatgaatgcaaaaagggaccacaaccgccaatgacaccgacaagagtcaaaagagacgtcactaataaa

SEQ ID NO: 1326 - DNA, 574 bp, Arabidopsis thaliana
gtagtctgaatgattctttgatcaccagattcaagtactcaactttctctagatcttcttctgtgattctctctttgtttggtccgagtgttgctcgaatttcttcttgaagtttcttcatcactctaggatgtcttgtaagctctgtcatcgtccatatcattgttactggtcccaccgtttactcccgccaaaaccacatcctgattaaatgacatatgtaataaaatatatatagttaaggtttaaaaaaaaaaaaaaaattaataaccaaaatttaattataggggaaaaattgtataaatggaccatcaaaacaaaatgcgacctaacttgcttcccacactataatatcattatatccaacattaaaatttagagatattggtactaattaagtgattattcacactcaccgacatcattgctatgagatgatcgtaagtgatctttaaagaaccgaattttctgggtctattgatcacatccaacatggcagtgacgaggtctgagtgacatcaagttgtttagtctcaaaagctcacgatacatcttcaaggaagtggtgagtttg

SEQ ID NO: 1327 - DNA, 236 bp, Arabidopsis thaliana columbia
ctcttgggaggagctgcctacgtaccctgccaagggatcaagccttatcgtagttcgattgtatttgagtacctattcgtggtatttcttgagatgcatggcattccaagaccgtaactcaggtactccgttaataatttttacgagcttatagacgtcgtcacgtaccacctctgtgattcgatagggaccttcccaattagttcccagttttccagcgtttagctctctcgtgt

SEQ ID NO: 1328 - DNA, 741 bp, Arabidopsis thaliana
ctgtggtaactaacaaaacccttgaaactttttttgcgatgcatgacatcggacgcctcaaacttggagcaaatggttacctctagcagaatggtggtactacaccacgtttgattcctctattaaatgcattccatttgaatttgtgtatggtcagcaaccccaagtccacttaccataccttccaggggaaagctcttcagttgtcgttgatatgagcttgcagaaaaaggaagaactgattgctatgctgaaatttcatcttttaagggcacataatcgtataaagaagtatgttgattctcacaggtcacaaaaagagttttaggttggagactttgtgtacttaaaactgcagccttataggcaacaatccctaaaaaccagaggagtccctcgatagcttagcacacgattttatggacatttatgtgtcatagacaaggtcgcatttgttgcttacaagctcgagctgccacaaggaactactagtcacaatgtcttactcaagttgtgcccaaaccctcctactaacgcacctgttctaccacaatacttaactgatgtgggtaatgccaaggaaccagaagctatcttggaaaagaaaatggttaatcgccaaaaccaagcggtcaccaaggtacttttgcagtggaagggcgagcaccatcgaaagctacttgggagtttatgggttctgaaatcacactagagatttgtaaatagatttatgagaaagga

SEQ ID NO: 1329 - DNA, 788 bp, Arabidopsis thaliana
cctcacggaatgtcataaggcttggcttgtcacctactggtggagtttggttgcagaccatgtgtgcaacaggcagcctaacagaagagcctttctgagccatgactcggctacgggaaacaacctcatccatccaagcgccacctcttttctctgacgggcgagagtatggatcaaagtaaaagtaagcgattgggttcccagaagaatctttgacgcggtagaaccgaacatcattgttccagaccttcaaatcaatatttcatgtcactaaacgactggttaataaatcacatggtcgatatatggaaaggtaacagataagattccaaatttaccggagctaaaccatctgctggttcaatatcaattccaaaaagtgtcttagctagactgaaaagtccatccataacctttggcagtgagaagtatggacgtagttcttcctagaaagaccaaaacgagagataaggatcaagactttcaaaacaatatataattgcatcactagctacagaaggacaaagaacctcattaatatcgtatttggattcacgaagcctctcactccagaaagtggtgtcccaatgagtcatactgtcagattctgcagcaccctggttctttgcgaaactcttgaggtcttccatgtctaatttatacaacgattcaagaaagtcaaagttccgtattggatagcccaatgcctcatgctatttctgaccgtaacaagtttcaacagtagccaacttgtttaacaaataacaaattgatttgaatacatcttc

SEQ ID NO: 1330 - DNA, 667 bp, Arabidopsis thaliana columbia
tattgatgtatttcatagttttctctataatcattatttcattttctcatatatttgttctcaagaataatcattttcactaaataaataaatacttgagtgtgtcaatccgacatccacattttggcgccgtctgtggggacggaggaatcttgagtcgtcaaattttctctatatactacatttccgaggtaagcagcaatggccggagaagacgctaccaacgcttcattagccgaaactctcaaaaccatgtagcaagctatgacgaaaatgtcgcagaagttctcgaatgtggaaaaagctgttgaaacactgcaaacaacccatgtatcacttagtcaaaatatagcacgatacagtctcgtgttcgttctttgaatgcaggaaatccctcagagtttgaagaactatcttcagttctccaaactcctttgcgcgaaatgcaacaaatgaacaaacaattccggatgatgcaaatgcggaagtccaaccggaagatggagaaacacatccaggagacaaagatcagttcgtgaatcaacacgagcaagaaaatttcaaccaagttcgaaaccatgagggaagtaagccttgagttgaaagaaatgaggtcgaaattccatcaggtacaagctcggaaccggatatcgaccgggtcatcaaa

SEQ ID NO: 1331 - DNA, 458 bp, Arabidopsis thaliana
tgattaatctgcagtcatactaaacttgatgaattgaatcaaaaagaaaataagaagaggtgtttccttctttctcagatcaacagactttcacctgctcataattataaattgcttgctcaaaaccatgtctttctttaaccctggaatcttcccagaaacgattcactagtgtagaatcaaaacttgtggcaacatcactggaatctatcaagatagcttccaggaagttgaggtagctttagattctcttctgcgtgtactatcaaccagtctcaaaggtaaacagtttcttactatgttaccatacattcgctgtaatacagtctctaaattgggtaaaaaagaagtctaggaattaaaaatatcttacatgcgcggctaaaagatgctacatgattgtatctcatggaccccaacttcatctctgtgtagcgttttccaccaaactggtatgt

SEQ ID NO: 1332 - DNA, 531 bp, Arabidopsis thaliana
agtcgtaaagacaatactgatgggtcactatgagagtgtgttacaggaaatggaacagaacatacgattggggcaagctgaagtttcagcacctggaaaggtatgcctctgatggttacatgtaggacctgcgaactggatacatctttctcataattttgcatgttttctctcatcacgtaggaagttcgagctgcttttgtatcattcaagtctcgatatggtgctgcaacagcactccacatgccacaatcaatcaaccctacttactggctcacagaaccagcaccagaacctcatgacgtacactggcctttcttctctgcatcatttatgcagaaatggcttgctaaaattctggttgtgttcgcttgtctcctccttactatcttatttcttgttccagtagtacttgtccaaggtctcaccaaccttcctgcactagaatttatgttccgttcttgtcattgatcctatcaatgtaagtgacagatttttcattatcattacctttgaacaacaacactttaa

SEQ ID NO: 1333 - DNA, 960 bp, Arabidopsis thaliana
aattgccatatttcttataacagtctcttgtttttcttgcatccagtcgaggggatacagcggaatactctgatctgaataagctttctaaacgtttccttagtggaaagtcttctggcttagaaagggaaggaaaagatgtaccgtcagaggcttttgttcaggaggtggtagaggaactgcgcaaaggagagcaaggagagtgtccaatatgccttgaagcacttgaggatgctgtattaacgccatgtgctcatagattatgtcgtgagtgtctcttggcaagttggagaaattctacttctgggttatgtcctgtgtgtaggtatcttgaagttgttcctgcgattactagttttcttctgttgttgattccaatgagtgtctgagtaaggtctaatttggcaaataatgaatgatgaatcgtttttttcaggaacactgtaagcaaacaagaactcatcacagcaccaaccgaaagtagattccaggttgacgtggaaaagaattgggtggaatcatcgaaaatcactgctcttctggaagagcttgaaggtcttcgttcttcaggctctaagagcattctctttagccagtggaccgctttcctcgatctcctccaaattcccctctctcggtataccattgttggcttgctatggtagttatgagaataaattgtttttaagaatctaaattatagcacaattttatctccaggaataacttttcatttgtccgtcttgatggcacgctaagtcagcagcaacgagagaaggtccttaaagaattttccgaagatggcagtatactggttggtgcagtcgcattatattgcaatgttcaatacttatactttctagtgtcgaatttgaagttaaataagtctccttttcaattgttggataggtactgttgatgtctctaaaagctggtggcgttgggataaatctaacagct

SEQ ID NO: 1334 - DNA, 542 bp, Arabidopsis thaliana
atatgatttgctccctggagatgttgttcatcttgctatcggagatcaagtccctgcagatggtcttttcctctcgggattctctgttgttatcgatgaatcgagtttaactggagagagtgagcctgtgatggtgactgcacagaaccctttccttctctctggaaccaaagttcaagatgggtcatgtaagatgttggttacaacagttgggatgagaactcaatggggaaagttaatggcaacacttagtgaaggaggagatgacgaaactccgttgcaggtgaaacttaatggagttgcaaccatcattgggaaaattggtctttccttcgctattgttacctttgcggttttggtacaaggaatgtttatgaggaagctttcattaggccctcattggtggtggtccggagatgatgcattagagcttttggagtattttgctattgctgtcacaattgttgttgttgcggttcctgaaggtttaccattagctgtcacacttagtctcgcgtttgcgatgaagaagatgatgacga

SEQ ID NO: 1335 - DNA, 631 bp, Arabidopsis thaliana
accaagggaaacgttcacatatgcagcctgtgaccaaaattctgaagttagagccaccggttcatcatcaatacccaagttcaaatcctgaaccgatttacgaagtctgtcactcatgattgtggatgacagtgtttgagaaatggtgaattgcagaaaagggagaagaaggagcgaattgaagtatatataagtttgtatccatggcggtttgtgtgggtagttaccctccgaaagtgaagggcaatgataactgccatggaaactgattggcagaaagtaaccgccgtcataaaaccgtgaaaagagacagattatgatggtcggagaactgctccggcgaggagaattgaaacggtgtgagttaggcaaaaaatcgccctcagagagagagagagccatcgttttagcataattagtagtagtacttgattttacaagaatttcttttttaaaaaaaataaaaaatattaataaaattagatttaacacgtctatatacaagaatttcttttttaaaaaaaataaaaaatattaataaaattagatttaacacgtcgattatctctttcactcaaagtatttgatacatgtgttagcaaatttgaaaatcatactttatattataaaa

SEQ ID NO: 1336 - DNA, 563 bp, Arabidopsis thaliana
cataaagatgagagtctcatcatttggctccacttgggtccttcttgacaacactcttgataactccaacaccaacggtttgcctcatgtccctaatagcaaaacgtcccaggggtgggtacgcagagtaagcctcaaccaccataggcttggtgggagtcatattaataatagcggcctcactgttctttaaaaactttggctccttctcaatctcatgaccagtacgccagtcaatcttggtcaagatctcagagaacttgactgcaatgtgagaggtgtggcaatcaagaactggggtgtaaccatttttaatctgaccaaggtggttcatgatgacgacctgggaggtgaagctagcagcaacctttgcaggatcatccttggagtttgaggcgacgtacccacgcttaagtccccaaagaaagaaactaaggatcaaattttgcagccaatatggaatgtgcagccttcactccatggcatcatttcagatctatatcgtttgggccctacattcatcagtggaagctaagtgcggccacatgtacagtaaatgttgt

SEQ ID NO: 1337 - DNA, 306 bp, Arabidopsis thaliana
gctgctttgtctccgataagcattgagtcgcaagtcgaagtatttttagcaccctcagctttggactgcacctgaacaagaccacggtaacaatttctcgaatgcccggccgaaattccctttgaaatgattctacttttggtattctttcctttgtgaatcatcttagtccctgtatcagcttgctgatagttattagtcaatgccacggagtaaaactcgccaacagaatcatcgccttctaaaacgacgctcgggtacttccaagttatcgcagaccctgtctcaacctgagtccacgagatc

SEQ ID NO: 1338 - DNA, 438 bp, Arabidopsis thaliana
cgagacttatggctctccctagaaaatctcttccgtgataataaggaggctcgtgcacttcagtttgaaaatgaattgcgtactacgacgatcgacgatctctcggtacatgagtactgtcaaaaattgaagtcgctttcagaccttttgacaaatgtcgactctcccatctcagatcgcgttcttgttatgcatctactcaacggtctcacggagaaatatgattacatactcaacgtaatcaaacacaagtctccatttccctcattcactgaagctcgctcaatgttgcttatggaagagagtcgcctctccaacaaaagcaagtcttccttgagccacacaaatcacccctcactatcgaatgtcttatttaccgtcccccgccagcaagaacgctatccgcaagagtatcacaacaacaatagtaatatggga

SEQ ID NO: 1339 - DNA, 816 bp, Arabidopsis thaliana
tcccggcccaatataagtgatagggaaaatgagaaatgagactcattggttcgtgtctcgcgccagaatcaagcctccttcacgctcaagattccacccaagttgtggagaaccggtgtactctaggctgattaaaacaacatattcgatggtccaagagaccaaagcaacttcaacatattggcctataagatactccatttaatcaatgtaaatcatatagttcttatattaacattctagacaacaatttaaatacgaattcgaccaagtatatatattacaaggagaaacatatggctaactatagatctcttacggtccaaataaacaaacatacgataaaaataacttcattctcgttttatcactgacgaggcagaaccactggttcccggcgatggctgagctggcatttgcccaccgtgaataaactcacgcgccagtgcttggagctcaccgcctccgcccatattggacgatgacgggacgccgaagagatgatcagacggtcgtggttgttgctgcatggcccaagtggaggacatgaccggctcgaagatggaggagaggtcgtacaccgacggtgatattgttgggaggtccgttatggaaagagcctgtagagatcctgaagatgacaccggaacctgtggtggttgaggttgtggcagctctagagttgctaagtgagcctctagagactggatcgctggggcatgagttggaccagagacgctttgaacgatcatcaagtcttgtagagtaggttgcctcgatcgagtaactggtcgagtaaaggatcgagtaaaaggg

SEQ ID NO: 1340 - DNA, 588 bp, Arabidopsis thaliana columbia
cgaagcagacaagcactcttacttcttcttcccaggtttttctgtgggctggagatggaggaacccaagcatgtccattctctagtgaattctcaatggcacgtatcctagctcgagatagatcatgcctcacacgttgatttttagagttccatccaaaggtggaaggagattccgaacctgtaagctccacaacttgtggaataggaggctgcaattgagttcctgtactcgacaattgccgaggagcatcctacaaaatattcaatatctaacctcagccattaacaaacacaagaaaagatgatatacagtcaacaaccaaaagctttctttacatcttttagtccatcaatgtgcacgacgatgattgttatatcatctgtccgagtttcatactgtagccatagcctatatgattcagcaacaattgcagcacaagcatctcgaggatccttatgttttgcaacctgaaaaagaatacattcaaattttgtgagacttcttcctctacttagggaactgtgatgaaacaagactgcggagggaagaatacattaccatgtcaaccaccgtttgactagagat

SEQ ID NO: 1341 - DNA, 562 bp, Arabidopsis thaliana
cggagtcctattgtgctctaaagaacaccttcctgaagctgattctgatgccactggcactgcttctcgttggtatggcatgtcatttgaacagcgaacatctgcagatgatggtactggcaggcgcattaccgccggcattctccggaatcattattgccagccggtttaatgtctacacccgtactggtacagcgtcattggctgtgagcgtactgggctttgtcgtcacggctcccttgtggatttatgtcagtcgactggtttcataattaatcatgttattgattttacataaatgccgaagtgtcttttcaccttcggcttttttcaaggcataagcaaatgacaaataatgaaagcaaagggccgtttgaaggcttattagttatcgatatgacacatgtccttaatggacctttcggaactcaacttctttgtaatatgggcgcaagggtaattaaagttgagccgccgggtcatggtgatgatacccgcacatttggtccctatgtggatggacagtcactctatctttagagcacactggcggacgttacta

SEQ ID NO: 1342 - DNA, 214 bp, Arabidopsis thaliana
gcacctccacttccaactccaccaaaccacaatagcgaacagagttgcccacgcataacccgtctcagcattcttcattcctagattgacgtaaagccaaccaaaaagcgaaccattaaaaaagtcatagctcctttgaacctgaactagcctgcgccaaatgcccgcaattgatggacagtcttttagaacatgcaaaattgtttcatcacca

SEQ ID NO: 1343 - DNA, 774 bp, Arabidopsis thaliana
gagaccaaaacgtgttgtaaactgataatgtaattcgttcctcatcagagagaaaacaaacaaatactatttcttacaaattattactgttttctttctgaaacaaacacgacaaggcaagattattaattttattataactagtttgttttcattgaacttcttttgaatcttgaatccgaacttgctgtgtactctgccacaagctttgaaaatgacgaggacttgtcttccagcaatctcgccggtgaatcgtgttcttctattaaccctgcatttttagatacataaccaatcttcatctaagccttccttctgatagaacaaacgtattaaaaaagtgtatgatcattaccttggtctaggagcagtaccatatcactgtctataacagatgatattctgtgtgcgattgttattactgtacagcccgagaaatgttgtctcagtgtttcctgtatcagagtatcagtcgctgtatctacagaagctgtggcttcatcaagaatcaatactttgcttctctttagcaagactcgtccaagacacaccagttgtctctgaccaacactccagttctgtccattctcacttactgcaatattagagattcctttcattagatgtgttttaacagattcgagatgactcttgtcgactatagttttagccgtactaaccaggggaatctagctttagttctttcttccttatttcatccccaagttgacacttgtcgagtgcctgacatcagagcaacaagaatcgtgtgag

SEQ ID NO: 1344 - DNA, 519 bp, Arabidopsis thaliana
caaaagagaatagatagtgggagattctcggatcgggaagggctgcgagaggtggttttcacggcggggatagattcatcttctgtcttctcctgagggggtagccgaggctccggcctcggggtatgtttaaacccctacctttacaaattctgggaaattagaaaaaaaaaggtttgatttttccagtgtttgctctgttcttctctcgaaagtttttgttttgttcgagaatttctgtaaagtgagattgttgatcgtttgctgataagagggtgaagataaagatgcctgctttagcttgcgttgatacgtcctttgtacctcctgcctacgccttctccgacaccgccggtgatgtttttatcccggcgtcatcaccaacttccgccgccgttgttgttgaccgttggtctccgtcgctctcatcgtctctctatcgaatcgatggatggggagcccttatttcatagcaattcgtctggtaacatctctgtgcgtcctcatggctctgaaact

SEQ ID NO: 1345 - DNA, 555 bp, Arabidopsis thaliana columbia
ataaacttcccatagagcaccactcatcaaaccagaaagatgttagatacccatttttaacctccactcgataaaactgttttgctatacccccgtatttgagaatcttgtgccacatccatgagccccgagttgtgttgccttttatagaccagaacgaaccatcacggattagatatttttgcacccagttcacccacaaagacccatgtgccgagaggatacgccatattagcttaagcatacataccttgtttgcttcgtctattgatcgcaaacccaatcctccttcctgttttggagtgcagacctccgaccaagcaactttagccttctttgggtttagagatggacccgaccatagaaacgctgaacagagtttatctatttccttgatgcatgcttttggaagacggaaagcggctatccaaaaattggtgaggcagaaagttaccgaacttaagagttttagtcgtccagcaaacgatagcgtacgagtcgaccaggagttaatttgcgacttgatcttttccacaagggcaggaaatctgagga

SEQ ID NO: 1346 - DNA, 799 bp, Arabidopsis thaliana
accaatctcactgaagtggttcagaatttttgttaattcggtatattcgtactgaaccatataaaaccaaatttcttctcctttcttctcttttctctgtttcactcactcccactttactcaaaagagacttaaactttatagttgttttcttcatcagcgcaataatgaacgaagagatgagcggtgagtcgccggagaataacaaacacgtaaagaaaccgacgatgccggaaaagatcgattacgtgttcaaggtggtggtcattggagattctgctgtcgggaaaacgcagctcctctcacgttttacacacaacgagttctgttatgattcaaaatcaaccattggtgtcgagtttcagacacggaccatcactcttcggggcaaactcgtcaaagctcagatctgggacaccgccggtcaagagaggttatatcatctatatccaaaaacacattgataattctttatatattttattaagctctcacttttggattcaaatcatttgtttagactatcacttcatttcacttggatcacggtaatttagatatggtttgatttgattttgtaactaaatatatttctaatacaatatggaatatttttgttgggtaaagaattgtggtatggatttgaataaccattggtgttcttgatttggttaatacaatgtcagatttcttttctgcatattttgttcttgtctttttgcaacacttatagacaacaggtcaaatgcaataactcaccgaatactttgttgcatacttgcatcagtaaaactttata

SEQ ID NO: 1347 - DNA, 1080 bp, Arabidopsis thaliana
ctcccatgaggcagatttgtgtataaggaagataaacattgatgttggaaagtaagttgatcattttcaaaacgaagagatgaagaaggaaaaggaattgtaccagcagacgattgaacagccattataccatgttctgtaactgttgatggtgccgatgttgatggagaagacgcaaaggctctgaagtttgaatacgacctgagagttgttgaatcaatgtctgaatttgatctccactcagcttgttaatatcaaggttgttaacttctgtagctggtggtggaatgtatagactaggaggattagtcatgatatttgcaactgaatgaggtttagatgcagcatttgcagaatatcctctaggctgaaaggttgatggagcaggagatctctgagattgatagttagagatggtgctcttaaaccttggaatataccctggaggataaccaataatcttgaaacatttctgtactacatgtccagattgaccacattgggtgcaaactggtctaggtggtctcggacgatattcattttgtactgcaaaagctgtattatccatctgaccttgatatgaagagacatcttgataacattgaccagaagattgattaggtcctgaagcttgaaacactacagtttttgatgaaggtgtcttaatacttctctgcctttcatcttgagttaccatattgaatgcatcctcaatagttggaatcggcttcagcatcaaaatttgtcttcttgtagactcaaatgactcattcagtcccataagaaacttagtgactcggctcctctgctgcaatctttcccacaacactgcagcattgcactcagatcttccacaagtgcaaacaggcaattccacataatttctatattcttcccataatgtcacaagttctgtataatatgaactaacatccatagcaccttgttgaataatactcaaacgctgttctatttcatagactctaggtgccatcttgtttgaacctagctaaaagattttccaaattcctcagcagtagatataaacagcaagctttgaccaatcttcttgcatacaga

SEQ ID NO: 1348 - DNA, 809 bp, Arabidopsis thaliana columbia
ataactcctaagatcttgaacattgtggccaccaaagactgccggcaacactttctgggcagtcttgaaggtgcgaaatgccctccataggtggagccatggcaatgttccagtatagccttgaacttcttcttcagagacacacctcctgaatagtccatcactccccttttcatacaggtacggtccatcccaatagtaactaagggccggaaaacttatcgacttctgaatcagatctttttgcgggttttcctcggctatgctaacttagagcaaatttttgggtgaaggtttcttatgagggtcgacagtatttatagggtctctgtgggttctgaaatccacactagagatttgtaattgagattatgagaaaggagggctagatcttcacaagaaccttgagagttatattgctaagaacaaatagactttttgtattgattatgaccaagcttttacaatgtgaaaggagattacaagtgtaaaagtataagtgtgaatgtaaagatgagttgaatgtgttttccaagtcgtccttgctcccttaaataggtctacgcacgtggtagctccgtccgggatctgtggagattctcctggatattcggcaggtcagttccgagatatcaggtcctctccgcgaatatccccctgttagttcctaggttgttattcgcttatcttccttcatcaggtgaacaggcttattaggcccaagtacccattcgcgtatgtggactcatcagttgcataggtcctctacttggtgggctttgtgggctggcttggtatttttgcaggtg

SEQ ID NO: 1349 - DNA, 872 bp, Arabidopsis thaliana
cttcaccgaaagaccatgaacggatcatgtctgcgaagccagagcaattttgatcgcatcaaactcttcggttttagtctgcgctttcagaaactttaataaatctttcacggatttgctcccgtcggagttagcacaatccgctgccggttttaacccgacagcagtgacctgtttgagcgagaattactcgtcttccagttcgatgttgatacccagcgaacgaatctctttcaacaatacgttgaaggattctggcatgcccggctccatctgatggttgccgtccacgatgtttttatacatcttggtacgaccgttcacgtcatcagacttaacggtgagcatttcctgcagggtgtatgctgcgccgtatgcttccagcgcccacacttccatctccccgaaacgctgaccaccgaactgtgccttaccacccagcggctgctgagtaaccaggctgtaagaaccggtggaacgcgcgtgcatcttgtcgtcgaccaggtggttcagtttcagcatgtacatgtaaccaacggttaccggacgctcgaactgttcaccagtgcgaccatcgtacaggcggatctgaccggaagtcggcaggtcgccaagtttcagcagctctttaatttctgcttctttcgcaccgtcgaacaccggcgttgcgattggcatacctttgcgcaggttttcagccagacgcataacttcttcatcgctgaaggtactcaggtcaactttctgacgaacgtcagcgcccagatcgtacgcacgctggatgaattcgcgcagtttcgcgacttcttgctgctgtttcagcatggcgttgatcttgtcgccgatacctttcgcagccatacccaggtggg

SEQ ID NO: 1350 - DNA, 1590 bp, Arabidopsis thaliana
tactgtcatcgacttaactgcagaacaactcagcatcgtcatggttatcttaccaccagcaaccgaccgctcggaagatgccggcccttctggcaacttagtctgttcaagcgatcccggtcagtctagcggttgtgaccgatcagacgactccaaccgatcagccgactctgattctcctgcttcaaccaattggatagaagaaatccgctcctatatagccgatagaattgtccccaaggacaaatgggcagcacgacgtctccgcgctcgaagcgctcagtatacgcttccccacgaacatcttttacggtggagtgcaactggagtcctcttgtcttgtctcgacgacgaggaagcacaacaggtcatgagagaaatccacgaaggagccggaggtaaccattcgggcggccgcgctttggctttaaagattcgcaaacatggacagtactggccaaccatgaatgcagactgtgaaaaattcgtagctcgttgcgaaaagtgccagggtcacgctccgtttatccacattccatcagaagtcctccaaaccgccatgccaccttatccttttatgcggtgggcaatggatataatcagaccattccctgcttctcgccaaaaaaaatatattctcgtgatgacggactacttcaccaaatggttcgaggccgaatcgtacgctcgcatccaatccaaggaagtgcaaaactttgtttggaagaacatcatttgtcatcatggacttccatacgaaattgttaccgacaacggcacccagttcacatcactccaattcgaaggcttttgcgcaaaatggaaaattcgtctcagcaaatcaactccacgatatccgcaatgcaacggccaagccgaagcgactaacaaaacaattctcgatggactaaagaaaaggcttgatgaaaagaaaggagcttgggccgacgagctcgacggggtactttggtcgtaccgaacgacaccgcgccgatcaaccgaccgaactccgttctctctaacatacggaatggaagcattagcaccgtgtgaagcgggcctccccacagttcgtcgttctatgttaatcaacgatcccactctaaacgaccagatgctccttgacaacctcgacacccttgaagaacagcgtgatcaagcacttcttcgtatccaaaactaccaacaagcagctgccaagttctacaacaagaaagtaaagaatcgactatttgcagaaggcgacttggtcctccgtaaagttttcgaaaacacggtcgaacaggacgctggcaagttaggagctcattgggaaggtccgtaccttatatccaaagtcgtgaaaccaggtgtctacgaacttctcaccatggatggcacaccgattccccgttcatggaactcggcaaatctgaaacgttactactactaaaaccatcagacacgagagaggacacagctgaaatcgctctgactgccgagctaacgcctattgtataacgaactacgatcggcttgatcccttccaaatggtacgtaggcagactctcacagaggcacagatatgtaaaatcccatattattcaaagt

SEQ ID NO: 1351 - DNA, 535 bp, Arabidopsis thaliana columbia
acatcttcttccatggcttcttcttcttctccatcttccattgatttttcgactgcaattctaataagagttgatcaatcgggcaaaggagacttcagtaagattcaagaagcaattgaatctatccctcccaatctaaacaactctcaactctatttcatttgggttaagcctggaatttaccggtacatataaaatattttgttagattttctatatttaagtcgtcttaaggtttattaggtttttagaccttaatggtttagggtttagattttgttgatatttatcagctgggtattaggtactaggcttttttgacctactaatatatttatgattttttttcctaaatagtatatgttattgatgattagtttattctatgcttttaaagtatatagttttgagaattagcgatttcattgataacagagaaaaagtggtgatacctgcggagaaaccctacataacattgagtgggacacaagcttccacacttttctcatatggagcgatggcgaagacattttgg

SEQ ID NO: 1352 - DNA, 560 bp, Arabidopsis thaliana columbia
cggatgagatatacaaaatctgcagtgtcataggcagcccaaccgaagagacctggttggaggggctgaaccttgccagcgttatcaattaccaattccctcaggtatttttaattctatttttaacttaaagaggaaagaaagcgtcactgattttatagttaaggttactataaacgatctgtttctcatcttgcagtttcccggtgtacatttatcaagtgtgatgccatatgctagtgcggatgcggttaaccttattgagcgcctttgctcgtgggatccctgcaatagaccgactactgcagaggctctacagcatccgttcttccaaagttgctactatattcccccatctctccgtcccaagctgtctgaaccaagagggtctctcgagcagcagcaatccgtgaagcgtttaccagcggctccgacttataatgctaataagccgttgaacacctacgttactccaaagacgaatgctccttttagcaatggtgcaacagttatgttactcacagacaaatgctccatttagcaatggtgtcacagttatg

SEQ ID NO: 1353 - DNA, 578 bp, Arabidopsis thaliana columbia
catcacactctcttgtgaaactcgagcctcctttcgaaaatatgtcttcaaataaacctccagtaacagccttaactggagattcaatagtttcacagtcgttaaggttgttaacattgcgcaaatgagcaccggatcttccataacgctgaagtctagacctaacactttcagcttgtcctagatatgaagcaagaacaatatctggttcaagctttcgacattgttcttgaccgatgaccgctacaccgagctcatacagacccggacaagatttacgaggtaagttctggactctgtatctacctacaccatcttttccgtttttgaaatcttcccaatcgttggatcctataagtacctgtgcagcatcaaactttacacaatcagataaaactaagatctaaaaccaaccacttcaagtagcaaatgaaacagaattaggctaattagatatacatatagttagcgaccaattctaacagaaatccagagaaaatgcatttgggacaaagcagacacactaggcattcaaaatgggatctttcactgaaatcctggaaatggaagatcagatt

SEQ ID NO: 1354 - DNA, 773 bp, Arabidopsis thaliana
aggatattacctcaaacattgacaaggtaccacttcggtaaatttcatcaccaggtgggtgcttcaggtcacacttcctctgcaggaaaaaagtaaggaaattatacaaaagctacaagataaaataaaaccatataaatgcaactttaatgaaccgtgaatgtggatatgcaagtcagtgacaatattcaacagaatctgaaaggttgggtactatcttcagcaatgaaactggaatgcaaaaacatagaatacagatgtgaaaccagactattgaagctcgcaatggaaatgtaattaaaaagcatcataagacttcaaagataaagaaaaacagttgctcaccatatgcctttgaagctgctctttgcgtttcatgaagttcaggcaaaactcacaaaaaaagagcttcacacagtcattgtattctggcggaaaaggggagaagtaccaagtctcaatctcatattttccaagctcaattgttgatatgttcttcactttcgtgaactcttcatgttcacgcaaacttgctgcatccagctcttcatgaccctataaaaacatttcgaaacacagaatactgaatcaacacaaaccttacgtttccaggacccgccttatattggcattcattacctctatatgtgtctcatcgatcttcctcttctggtgacgtgtcatcttcaagcttgttacctagaaaccacagacataaatctctgctcattgctaaacgtatatgagaaactcatgaaatcccattatgcact

SEQ ID NO: 1355 - DNA, 449 bp, Arabidopsis thaliana
  unsure (1)..(449): unsure at all n locations
tagtttntattagtttttttgcgccccgtaatagctctaaaccctgaccactttacctttttgttagtcatagctcccggaccctgttttgatattcgcggtagtagagagttgatacacaagtttctccttcccaaagagtccaacctgcgggataaactaaaacaccgatgaaagactgcataaccgcggctgttgaaaatatcctccaaggtcgaccaagatatgtcttcacagttgccagatctaggtctgaactcgtagtgatattgcatttttaaagcgagaagcccgagttagcgtccatattgtgcgtgactgggcggtaatgccattgctatgccccctcgtaggctgtcttgctacaattaggcagatctgaaagaccgcgccgcgttttcacaaataaaatctacagtgctaataataaagcattccctataaataga

SEQ ID NO: 1356 - DNA, 574 bp, Arabidopsis thaliana
cgtaattaacagtatggtcaatttcacattccaataacttacattgaagttcgtagagttaaaggaaaataatgatagagagattacagaatcctacctgttcgacattaacagtaaacggtccttttgactggcattcagaacaagaaccgaccttgacttctgaataagagttttggaagaaaggccccaaaactgctccacacttgttacaatcatatttcacttgctgcagctgaggaaagaccccagaacgcctagtgacaactccaccgatacggatcatcgtgttaagatgaatctgcctgacaattcacaaacaataaggtttaagttgaaatcttgaaaatgtatacaaagtgagtcactacccatgaattcagcgatattattacctgatgttccgaatctgatcattaactggtaggttggtacacgaacatatatcttcgtgtgaatattcttgtagtttggatgcagatcaaagatgaccttttcagaaacttcctccatcacttcaagcacaggttgtggagcaccgcaagccagattgcaatattcgggtggacgtgta

SEQ ID NO: 1357 - DNA, 510 bp, Arabidopsis thaliana
gtgaaactaaaaataactgtaaagacaaaacaattaaaatgctacaaatgataaaaaaaacagttgctcaccatatgtctttgaagctgctctttgcgcttcataaaactgaggcaaaactcacagaaaaagagcttcacgcagtcattgtattctggaggaaaaggagagaagtaccacgtctcaatctcatacttcccaagctcaatcgtagctatgttcttcactttcgtgaactcctcgtgttcacgcaaactggcagcatccagctcttcatgaccctatacaaaatatcgaaaaacatcagaatatatagcatgccacacagttcactaaaaccacaacaaagtttaactaacttaaccaatcactttacctctacatgagtctcatcaatcttccgtttctggtgtcgtgtcatcttcaagctagtcacctattaccacaaacaaacttctatgtttcagtgcaaactacggagaggaaagctcaagactttgaagaaaaatg

SEQ ID NO: 1358 - DNA, 533 bp, Arabidopsis thaliana
ctgcccgataacactccaataagtttggagaaaaaggccagtcatcccatcagcaccgggtgcgctactacctcttatgccaaagactgcttgtctaatttcttcattagtgacaggtttagtcaactcaacattcatactagcggtaacccgaggaagcataccagctaggagattggatgcatcacaaagttgagaagatgaaaatagcttttggaagtagtccacagctatgttacccttcgaaccatctgaaaactgctccaccccattgtcatcaattaaggaaaaaactttattttgagctcgtcttccgttaacgctaccatggaagtatttggtgttcttatcaccatcatttaaccaattttctgaactcttttgcttccaatacacttcttcttgcctataagcatcagccagttcacccttccatctttgaaggagaaaaaatctaggaaattgcttactcccttcctcctctaaattctctctcagcatcttaatacgtgtcttggagttggattgtgaag

SEQ ID NO: 1359 - DNA, 462 bp, Arabidopsis thaliana
cacgcgacctgatctattccccaaggatttgtgttcacagctctcaaagcttcacagtaatgctcctgagcatagcttcgcctacactaagaaaactatcgagaaggcatttggtcgtaaactttctgagatatttgaggagtttgatgaggtgccagtggatctgggagtattgcccaagtacatagagcttctttaaggtttcagtatccaggacaaaagtccaagtcttcgctggttgcggttaaagttagacatccgggtgttggtgaatcgattaggagagattttgtgataattaatttggtggcaaagatatcgactttaattccagctttgaaatggttgagattggacgagagtgtgcaacagtttggtgtcttcatgttgtctcaagttgatctcgcgagggaagcttcacatttgagtcggttcatatatcactctcgtagatggaaggat

SEQ ID NO: 1360 - DNA, 504 bp, Arabidopsis thaliana
attccttaccttctttaactagtcctgcgtgtgcacaagccgatataacaacaagaaatgtcactgaattcggtaaaactccgcttccttcttcacacatttccctgaagatttcaagagctttaaccccatccccattaaccgcatacgcatctatcatactcgtccaagaaaccacacttttagatggaatagctctgaaaatagtacgcgcttgcacaatctgaccgcattttccatacatatccattaagccattgcatagcttagaatctgaaacgaaaccattacgtaaagcgacacagtgtatctgtttaccaatccacagatcagagttatcagagcagccagcaagagagctactgagcactctcacattgggtctctgcctactcataagcagaaacgcttccttgtaatttcggtttcgaatgcaacctgatatcaaagaattcaacatcacctcgtccgtatgaacattcaaactgttataaaccttcatgg

SEQ ID NO: 1361 - DNA, 554 bp, Arabidopsis thaliana
tcggtcactgcacgaatcttcagcttcttgatctcagcagtaataacatctctggaactataccggaggagctttttgacatccaagatctagacattgcgttaaacttgagctggaattcattagatggctttatcccggaaaggatttccgcgcttaaccgattatccgtgctcgatatttcgcataacatgctttcaggcgacctttctgcgctgtccggtctagaaaacttggtttctctgaacatctctcataacagattctcaggttatcttccagatagtaaagtgtttagacagctgataggagcagagatggaaggaaacaatggactctgttccaaaggtttcaggtcttgctttgtaagtaacagttcacagttaactacacagcgtggtgtgcactcacatagactcaggatagccattggattgctaatcagcgtgacagcggttctagcggtattaggcgtgttggcggttatacgagctaaacaaatgattcgagatgataacgattcagagactggagaaaatctatggacatggcaa

SEQ ID NO: 1362 - DNA, 130 bp, Arabidopsis thaliana
ccccttttttatttatttatttatttatttattttgagacgaagtcttgctattgtcccccaggctggagtgcgatggcgcaatcttggctcactgcaacctccgcctcccgggttcaagtgattctcct

SEQ ID NO: 1363 - DNA, 593 bp, Arabidopsis thaliana columbia
taagtacctctctaattgatctttacatgaaaggcggagactttgccaaggcattcaaaatgttcagcaatctaaacaaaaaggacacagtttcttactctgctatgatcatgggctgcgggataaacggcatggccacagaagcaaacagtttgtttacagctatgattgaaaagaagatccctccaaatgtagtaacattcacaggactattatcagcgtatagccattcaggtcttgttcaagaaggctacaaatgctttaactccatgaaagaccacaacttggaaccctccgctgatcattatgggataatggtggatatgttgggacgagccgggagcgtagaagaagcatatgagctgatcaagagtatgccgatgcagccaaatgctggagtttggggagctttgcttttagccagtgggttacacaacaacgttgaatttggagagattgcgtgcagtcactgcgttaaactcgagacagatcctacaggttatctttcgcatcttgctatgatatattcgtctgttggtagatgggacgatgccaggactgttagagacagtataaaagagaagaacctgtgt

SEQ ID NO: 1364 - DNA, 1549 bp, Arabidopsis thaliana columbia
gttggttgtgaatgggatgtattttgtcaaatttgttctttgcggggtggttaataggacctctcttttcatttctggagcttgtagtcaggttgatgtagttctaatggagaatcctttttctaagtgtagaacgctaaatgtgtttgctatccactgtactgttatcagattggcacatattgagctggtatcagatcagacattgtatttatgtagatatgaatagttttaagctcttttgctttcaattggagagtaaaatttgaatgaaaatagcttgttaaatgacagagaagcaacctagatgtgtatacttgtctgtaccgtgcataagccaagaatattgcgtgcattgaaggaattctgcatattgaattttaacatacgtttctggactgtagacaacagcttcagattagttcggatagaagctctttctgagcgcctattatacaactattctttggattgttaatgctataacttgtttctgttttttaatctcttgtaggtatggtcctatgcagattcaaaaaaagccggctaccttggccgagcggagttttataatgctctaaagttggtaacagtggcacaaagtagacgagagttgactgctgagatagtaaaagctgcaatttatagtcctgcttcagccaatatccctgcacccaaaataaatcttgctgcaacaccttctccacagcccagaggagttttgcctgctacacaagctcagggagttacatcaatgccatcagtagcggctggtgtgagagggcctcacatgggtggaactgtaagcactagtaaccaacaagtagtcccaggccaacagaaccagtttactgggatacctccatctcagacacagcaaaactttcaaagcccgggaatgccagctggagggactaatgcacctcgtcctgcaaaccaacctatgccatctgattggctcagcggcagaagtgttggtccctctgggaacgtgaattctcaaattccttcgagtcagagtacatatggtttgacagcacctaattcaactgccaaccatataacaaaaccacatataacacctgcagtaacaagctctacaacaaccagaccccaagagtcagcgcctgtgcacaatccccaagaatcatctgctactttcggttctcgtgtatcaaatgttccatccaatcaattggtgcccaaggatcccaaggaactggctgcatcaggaaacgggtttacctctgactcacttttcggagatgtcttttcagttacttccacgcagccaaaacaacatcctacgggaagtgcatcaacaacaggcatctcatcggttactactggaactgtcgcgggccctgagatcacacagtctgtagttaggcaaagttcaatcccacaacagggttcattgagccagcatgctgttggtgttcagacccagcttactggaaactcagggcaaccatatacttcctcaggtgcggcttctggtccacctggctctactgttggagttggaatttcagctaccagtcagttg

SEQ ID NO: 1365 - DNA, 614 bp, Arabidopsis thaliana
ttcgacgcatgatgagcgagacgcagtgtagtaagattccatatgcttctactataggatctatcatgtatgctatgctttgcactctcccagatgttgcatgtgcttggagcatgacgagcagatacaatctgatccaggtgaaagttattggatagtagtcaagaacatccataagtacttgagaagaactaaggataagtgtttggtctatggaggaagtgaggaacttgttgtgagtggttatagtgatgccagctttcagacagacaaagatgatttttttatctcaattaggatttgtcttttgtctcaacggaggagtcgtgagttggaagagttccaaacagagcactgtggcagactctataactgaagttgctgcttcaaaagcagttaaggaggctgtttggattaggaagttcattactgaacttagtgtggttcctaatattcctggcctcattgatctttactgtgataacaatggtgccatcgcgcaaacaaaagaacgtagatcacaccagaaatccaaacacatacaaaggcgatatcacctcattcgtgagattattgatagaggtgatgtgaagattagcagagtttcaacggat

SEQ ID NO: 1366 - DNA, 566 bp, Arabidopsis thaliana
tccccggaatttcaaaggcccgctcttagcaagaccaccaaacatcaagatctttcttcctccataaaccgatagtgtgtggcctaaccgggaaggcggagtccaggcagctggaatctctctccacactggtttctctattgaaaggtcgaggaggaacgtgtcacttagaagaacgccggaatctgcacagcctccagagactaaccagtttggttccgtcaagggtgcatgagctgtgccatgatcttggtagaggcggccaaaccccgaaattcccctccaagtaaggcggcttagcatcgagattcaagacaaacacatcgttcagcaaaccttggctgaccacagccaccaaatacaaccagattggagccatttacacaagtgagcgtgtggcccagcgtcctggaggaggggagctcactttgacatgttgccattcagggtaatcagaattcagatctaaaacaaaggtatcattcataggctgcatattcacaccttctcctccaaacagaacaactctgttcccgacagcacaagcactaaaattacagcgagaa

SEQ ID NO: 1367 - DNA, 1003 bp, Arabidopsis thaliana
ggtcgactctcccgtccagatctaaagttggtaacagtggcacaaagtagacgagagttgatttgacccaacggatcaagaattgatagaacatttagaagcgaaagtgttagctaaagacttcaaatctcaccctctcattgacgaattcatcccaaccattgaaggcgaagacggcatttgctacactcatcccgagaaacttcctggtacatacacaccttcatgcagtccatatatcacattcttgatatatcttcattatatgattatttgataagactaatatacataatagagcattgtgtcacaccaaagtttgattttgttttagttgagtcacaccaaattttatatctcttatactttggtcacaactacactatatacatacctttttgtataacctatacatctatatatatacattcttcatgcatatcttatttataaattacacatgcatgtcttcattataatatatgattgcttgatatgactaccaacggagggtcaaaccaatgttttgatttttctttcttttcatttggtcataccaaagtttgaatctttttaatttgggttacacaagaaacatataaattaacaataaagagatttttcttttttcaacttttataggagtgactagagatggtttaagccgacacttctttcatagaccatcaaaggcgtacacgacgggaacaagaaagcgaagaaagattcaaacagaatgtgacaataatttgcaaggaagtagtagctccggtgagacgaggtggcataagaccggtaagacaagaccggttatggtaaacggtaagcaaaaaggttgtaagaagattttggttttgtataccaattttggtaagaatcgaaaaccggagaaaaccaattgggtaatgcatcaatatcatttggggacacatgaggaagagaaagaaggagaacttgttgtgtctaagatcttttatcaaactcagcctaggcaatgcaactg

SEQ ID NO: 1368 - DNA, 948 bp, Arabidopsis thaliana
tgcctctggttatccacttgtgtggatacaggaagtgggcattgacaaacggcaagaagaaggtgagaggagcactatgcgtgggtggcgttgtgacgccaattctggaagcttgtggagtaccgctcaaggagccaggtttagcaccgaggatgatggacttggatcattggcgccgatgtgagttcttagagtatgacatggttggcgacttccagcgctacaggttcgagcattcatcgattagaatcgccaatattcttctcccctgcattgacgctactaggattctcgagggaaggaacattgacttcaagcctgcgcttgaagatctctatttcgagggctgtccaccaactgaggagattagtcacaccgaaggagttacaacagaagatgttgatgagacagataaaattgatgaggcagagattgacacgagcatgtatcatttcagtgagaatatacctctagcgagggaaagcaagagtttgagcgacgtcacaggaacaacaacaagttccagaagtggtgcaagaaacaagataagttacttgccaagtgcctcagggctatcaagtttctgaaggactagatcagctgctcctcttccactacagctattccgcagggacatctccctcaggacatgccctcgaggagatatgacgcgcctgagccaagtcggcgcaggcctgagcctagagaggaggagattccgcatgtccctgcgaggcattcatcattcgagcctcgtgaatgtgggaggaagaggaggaccagactcactcgatctagcagcaggagcagacgacttctgcagcctcgtagtttacgcgaccgcggtgctggccgcagtagaagaagagaggtcgagtatctcagagcggtactggctgccacagagctgatgaagtcaagtaccacttgctggagatgatcagacag

SEQ ID NO: 1369 - DNA, 709 bp, Arabidopsis thaliana
tgtactatttaatctgtcatttgttcactaacttcacacttttttttgtagaaaactcaccactgggatcccttaataacagggacagtccaatactacttcaatgagatcgttaagaggcgcttgaaggacatggttagcaccgcaaggagaactcgagagcagcctccatggattggagaaactctgtggagaaccatgtgcgactactgggacacagaagaggcacagaaaaggagtaagacctattccaaagctcgtctctctgaccgtaacggtctcggtcctcacgtccactactctgggccaaaatctttccaaaaaatccaagatgaattggtaagtgtttctgcaatcttcccatgtgttttagtgatgttcgtttaactgtgtgtgatgtttagtctgttgatagtaatgaagcttgtgatctgtgtttgcaggaagaaaaaatgggaagacctgtccctcttggtgaggtgttcatctagacacacactaagtcggatgggacttatgttgatcagaaggcagagaagattgctctggtgtatgagcagaatgtgagagagaagctgtctgaactagaggcggctgcttttgctgtgtctgatggctcttcacgtcctcgggatctcacactagatgagtatacaaccatatttcttgaggtaagatgttctttgtcttttttagagtgttagagaca

SEQ ID NO: 1370 - DNA, 570 bp, Arabidopsis thaliana
ttacactcgttttgctgctatattgaactgccttctcaggctcagagccctctaattcttgtttcttttctttggattttgaataggggatacaagcgtttcttcagacggtccttgcttgagacatctgactatcttaaagacgattgcttgaaaattaattgtacagttggagttgtcgtttcagaaatgcattgcccacggttactctcgattcatgtcccagactcagaacttggatcacattttggaaagttgctggatactttacaaggctcggatgtcacatttgacgttgccggtgagaagtttcaagctcataaattggttttggctgcacgatctcagtttttcagatcaatgttttacaatactctagcagagaacaacagcgacgtagtgatcagcgatttggaacctaaggttttcaaggtacaaatttcgagtttatagcttctcgtaatatttttctcgtattgtttgttggtacttatccaagtcgatggtccaccttatacaggccttgttacacttcatgtataaagattccctcccaggagatgtggacca

SEQ ID NO: 1371 - DNA, 522 bp, Arabidopsis thaliana columbia
cggcggcccttgaaaatccggagactggagtggcgataacacctagacttgagttttccaggaaaaagcttcaagcgagaattgaacagcaagacttgatcaccaacttgaaaatctttcgaacttattttcttgtcatgaaacgacttggtcctttccttgtaaattttagagctctcatatgcttctaggcggagtcatcaaggtcgttgagctgtatcaatcttttctcttcagcagtcttgatgtcgaaatttaaaagtttcactgcccacatagccttgtactccagttcaacaggtaagtgacaggatttcccataaagaagattaaacggggttgtaccaatgggagtcttgaaagctgttctgtatgcccataacgcatcgtcgagctttacagaccaatctctcctggtgatcccgacagttttctctagaattgattttatctccctgttagagatttccactggccacttgtctgtggatggtaaggagtcgctactttgtgtttacccca

SEQ ID NO: 1372 - DNA, 546 bp, Arabidopsis thaliana
caatattgtaattacctttattctaaaatgcttattgataattattccgacacgttttggcttaacatccagaccaacgtcaccaataaagtcctgtaaagaactcccaaaacatcaagtgttgcttttcgagatcgatcagaacgttccgtcacataacatgtgtgttccgaatcgtatatacgaacaaaacaatatggctcatccccctgtgtagatgcatgaaccaacgacatccatcaaactagcacttacaaattactgtagtcgatttgatattggtacatcaaaataaaatccatcccttaccgcaagaagtttgagtcgatagtccaactcgtctttgctcacgtatcgttgtcctacatcaaggtttaacgtagactactccaaccttagatcctcagagttcccagccgatccggtcgtttcaatgttctgaggtcactacttaggaagaagagtttgtgaatcgttcgtccttactatgaggttgccgtatacagtaaagtcactatcatcagatgaggcaccatcagagtagtc

SEQ ID NO: 1373 - DNA, 724 bp, Arabidopsis thaliana
gtagctatggattgaattaggtttgattcgtgagaaaaatgttttttacaaacatttggcaacttccagcatcactctttttagcaaaaaaatgtgcaccattgatggcaatgcacatcgatttaaggaagattttggagtcggtaaaactgttgtatggtattaacttgactttgttaaagtgacgaacgcggactgcggagagacgcgccgtgaagggcaagcgttgtgtttcttccaacaccctttctagttcgggcgccgcggtggtggccgatgcatttaggaagacatgtcccttattacgacgtttagttgtgcaagctccagattgcgggatcggtttttatcttcaacaggtcgatctgaaaagatctgtctgccctctagagttcggttatttggaaaattttggtcctttggcagatcttgacctgtcaagagatagtgatcgttcgaattatgaccgctctgcgactagttcgcgcttggcaagttgaggctgctctgcaagttgtggccgctctacaaattgtggccgttttgcaagttgtggccgatctgcaggttgtggccgctctccaggttgtggccggtctgcaggttatggccgctccgcaggttgtggccgctctaggttgtggcgctctacaggttgtggcgctctcaagttgtggccgtctacaagatgtggcagtctagaggttatgccgcctcaggttgt

SEQ ID NO: 1374 - DNA, 417 bp, Arabidopsis thaliana columbia
tgtgaaatcagatcgtagtcgattcatagccaaatgctctaaagaaggttgtccttggcgtatccatgctgctaaatgtccaggtgttcagacatttacggttaggacgcttaatagtgagcatacttgtgaaggtgtccgtgatctccatcatcagcaagcatccgttggttgggttgctagatcagtagaggcacgcattagagataatccgcagtataaaccaaaggagatattgcaggatatacgtgacgagcatggggttgcggtttcttatatgcaggcttggcgtgggaaagagcggagtatggctgcgcttcatgggacttatgaggaagggtaccggtttctatgtgcgtattgtgagcagattaaattagtcaatcctgggagttttgcttctgtttctgctttggg

SEQ ID NO: 1375 - DNA, 762 bp, Arabidopsis thaliana
ttctctttcttttttagtgttggaggtttttatgactttgtttataatctatgtacttgtgggcagacagcaggggaagattggtggctggatcttttcaaggaaaaacagggcatgcagatggaaaaccgagtgaggctcgttttaaccatccgagaggcgttacaatggatgacaaagggaacgtttatgtcgctgatactttgaatctcgccatccgaaagattggtgattcaggtatacaagttttctataggttttacttacatcagcactcaaaaactgaaatggttgcttgttgttgaaaaatataattaaactgagaagaattgtgttcttaagagtctgaaacatttttgttacaggtgttactacgatagctgggggaaaatcaaatatagctgggtatagagatgggccaagtgaggatgcaaagttctcaaatgattttgatgtcgtatatgttcggcctacctgctcgttgctggtcatcgatagaggaaatgcggctcttcgccaaatctctctcagtgaagaggactgtgactatcaagatgatagctcaatctctctaactggtaagaagtcaaaaacacctcttcccactacatagatcattttgcatacactctgtttaggggtggatttgagagtgttaacagaagatcattgcgtgcttacattcggtgcagatatactcttggttattggtgctgttctcattggttatgctacttgtatgctccagcagggctttggaaa

SEQ ID NO: 1376 - DNA, 536 bp, Arabidopsis thaliana
  unsure (1)..(536): unsure at all n locations
gtcatctataagcagtccttttgggacccaaactcattctttgttcggacagaccaataataacgcgagcaataatccttttgctacgaaaccttttggtacttctactccttttggcgcacagacagggagttctatgtttgggggcacttcaactggtgtgtttggtgcacctcaaacttcttcaccttttggtgcttcaccacaagcgtttgggagctctactcaggcttttggagcatcttctaccccttcatttggcagttcaaattcaccttttggtggtaagtaccttttatttatgttactgcattaactataccagggctggaatatactatgtgtttatatcatgtgagagatacattgataggcttcatggaataggatctactttctctcagtaggacttggagggtagcaatatccaagttttttggtcttcaaaagatttgttactacttccaaaattagtagtcttttgggttttctttgtgacagtactagcagctcctgatttggtctagtntgtttgt

SEQ ID NO: 1377 - DNA, 572 bp, Arabidopsis thaliana columbia
ggtccgaagtaaaatcccgtgcattgctcctttcttcttgcaattcttttttggcttcagcccattctctctgtgacaacccatccaacacatcggttaacttctactcttcttacataataattttgaaagacttatcaaatattatatagacctgaagttgcttaatatgctcctcttgtttccttctctcggcagctcttgtttcctgagtattttgataaagttataacatttttaatcggtattgcagaatagaattagtaaactaatatcaaaggtcgttttcttacctcacgaacttcctctgtactttgtacagtatccaaggtagcctgcagaacaacaggtcagcaaaaaaaaaaagagtacgcacagcttaagatcaaattgcactcctctcatgtttccaacctgaagacggtaaactctttgagatagagcagagacttcatcagacgctcttttttcagcatttgataacagctctttttcttgttttagaactgagacctatagatgactgttagtattaaagcaaaaaaaatcataaacttaacgggtgatggtat

SEQ ID NO: 1378 - DNA, 578 bp, Arabidopsis thaliana
tggaagacaaaactgataaatggaattgtacaactaggcttccaagcaggcctaaatgtttcatagtaaactagtagcacagagaatatttccagaaaacaccatcacattcatttgggagttacacaaagaatttcatagagccaacagctacctaaggcatttggtttccagtaacaataattcagccatgttaacttcaatagttcattgtgaaaccatggatgacataggctatcaaatgagaaaacaaaaagaaccaaatgatgcgatactaacttcgtcaggagtgaagttggcagggcacgggaactggcctcatttgtgtcttccagtccaacaactcggatataaggctggcgaattgcaactgctcctttatgcctacatcagaaagtaggaaaagatgtccatcattgttgtggtgtaactctcccagaaaacaatctacactctcatttgacataaaactacaaagcttacgagttagatgatgacgaagcttggaaaatgctgtagatcccattactgtcagtctggttcaggtacaatgtttgtcaagatccgatcactgagag

SEQ ID NO: 1379 - DNA, 480 bp, Arabidopsis thaliana
gtttctctgacaaactctgcattcctccttgattcaggtgtccaagtcgcctatgccacagttcctcaactttctcatctgaaacagcttgcagacagttcccttcttctttttctttgtctcctctcactgctgcctgtatgacaaacatccggttttttgtcatagttgagaacatgagtagtcttctctgctgcttgtgccagatctcacacacatcatcttcaatgatgattctcagtcccttctgctgcagctgcccaacactcaagagattgttcttcaactttgggacatagtaaacttttgttatcttttgtgctgccccattaatgatgagtcggagacttcctcttccttctacactcatcttcctgttatctccaagtttaacactatgcttgaatgttgagtcaaactccacaaaccactctcttgtgctgcacatgtgattcgaacaccccgaatctaagaaccaga

SEQ ID NO: 1380 - DNA, 587 bp, Arabidopsis thaliana columbia
cgacttgcttgccatcacggataagaatgtcaacgaagggaactctgttcatatttgtcagggattcattaacgacgtcattacggccggggaagcagctcctcctccggatttcgcgctagtccaaccaccagaggaaggtgcttcttcaactgaggatgaaggcacaggcagcaagatcagggaagacggtttccttctcttcaaaaatctctgtaagttgtctatgaagttctcgtcacaagagaacaccgacgatcagattcttgtgagaggcaagactttgtctctcgagttgctcaaagtcatcattgataacggcggcccaatttggctctctgacgaaaggcaagttgttttatctttcatttcacaggttagtctagtcgtctctcagtagtaatgaactccaagagctcactctccctccccaaaaaatatgcaggtttctaaatgccatcaagcagttgctctgcttgtcgctgttaaagaatagcgcactttcggttatgtctattttcaacttcagtgtgctatctcacaaccttactacggaaatatagatcgggtatgaaacagaagtaggt

SEQ ID NO: 1381 - DNA, 538 bp, Arabidopsis thaliana columbia
gtgtaggagggttagattcatatgtaaaggaatctggttgttccttttctgttggacagagacagcttttgtgccttgctcgtgctttgctcaagtcatctaagatcctatgccttgatgaatgcaccgccaacatcgatgttcacacagcttccctactccacaacacgatatcgagtgaatgcaaaggcgtaaccgtcattaccattgctcaccgcatttctacggttgttgatttagacagcatcctaattcttgatcgtggaattcttgttgaacaaggaaaaccacaacatcttttgcaagatgactcctcaactttttcaagctttgtcagagcttctcagtgaaatgttgttagaatctgatcacttgtaacttctgatctctgctataattatcttgtcatggaaattaagaaaaactagtttcaactgtagtagctcatttatatgctcagttttccataataaatgagtcttcatggacttgcctaatccaaattcataaatatctatctaattcgatggtgattgag

SEQ ID NO: 1382 - DNA, 632 bp, Arabidopsis thaliana
aagcatctgcaagtgctcttgctgttgcctcgatgggacccatcccttctcctccacccattaacaaaacagctggaagattctcatccatccctagctcccttcttaattcaacctgcgattttttcggacagatactattacatttggatgagtcggaagcaacaaagaacagctaggaatgattccaaaaccgacctttgggcgaactggtttcacaaaggaaggtcgaacagggaggccataaactttgatttgtgatgtttcaagtcctgctttttgagccctttttgccacttctgttgatgggcaataacatcttgtcacaagcttatgaaacctaaacatcaaaacaaacatgttgtaacaatatattaagaaaagagaaccacatgaacgatttgataaaacaacaaagcatgtaggatggcaagtgcttaagtctgtaataaccgtggtgaacacgattttcttaagcaagccttttgatcttaggacacgaaggtggacatgttgcacaacggatgacactgattatgatactggttgatattctatacccttgggcgatttcctgtaagtataaacaatgggacagattagaaagaaaagcatgatagcctctgtagaga

SEQ ID NO: 1383 - DNA, 503 bp, Arabidopsis thaliana
actaatgtactctatgagaaaaaagtatatcactttattactcgaaacaactgaaacagctgaaatatgtaaagcatacaactatcgttcactagcaaaacacctatgagtacacaacactatttgacacaatacaaagaaaagactcgctaatggtccaaagccactctttcgtcttaacacactaaacacgctctaatccacctcttcgatcttgggacctccagcagcacctgacctactgacctcaccatctgtcggcctacctccagcagcagcaccaccctgatacatctttcacatgattggcttgccaatcacttctaactctttcaacttgtactcaaactcatcaacttccgccagctggtttccttcgatccattcaattgtctcatcaatcgccttctcaatcttctgcttatcctcttgagttagtttctgtgcgagtcttctcatcttgatagtgtttctcatgttgtaagcatagttctcaagcgaat

SEQ ID NO: 1384 - DNA, 830 bp, Arabidopsis thaliana
agtaagtcccatattttcttatagtatacatctcaagtgtaccaatagggtaaacgaaatatgattttcttggaactaatattgacataaaattgtataactaatgatttaaaacaaaagaagagaaacaaagtggaaatgaaagaccaaaaagtagatttacaaacttgaatcatgttaatttaaatattcttaacaccaatttgcaatttctgaaggactcagaagtctttgattgacatatatgctacaaacaaaagaagcatttagttgaaacaatagaaccctacaaagtagaaacaatgcatgcacaagcagccaagaaattatcaaacacacgttcatggcagctgatgcatccaatgttacttcactactctctcctacgcaaactaaaccaaaacaacaagaaagtaaaagaaagagaaaaaaaaacaccgagagcattcatgacgggtctttgcatggtcatccaacgaccgaccatgtgaaaaattccaccagttccggtacacactcacacaccactaaaaccagttttgtgacatcggttatcgttaataatcaaacgatctcgacggtagcgacggaagaaacttgattatgctctctcataacccgttttctaaccccgttaagccattttgcaactcccaaaacgacatcgtacatgcttaatgcaagatatataccaataccagcaataatcccattagcaatggaataagtcaacggcataagcaagatcgttacaaatgctgtcacggcttctttagtctctccccatctaatatcttttacaactcccatcatcatcacaccaaccatca

SEQ ID NO: 1385 - DNA, 378 bp, Arabidopsis thaliana columbia
tcccctgcaatatgtgtataattcaccattcgacaatatatatatatatatattaaaatacactgccagtctgaggatttccagggaaataaagaaacttgactgctaattgctaaaggtaatgcttctgagaaataaaagctaatgaagctcttcctcaatagcaatctgctcagaaactctattttcttcaagatctccgcctttgttttgatctccgttgcttgtttcttcctcggtaagcattggtctgaggatggcttccgccgtctcatcttcttctccgccgagccttcccgatctcccattgtcgcactctcacctgatttcggaaaaacctataacatctctggtttgatctatgagagtccccgattt

SEQ ID NO: 1386 - DNA, 540 bp, Arabidopsis thaliana
gtaaaatcgacggtggacttttcgccgtgaagtcgatagatctcgccacgtgtcttccttctcaagcagagtcgttagagaacgaaatcgttattctacggtcgatgaagtctcatccaaacatagtgaggtttctcggtgatgatgtgtctaaagaaggaacggcgtcgtttcgaaatcttcatttagagtattcaccggaaggtgacgttgctaacggtggaatcgttaacgaaacgcttctcaggcgttacgtgtggtgtcttgtctctgctttgagtcacgttcattctaacggaattgttcactgcgacgttaaatctaagaacgttcttgtttttaacggtggtagctccgttaagctagcggattttggatcggcggttgagtttgagaaatctacgattcatgtttcgccacgtggaagtccgctttggatggctccggaggtggttagaagagagtccaaggaccggagagtgccgtgtggtctttagggtgtaccgcatcgagatgccaccggaaaactagcttgggaag

SEQ ID NO: 1387 - DNA, 475 bp, Arabidopsis thaliana
ccttggatgactttgaaggtaaacaagaggaatctctcgtctcgtaattggattttaggtttattgatctaataagaagcttttgttgtgtctctcttaagctctgggaaactctgccccaatatcatcaagccctccaaacattggagagagaagttccttctcacatgtgacaaggctcggtttcgcagctggtcacgactccccaaacctgaataacgagccaacaaacgttcaaagcagcagcagcagcagtgaagtctcaaacgcaaccacaggtaaccactgtttttagctctgcaaattctaaataggattctcggatgacctctaaacatggtttcaggtgcaagaaacacaaacataacatcctttgcgagtgtagcttcaagaacaacaacaccaatggcaccaaccgtcaaagagcccggtaagagagggaagaacagagccgagtactctatcgacactagtg

SEQ ID NO: 1388 - DNA, 526 bp, Arabidopsis thaliana
acaagacctggtttttattcatgttatcttttactgattgaacaggttgcatcaccacaaaggagctgggaacagtgatgcggtcactagggcagaacccaacagaagctgagctacaagacatgatcaacgaggttgacgctgatggaaacggaaccattgacttccctgagttcttaaacctaatggctaaaaagatgaaggacacagactcggaggaagagctgaaagaagctttcagggtgttcgacaaagaccagaacggtttcatatccgctgcagagcttcgccatgtgatgacgaatctaggtgagaaactgactgatgaagaggtcgaggagatgattcgtgaagcagatgttgatggagatggtcagataaactacgaggagtttgtcaagattatgatggctaagtgatgatgataagaaaaaaatgaagaataaaagtggtgatgtgatgacattttaggcttttactatctacaaaagaatgattcgacctttaatgtcttgggtttgatttg

SEQ ID NO: 1389 - DNA, 871 bp, Arabidopsis thaliana
cggtgctataagtattcgattttcctagtaccaagtggccttccactgctcatcttattttctgttttggttgaacttttggctcgactttacagttagttgaaatcttaaaatcctgcgattatcgaacccttgcaattggtgacggtgggaatgatgtaagaatgatacagcaagctgatattggggtcggcatcagcggaagagaagggctgcaggcagcaagagctgcagactatagcattggaagtaaggaatatatgtacataatatgtatcttcaagctaataccaaggaaacaatttctgattggttcttgctggactactctttgattgcaggattcaggtttctaaaaagactgattcttgttcatgggaggtattcatataaccggacagcatttttgtcccagtattccttctacaaatcgttgttgatatgcttcatccagattttgtaagtttattatctcagatatgttctcagtagatatcattcaagtcgttcatgaaatactgacaacagaatctatgtagcttctcgtttatttcaggcgtttctggaaccagtcttttcaattcagttagcctgatggcttataacgttttctacaccagtgttcctgttcttgttagtgtaattgataaagatcttagtgaagcatcagtgatgcaacaccctcaaattttgttctactgccaagcgggaaggtatgcttgattaatagtgtctaaatctggtttcactatatctgaagtcaactgttcatacgtttatgcatatttgttaatttcatttttctcacgattcaggcttctgaatccaagcacatttgcgggttggtttggccgatcccttttccacgtga

SEQ ID NO: 1390 - DNA, 575 bp, Arabidopsis thaliana
taataaaagaaagcaacaaactatgtcggaaataacgcaaaaattctcggatgtggaaagggctgttgaaacactgcaagcaaaccaagtatctcttagtcaaaatgtcaatactatacaatctcgtgtttgttccgtgagtgcagagaatcctgtcggagttcggaggactattttcaattcaccaagctcccttgtgcgaaatggaatcagtggataaacaactccagatgccgctaacgcagtggttcaaccggaagattgggaaacacagctcgtaagcgaagatcagttcgcagatcagcatgagcaagaaaacctctaccagctcgtgaccatgaggaaggtgaggcgggaaatgaaggaaatgaggtcgaagttccatcaggccacgagttcagagctggatatcaaccgggtcatcaaaaaagctaggcgaccacccttcatcccgcaaatcgcgagtttgagaatcagggattctcggaagcttaatctagaaatgtacaatggtttagaggatcaaaaagttactcgcagcttttctaattgttgcagacgggttgcttggatga

SEQ ID NO: 1391 - DNA, 435 bp, Arabidopsis thaliana columbia
taacactcaaaagggttaaagcttacctgcctttttcacctaattcaactacaataacttcacttgtcttctggtctatcgcaggaaaaatccttagtacgctcttacacagaagtattgctcgtacctttgacaacccctgattttagcatgccctacaacgtaatcacgatcacatgcaccatcttcgcattgcattctggatcactgctaaatgttctacgtagacgaactggtgaagaagaaaggtttctcaaaagccaaggttagtcaccacattttctgcggccaagatcacttgaggcttaatttggctgtcacaacactgactctaacgtcaaaattgatgattgtttcagttttctccagcaggacagaaaacaggtgggcttaagcagttagtgtcgagaatcacagccaagatcagagggagac

SEQ ID NO: 1392 - DNA, 508 bp, Arabidopsis thaliana columbia
  unsure (1)..(508): unsure at all n locations
nnnnnnnnnnnnnnnnnnnnnnnnnnctaaagcgtgatgtttggtaacaacccggcagaaacccgcatgagcgctggtggcatcacttatcttcttgaaaaagcgcgcgagaaatcgaacgccaaaatgattgttatcgatccgcgatataccgatacggctgccggtcgtgaagacgaatggctccctattcgcccgggcaccgatgccgcgctggttgcgggtattgcctgggtattgattaacgaaaatctcgttgatcaaccttttctcgataaatactgcgtcggctatgacgaaaaaaccttacccgcagatgcacccaaaaatggtcactataaagcctatattcttggtgaaggtgacgataaaacagcgaaaacgccgcagtgggcttcgcaaattaccggtatcccggatgaccgtatcatcatactggacgcgtgaaattggcacagcataacccgcttatatctgccagggctgagggccacaacgccaggcaaac

SEQ ID NO: 1393 - DNA, 511 bp, Arabidopsis thaliana columbia
gagcaaagtgcatatcagtggatggttagggaagacacccgctttccaaaatgcttcagagaatacatggccaacaggatcaggatactccaagatttgattcagtctatacattttagccatgagaccgtcagcaacctcaatcatttgaactacccattgtatgttcaaagcctttgtggaaccaccaacatgtccatcaatttgcttagagctcctagtagaagacactgatgcagccatttcaggtcccaagtactcagtccatctggaaggaccttcccattcccttgatctcacagaagtcggggacattgattcatcttgagatggataatattgacgagaattcgccattaattcagtatgataatctctacaataaaggaaaatgtatttcaaaatcacgttacacaatctcgtccaacataatttacttagctctctactcttgcattcatcttccaaaaacccagtaatactcaacaacgagtgacgagtgagaatagat

SEQ ID NO: 1394 - DNA, 572 bp, Arabidopsis thaliana
ggcagctttcattacctcttttgagaataaccctccaactgctgataaaccaagaagcacatcaggtttaacttcacgaacctagcacagatgaaacagaaaaccgttgtttcttgtcagtattaagcagggaaacttttttaagggagaatttctctccaacaccagactcattgccaaattagatttagtatacttgatgaacatattgatagaaagaataacagaccacttccacaagagttgctccttcttttaatccctgacgctccatttctttagtcttcctagcaaaaggctgagcctctgggtcaatattttcccggccttcggtgataagaccctgatttaagtgcaaaaaaaagagttcacaacttcagctccttaagctattggaccaaaacacacgcccaaaaaaaaaatgatgatgaagtgatttcatcagcagtaaaaggaaaccagagggaaatggcttgactggctaaaacgtcttatcagctccctaatctgaaaatcaattactccactatagaataacatacatgcgcatcaaccacgtaaaattgactttg

SEQ ID NO: 1395 - DNA, 550 bp, Arabidopsis thaliana columbia
gagagcttgaacgccatcgaaaacgtttttcagatatggaacatcatcaagatcaggacagtcatttcctatctgaccaaaaacctgagccagtgcagatccacccaatctcctctttccctttgccaaatcaacatgcaagagaataccatcatcacctccgagctttagatccggagtcactgtctttgttatgtctggacaggtaacataggcactaatcacaagatttcctggagctttaacaacctcaccgtccgcatgagctgccattgaaagactgtcttttccaccatcaattgcaatgccaagttcaatcatcgcttcagatagagcaatcgcagcatcatacattgctgatccttctccttcaagcttggcagcatacatccagttaccactagctttaacatcagaaagtgcagtgacctttgcccaaaccagatttgtcaaagcctctccaacagctagcctagccatggcttttggataagcaagcctttgatcggttgctcccaatggcacatgcacacgtgttagatctgtgaat

SEQ ID NO: 1396 - DNA, 559 bp, Arabidopsis thaliana columbia
cattatcttttaccttgagatccttgtgtttgttcaatatcactagacccaatgccatacctacggtttataagaagcaagttatcaaacaggatgcttctaggagaaagtaccaatcgttcaagcgagcctcatgtgcttaggcaggtattatagaaaacacatgtttctcttataatcgcatcttgactttagaatcctgttaacgataacctgcctctcaattatctctagtactttattttacaatcgtaattattttagctgcgctattgcagatagtcatacagagagcattgttatccaaaaggaaaaggttctaacgcttatggagattcatggactcactgcaagggatagcttgccatcatagcaataccacatttacccgtgtcttcacttacaccacgctccatccgtatgtagccttcttcaccccagccagttccccatgaattctttacgatccagtacttttgatcgccttctactccatatccaacaacagtcactccatggttgagatttgtccacagtaatttgtgaaacaccggagagt

SEQ ID NO: 1397 - DNA, 493 bp, Arabidopsis thaliana
tcgcagtctttaatcggcaagattttgccaagatatatgtcgccagacctttctcttcttctgttggaaaataagttctccacttgaaagtttggagactcgacaacaaacattgagggacatcaatcatttgcttccaacaaaacaatgtatccatactatctcctacaacgtttgccttacgacgatcgaagaaatttactatgagctccaagtcacgtagtttgggagaacctttgagtaaacagaatagtaacttggaccaatatgttttacttatgcgcagatgcgtgcctcaagacaaaagaaagaaacattcacctacgtcctcaaatttttgaaaaaaacttagaagcatatatttttacaagataactttagtgttataggtttaatattgacagatcacttacatttaccttgttttttttttttgcgaaatcacttacatttacctaagtaataaaaaaatagaattaaaaatggaaaaata

SEQ ID NO: 1398 - DNA, 505 bp, Arabidopsis thaliana
tttattatttcagtaataacatgcgagtgagaaaatagtataaatattagtggaaaaagacagacttccttaatggatataaacatcaaaattcaataattgcgatagagtatcaatcaagatcttacatataaaaaaagattcatcccccaaagaacggaacactcactcttctaaaacgatgggagagatagcaacagagttcacgccggtaatggatgatgatgatgaccggtgcgttgtaccggaggtagagctcactgtacccaagaccgacgattcaactttaccggttttaacatttcggatgtgggttcttggtataggcgcgtgcattgtactctcctttatcaaccagtttttctggtacagaacgatgccgttgagtatcaccggaatctccgctcagatcgccgtcgtgccgcttggtcatctcatggcgagagtgcttccgacaaaaagattcttggaaggtacgaggtttcagtttaccttaacccgggtg

SEQ ID NO: 1399 - DNA, 553 bp, Arabidopsis thaliana
gatgaagttgatatatctcaagtctttcactgcaacggtttattgttattcatcagcatcaccaaagacaagactaggctagtggtttggaacccgtatgattggggacatacccgtacgatcgaacccacacataactgccacatattcaataggtataatatatgtatgctctcggatacaacaagagctagcagctaatcccacaaaatcttgaggtttgttacttactggatgagggttatggatgagttcataatctacgattttaactctgattcatggagggttcttgatgtcactccagattggacgataagttatatgaaccttggcgtgtctctcaagggaaatgcatactggtttgctactgagagatattccgaaacagacgattatttcttagtctgttttgatttcacaagagagacatttgggcctcttttgactcttccgtttgtgtttgttaaatctgaagatgttatgtgtgtactaatgttagagaagagcagcttgcggttttatacagccgtgggataaataaagatggaga

SEQ ID NO: 1400 - DNA, 607 bp, Arabidopsis thaliana
tggaagtgaatcgaaggagtacccgttcaagccattgacgagattcgtgggtgaattcaaaggaaggatcttgaagcagatcagacttgagaacagagtaaacgtcgaggaaggttgatttcagatccgccattgataggatcaaggaaggtgtgcaaagccaaatgtggaacctgattgttttaagtgtgttcctcggatcatgcttatatcgcgtcacgtgacgttctttaaatgggctttttgtggcccatttaattgagccgtctaaggcctgcttatctcagaagtacagtatataaaatgtacgtgaaatggggaaaacatttttaaacaactctaaacccctaattttgtattgcagagtttcaaaggatgacgacaatgtctgatctttcaccagatttggtaggggagattctcactagggttccgatgacatctttgatttcagtacggtgtacttgcaaaatgtggaacgctttatccaaagaaggtattttctttaaagcagcaaggaagcagtttatgggatcacgatgatggatctagggtttgtcaatgaagtttgactccaaggaactgaaacacgaacatgactttgttg

SEQ ID NO: 1401 - DNA, 437 bp, Arabidopsis thaliana
actctgatccccgacacgatcagaggttgtttgcggtagtggtgcaaggtgtgacgggcataggcgataagttgtcttggcaaggtattcctaatggcgagttttcggtacgtacggtgacatattctttattaacgttggatatggaacaccgatcatgtatcgcaaattactacaaatggatttggaatgtgctagcgccggagagagtgcgtgtttttctctagctggttagccatcaagtaataatgacgaatgtagaacgttttagacgtcatattagagaaagtgagtttctccaagtgtgtaaagctgctagtgaaaaaaatatttcatttgctgagacactgccccgatggatggtatttggaagaggttggtcctcaacggcgacaacatgcttttttaccaaatctcttttggaatggttgtttgaa

SEQ ID NO: 1402 - DNA, 584 bp, Arabidopsis thaliana
cactaaagctttagaatctaaatatcaactgcagaaggaatgtcgtcgaccgttagatctacgccatcatctggtaactcagatccgagtggtcctagtatcccgtcagaactcagcgtcagtccactctgttcaaacacacaacaacatgagcttattatcctccaccaattacaaccttctatggttatggttaaacaaaccaacataccgaaaacaacaacataattctcaaaatccaaattaactcatttgtgatgatcaatgtaaaaggaaaaaatcttagatggttactaaacatgtacacttttggaacttgattgcaataagaaatcaataagcatggataaacgagatcaggcaagtggagaatgatacctcaggttggaagcgacgatgtctgcacgagccatggcttctgcttgcgcaattctctgtctgaatgtctgagccatctcctcagccttgagacagcagaaagtagcaaatgattgagacataaaagaaaatagggaaagtttttttgaatggaaatagagttccttctcgacacaagttttgggttacgaacatacaccaggtgt

SEQ ID NO: 1403 - DNA, 3941 bp, Arabidopsis thaliana
gacctctcccttgtttcacggggcggaaatggaggactccccgtggctcacatagtcgcatataaggtaaataatactagcttaacatcttatagtttgcacaaaaaagaataaaaaaaaacatcttatagttttctcgagaaaagaatacaatagtattatctttcaaatgcaggcgggtcatgcactgcacactgacttagcacgtcaccttaccatggactgaagagtatgtgctcgttgtcaaccatatcccgcaaaagccttgatcgtttctgtttctttttggattcgttatccaaagatggtaccaatgtgggatttttgtttgttcaatggaagatcattactcttgtgaatacagtaaaatttgtaacattaaactattttaggtactaatcatagggacattttaaccgatcaaactgttccaaaaccaaattgaattgaaacttaagttgtagttcaataatagttttactctgtaccaatttaacatattgaaactgaaaataaaagaaaatggaacagaactaataaaaataataaaataatttaaaacgaaaaagaatttgacttggatacatttttcacattaggaaaaggtaaattcctctccttttttatttttatttttttactcgtatttataattgttgtacattataacgtattaggatacgtattaagagagaagaaccctaattacttacgagagaggagaaccctaattttcaattgtggtcgaaaattggaagaatgaggaggaggaggtgcgatcttcaaccgaagagaacgagaatgtgcgatcttcaaccgaagagaacgagtatgtgcgatcttccaccgaagctggtaggggagaagatcctcacgaggattccgataacatctctgagagcggtgcgatccacttgcaaattatggaacgctttaaccaaagatcgggttctgggtaaagcagcggcgcagtttttggggtttatgacgatggattcaaaggtctgttcagttagattccatctccgtcgcagcaaggaggaagaagaagacacgatggatctatctataaagcaggtagatttgcttaatcaagtcgagatatctagagtgtatcactgcgacggcttgttgttatgcgtggctaaggacaactcgagggtcgtggtttggaacccttatttggggcaaacaagatggatcagacccagaacagaatccaacataggagacagctatgctcttggatacgacatcaaccgtaaccacaaaatcttgaggatggtgcagacaagaaacgtttccgtttacaggtacgaaatctacgacttgcgctctaattcatggagggttctcgaggtcactcccaacggggaaatggaccctaatcatcccctctacggcgtttctgtgaagggaaatacctacttttttgcgcatgaggatagcagcagtggtgaaattgatgaagatggcgacataatcgatcttgaagatttcttactctgttttgattttacaacagagacatttggtctgcgtctgcctcttccgtttcactctactatcgatgcgactgtgaccctctcttgtgttagagaccagcagctcgcggtgctatatcataatgagggtcttcacagtgatgatcggtttaccacagttgagttttgggttactactagtattgagcccaactctgtgtcctggagcaagtttttgacagtggatatgagaccattggcactcactggtgttcggtttgacaatgatatgggtgccaccttcttcattgacgaggatgagaaagtcgctgtggttttcgatctagacggatacctaagcaccgagagcgctcgttaccacaccgcttttatcagtggaaaggatggattctttaaacctgtgactctaggagtagctcccaatgtcggggaaccttgtcccagaaccgggcatattccgactacatatcgtcccccgcttgtctgctcgtctacttaccttccgagtttagtgcaagtcaaccaacagcgcaaaaggaaagaaagacatgtttagttttctgttccttgcagttctcaagactgctagtcaattctcagttacatttccatgttatctttctcctcttttagtttctcttctcaaacttactcttgtcatggtttaagtttcttacttttcgtcagtgagatggttaggtaccttatttgtttcttgcattgtcgtctgctagtaaatttatcaaagcattgttctagtcacttgttcacttgcaccatccttaagcaaagcatgacatggtttcatgtactgttagcccaattatggagtacatatctcatataagttagtctgtttctgcgtttacttctaagttagtcccaattatggagtacatatctcatacatatcttatatatacgaaaagtgatatctgatctcatctcatgtatgttgtgtttcttacaccattatgaatactatctggcctttacaggttcgtcctgtagtgaaagaagtactagacacattttgggtaggtgcttagctaggaaccaaataaaaactgaaagaccctcggcaatttttgtcgctaggcatgcttaaataaccatagctttctgctttccacatttcacaaattaagtaaaagtggaggaacaagtcgaatttttatgatagaaacaatgggaagatggcaaggaacattttgcattggcaaatattattacagggaggcactattcgaacacagcagattttctcattcaggctagtctacgtcagcttctcggaatcctttttctctacgattttgatgaaattgcggacaattgtcttgccctcagttgttataatactctccggatgaaattgaactccctgtgaacaatgtttacaagacttcaagagttctgttttgaatggagggggcaataagattacagtacacacttgtgcgggttttacctgtatatgcttgtactttctgtgacgggcagccataaccagaccatcttctgtccatgctgtaacctcgagctcatcactaggaaatgtatctttttcgatcacgagactgtgatatctacctacaatgaaagggctgaaaccaaccagatttgttttattacacatttttacagacttatgattaactatattagacaacacacaaaaaaaattgattttgattcatactttgataatccagagaacaagccttcttctcctttctcatcatagtgaaccattgagcttttcccatgcataacaccaaatggtgaccgcacaatctttcctaatcaatgttcaaacaaaattgcatttaagctgtggatgcatagaataaagaacaaaaccatgtttgaacactgatacgggaaaataagatgtcttgtttatatgcaactaacctccaaatgcttctcctatacactgcaaacccatacatactccaaataaaggaacaagtggtccgagttccaaaacagtttgcaaggaaatcccagagtcttgaggggtacctatcaaattcaagaaaagtgttatccacttctccagcatataattataggagaaatttcagaggccaaaatatttaccaggtccaggagaaatcaacactcctcttggattttttctgcaagagggagagaatgataaaggaatgaacatcagtcgattagccagattacgttttaaacagaatgcatatagtttcttcttaccttttcagctcttctactgtaagttcatcattgcggtaaacttcaaaatggcattgtagctctcccatatactgtagaaatagatagcaattctcaaaattttgtttatactaaagcagaagaaaccatatcaagagaacgatcacaataaatagtatgcactgacactattctgcgtggagactagaagtaagcatgacaaat

SEQ ID NO: 1404 - DNA, 571 bp, Arabidopsis thaliana columbia
tgtgtggtgaacaataacaaggacttgtcaaacgcgtcagaatgagcattagaagcgtgtgctgttgcggactgtacatcgatacttcctggcgggtcgtgttcaggcatcagatggccaggcaacgtttcatacgcgttcaatagcttgtaccagcaaaatgatcacagtgcagaaagctgcaactttggtggacttggtttgatcactactgttgatccttctgaggataattgccggttctcgattcaacttgacacttctcattcatcttcgcaaactccaaatttctttcagagctggcctctcctcttattgttcctactgtccggactcttttaaagttgtagttatagcaaaattttggtggattttgcctctaatttctctctaatagccacatttcaaaactgtattgggctacgtaaaaaataactgttattgggctggccttcgtaaaggttagatgattatgggccttagaaccatgttgtcttatttgataaaaaaagcaagtccagttattttgggaaactggtcggtaaaagataagatgtaaagaatttaagat

SEQ ID NO: 1405 - DNA, 1325 bp, Arabidopsis thaliana
tttattgactaactactaataatcttgttcaaagaggtgacaaaagagaaagaaaaccaaaaaacaagctggtcgactaattaagttgcactagacttggaacataagaccacacaattggtaacaccttctgtctgattctccaagatccacttctttcatggatccatccactccaatgatgtaagctatgtagcgctgtattctgtagcctttatcaaaaacaacagcgactttcttctcctcgtcaatgaagaaactccccaaacaaaactgaaactgagggccaatgagttttcttatactcactgataagaacaccttgctgttccaagacaccgcgttgggctcaatcttagacgtgacccagatctccatcattaatgtatcccacggctgatataaaacagcaagctgctcgtctctaacattggatacactcaaagcatcttcagattcaacaaactgaaacggaagaggcaaaagtggtccaaatgtctctcttgtgaaatcaaaagagagtaagaaaaactcttcgtttgtttcacttgtttcgtaatacttctcttcagcaacccagaaggcatttcccttgagagacacgccactattaatagtccctaattgccagtctggagtgacatgaaaaaccctccatgaattagagttaaaatcgtagattatgaactcatgaaaatggggtctcaaacaagtaatacacctcaagattttgtgggatttgctgctcttgtcgtatccgagagcataagaatagctgtcgaatttgttgaactgatgtgtgggctcgattgaccgggtatgcccccaatacgggttccaaaccacgagcctagtcttggcttgggtgatgctgatgcataacaataaaccgtcgcagtgaaagacttgagatatatcagcttcttcatcgcctaagctaataagtttagcttcacgttttatacatgatgatgatgatgatgatgatgatgatgatgattcaacaacgttgttttgaagattgactctcatcaaataaaccctaaaattcatcatcaagaccaccataaactcctttgcgtctgctagtacttttgcttgagcaaggtgcttctttgcaaagctcccacatttggataaagtgctccaatttttgcaagtagatcggacaggcctcagagatgtcaacggaattctacagagcacctcctccggcaaatctcttggaagattgtacatcttcttcattatcaaccaggaccaatgtaacgcaaactagttaatgtcggaaaatatttacgttaatcttcttaaataacacaaag

SEQ ID NO: 1406 - DNA, 491 bp, Arabidopsis thaliana columbia
cagacataaaggagataatatgttgcgggtctcagatttgggatccaattgttgtggggttcaagatttactggctccaagcagtaactatgatcatgacaacatcagtaagtttgatgatttaaagctgtaacgttgacaagattgttaaatgcagtctgaggatattctcttatacaggtaacatttcgatgaaaataaatccgcatataagaaaagaagctgtaacattttcgtcatatgatggttatgctcatgacaactttggtatattcagttttattatagtacatatatggatgagtccaagatttcttacttcggtgaaagcatctgaggttttaacatgtggggtgtttctgatacagagcctccaagtaagaagaaagtgaagaagaacaatccagaaatggaagcagattatttatcagaccactcttgttttgtacccatgtcacaacttcaagtctacacacaaatgcgttggtgtg

SEQ ID NO: 1407 - DNA, 473 bp, Arabidopsis thaliana
tcgtagtagattgatttagaggaactgatttcattgttaagagtaagtactggctcagtgactctaggatttttggtaatgatgcagtacaagttttcgatatggtacactcgtcgcacaccaggggttcggaaccagtcttatgaagataacatcaagaagatggtagaattcagcacggtaagtctaaatatactactggaagttcattgttgaagctgtttgcgatactatcttgttcgtttctgagttatggcttttataaactaggttgaaggattttgggcctgctactgtcaccttgctcgttcttctctcttgcctagtccaacagatcttcatttctttaaggatgggattcgtccattgtgggaggtacgtattcccctgtgttgatttttcgtattgtgtttttatctggatcatcgatatagagggaaccttttatacaacaaaagtttctccagagttgt

SEQ ID NO: 1408 - DNA, 821 bp, Arabidopsis thaliana
ttcaatgttaatctcttccacctccacacactataccaattctttcgtctgtcacttcagacaaagatataaatacagatccaacaaggcaaatagtagtgaacaaagtttgcttccttaagcaacttttctaatcagccattttgtctatcagatgaaaagcagagactcagattaagtataacgagcagcaccaagcgttttatgttaccagtaatacacatactatgcattgggggacaagacattcatagagtctatataagtatcctaacaattcaagtaaaaacaaaacaggtattgcattctaataaagataacaagaggaaaaaaccaaagaagagaaggcggtttagcaggcagctgatgatccggtttactctcaatcatcctgtcaaacaaagtatgtttctttttactgactcacacgtgacacgattattccagtgatgacttacaattcaaactcgtcttcaagcttcagagcctcagcagcagcctcttcttcctcatcgtcaacaacaaagtacgggttatgcacctctggcctgaacttgtagccagtaaacagatagaaggcaagtgtggctaactcgctggcaacaacactagtccacatatacttgtaagaggtaatggtctccagtgcatacacaacaacacgagtgaagtagatgtagcagataaccacaatgtagtactgcctaaacagagttaacttaacgaggttcacagcagccttcccgtcagtcttagccgcctcacgcaagtttttgatggaccagacaatgggaaacagaacagcacagcaacagacgaca

SEQ ID NO: 1409 - DNA, 492 bp, Arabidopsis thaliana
acattaattgaccctgatataatttaaggtacatgctttatgtgaaagtcatggatggcagtggtgaaaccaaatgcctcctgtctcctgtttgataccatctgtgcagacatggttcgtgaatcatgtacatccatgttaggtggctcttttaatgaggtatacttacaatcgaaatagttatcttcttatgtttgtggaatctaatatgttgcaagagtatataaactggctaactgacaatttgtggtcttactatttagattgaggatccaaatgatatccctgacggttgaagaaatttggttgggaagacttttctatttctggtctctgttgagaaagaaaacatatgggatggtaaggattcttttaaggtcacaaggctattgtctaccgatggtctctgtggtgatgaggtctcgaagactcagaccactctgtcaatccttcatccattggttctagggaccatgtatgattctacacatg

SEQ ID NO: 1410 - DNA, 646 bp, Arabidopsis thaliana columbia
  unsure (1)..(646): unsure at all n locations
nnnnnnnnnnnnnnnnnnnnnnnctaaagactgttccatcatgagtatccttaatcaataatgcgcataatggcgctggattcagggtgctgcagagcgtaatcccgcaggcggtaatagtgctccgtcatggcatcgcattcggtgaggcaggcgtgatggctatattcaatcaggcagacagcgatacctgcggcttccgcgctcatttccgcaccattgccattcatgccgttgagcaaatgccatttatcgtcaccgtcagcatcaggagccataaacgctccgccattgctgagcgtgtaaaaggaccagatacccccgcagtactcatcacagaagcggtccatccaggcgaaaatgcgcggttccagcgttatccactgcgggatggtgccaaagtgctgcggccagaagcggatatgctgttcatcgggtacctgcgttacgctcaactcaaattcggatccgttagcgggtacgaggtcgtactgtgtctgtgttgtcatgggtatgtctccgtgaataaaaaacgccagcggagtgtgctggcgtatgaggtaataaagcgcgtttgggagggtaaatgttctggaaatgatcggagtcacgggggaagttcggtcggacgctactgtgatatacg

SEQ ID NO: 1411 - DNA, 550 bp, Arabidopsis thaliana columbia
gataatccgcaatgacgattaatctaagacttttaatgtatcttttgagaatctggtttttgaaatcaggtggataatactataggagaattggctggaggaaggtattatcacaaggacactgtggctgcagtatcattaggtatgggaaccaacgctgcttacattgaacaagctcaagagatatcgaggtggaaatctgcgatacgtgagccacaagagatcgtatgttaagatactttcaacacacttagttcaatatcatagagctttccaaagtttttatatcaagtggttgtactttgtaagattataggttgttagcacagagtggggagatttcagatcttgccatcttcctataaccgagttcgactgcttctcttgacgcggaaagcttgaatcccggacatcgagtaagaacacataccgattagtactttctatagtgtgttttgagaaatttgtctgtttctgtgtttgaagatatttgagaagatggtgtcaggaagatacttaggggagatagtaagaagagtgttctaaaaat

SEQ ID NO: 1412 - DNA, 1119 bp, Arabidopsis thaliana
ctgcacatcagagtttagcggtaaatttctgcatattgaagctatctctgtgttcagaaatggccatctgaagatgctgtgccaaaattgttctcacaatcctgacattctcttggggagaaatctgtctcgcggtttgcgcaggaatatcttctcgcgaaggacatatctctcgtgttaaatattaaaaggtcccttctagagcgcatatcccgctgtactggtgcgcagattgtcccttcgatcgaccagctcacatcaccaaagctaggttattgtgacctgttccatgtggaaaagtttgtggagacacatgttagtccttgtcaagttgcgaagaaaatggccaagactttaatgttttttgatggctgcccgaaacctttgggttgtacagtaagttccacaacattttaaggtgttttaagacattagatccttgacctgttattatgactatgcatattgtatgtctgatcaggaaataatcttaagtatggtgcttgatctgtctttctcagatattgctcaagggggcacatgaagatgagctaaagaaggtgaaacatgtgattcagtatggagtttttgcagcatatcacttggctcttgagacatccttcctagcagatgaaggtgcttccattcacgaacttcctctgcagaccccaattactgtggcgttacctgataaaccatcaatggttaacagatcaatatccacaatacctggttttactgtgtcaagtgctgaaaagtctccaactactgagttaaggggtgagccacataaagccaatggcgaccttactggtaatttcacttctagtaagactcatttccaagggaaattggatggaaacgacaggattgacccatctgaaagactgcttcacaacttggatactgtttactgtaagcctccagaaactattacctctaaggacgatgggttagtcctactctagaatccaggcagctatcatttcacgtggaagaaccttctgttcaaaaagatcagtggtctgttttatccggtgccacagacaagtaacagatggtggttaccgaatgcaccgcagtaataggaaatcaaattttaatagacaggacaaatgg

SEQ ID NO: 1413 - DNA, 573 bp, Arabidopsis thaliana columbia
  unsure (1)..(573): unsure at all n locations
caaatgcttttggttttacttaattaacttaaattaaataaaggaggaagcaaaagcaaacagttttctagcatttgggatgggaggaagaacatgtcttggacttgctttggccaaagccatgatgttagtgtttctccaccgttttataacaacttacaggttcgtacgactttttctttagtattgcaaaaaaattgaataatcctgtaacagtaagttttaataattgaaaaaaaaaattgaagatgggaagtagtagatgaagatccaagcattgaaaagtggacattgtttgcaagattgaagagtggatatccaattcgcgtgtcacgtagattgtaaattcatatgtttcaaattagattttatatctcaatatgtgttcctacttcctagatgcgatgaatcatatccaaatgtgtaatatttaatgaatgtattaattaatatttatgagtatagtttaaaaggaacaagtgaaaaagaaaaaattaagataccacaagaataaaagagtcccgaagttanaattaaaagcgttagaaagctacaataatactagtatagaga

SEQ ID NO: 1414 - DNA, 527 bp, Arabidopsis thaliana columbia
tgtgctctaaaggagttgcatatcgtaataattgagaagatcaaacaaactgtcgctgaaggactcaagccacgcttcgtctacgtccggtaaggttaatgccagcgtcaccacggccggatcggccgccatcgctgccagatcgcttaggttcaccgccagtgctttataagccagatcagcaggatcgatatcagggaggaaatggttacccgccaccagcgtatcagtgctgatcgccagggtctgtttctcggggatattgagaagtgcgcaatcgtcgccgatgcccagttcgacatcaagacgagaacttcttacacggtcaaaataacgggcaatcagggagaactcgccacatgccatacgttatgcctcagcaggtaaaaaagaaaaggccggcgatcatggaacggtcttccgtgaatctaccggcctggatatcactttttgttagggcgaatcacaggtgctgctttatcgagtacgccgttgacgaacttatggctgtcttctgcgccgaacga

SEQ ID NO: 1415 - DNA, 482 bp, Arabidopsis thaliana columbia
tccaaaatttttaacttaaacgaccatcgcctgggacgggttgatccttcctgccatccacagaagtacgaacagcacggtagagcgtatgatttcgcagataccagtgaacagtgagtaaggtttgtgcttcactgagaggagccagcggatcgcgactttgcgtggtaaaaataagcttcttcacccaacaccatgattttgtccgtactccgattcctccgggcgaccagtttgacggagtcgttcttatgtataaatctcagataattgatgagagaccttcttcgtcgtgtcagctaaatacccaattgtgtaagagatagcagaaagaaaatgtcaagaaactactccacggaaaggccaaacctttttttaatccgccgagtcttaatggacaagaatacttcgggtggtaagagtgaactactactatacccttacattgcactgagcctttttctcagctaactcaggggtgt

SEQ ID NO: 1416 - DNA, 866 bp, Arabidopsis thaliana
tattttcttaaagctgattcaagaaactctctgaagctattggaggatgagatttgtcgtttgagaaatgagcatagtgagctaattacaagactaaccgagaagcggtaaacatcgattgtgttgtaaacaagcatttgtgttcttgatcctctgattgataaagcattgcttatggaatttttttacacagggaaggttttgtgaagatgtgtattgggtttcaaagggagattgaagacagtgaattcaggaatttattgttggaaagagagtttctcgacaacgaagttcggcatgttggaggagaagaacttagatgtgaagaactctatgttggcgtacatggtagatgaaatgatgaatctattatctgattagtgtttctggtcacattatcttcaacaccatggatcattggtgcaccagaatggaggttcatgtatacaaaaaatatgttacaaaaagaataaaaggtgaagtttgttatcaacgccctaagatcaaacatcatttcttaacgccctaagatcacagactttgtcatctcattcacagtgatcaaatcctcagacgatgatttgtcatctctcctgtgcactacaaatgtcggttgttctggtggtggaagatctgatgttgtggtgagcatagacagcaactcaagtgtgttgggtctatctgcaggttggtgttgaacacagagcagaccgatctgaacacatctctcaacttccagtgggcgacatgaatcggcgacatctttgtccaagagatcaattcctccagtatcacaccaagattcccacgcctgttgttcagattcaggtcttaagaatatagaagcaagaagacgttttgagaca

SEQ ID NO: 1417 - DNA, 496 bp, Arabidopsis thaliana
gtgtgattcgagaagcaactgggaacctcccctgaatatttgcataggcaaccgtcaacatccccgcattttattgtatacatgtgcaggagtccctgaatcatatatgaaacaacatcaaaatctagtttgttttcaaaatatcgtgttaagaaatgcgaggatatgtgttggtacttcgaagacaagggtttctagaattggacagttcttgagtagagctggcaatgattcccatcctacgctttggttagtcttaatagttaactgaatcaggttgttgaataccggtattgattcacagcagaaagtaagaacctgaaacaaaaaccaaaacaagtaccatatcatcatccatatccaatcactatctaaaaaataatcattaatcaattacgtacactaacataccgcaagactgttggcagataagcaaaggatctgaacattgcatattcccattagaaagtctgttgcattgccgaccaaagcatca

SEQ ID NO: 1418 - DNA, 618 bp, Arabidopsis thaliana columbia
tggtatttactggatttggtggctgggtcagtcaaaacaataaacagcctcgaaaggtcagtttcatttccataaatcagaaaaaatccattaatgtagaaactagattatgattatgtgtgttgttgtaggccaagcccaaaaaaactgaaaatgttgaatctaagtcagagtcagaaatggtggataataataataaccatgataagatgaagaaatattatgacgaagatgagaggaagaaacaagatcaagtttggatagatgcagagaagatgcatccatggaatgatgcccctccaaaggtgaaggtaatgataacaaatcatcaaacatatataatcgcactacttagatttgtttgcctttaaaggaataagaataaatatcttactatttttttaatatatttttgatgtttgtaggtgacaacaaaaaatggtctttgtcatatgaacatagaattgacattgggattttcccagataaagtcttcggattttttactatccatccaacggaccatttttctctccccactctttttcttacgatcattgtattatcagatgtggtataattgtagcaagcttgagagtgtactctattttttttatg

SEQ ID NO: 1419 - DNA, 540 bp, Arabidopsis thaliana
ctcaattcggagctcgaggaagttcggttcctgagagaacggatcgaatcgggtacgttcgtgagcggctctgtttatactactcaagctcgtacgttcgctggtgaaacgaatgacgttggagtgaagaagacgaagacgaagaagaagaaaattgggcatgggcagaagcgaagcaatccgtttgctacggacgagcctagccttaagcgtcatgtggctttggatctgatgtctgagaaggtgttgaagagtatgatgacgacatgtggtcagatcttggtgaagctgatgaagcataaatggtcatgggtctttttaaatcctgttgatgtggtaggtttagggcttcatgactatcatcggattgtggacaagcctatggatctgggtacggtgaagatgaatctggaaaaaggtttatatagatcgccgattgatttcgcttctgatgttaggttgactttcaccaatgcgatgtcgtataatccaaagggtcaagatgtttatttgatggctgagaagcttctgagtcaattt

SEQ ID NO: 1420 - DNA, 564 bp, Arabidopsis thaliana
ctcagctctcagtctctaaaacatggcttcataatttgtatatatatatgtaatatttcaggctgagttagataggttctgtgatgctctcatctcgatcagggaagagatttcacagattgagaaaggaaacgcagatccaaacaacaacgttctgaaggtaagaaaaaatttgagaccacaatttcagttcggactagccctctagtctgatactaatgaactttaaaaaacaaacacacacagggtgctccacatcctccgtcattgctaatggcagatacatggaaaaagccgtattcacgggaatacgcagccttccccgctccatggctccgctcctccaagttctggcccactacaggtacttgaaaactaggggtggcatttcccatagaaaacaatttgttatttgtaaatcgtttcaaaatgtattaaatatgtgtgaaacagggcgagtggacaacgtgtatggagaccgtaatctggtgtgcactctccaaccggcgaacgaagaacaggctgcagctgcagtgtctgcttaaatgaagccctatgaagcga

SEQ ID NO: 1421 - DNA, 546 bp, Arabidopsis thaliana
gcaacaatgtgccattatctttagaagattacaagtcataatctcagctgttacttgcagtgtgatccagaagaggaaggttcatgtgattctggttgtaacggtgggcttatgaacagtgcctttgaatacacgcttaaaaccggagggcttatgcgagagaaagattatccttacaccggtactgatggagggagctgcaagttagacaggtctaagatcgttgcctctgtctccaactttagtgttgtgtccatcaacgaagatcaaatagctgcaaaccttatcaaaaacggtcctctagctgtggcgatcaatgcagcttatatgcaaacctacattggaggagtctcgtgtccttacatatgctcgaggcggctcaaccacggtgtgttgttggtaggttatggctcggctgggttttctcaagcaaggttaaaggaaaaaccgtattggatcatcaagaactcgtggggtgagtcttggggtgagaatggtttctataagatatgtaaaggtcgtaacatttgcggtgttgacagtttg

SEQ ID NO: 1422 - DNA, 1112 bp, Arabidopsis thaliana
  unsure (1)..(1112): unsure at all n locations
aaggtaagaaaacaaaacagaacaatcttatgattctaagtgcagaataaaatgtgggaaattttctatatgcaaggagaaacaacgtggtcaaatcgggatatcattagatgcaaaatggtatgagccaatgtctgattgtgatgaggacaaagatgcagctcgtagacaatggattttgggcttggatggtaaatataagatccctttatctgaaaatttgcatagaaaagtctacagagagaaaagaccaaagtaacagaatgagatttaaaaaataggtttatggatcctctaatcaatggagactatccagcttcaatgaagagtctagtggaagagagactacctaagataacaccagagatgtataaaaccataaaaggggcatttgattacgtgggaatcaaccactacaccacattatacgcgaggaatgacagaactaggataaggaaactgattctacaagatgcttcttctgattcagccgtgattacaagctgtaagaaacaacaccttatctcatatcattctcattaccgctacaaaactaaaagaattaagctaatgtatggtcctaattgttatagcttttcgtggaggagtagctataggagaaagagtatgtaatttctctgatagaaacagaagactaatccttaactggcactccaaagaaatttacttgatgagaaacaacttacttgaaacaggcagggtcaagctggctacacattgtcccatggggaatcaggaaactggcagtgtatgttaaagacatatatggaaacccacctgtattcatcacagaaaacggtaagcattctcaaataccaaaatgtatattctcacaaccatcaatcaaatttttaacatggagatattcacaggcatggatgagaaaaacagtccattcatagacatggaaaaagcattaaaagatgacaagaggattggcttccacagagattacctctcaaacttatcagctgccataaggtaaagttcttcactttgcagagattcacaaagattcttgagtttgaaatgatcccgcattcactttgcaggaatgatgantgcgacgtaagaggatattttgtgtggca

SEQ ID NO: 1423 - DNA, 841 bp, Arabidopsis thaliana
tagccttctttggttgctgaggatgatgaagaagctgatatcaagagcaaacaggtaatgttttcgcagactctattcaatgcgagttatgttttgcttctgatttttcagctttttctgcattttgattcgtagctcatatatcatctacttattcattgttcaccatactacatgcaatcagtttaggtgcatgtacatatccaatcacagacataaaaaacaaacacaagcatacacatatataagagaatctacacgcatgaattcctgagttcataggactttgaagcttttgagtaaaagagaaaactaacatgaaaaatattatacaggagagagagctatcggcagcagcagagaagttagccgagtgtcaagaaaccatatttgtgttggggaagcagctgaagtcatttcggccacaacctgagcaaatgaggtcaccacaaactcgaaatgagtcctattctgaagaagaggaactaggcaccaccactacctcagtcccaaagaactatgccgtagtagacgaaggagattcggttaacgaggttcctagatttatggagtctccaaaatgcccctctgattcagagactagcgatacgacgacatcgccatcacgagtgggttccaggctctcaaggtcaggttcatctactaacgcgaccccagagaaagcctctagaggaataagcaggttcttctcctccaaatcaggttattaattaaagcctttaaaaataaaagtggggagaaacttgtgtgtatgtgtacatgagatgaaatgtgatcaaaatacttggagaatattttcgtttgggatctttttgttact

SEQ ID NO: 1424 - DNA, 523 bp, Arabidopsis thaliana
tgtcaagaagtggctttcgacccccaaaatagttatttgtcacaattgtcgaataaagttgatcggaattatagccgaaagtggaatgttctgaaggcgatcttaaaacacaagtacttcaataatccttgggcatacttctctttttttgctgctcttgtcctgctagttctcacgttatttcagagtttctttactgcttatccttattttaacccaccttcttgattttcattattattcagtagtttccttcattaaacttggaatgtttgtaactttttttcgagcatttttgtttattttattttctattgtattgcaaaaataaaatcagaaactaaaattaaaattttccagcatttttatttaatcctatttttgattgtcacatgtcttgaatctgatcatgacaaggtgtctgtggtagcatgaaagtatcgctgtgactcggtaggtctaggggggacgatgccatatatatattaacagttagcttcataggaggtgagacactgagaca

SEQ ID NO: 1425 - DNA, 499 bp, Arabidopsis thaliana columbia
tgaactggcctcaggacagaaaattaaccaggctaaatattccatcaccttctctgccaaaacaccacctgctgttagggaaagagtcaaacagattctgttgatccaaaaagaaggcggacagggcaagtacctgggtctccctgagttgtttggcagaaagaagaaagacctgttcacagccatagtggatcgtattaaacaaagagctctcagttggtcctcaaggtttttatcttctgcaggaaaactcactatgctcaaatcagtcctctcgactatgcctacttacacaatgtcgtgtttccaactcccactatctctgtgcaagcgcatccagtctacattgactcgcttctggtgggattcaaaacctgatcaaagaaaaatgagttggatctcttggcagaaaatgacattatcttttaaaagtggaggattggggtttagagatgttcaaaccttcaataaagctctccttgcaaagctctcttggcga

SEQ ID NO: 1426 - DNA, 851 bp, Arabidopsis thaliana
cacttatagtagtatttgtatttttatagtgttgcatgcatgttctcttcttttcaaaccaaacgacaaattattagaaaacttaaaactgtattttaaaaaatttacacatatgaaaaaaaatgttacaatatgcatggtacttgtgcatttcgcattcgtcgagtctctcacgccacttggctttcatgcatcaagtaaatcttttcgttattttcaatgataggagcgaccgtaaagcttgcatgcaacaacacaaagagaggtgtgacaatggagacaaaaacagacaaaaacggatacttcttcatgctagccccaaaaaaactcaccacctacgctttccacacgtgccgggcttggcctacgaatcctggacccacgactgcaacgatgacatgcaccgtgccgtcaaagctcaacaatggaataaccggtgctatgcttaagccttctaagacaatcaacatcggtgaacacgactacgttctcttctctgttggtcccttcgcgtttgagcctgcctgtgctctttgaagactatactttcgttttatgtatttggtgtgtgcttgattgttataatgatgatcactagtgattttaatgttctgtcttgtttgttttcttggtacgtttccatttgaaatttgtgtgttttgacattataagatcgttagtgtgcatgtttgtagtaattagtactatttgtggggttgatatggtctcaaaccattgctctgacatttcacagttttatcagttgaaaacttcaagtaggtactccttctccggatcattcatgagatggaacccagataaggtttttgcttgaaaatgtgaatttggga

SEQ ID NO: 1427 - DNA, 983 bp, Arabidopsis thaliana
acatcgtacaacacagtcatttacgcctattgtagaaatactcggatgagagatgcatctagaatattttcagagatgaggaattcagggattgtccctgatgttatcacctacaatacgtttattggttcttatgcagctgactcaatgtttgaggaggccatcggcgtcgttaggtacatgatcaagcatggttgtagaccaaaccagaacacctacaactccattgtcgatggatactgcaagctaaacaggaaagatgaggcaaaactttttgtcgaagatctgaggaatcttgatccccatgctcccaaaggcgaggatcttaggttgctggaacggatagtgaagaagtggccatagataattgttgatgagaaacctcacagtaaacttgtcaaaccctgacttcagatctgctgtaagtgttaatttttatcataactttcatgctcgttgagcatgtgaggcacctttttttcttttcttgtttgtacttgagagagaaaaagtcccactatttgccttcaaatttaaataaggataaactgttagaaataagaatatttcattgttagtgtgttacatctgtaaccattccaatgactgaaggagtattgttgccctttgtgaaatatgtagacacatcaactgctgacttctggactgatttcaatctaactttaaaatagtctgaacactttgttgctgcagaggaaggtcctaaacacttaagctcgtagctgttagtgcaggatccgtggtgaagaactcaacaagtgatatatcttcttggtgactcatagtaagaattatctgcataagagcttcaatgtttctcagctctcactgtagttaccgtctcacatgatcttaaacttgatagtaagaattgtctgtgaatcggattgtattgaccataactgttagaatctcagcgtactgcctataagcctgatcatgttctcgaaagagttattatg

SEQ ID NO: 1428 - DNA, 563 bp, Arabidopsis thaliana columbia
cttcaggctgagctccctggcggtgtttataaagccttatgcatgcaagttcaggcctaatcactttatctgaattctgatgaagattaagagtgtgattacatgttggttctagattaagagtagttacaggttggttctggatttcgttctcaccacgacacaaaacctttcaagccttttacattgtgttttcagttggctattagcctcaaaatatctaaaaccggcacattctctcataactagtttttgtaatgcagtcactttacaaaaagtaatagatgccaagtgtaaagagctaaggtccaaaaaaaaaaagagctaaggtgcaagagatttgagggaggtcggtaaaagccattggtgtgttgtcacgttcaatcattttgcatagaatattggaagataaactggatgttggcaaaaaaaaaagtatagcaagttaggaagcagctaatgcaaccaaaactctctcatgcaacaacaaaacattgcaacctgaaggcggcggcggtactacaatttttggatttggtaaacattggttagcccaataagta

SEQ ID NO: 1429 - DNA, 529 bp, Arabidopsis thaliana columbia
tgaaatattggctcagggttgctatgttcgaatactcaaagcatatgatgagattaggtgatttgctctttgagcttctctcagaagctcttggtttgagatctgataagcttaaaagcatggattgcatgaagggtttgcttttgctctgccattattatcctccatgtccacaacctgatctaaccatcggcacaaataatcattcagacaactccttcctcaccattcttctccaggaccaaatcggtggtcttcaaatctttcatcaagactgttgggtcgatgtctctcctattccaggggctctagtcatcaacatgggagatttcttgcaggcaaggcaatttcttcattgatccattcttttaaactttattagtaaaatatacaatgttgagaatctgagtttacctttgatacgcagctaataacgaatgacaaagtcataagtgtggagcacagggtgctagcgaacagggcagctacaccgaggatatcagtagctagctttttcagccaagtatgc

SEQ ID NO: 1430 - DNA, 709 bp, Arabidopsis thaliana
tcgacgacgaaaacaagctctcggagaaggatcaagccagcaaagagacgctagtcagcggaatctgcacaaaactcgccggatttagccctttgaacaagtttcaaggcggtcgtactaaggcggcaaaatttcaaactttgtctaacgttgagagagtttcaagtaaatgttacgatcgttgcaattctattggttactaaacaaaaaccggttcggttttaaattgtaatttcgttctgttacaaaacatccggtttagccaaaccgaattacaacgcaagaaatgctgcttttgctaatcctgtttaaagcttctttagctaaacattttgcagcttctttaggatcctctatgtgtcttattaggttaatcgcttcttgactcttcatcacctgtaaccaaattattttgctaagtgattgatcagtttgtattttgatggatcttgatcttgatcttacctcccaaatcccggggctaccgataatgataaattctgtatctgaattaatcttttctgtaatcactacaagctctgaatttcttggatctgattcatcctcttcttctccttgattacaaactgagatattacatttaaaggatttaagtctcaattcaatttcctggcacaccagttaccttagaggatattcgggtttgaagggacttaccagggaaaattaattgtgacccatgttttgt

SEQ ID NO: 1431 - DNA, 530 bp, Arabidopsis thaliana columbia
aagctcaccatataactcacgtgtggcaactgtgagcatgtgagaagtctggtcaacatcattgcttcgggcagcaagtgagtaactattaagaggaaattatttgtatgagataaagatactgaataaagaaaatgaatttcctgggtatttttgttaagcacagagaaggataagagataaactgacttggataatgcagatttcaactctgggacagattttaagcactgcaccgtggagttcatgtaacacgtgttgccaagattgacaaggccagcactgtaaccctgaaatcaattgtaatgtttgttagttgggaaggatacataaattttctgaatatacagtacaaacaaaaccagttttcacaatgcctaacaaaaatttgggtctatcttctgttaccggaactctatgaaacgtgcattttctctagggtccaaacattgtaaaagttaacaacaacgattacacacgtgcacactcataatcagcagtcaaaagtaaatcccagattagtggctagc

SEQ ID NO: 1432 - DNA, 571 bp, Arabidopsis thaliana columbia
ttgagaagatttaaagtttctccaaaaacttaaggtgaaattgatacgctagaattttgtgttgatccataaactttacctgctcagggcatgacagatggctttcgccccaacctccatcttcttcctgtatcgcaagcaggaaatctacacctttgcgcacagccaggcaacttttgtaagttttaccagcggctgctaggccgctcagagcaaaccaagtagcgtagatgaaacagataccccagtttccatgcctaacattactcaaaaagaaactattaccttaagagaaaaaccatattcattaaacacgtcttaattatgttaaaggcataccatgaaccatcaggcgtttgtttgctttcaatgaattgcacccctttctcaatcgacttgatgatctcttttgtcctgtgatccggataaagttgtttgaacagtaccaaagcttgtataacagctgaggtacattctacatactcgcgttcagccataacacaagtaaagaaatctgtgggaatgagcactgcacaccagttcaaaggttagcctgatcactgaatggtta

SEQ ID NO: 1433 - DNA, 563 bp, Arabidopsis thaliana
tgccatcaacaacttcgattccggggactacaagcctctgtcttctctctcgtttagggttttattccaaaattccgtgcttcgatcccgaagatcagaaaaaatgggtgatgagattgtgcctccgggaatcagttagccgccgataacttggaaaacgatggatctacggtgcagaaagcgcaattttcagacagggttctgattcgatcgattttgggcggcggagtaaactcgccggtcaaaaggttagaatcggtggttgggttaaaaccggaagacagcaagggaaagggacttttgctttccttgaggttaacgatgggtcttgtccagcgaatctccaggttatggttgattcatctctttatgatctctctaggttggttgcgactggaacttgtgttactgttgatggagttttgaagattcctccggaaggtaaaggtttgaagcagagtattgagcttagcgttgagacggtgattgcggtgggaactgttgatccgactacgtatccgcttcctaagactaagttgactcctgagtttctcagagatgtg

SEQ ID NO: 1434 - DNA, 571 bp, Arabidopsis thaliana
tgattgcatcaaggaggttagggaatccaactgaacttttctgtccctgcatcgattgccgtaatgtttgccatcaagaagtagacacagtattgtaccatcttgtgatcaagggtatggataagaagtacatgaggaattcttgtttgagtatgcatggtgaaagaaagtctgatattactcatggtccaacattagaatctgaggcttatgatttgctaaggacggcttattgtagtggtgaaggtacacatccattagacaactttggaggagagaatttggatggtgaaactgcagaagactctgagtttaggcagaaactgaaagatgctgaaactccattgtactcgacgtgctctaattacaccaaggtttctgcaataatgggtttataccgcatcaaggtgaagagtggaatgtcagaaaactactttgctcaattgttgacgttagccatgacatgcttcctaaagagaatgtcctgccacagtctactgatgcgatgaagaaattcctgaagatttttgggtttggatatgatgtcattcatgcatgcaagaatgattgt

SEQ ID NO: 1435 - DNA, 592 bp, Arabidopsis thaliana
cggtatatgtgttcctttatgggcgtctttatctggtattgagcggattagaaaaaaacatcctgcaaagtgcaagtgtacatgagtccaatgcccttgagcaggcactagcagcccaatctgttttccagttaggttttctgatggttctaccaatggttatggaaattggcctagaaaaagggtttcgcacagccttgggtgatttcatcataatgcagctgcagcttgcctctgttttcttcacgtttcaactgggaacgaaagcgcattactttggaaggacgattttgcatggaggctctaagtaccgagcaactggtcgaggttttgttgttttccatgcgaagtttgcagaaaactatagactatattcgcgaacgcattttgttaagggactggagttggtcatactactagttgtgtatcaagtttatggaacttcgtaccgtagctcaagtacttatatgtacatcacattttcaatgtggttcctggtgacttcttggttgtttgctcatttatattcacccatctgggtttgagtggaaaagacggtggacgattggactgactggaaacgttggatggg

SEQ ID NO: 1436 - DNA, 952 bp, Arabidopsis thaliana
caaactaatgaggcagatgaaacagagtatcctcttatcaataatctatgaaaaaatggaaagaagaaagtatataactattttttcaacaagaaacgtttcgggtcaaaactgttccttgacattcgtgatcataataatcattcagtaagtgaaaaagaatcttcaaaaatcaaaaaattccccacgtaccgacacctaaggttccacacgtggatcttaatgagtcttgtaactaagaaatgtgcatgtgaagataaaaaaaaacagattttacaacaacagatgtaatgttttaaagtctctgacatatgacatatgtgacacaagatagaaacgctcaattagcaagtctattgggaagtgcactcaagtctgaattacaaaataatttaaccatttaaatgtaaaaacgacagagggtctgttcgagaaacaagatcaacatcattgccccaacatcctcctctacaaatgccaaaccagactaataccgggaaacccataaacaaaaaatagagagaaatctatttttattgtctgcaaattcagtgtcatatccaagtcaagggtggttgtcgagtgacaggagttaacttaagaggatgagccatggtaaggatggtccctttaacagcctctttcatgttgaccttctctccttcgattctccagtcaaagcactgcaccatcattcctattgcacttcctacaatcatataagctagatttgatccaggacatcctctccttccactgccgaaaggaagaaacttaagagcttgctctcttctctcgtcctcttgccctgaccttgaagaagctagaaatctctctggtttaaactcctcagggtcttccagacattcggatctctcatcacaacataggcattaatcaaaagtgttgtcttctccggtatgtagaacctccgatcttacaccttgttgaa

SEQ ID NO: 1437 - DNA, 885 bp, Arabidopsis thaliana
tgcaaaaagaaaagaaaacaatagatttctagatctgaacaaacaaaaaaagggctgaacagatgggatccaattaccttgagagagaagacggtgagtgatccaaaggtaatccatggatttataattttctgggatttgtgaatgaagaagacagatcagagaaagatacatttcctctgttccaacaaacatcatcttcttccctcttaagctttccaacaacgacagagcaaaccgatctgaagatcaatcaccgaaacaacctaatggcattcaaaatcgagactgagagagaaagagagactaacgaagtaagtgagcaggactcaggttgccatctccaggactgataatcactatctggatgaccatgcgtgcggcaagggagctgcggatgaatgtacgggcactcagattctcggtacaacggacgcgttgacaagtctatgacccaattccctttgaacacatcgcatacttccgagatcgacgggagaaagagatgaaatcgtgcccgtagatgacggcggcgagtaagtgtgtgtgtgcgacggcgcttgtaatacgatgagtcggtgaaaaacgtttactttttttttccccctttttatgcctctttttatgtatccttaattctctgttttagacctacctttgtctaatttggtggctgaagtagcctatgcgatgttgcaaggctggcttatgatttaaacactcttttaggcctttattaatagaatgaccagatgacaaaaaaaaataaaaaaaattagtactgtatttgggattaaaaaaatgaaaatttggacttcagtgaaaaaagaacatattgctgattagttactactagtagccatggtggtggtagttgacttaagg

SEQ ID NO: 1438 - DNA, 1480 bp, Arabidopsis thaliana
catcatcaagacaacagtatcatcgctattgggatggatgatagcacgattcagatttataatgtccgtgttgatgaggtaatgcatcgacactcaagagtagaatgtagaaaagaagatgaagtgttttgtttgttaatatgatggccatcatgttccttgtttgctcctgcaggtgaagagtaagcttaaaggtcattcaaagagaataactggtcttgccttctccaacgtattaaacgtgttggtttcgtctggagcagatgcacaggttcccgccttagaccatttttttttttttttttgagaatcgatgaagaaaagatcaatagtctttgaaatgtttttgtttcagctttgtgtttggaacacagatggatgggaaaagcagagaagcaaggttttgccacttccacagggaagaccaaacagtgcaccttcagatacgcgtgttcagttccatcaagatcaagctcacttcctcgttgtgcacgagacgcaacttgctatatacgaaactaccaagctcgaatgcatgaaacaggtattttatatttataggccgctctctctaagatctgcaatttattgcatttgaaagatgattaatgattgcaatgtttcagtgggctgttcgagaatcattagctccaatcactcatgccacattctcatgcgatagccaattggtctacgcgagttttatggatgcaacagtttgtgtatttagctctgcaaatctacggctgcgttgccgggtcaacccttctgcgtatctaccagctagtctcaggtaaacagaggaatcttgaaatttacccaaaaaaacagaggaatctttaaatttcggaaagaacgtttctaaacatcaatcggttagttgtttatatatcataaagctcctcttgttgacttgtgcagcaattcaaacgtacatccactagtgattgctgcacatccgcaagaaccaaacatgtttgcagttggtctctcagacgggggagtgcacatattcgaaccgctcgagtctgaaggtaaatggggagtcgctccaccggctgagaacgggtcggctagcggtgcaccaactgcaccttccgttggagcctctgcatctgatcagcctcagagatgatctgatccgagagccacctacctctctgattccctgtcttctatttaaaagtcttttctttcttatttttttggtagaaaaatttatgacccagagattcttaacatttagatgtaacatattttcacagtaattcagtagtgaagtttggataaaaacagtgactgatgttgtttctctctcttttccttttctgagatttttaccttcacatagattttctattgtgcaagatattcaattatatattacagtcgatatttcgaatttacatatatttacaagagtgacagtttatgttggttcacttcagtagataaacaaaccaaacagatcctgaaagct

SEQ ID NO: 1439 - DNA, 675 bp, Arabidopsis thaliana
cgcgttgtctggtgtgcaaaggcatacgtcatgagagagttatccggactgagtttggtaccaaaaacctctcacaataactcttgagatgtttcacttggtatttctctgacatgaccaaaagatcacatgccatttgctcatcaagacatgcttcagctgtatagagataatatacgaaagtccgaagagcgtcataagatacgtcgctgatcttgatcgtgccgcttagactctcttccatttcattctcaagcattgctttgaaaactggagaacgactcacctggtagcaatattcacacatatcatcaatttcagcacaagtgtacaaaaacactgctcttcttcctaaaacatagaacacaagaacagaccctaactctcaaaattagccaaatggttcctaagtaacaacaaaccctaatattttttctttctctttctctctatttctaatctatcaaatagattcatatctaaaccatcaaaaacagagattatcacaagtcaattctacaaatttcaaatcaaattaatcaaataatttcagagaaattagggttttagtgatgtgagaacgaaccagaacggatttatgagcgggaataggaggagatctggcgatatcttcagaggcgatgagactacatgagtgaaggatctagaggttga

SEQ ID NO: 1440 - DNA, 620 bp, Arabidopsis thaliana columbia
tgttcaggttcatcacagaaacctgaggagttcttacctctagatatcaccagatacttctcctcaaccgtttcttcctttcattgcaccttctccaatggttccatacataaatagtaccatgcctaaactatcaggtttgttcttgttttaacttgatcacttttctctattagtaatttgctttttgtaatttactaatcggtattagttttttcgtgtatcttcagggctttgctcgcttaatttcagtgcgtctgagagtttgattcagactacttcacacaactgttggactgtttttgctccattgttggcaaatgtgatgtgttgtcctcagctagatgctacactcacaataatccttggtaaagcgagtaaagaaaccggtttgcttgctttaaacagaacccagtctaagcactgtctctcggatttagagcaaatcttggtaggaaaaggcgcttcaggtcagcttaataagatctgttctattcactcgtcgaatctcacttcttcgtcgtgccctgttatcaatgtcgatgagtttgaaagcacggtggatacagcgaaacttcttttggcctgtgaaaaaattgatcctgtgaaggaagggtacg

SEQ ID NO: 1441 - DNA, 780 bp, Arabidopsis thaliana
aattctctcctcaaagttgtctaatggttgtgtaccttctccactacaataagccgttcttaccaaatcataagcctcagattctaatgttggaccatcagtaatatcatactttcttttaccatgcatactccaacaagaaatcctcatgtacttcttatccacacccttgatcacaagatggtccaatactgtgtatacttcttgacggcaaacattacggcaaccgatgcagggacaaaaaagttcagttagaatccctaacctccttgatgcaacagtaacaaaatttgttgctccttccacatactggatagtcactgatagtccacaagagtatagctctaagcgtgaacttctctttaaaaaaaaaatcgtagacctcaacgccctcagcccacaaatccttcaaatcatcaatcaatggtgcaaggtacacatcaatattgctgctcagagttgttggaccaggaatcaacaaagccaacattatattcccagccttcatacaaagagttggagccatattgtagttcactaacaagactggtcaggtacagtaattggtgttctgaatggagaaggggttcctcccatctgtagacagaccgagtcgaagatttctttgttccatagcaaaatctggccatttatcttttacttgagcccacattcgagagtcaacagggtgccgcattgtaccatctccacttgcattgctagaatgccacttcaattcctctgcaatcctatttgatctaaacattctccggggatatc

SEQ ID NO: 1442 - DNA, 548 bp, Arabidopsis thaliana columbia
agggtctatgattatgtgtttttggtactgatttggtttgttttaagaggaatttgatattgtgtgtcttctagttgcagaatcatgtcagataaagataaggaagagaatagcaatgcacaaaacaacaagttgttgatggaagctataacagctactcttaccgcaactctcactactaatatggctaagatgatggatgagagatttgaggctgcaaggtctaaccaagaaaggaagaacagaactatgaggaataattctgatcgggaggcaacacttagctactacagccaatcctctactcgcactagtcataggaggcaaagacgtgggcaagaagaaagacaccctccaagagacaacttagctaatcttaagcttcgcatccctccattccatggtactaataatcctgatgattatttgtagtgggagaagaagattgagttggtgtttgtttgtcaagagtatactgaagcaaccaagggttaagtggcagccactgaattctatgattatgcactaagctggtgggatcaagttgt

SEQ ID NO: 1443 - DNA, 581 bp, Arabidopsis thaliana columbia
ttgataagttttgggagatggattagaggaactagggtttggcaatattaattgaaaaatcaatcgataccaatacaataacagttacaaacattacggtgccttcatagcaaagcaattaataagaatttatttgacaacttctctcttatatataagtcttcagattttcctacttgaaaccaaaacgacatggagagacgcgatcaagacttgagttactaaaaacggcgactagattctaccataaccggagatttcccaaaccctaaaggcgagggttgttctacagtcgtcctatccgactctgctgtgaagaagttttcagacaatgtcgtctacagattgtacaccaagggtttggtggtggaaggtaaggaaaagaccgtgaagtctggattagagttgcgatttgcgatgagaaggagaatttgttgtatgagattaaagaatcactaagcgacactaagattagctgcatagaagtagagagcatggcactgattcgtgggttaagagaaccttcgatttggggatcagcaagtcgtggttattgcgatgaccactgctttacaatatgt

SEQ ID NO: 1444 - DNA, 586 bp, Arabidopsis thaliana columbia
tctctttcttgagtcttcctcagccagttggaaatgtatctttgacttgagtcgtgtaatatatatctatttcaattcttgagtctcggtgggttctaccgaggcaaagcctttgaggatgtatcttccacttgagtcgtgtaaagtccatccaattgccactttgcttttagggctagtccacgaggcatctgtataacagcagtgagagggggtttgacgaagcacttcctgaaaagaggtagggttattcattttggttaggtccttcgggttagcatgcgagggacaagaaggatttgcctccttccacattcgtaaatcaataagagcaatctattgttattgaaaaataaatcattcttggctttccatatgcgccatccaataaaaggaaagacttggctcttgtcttttagggcaaataatgcctgaatatacaagagttgacacgagcttgggtctcatcctccaaatgtaaaagatatcttctggatggatcatcgcctgcaacttctactcatcccattggttggaatacgcaacataagtcctaccacttttaaatatggtttagtactagtag

SEQ ID NO: 1445 - DNA, 1016 bp, Arabidopsis thaliana
agccatctgattagttgaagagttccagttttgcagagcatatcacggtgggcatccaagagtctccacactgggagcttcctaaccagagctattcttctgagccatcttcctagtgccaagagccaaacatgtggtaataactgctggcagaccttctggaattgcagcaaccgccagtgcaacagcaatctcaaagtaatatgtgcacttctcgaaggagaacttaaagtttctgggccagccatcaacatactcccatgacagaaagtatttgacattgatgagccacactaacgcacaaattaacccaatgatcatagtcagaacttccccaaactcgttaagttttttcttcagaggggtatcttcctcgtgttgtgcagcttcctggatctgtgagtgaacccttccaatctcagtattcatcccagtatctgtaactaaacatatgcagttcccattcacgacagtggttcctgcaaacaccatgcatttctttccttgaatatcagcattctcatccacgtgcttggtggttttgctcactgcctcactctctcctgttaaggacccctgctcgactctcaaagttgaactgatcaaagcaaccacacgcatatcagcaggtaccttatcaccaaccctcagttccacaatatcaccaggaacaagctcctttgcaggcaaactggaaaccttagtcccatcacgcatgacagttgcttgctgagactgaatctctttcaaagcttccaacgccttctcagcattagtttcttgccagatgccaacaatggcattaacaattaagatgagaaaaataacaagcggctcaacaaatgcagtgatacccatctcaccaccttcgtcgccatcaaagaaggccaagacaaaggaaataacagcagccgccaaaagaatacgaaccaatgtatcattaaactgctccaaaatcagcttaaaaatagaagtacctcaggcttctctaactcattcaaaccatagatctgatg

SEQ ID NO: 1446 - DNA, 573 bp, Arabidopsis thaliana
ccaagaacaacatatgtcataatgtgaagacaaaaaaggatctgagtcaacaatgatcagaagcagacagacctgaagggtatctttggctgccattgcaaactgagctgtggagaaaagagcaaaccccatgggcttttctcccttgaagttcacctgagaagcctcgtaaccaggcaaccatctcaagagattcaaaagctctctctcttttacatcatcgggaagccctgcgatgaagattgtccgcagctgaacaacagattcaaacttgtgtaagagatcacgttttcccaaaatcagaaaactccaactacatgacaagataagagaacctttctcacttatgcaacaggtcataagtgagattttagtaacaaacttaaaaatcattcttatcaaaaaggtcataactttggacaatttatcgattccgtagcaaaatcaagctaacattgtatatcaaaaagcaggcaaattaaaacctcaacgtaaacaaaaatcaagcaagcccatctcgacaacacagcacaagaatcaccgatatgtatagagagaaagagaaagagttga

SEQ ID NO: 1447 - DNA, 879 bp, Arabidopsis thaliana
attcccattgctatcccagcaacagaacatttgactggaactccagcatcttgcaaagccaagcaaccgccacaaacagatgccatactgtcacattttgagatcaacgtaagaagcaattaccaaatttgtcattcaaacaaactaggcgtgcagatcataaaaccagataaaaaagctgaccttgaagaaccattgctttcaattactgtactttcaacacgtattgtgtaaggaaagtcatcatcactaggtagaatggtctccaatgctcgctctgctagtgtcccatgacctatttctcttctactgggtgcaccaattcgtccaacttcaccaacagacgatggaggaaaagtgtactgcaacatcacaatgactagcttagaaaatctctttaagcacaacaagaaaaatgaagaacgacactaagcaactaaccacatcaaaaagtttactttgtctaataaaaagtcaactgtaataataataacaaagtgagaagaacaaatataaaagagacctgaagatagaacctcttgtattcatcagaaccctcaaggttgtcaattctctgcgccatttgtttatcaccaagcgtaacaactgccagtgcctgaaagaatcataccaaatgttcattagcaaaccaattgccttaaaatacataaaaggcgataagagaaaggatcgacatatgaaatagccacgcaggatttctccagaagacaacattcctatgtaacctgtgtttcccacgtgtgaacagagtacttccctgtgccctgggaagcagtccacatcttgaattaattggacgagtctcatccagagtccgaccatcacttcttttacctccctatggatgcagaaagatgt

SEQ ID NO: 1448 - DNA, 566 bp, Arabidopsis thaliana columbia
ctacatattaagaaaacaaaaaattcaatggaatttaggaacttgagctttttggatgctctaactttcatcacgggacgagtcccactaatatctactctccaatctctattgcaaaaactatcaaaagaaaaagaaaaaaaaaagtttatggaccaatcctttgagttggctactctgaaaagtaatactccctcatatgtttagataccaaaaaattgaggagttccaagtgttagcctttgatgggggttgagatacgtcaagcggaagttgcaagaacatcctcagtaggaggctgcattggtttttgaagacgtgttgttgttgttgatgattgtggctttgccgctgttggtaaaggcctcttaggttccacctaattgacaatctcagctccaccatcaacttgcatgaaggcaaaaaattacagccacacgggtttcagagaagtagagtgtattccaaacgcatcaaattattgaggttgaagcaaggaaacaaaccttgtaccacagcctgctacacatgcgtgacagcattcctgaatttaaaacagagttcat

SEQ ID NO: 1449 - DNA, 699 bp, Arabidopsis thaliana
ggtaagttgtaactttggtggatactgtttcgtccttaatgaaattggtgaaccttacttcatttgatttcttagtacactttacactaagagtaatataagcagaaacatttatttcagaaagtttcagtatttaggcgttcatgtttgtcttatatccttaattgctttgcaactgttatgcttgctattagagcagaaattgcaatgatcttcagttatttctcaattggggaagtataaactttgatccggattttatctacaaccaattttttccctctttggggaacattcactttgtttatgcataaatagcaaaaagattgatttctgacatcttcagtctgccagagtttatgtgtattatttggtttttgaatccttgattcggctgctgctgttcttcatattcagttttagcgggaaatccaaatatcttgagttgtgtctcactttattcatgcaactgtctgttgtcttgtccaggaaaataaaaactttgttaatggaagagagttgttttagtgaaaaggatggtaagtggcttcatgagcattgctcagcacaacacatctcttgaggttttaaacttctacatgacggagtttgccaaaatcagtcccaaagacttggaaaccatagctagaaattgccgctctctggtatctgtgaaggtcggtgtctatgagattttgg

SEQ ID NO: 1450 - DNA, 532 bp, Arabidopsis thaliana columbia
ccgtatggccatgggtgagaagaggaattggttgagattcatgtctagaggaagaagaaaactcttcgccatggcgttggtgtctcgccttgttagctccctgggcgtaattgaactcattctcgatatcatcaacatcatcctcatcttcatctccttcaacacgaggactccctggaaaattccaaaaaattgttcaacacaacagcaaagaaacaaaaagagaaaatccatatatagcaattgccaacaaaaagaaaaagacaactgacccctgtgtcgtctgaatctagtcttgcattgagggcaacactgagttccatctttcctctcgtactcatagcaaggccgacacacagggaaggcacattcattacacgcgacaaagacatctccagtttcagcgagtccaacatcatcaccacagatctgacatatctggccattcatattcttcaaaggtttggtctgcactttgaccaacattgcatcattgttagtcattgagtattagaacctacagaaagagatg

SEQ ID NO: 1451 - DNA, 1111 bp, Arabidopsis thaliana
tgattcgtgtgtatacgtcaaagaggtcatccctgatcagtttgtgtatctactgttttatgtagacgatatgttgatagcaggaaagagtatggctgaggtcaataaggtcaaagaaggattgagtttacattttgagatgaaagatatgggtgcagcgagtaggatactgggaattgatattgaaaggaatagagaggaaggaactttgtgcttatctcagtcaaagtacttagagaaggtcattcaacgttttagaatggcagatgcaaaaggtgtgagtactcctattggtgctcatttcaagttgtcagcagtcaggaacaatgatgagagtgttgacacagaagtttgtccttactcaagtgtagtaggaagtgttatgtatgctatgatagggaataggccagatgtagcgtatgtctcggattggtgagcaggtttatgagtaacccaggtcatatgcattgggaatcagttaagtggttactaagatatcttaaaaggtcaatggacctgaagttggtttacacaaaaggaaaagacatgaagatacatggtttctgtgactcggattatgctgcagacctcgataagagaaggtccataagtggatatgttttcacggttggtgggaacactgtgagttggaagtcaagcttgcagcatgttgtagcattgtccactacagaagctgagtttatggcacttactgaagcagtaaaagaagccatttggatctgaggtctcttggatgatatgggattgaagccagaagcagcttcagtgtggtgtgactctcagtcagcgatttgtctgtcgaagaacaatgcatttcatgaaagaacaaagcatattgctgtgaatttctatttcattcgagacataatcgaagctggtgatgtagaggttgagaaaatccacacttcaaggaatcctgcagatatgcttactaaagtcatacttgtgcacaagtttgaagcagctttagatcatctaaagctcctcaagtgatacttggaattatgattgccgaaggttaagttcaagtagtgcaattcactggagaatgttgaaagattgaatcaaggtgggggatcattcgacctgc

SEQ ID NO: 1452 - DNA, 583 bp, Arabidopsis thaliana columbia
tctcggctggttcaaaaagaccgcttgagcttaaggatataccgcttcttgcaccaagagatagagccaaatcaagttacaaggtcttgaagtcgaattggaagagatgcaagtccgagaatccttcaaagcctccttctttagctcgtgcaattatgaaatcattttggaaagaagctgcttgcaatgccgtatttgctgggttgaatactcttgtgtcctatgtcggtccttacttgatcagctactttgttgattatcttggagggaaggagattttccctcatgaaggatacgtactcgctgggatattctttacgtccaagcttatagagacagtcaccacccgccagtggtatatgggtgttgatatcctagggatgcatgttagatcagctcttacagcaatggtataccgaaaaggtctcaaactttcaagtatagccaagcagaaccacacgagcggtgaaattgtaaactacatggcagtcgatgtccagcgcataggagattactcatggtatcttcatgatatttggatgcttccgatgcaaatagttcttgctcttgcaatcctatataa

SEQ ID NO: 1453 - DNA, 965 bp, Arabidopsis thaliana
ccaaaatatgcgactaactaatcaaacaaggcaagcacctacccaaatgttccgatgacccgtgtggtgatatgagtgttacaatcaagagctaatcttgcaaggccaaagtcagaaacctacaaaaaaaatgagagatcaaatactgttcaagtcaccatttaactgaaaccttgaaaaaaatctaaaatagcaagactaatgttgtacccgagcatcaaagttgtcctctaaaagaatgttagacgacttgatgtccctgtgaatgatacgcggatgacctgataatagacaagagtttagagactagcatttgattgaaaaggttaaactagtggttaagcaacaacttacaatcttcatgaagataagctagtccacgagctgccccagccgcaattttaacacgtgttgcccagtctagaacagatttttctcctgtttaagagacatgtagatagtgtcagtcccagtggtgtgtgtatatatataaaatgtaatcttggagatgctttttctttaccatgaaggtggaagtaaaggtcattgttagaaacataatcatagataagcaatctacggtcaccagagatacaatgtcccacgattgaaaccaaatggcggtgatgaattctgctaagagtttcaacttcggctttaaactccctgtcaccttgtcctccaccgatctttagttgtttcacagcaactactctcccatcaggtaatatccctttatatacacaaccaaatccaccttcacctaatagattttcttgtgaaaaaccatttgttgccttcacaagttcttcataggaaaacaatgctttcgaattgcctaagccaccggattgtgattgataactgcccgaacgcttgcttgctccaacaggtgcagatgactgcatcctaaaaaatgctgaatctgtacataagaatatcaaaatgtaatgagaatcaagaaa

SEQ ID NO: 1454 - DNA, 541 bp, Arabidopsis thaliana
cccgtaagatcgaatccggttcaattggctccatctaaccagtactcaattccacttaaccacatcacctaaaccggtcacttaaagttgaatcagaattaagaacaacaacactccaccttgattcaatctttcatcattctccagtgaattgcactacttgaacttaaccttcggcaaacatatcaccaagtatcacctgagaagctttagatgatctaaagctgcttcaaacttgtgcaaaggtatgactttagtaagcatatctacagggttccttgaagtgtggattttctcaacctctacttcaccagcttcgattatgtctcttatgaaatagaacttcacatcaatgtgctttgttctttcatgaaaagcattgttcttcgacatacaactcgctgactgagagtcacatcacactgaagctgcttctggcttcaatcccatatcatccaagagacctcgaatccaaatggcttcttttactgcctcagtaagtgcaataaactcagcttctgttgtggacaatgttacacat

SEQ ID NO: 1455 - DNA, 529 bp, Arabidopsis thaliana columbia
cagcagttaagtggcggttttggggtgggatctttccttttgatgatccttccccattctgagttatggttttgcttgctggttctaatggcagtttggacttttttgactttgacttgtcatctttagacgaatccgatggagacaagggaagtttattattcagtaaggcaactccaacatgggccttcaaaagtgaaagaaaaaaaattaaatcaaagaaataaaataaagcgaagacatcatttgcatggcatctgcccaatgaaaataaacgctacctgcttcagtgctccgacatcatttgtcccgtcaccacacatcaaagtacctctgcccaccgctttgaaggtggttaagatcagctccttctgctgtggagcaactctcgcaaaaacctgaaagaaaaaaaaaaaaaaaacttcagaccctatagtttataggttactaaggaatactaaaccacctgacaaagattacaaggtgtaatataccttaacaaacggaatgactcgcaaaacagcagatg

SEQ ID NO: 1456 - DNA, 556 bp, Arabidopsis thaliana columbia
gatgattttttttattaaagtgtttcagagaatttgaaggaggagatcggaatagttgaaaatggctaaccaaggtggtccgtcgaggaaaagtctctccttctccggtcattcatttcaaggaaggaaaaaagcttcagaaaacgaaggtggtggtggtggtggctctgatctcctcccacgaagatctctcacatcttctcgttcttccatgtaatcatcaccccattctcttccaattcttcatttttctgaggaatgatacatgtttcaaaatatatgagattggaagtaaatgtttgcatgttgtttcttggtgtagaagcttgagtggggaaaggagtggtgagagaacggtaaagagactaaggttgtgtaaggctcttactgtaccagatagcacaactttatttgaagcttgtcgaagaatggctgctcgtcgtgttgatgcgttattgctgactgattctaatgcattactttgtgggatcctacagatagggtatcatgtttcatgacaggattctaatgcaactggactttcacttatgttttt

SEQ ID NO: 1457 - DNA, 943 bp, Arabidopsis thaliana
aaagccagacagagatgccgcttgatgtctctccggagatccttgggaagattctgaacgagatactcttcatctacaccacgtgtctccaaccatttatactggtcataacgcctcacacgctccctaagatcttgtggtaacattctgtgatgcatccattgttctgaatcacgcctctttactctcatttcttcaagccggatggtaagagattggagatatgtctgtcccaagattgcaaaatgttgttagatagtcattatgcagaggaaacaaattatgcatgatgcttccattgaaagagcttacaagaaatttctaatgatcacgaaagtagctaaggttgcaccataattactcacctgcatgtttccaatgagaagagcaaagaggatcaacccagaaatggcgagagatatggaaaatataatctccattgggtatgtactggtttcaagcccttgtccaagtgtactgtggtgcaacaatgagaagtactatatgaatatctgaaactcatagacgcataactttgataaaggagccgagtttagtgagaattggtaagatcaaagcaatagtctttcgactgaatagtgatagaacatggttacctcaagttctgaaggccccaccacaaacaataacaatattttacgatgaagttttgggacgagacaattccagacgataaagcctgtgtataaacccaaagtcaaatggaggattattatcatcgaggtcagctcggcacttggacttaagaacagattccttggctctgttccaaacagcatagccgtccatgttttgattgccacagtacaagaaatctgtgctgcaattccctgcatctatacaggcctcctgccagcaggcgtcgttacgttctaaggctaaaaggtccaaaaagctccactatctgcaagatacgaacagt

SEQ ID NO: 1458 - DNA, 555 bp, Arabidopsis thaliana
tacatgtgttttgttctcccttgagtacttggaagtggatagtgtagattgtcgattgcggatatccgtcgaagttcttgacgtacagctagacagcctcggtgatatggtactaccttggttgtgcttcacaaaattggagtttgatatatctgaatgcaaggcagcgttctgagctatcccctccactgcatactctaagcttgataccttggattgaagaaccgaaaagttgttcattattcctgttgaaaagacctataagtttaacagaagacgaaacttagttactgagaacacgcatcttgaagatacaaaggttgactaaagcatctataaatttgtaagctgggtaaagacattagattgtgacagataatccactaacctgtagctgatctatcaaacgtgactgtctatcttcaatatctgagagttgtttacgtacagaagccatttcatttgcaatcttagcacagcagtcatgattaacttgagagctcgcactgttacaaaagagtcaaggcttgtacgatcttcacttgggttgagaat

SEQ ID NO: 1459 - DNA, 665 bp, Arabidopsis thaliana
ccgataatgttttacaggactctaactgtgtatccaaagggagactctgaggcagataacgagttctgcaagtacttgcatttagctgacggtgaagtcttatcgcctggtgagatgatttccgtgcgagcacaactaagggctttagacccgcgtggatccaaacacaaaacagtctggcgtaagtcaaaaactattgatattactattttcacaatgcttatgtcttgccttgatggatgatactgatgacattttcaataagcaaatgtcccaactcttttgacgacattgattccttgttcttgtagttcaacaatggatcatggcagcgaccaaagcgaggggtattcctcaatccttgtctttagctgatcttcaggaggcttacttggatgaagatactttgaatgtggagatcgaatgtgaagttgtgaactctaggaaaatgttttaagcgtagaagagaatgtgaagttgtttccaccaaacactctatctatatctatttagctatcatgccatgtctactactctaggactatttgtgttaagcgtagaactgaatgtgaagttgtttccaccaaacgctctatctatatttaggaatatctctttgtccatcatgcatatctgactattgtatgactactctgttttatgtg

SEQ ID NO: 1460 - DNA, 1192 bp, Arabidopsis thaliana
cccgtcgttttccttagcttcagatttgatcttctccacgagcttatcaatggcggattttctaattgaaccaaattcctttaaccggttagagcagagcatgttttgaaccatgttccgtctcagtgatcgccacacgggaccgtacatagcggaatgaacggtgatatcgctagaactgaagattttccgggtcggagtttcggcgggtcgggttgcgaattgggctccacgttcgatcaaggcttggtgtgcgagattagcgtcggagatgatgatcatcgttcgaattcccatcttaagtgtgaaaattgggccgtagatgtttctcatctcatcgacatattcgaaaaactgtttaccggagcgcgcgaactgtaacagattcccaactaccggccaaccttttgggcctggagggaggttcgcgcactttggattgtgactgtggcgcgtgagtatgtaaaccaaacatgataggagaattgtgacaagggtgaagaagaagaagacataattggagatgtctaacatttttggtcttgaagctaagaatttgaagcaatgatgaacaagaagaagaagcaattttgaaactgttttatgatattatttggatcaacatataagcatgctagttattagaaagcttagagtgtaacgtatgaatatgtgtatctctaatttctaaaaatatgttcttgtttaaaatttgaaattcattctttatttgtttatgttaatagaaaacatagcataacgtatgcgaaatttctaaatatatggttttgcataataatcttattctaataatactttctccactcatatggtattaggttgatatttctttgagatgggatcatgggattgattaccatttctcacaaatacggtgtatattttagagtagttgcaaaagatacaaaccctgggacacacatgagatttctctttttcccgcgctaagtttccgtttgggcttgtgatactttttatcaattgggcttttgctttgttggcccaaggaaaatctagatgttatagtacattgcaaagtggggattacaacaatacaatgaatgaactctgtacttcaagtgattctttcactgacaatatcggaaacaattttagaattagagctttggaataattgcgacaacagaaagaagttttatcatttgggaaa

SEQ ID NO: 1461 - DNA, 539 bp, Arabidopsis thaliana columbia
gaatttaatagattaaatatataaaggaaattaataaataaatgaaggatataattgtggtgcgagagagagaggtcggagtgtgttagcttcccatactgccactaacctttagcggttttctcatcttctctactcttctttctcttttctgagaaacccaaaagacaaaaacgaagaagaagattaggaaatcatcttgagaaacaggtttctacatctctgtgtttcaacattttctctgttttttttaagttgttgagctttctggtggtgttttaatggagaattttttctgataatttgtatggtttttaattgtactaggaggtagcaggagaatatgggggacaaggaagaagtccttgaggctgttttgaaagaaactgtggatctggtaacagatctactctaaagttttaatttttatttgtttctctgatgttggagagaaagaatctgaagaaatttgttttcttgggtttttcaggagaatgtactattgaagaagtttttgagagtctgagatgtagcagaga

SEQ ID NO: 1462 - DNA, 578 bp, Arabidopsis thaliana columbia
gacacgatccgccttttaacagtgacagaaatatccttcaacaaaaatccttccataacagccacataccacttgaaaaggaatgctagagacaactaagtaattccctagcaaaagaaatatccttgagagacgtctagagtggtaatttttcttgtcatctaagcaaaagcacataaacaacaggaagtatgcacatagctcaaggaagcttaaccaacttaccgtcatccatctacacctcaatgctacatcccttacagttttatccggtagagttgcagcgatctttacatactttgaaattttgggttcatcttttaatctacaaacggaaaaaaaataaagatgtcataaatgcaaacaaatagaacaaacaagctacagactctagaaaaccaaagtaaccaggaacaacctcagctagaaaatcgataacttaacccgaacttactaatggtcccagtcccagaaaacaatgtcatggaacacacaaaggcgatacttttataatcagaaggaacaaaggaacatactttaatagtccccattgagaatataatgtcccactactactt

SEQ ID NO: 1463 - DNA, 531 bp, Arabidopsis thaliana columbia
tgcgtcacaccatccaaagtttacaatgtggactcttctattttctactccgtaaaatcaactttagagctatcaagattggatcatttgcatgggatttggagtgaaaagataaattgttcttgtttggtgtcactgattcacaatgatgatccactatcgacagtagaaagcatgatcatgaaatcttgggtatcttctctcaattttatcactctcacagatttattttgtagtttatacttttgttcatacaaagaaaactttgacaaatcattcatgtttgactaaaagaagggagacgaaggaaaataaacagataaatatctaaatggtaaggacagcgtaccaagagaagttgagaaagcagaagagaattaccaataaatcatatcatcaatcaccagacatctctgaggtatcttccttcggtatgaagtatcttaactatagcctctgcctctgacgaactcacaccttcctgaaattttgtaaagataaaaatagtcgagtatcaacgggaacaaagtg

SEQ ID NO: 1464 - DNA, 620 bp, Arabidopsis thaliana
cacccgatagaaggtaatcttcatttcttatgcttacacttcaattcggaattacatcagagttaatttgttaccgattgaattataattcaaagtcatatgggaactgtgtttgcattgttgcttagctgataactgttgattatcctcttgtatcgatggttgttatattccatcgttttcgagatttcctaatctgtactcaatttttactttgcatgttagatttgggtatgaccatggtggaggatatgaccgtgaaatgggtgggaggcctggttatggtgatgaaaggcctcatggtcgctttatgggtcgctatcagggtgagacatctctgtctaagatgtttttacagttgagagaatcagtattaccactttttcgtatgatttctgtcttgtgagacatgtttaagatacctatcattgggcgttcttattatttgtggacttctgttcatttgactagcttcgtatatttctctctgtatgctgtggattggaaacaagcgatttacattagaagataagatgtcaatatctaccttttattgtgtgttacttatggcagactgggagggaggacgtggaggttatggtgatgcttccacagtggaa

SEQ ID NO: 1465 - DNA, 525 bp, Arabidopsis thaliana columbia
cgactctaccactttctaagtagcacactattggacatattgcaggacatttgctgcagttggtgttgaccctgcaatcatgggtatcggtccagcagttgccattcctgctgcagttaaggcggctggtttagaacttgatgacatcgacttgtttgagatcaatgaggtatatagctaaacaatttcatgatcttcttatcacatatctcttcccgcacattctgatgatgaccatctgtttgaatccttgtgtgttcaggcatttgcatctcagtttgtttattgccgtaacaaattgggacttgacccagagaaaatcaatgtcaacggaggtgcaatggccataggcattcctttgggcgctacaggtatatctgttaagaacaggactaaaactgttaagcttgttccaatttaccaaaccatagagacttgaattaatgagaatctctcaactctcaaccaaaccttaagaaatccacagccgagatatatctttataaactctgtcctcactaatgg

SEQ ID NO: 1466 - DNA, 929 bp, Arabidopsis thaliana
gggttgaaatcaatgccgagagaattctagtggttggaacgcatgcagatgatcttggatatcaatgcggtggatggacaaagacaatgtatggtcaaagcggaaggatcacagatggtaactagagctactgcaatatggtttgaaaaacacctttggtaggaaatgctaaatggtctcgtcgaatttctaactatattgtttgaaaatgtaggcacaacgcttttagatgccataaaagcggcagttggagacgaaaccgaagtgatctatgagaaaagtccatcagaggaaaccttagcctcaggatatagattttcttatgcaattgttgcggtgggagaatcgccctatgcagagactatgggggataattcagaactcgtaatacctttcaatggtagcgagattataaccacggttgcagagaaaataccgactctagtgatcttgttctcaggacggcctatgtttcttgagccgcaagttcttgaaaaggcagaggcgctggtcgctgcttggcttcctggtacagaagggcaagggatgactgatgtcatatttggagattatgactttgaggggaagttaccagtgagctggttcaaacgcgttgaccagttgccgttaaccgctgatgctaattcatatgatccattgtttcctcttggttttggtctcaactacaattccagtgagaatgtgtgaaagtgtgatatttgatattcagagtaacgcttggactagtgtgcatatgaataagtacttggtcttgtgtcttcataattaaaaaaaaaaactcaaagaaaaccaaaatctaataacatcatttgctcacaagtctgtttgtttctatcattatcttgctttcttgtccgacaagaaactattttacagactacgtattttcttgggttttttttttcttg

SEQ ID NO: 1467 - DNA, 1198 bp, Arabidopsis thaliana
tgacgttattagatcgaatgtcaacagtggagaatggccggagctcagtgactttagaagatattctgatggctgaaacgagcagtttccgatctcttactacgccgacaactccggtgaggaatcactctagtagtagtttacttgacgtgatgagaagagagcgtcgccgtgataaaaccgcttggaaatctctccgggataagctccgtcttaaacgcaccgctactggttggatctcgtctaatcctatccctaccttggataatcatattcttactccggataacgacagccaccgatttaaccgccttggattcctcctcactaactcggagacaaaccggagcagtcgtgacgtcagcgacgcagcagaggaagcggcggacggagaaggaaggctccggctaggcaccgtgttggcggcggagagagaggtattagtgtgtattagttagttacttagtaagttagttagttagttagttagttagacggttaaacttcatatatatcctctgtttctaattaactattaatgagattatattaacaaaactctaatgtggtatcagaacaattaagtttaagctttcttataattttttatctaattaggaaatgcagccaccgaggatgtctctaatggagttgttggaggataatgatggacatatgtatgaactcagcgcgcgagacgaggtggaagtggagggaagagatggctgcgacgggggaggagaggcggtggcggtgacgggggcagcggagttgggttgttgcgtgtgtatggtaaggagtaaaggtgcggcttttataccttgcggacatacgttttgtagattgtgttcgagagagctttgggtacagagaggaaactgtccactatgtaacactgccattttacaagttcttgatattttctaggttagcttcttttgcaattttatatcatttaaagtgtacttttcttcacttgtttgtttgtgaatctcaaacaatgaaccttcacaacaatgcttaatcaaaggccaaaacccaaaaatgagactaagttcccatattgacattcgaaatcgtcgtagaaagaaagacatgatggttactctattaaccgatatcatgacgacattttacaatctgcataatgactatcatgatttgctttcttatctattttgttcaagttttttttagg

SEQ ID NO: 1468 - DNA, 447 bp, Arabidopsis thaliana columbia
  unsure (1)..(447): unsure at all n locations
cgccagtgtgctttaaaggtggcgtctggatgccgcttgcgttgttcccggatctcacctggcaggtcatggaaaattcgaaatatcactttatcgaagaagtgaagaaaatggttatcgatcgtagcgaacaggaaatcattcctctgatgccaaccgaagagatgagccgtctgcttaatatcagccagacaaagccgattcttgaaaaagtatcgcgtggatatttagttgatggtcgggtgtttgaatatagccgcaacgcttttaataccgatgactataaatttaccctgatagcgcaganacaatcatcgcgataagcacaaaaaaggccatcatacgatggcaaccatgtcgaaaccgacagcccttcgccattcctgtagagggaagcggcgagggctatttcttattacagatatttatttcaagaccagtttcagt

SEQ ID NO: 1469 - DNA, 571 bp, Arabidopsis thaliana columbia
gcatgtatatatatttgttcttttctatgtttgactaagaagctatgtaagatatgtaagaaagacattttttctagaagcataaccaaaaaaaaaatacaaagagccttatcaacaaaggatttctcattcatgatagctatctttatattcaataccaaaagtccatcacatctttctgtggaaaacacttgaagttgaaaagtcataagtgtttcctcaaaaacatagcaaaaagaaccatcaacctgcccgagaacatgttagaacatgtaaaaaaacatacctaaaaccacacatgtgttcacccaaaaacatcatagacacatgtaatcccggaaaaaaagttgaccccttaggcaaatgatctattaatgacaggtttttaaatttaaccggggtaagttgccctctactttgaacgtaggtccagcacctcacatgctccgtgttcacctttgtgtctttagataatctaagacttttgtccatttattgtgatccgaggagatatgacactcgatcccaaggcatcgcgaattgcccagattgtgtaaacagtggtcggatc

SEQ ID NO: 1470 - DNA, 838 bp, Arabidopsis thaliana columbia
ctcgttgataatacgggaagcttcacgccgtaagtttggacggcttaacactgcaccttctgattgcatcccttgcaactgaaagaaacaacaacctttttaacaaacgctttcaagacaacctcacgcattattgtgacttgattacatacgtaaataaagtctcaaactttgctactgggtcacagtgtgtgtgataaaccctcagcacttcataagctcactaaatgttcttaaaccctcagatcaattcctaatctaaaacctccaaaaccaagcaacaagctcaaaagattcaatttttacaagttctctgtgataagcacattgaataacgaaaagggtaagctcaaatctcgaaccagacctgaaacaagatggtgaggcgagcaagaggagcggtacatgtcttgctaatggcgccggcaataccaccagcgaggagattctggaaggttcctagctttgcctgcggcttaatctgcgtcatgacgacgctactatgaacagtggttgcagtgttaagagcactctgagctccatcgaccgcaacaccgactctagcgtcaacattcatatctctctatcactgtttctatgagtaacccgtttctgggtttgcgagtttggaatcgaaggtcacatcaattgaaggaaactgaattacgatggagatcggagacatcgacatgggagagagagggaaaaggaaaactctttgagaaaccctaaatcttgcttggagaaggagaagggtattttggtaaaacagctcagatactgagatacatcggaatgatgtccccatgggcatcgggggattagagtcgacgacctg

SEQ ID NO: 1471 - DNA, 865 bp, Arabidopsis thaliana columbia
tccatcgttttctaaaattggaggataacgagactcatcatcatcctcatagccaggaattgggaatctggacaaaatctgatcctcttcttcagcagaacagagacattgcagctcaaacagttttttaagcatcagtgtagggttaaccactgtctcatttgttttagtctcttctataccttccagttcatttccagtgatcttctccgttgtaaaactctgtgttggtgacttctccaacgatctgtttaggttttctaggaaatgagtcgcaggaagttgagtcttgtcaagcacgtaactcctgttttcagattgcgaacgaagccaactgttaatccttgaaaactctgttccacctattttctgcatcacatctttctcgaagttactgatgttggagcgggactttgtcgcagaaccaggccccatctgcagcggttttggcttgtgttcagacactaccaacttaatgtcacattcagatatgtcctgactatacaccgttgcatcatctgctgtattttgacgcataatgctagtcgatttcgaaacgctcctgtctgatgagtcacatgcagaatcaaatctgttcttcttcttcttcaccggaagacacgcagattcagctcggacagatatcattgagttccttctagacttgaagcttgaagaattaggggttacgctaaaatctgctcctgataatcttctgttgctgctagctgttggtctcatgaagctaggaaaaacatctgaagcacgtcttgatttgtttcttggtttctttggagtcacatgaatcacttctctaaccacatccttttcttctgcttcaataacatgaggcttaccagtgagt

SEQ ID NO: 1472 - DNA, 531 bp, Arabidopsis thaliana columbia
tgtagtagtaaccttatctttcgagtaggcttggcacccgctgtaacattggcaagctcagcctccagctctattttcttacatagtaacaatgaaacggaatattagggtttgcaacaaagcacaagagaatacataaaaattcaagtgtaacttcttccactgattaaagaaaaacgcaaatcatgggcagaatttacaggtaaggtgtggttcttatccgcaatgggatctatcatctatctatctgttatgactagaaacccctgtttcagttttccaattccaagaaaaatcaagaggatttaatccagttcatatcaacttggcagcatagctaagttgcaaatgtgcggctcaacataaatcttaccatcgtatccctcattttttcaaacaatatagactttacagggtcttttccaatccaacggcatagctcaagagtcactcctttggcagatgcacggacattctgatcttgatggtcgaaaagttcaggaagcatctttagaatccttttaggtggaa

SEQ ID NO: 1473 - DNA, 876 bp, Arabidopsis thaliana columbia
gttccagtcagatgattgaacgtcaagtcaagatgctgaagctgagacaaacaaccaaaacttctggtagtaaccaatagacctgaggctgttgattgatcacactcgaaacctcattgaatctaacatcttacacaaaaacagaaacagccttatttctgaatccaacaacagctgccaaaacttgaaagtagctaacaaaaggaaatgattccaccacaatggctcctgcttcagttcagagcagcttatagaaatctgaataacggattcttgattacacaattcattataccaaaaccatataaaggattactacagattcaacaaaaattcacaaccttccttaaatcattcttctgccatttgatgatgaacatattcaaattcccagaaatatccatccttactatctccaacagatgcagaaaaaagaatcagaattttaaaaccctaattttaccaattacgtagctcacaagatccaaaataacctttcgccgacaacaacaacaaaaccaccgtatctaacgctgctcaaactcgcgctgatggcgagagagacagagagaaagtgaaagctgagcgtattcgcactgtttacgcttaaggcttgttccgccgctagagcaaagagacctcaccgcctctgattcctccggacaagcctccgccaccacgcactccgcaaacgccttgttcaaatgtctgcaaccggatctccttgccggtccttccggcatccgacggtggcactgcaacaacgcttcctccaaccgatcgcaagatttcatcggaatctctctgatttttccggtgtgaatccgtctcatctcacgatggtactcactagttgggtttgggcttttgttttgt

SEQ ID NO: 1474 - DNA, 736 bp, Arabidopsis thaliana
taaattggttaagttcatccggtttgtgaaggaaaacataagctgatcaaacaagaatcagaaaagaaacaaacctgtcatgatgtcctttgaagtagcgcaagtacttattatcgtgcaaagagagaagcctcagagagtctaaccaaccagatataaaagttagttaaagcaaatcagataatgaggaaaagcaatgtgcacatgaatttgggctcaccgtcccatccgtttctggaagagtagatgacagtagtaggatgagaagtgaagcaaacaagatcaacaccatactttttgctattaattgtcttcagacatctgaaacaagaaaacagaaaacactgaaaatatagttggaatgtcttatagagcaatactcaagacagagtttggggtttggaactcacgtggcgctggcaacatcatagagacgaattgagtcatcgtcgctagctgtcaccatacaagtcgaagttttgtgaaagtcaattgagctgatcctgcaattctgaaaagaaaagctccatcctttaaaatcccattataataacaggaacaaaagaagaaagcttcgagaagggaaggaaaaattacatagtctctgaaaacggcgccaggttccatgctctgtataatttcttcgctgagtgccaaagaaactcggtcctctctctctgtaaattcaccattggacaatgaattgttaagacttcacgttacacgccgagaattg

SEQ ID NO: 1475 - DNA, 583 bp, Arabidopsis thaliana
tcccaaattttgtcccttttgtgtagcaattggcattttgaggttcatgtttctcatttatgattttgctctttgttctcatgtagaactttaactagttagacctatagtttctcatgctggactcaaacttttataatctctgtgtgcatataggtcaagtggggtatttaaggctctaaaagctgagagatgtggttgttactctcgtggtatttcccccatcagtgagacctcaaaacctatcagggctgtttcggtatcttcttcaacaaagtattatgatttcactgtgattggtagtggagtagcgggtctgcgttatgctttagaagttgcaaagcaaggaacagtcgcagtgattaccaaagatgagcctcatgagagtaacacaaactatgctcaaggtggtgttagtgctgtgttatgccctttggattctgttgaaagtcatatgcgggacactatggtcgctggtgctcatctttgtgatgaagaaccgtaagagtaagtccctttgttgctgatcattcctcaaactgtttgataagtgcttgtgttagctcgtgcataacattttgta

SEQ ID NO: 1476 - DNA, 546 bp, Arabidopsis thaliana columbia
caaatcacttaacattctcgagtttctctcgatttgattaatctccctaagtagtccacaacccttcttctttttgtctcttttctttgattcgtccataatcttatcgtgcaaggacatgactggtactgcccattggaaatgcctagggaaatagaaatggacatgtaaaccacgatcttgacaaggtatggctgcgacaagaacccaagttacaaacaacagtattgatgtcattgtatacactgtgagagctaggccattagtcgccataacatcgctggctcgaggggttgctaagttatttccaatgccttgtaactgccttgatgccgaccacgaccgagaaacactccaagaaagtgacctgatatagccaatgtgttgattatggtccttgttgcgtgtgaaagagcgattacggtgggtgttagaagagtctttctcgtcgagcattccaattgccaaatcaatcaaagctttctttgcacggtggattcaccttctccaagttgtcattggttcgtgtcaaagccgatattacga

SEQ ID NO: 1477 - DNA, 563 bp, Arabidopsis thaliana columbia
gattctctgagtaatgtagttctccacagtcgtcgatcttattctcaagttgtgtccttgtttgaagctaagatcaagagctaggaatgggcagttgagagtatgaagagtttacatgttcaaaaagtgatttttggagccactacaatggagataatcaaagccctgcataaacctaaggattggccatcaataataagtcacattctcccaatgctagttatggctgatggaatgactgattggttcattttatttgaacctaatgggtgcaacaaaggagcctataaaatagccaagagtgttacctctgacataagagtgaactcttatgtagctcaaagctatcctagatggatgaaagatttcttcattaaggagaaatgtattgtcgatagtattaggtcctaagttttttttagttttaagttaggagttgtaattatagagtgtattttattaggttctaggtccttctttttatttattccagtaattttctagttagatagatttttaaagagattacttcgcaatgatagaaaaaaaacaaaaagatttag

SEQ ID NO: 1478 - DNA, 517 bp, Arabidopsis thaliana columbia
ttttgcaaatcccattatggcattatcaaagagagaagaacctcatacaagaaaaaggaaggagaaaccatgagagagcacacagcgattagctagacattggatgattgtaaacgtattcaatggcgagagagcaagaatcgatcttgtcagcttctttgtctggaatttccagcttgaattcctcttcaatagccatcactatctccactgtgtccaaactatctaatcccaaatcgttttggaaatgaacctcaggagtcacctgtcgatatttatcacaaagccatcaacaaaaataaccctaaccaaacaacccttattagagagagttgatgaaggattcataaatgcaaaatccataagaatgaccatatcaaatcaaatccataggaacaacaacacgataagctacacttactaaaccacattgagatcaataaccttcaatttactaacaacactaatgcaacatcgtttcagatacatttggtctctattccactagatcaatacg

SEQ ID NO: 1479 - DNA, 478 bp, Arabidopsis thaliana columbia
tgcttgctatattagttaatataaagtttcggagtatggtaatatagttgatattatttattactggtttgatgttttttttttttctttcataaatttccaattaaccaaaagaagttgcaatacaaagccaaaaggccaacacagcacgcaggcctgaaagaacaaagaacaaccaattacaagcttaaaaggctagatcaaaggcagaagcccagaaggcccaagccatcacagcagacggccaaggagctagaacaccaaagcccgaacctttgaaacctgcacaaggagaaagcatcagacttgaggaggatctctattgaggaagagagaaaaccaagaacccaaaagcgagagtccggatctcccaggagcgcgggacgagatgagaggatccaaccgagcccttatcaccatctgaatttcgttagtgataagatgagaaggctgcctgatttcagagtgaatacgagca

SEQ ID NO: 1480 - DNA, 549 bp, Arabidopsis thaliana columbia
gagatataatgaaaactgtcaagtttaagtttccaggaactacttaacatgactacaacaagacacagcttccaggaacttaacatgactacaaactttcatgttattaactagacagattgtatcaaagggcagcaaaaattagctcagaaaacttagttaaaacccattataaaagagatataccacaagtccacaagtgaacttaactagaacagattaatgccttgaattggacaatatatggaacaaaaggacaagtttttctcttttgttgcgattacaagttgaaggaaaatttcggctttttcagaattggtaaattggtcacccgaatcaaaatcaacacgagcacacaaataacatacacctatgagtaggaggatcaggaatgctacaaaaaggtatatgattgttaatatacctgaagggtgaaattgatgtgatcttgaataggagagagttgcgattgagcagttgcattaacttcttcaagttttcttctaatcctctccgttacaatttgctcctccgctgccgctatgtgat

SEQ ID NO: 1481 - DNA, 716 bp, Arabidopsis thaliana columbia
tgattctactaggaagaggaagtcttctctactttggaaaatcatcagaagctttagattacttctcttccattggatgctctcctcttatcgccatgaatcctgcagagttcttgctcgatcttgccaacggtaacatcaacgatatctctgtaccttctgagttagatgatagagttcaagttggcaattcaggtagagaaactcaaactggcaagccatctcctgctgctgttcatgaggtaattatagaagcaacaacatttctagtaaatcagtattacctaaaaccaaattgagttctgatatatatatcggaaaaactgtaagcagtatctagtggaggcctacgagactagggttgcagaacaggagaagaagaaactattggatcctgtgccactcgatgaagaagctaaggccaaaagtacgcgtctaaagcgccaatggggaacgtgctggtgggagcaatattgcatactattctgcagaggactcaaagaacggcgacacgaatacttcagttggttgcgtgttaccaagttctttccacagctgtcattttaggtcttctctggtggcagtcggacattaggactccaatgggactacaagatcaggtatgttatcatttggttttgaaatatacttgttttttatgcacactatactaatatcattctctacattcttatgcttctttgttgcaggctggt

SEQ ID NO: 1482 - DNA, 598 bp, Arabidopsis thaliana
tccgacgatgaagacgacgatggaactctttctgatacttctgacgcttacaatcaaaaccaacatcatctgtctaaagctagcccatactcaacggcatggcctaagagttataggtatcatgattctcaaatttctaacgttaatgttaatgcttctttgtcatttgtgtttacttaattactcatgttaatgtttcaggcaatcgattgatatgtttggaagtgtaccatcaccaaatttgggttttcttgctaattcttctatgtcgagaagaggaagctcattcatgtcttcgacactgacaagaagacatactccagaatcattaccttgtgttacaaagcctctcctagaagatgaagaagcaccaaaacataaacttagcactcattctttgcttccgtcgaaaccatcgtcatccatggtggtgtctcatgatatgggaatctccaatgatagctcctttggacaggctgttcttaatggtgagtttcacacaactacttggtaatctctatgatggcactgtcaaactattttttcggtgtgatcacttgaagttagactaattaaataagagatctaatacatatgt

SEQ ID NO: 1483 - DNA, 478 bp, Arabidopsis thaliana columbia
tggattgtccttttacggtggaagaagaagagaggggatcagtggaagagatcttggacctttgctcattgcgtaacttggagaatttggagatcaacaagaccggaaaaacgcttagtgggggccgatcactagattttctctcgtacaggggaagtcggtgactcgaagaatcatctgactcctgcaatggagaagataaatgacatgatcactgaggagaaatttgaagggtcggatttgaaattctgagatatgtgtaatctatgtattcgtagatattcattgttcttatcgctcaattgtgattcaggatgtctatctatcatgcattcgcttctactctggtgtaaaattcggtttcatatacctcagagcaatgagtgtgcaaccagaacgaatagagcttgggatttagaactgatggcaaatattagtgtacacgagtatatcgaatttacagccgttgggaaggtgg

SEQ ID NO: 1484 - DNA, 514 bp, Arabidopsis thaliana columbia
atatgtacccgagttttataactgcccgcaggcacgacccactcattatcatccaatcgaaaccatgatctctcactaagtcgaatctcagccgtacggatccggtaagcataataaatttcaccaggaaaacggactctatcgacatatggcttttcaaccactgatagattttgcgcagatcgtcatcgtccatcctgcgagttctctttttaggcttttgcccgacatcagatggcagtaatccctcgagtgggtttgaggcgatcacacttctgttaacgcagaacctaaacgcccgtttgcacagcgaaacgatgtaatgagccatcaccctgctttctatagaatcgaagacgttgatccagtgcattttcgctgtgttatcgactttgacattcttcatcggttcggcgatatgtgtctcaaacacctggcgatagtaatcgactttaactagcccgttagcgatacagtgcctttcaatccagtaattgaacgcttcggcaacgga

SEQ ID NO: 1485 - DNA, 502 bp, Arabidopsis thaliana columbia
aaaataaaagatcttattaaaatcaaggaagcaatcgtagtcttctgtttattgcttctccctcaaatattttcttattcgttaaggttacaaaaatcaaaaagactcgaagaaacctgagatcgaaaccccagccatggcgggtcgttacggatcgcaagtcatgacgatgactgtgaccaatactccgtccgcagatctagcttttactaacctcgcttactgctcttcttccgatctccgtcaattctccgttcccggttccgatctcttcctcgccaacgttgccgatagcttcattctttctctctgatatcctttcttatttccattttacgattcatttcttacattgcaatgcgaaatgcgatcctaggagttgattgtttatgtgatatggctaattactgctaaatttaccaaatcgatcttcgaatttgaatctcggccttatgaatggttcttataatgattgattgatctatgatcgtagtacaagtta

SEQ ID NO: 1486 - DNA, 1289 bp, Arabidopsis thaliana
tatttttattaatgagataagacaactatgtttttttttttttgatcaagaaacttcttaattgataagcttaacggtccacaaacatagagagagaaagttttgctagagcatctgcttccgaagttgcagctgtaagaataagattacagacaaagagattaaaagatagagagctgagaaggatatcagctaacacgccatgaatttccgggagggtggatttagtaatgatcgttgtgaccaaggtactacaatccgactccaaagctatgcgtgggagcttgagcatcctagcatttgagagagctgcacgaacagctatggcttcagcatgaggggcgaggccacatgagagcacaccaaagagtgacttctgggaatatctaaaactcagtccccaaaaatccagctcaaacctgcaacatgatcaccacttctccaagctgcatccgttctgtagattataaaaaagtcacaatccctgtagcgcggggtacgattaactgctctttgccccgagaagattgaaccaggtgggggaagagtaacagattgggctctttgccttgatcgctttttgtaccgtctcttcagcagagaaacacctttgattgaagacttcttgattcctagcaatccaaaggttccagcagagccaggggaataggggacttctggctaggcccaccgagggaggcagatgagcttgttcccttgagagacaagactttccaaatccgctgaactagctagaaacaaacccttggcgaaaggagccaaaagccagacttgctttgcaaaactgcaattgaacaacaagtggtcaatggtttcaggttccttacacttcttataggccggatcaacctcaatgcctccgctagcaagctgacatccagtagagagggcgccttggagagctttccacataaaaactttaatcttctaggaagtgcaaatgttccagatttctttcttccagttaaacagggggccaacactagagggaaactgacattctctagcaatgaagtaacccgacttgaccgtatactcaccattttgggtatgaatccagatcctcttatctggtgcagacaaccggctaggtgtaatagaaaagatattctctgacaaagcagggaacagatccttcacaagtgcttcattccagtcaatcaaattaggaaaaaacaaatctttaactctccatccttttgaaaggagaggaacgagacccttgggttggataaaatccggagaagggatccacgaatcatcccata

SEQ ID NO: 1487 - DNA, 625 bp, Arabidopsis thaliana columbia
tttaaaacccgtgtaaaccaatatgattgtgctattgtctatagaagtaccctattgtcatcttgatgaagacatatttcatttgatttgaaggctatagaaactctagttcatgtttagactgacaagtggagaaatcatggaattcatgttgggttttagtattggtctttgacatgttaactgtgtattattcttcacccataaagtcactgtttacataattctgagttattgagtggtttttcttcttactaatgttaaacctgatgtgagtgcttgcagaaggatgatctgaaggctgtggttgagtttttgcggcaggatggaaacatatccttgattgggctatgggggcggtcaatgggtgctgttactaggtttggcccagtctataatttgttaatttactaagagcttatcgtttttctgctttgcatgaagtttcagttgatggtatgagactgtcactgtgtcaatggaacttaattataccggaagtttacatttgttgtgaagcttcattagttttagagggtagaataggtgctgtgatagtttctggtgattagtcatagctacacatgtcacaagggaagaattataagagactaatgtttgagat

SEQ ID NO: 1488 - DNA, 825 bp, Arabidopsis thaliana
atacccttctcatccaatacaaatccatgtgttataacagcagaataggggcttttcctatatacaatcatgcaaaatgtgaagaaaaaaatcaaaagccacacaaagatagctaaaaatctgtagaataatctcaatttataaggcaatatcatggcatgcacttctcaccttgcgttgcgatgcttgttaacaaagaactttggaaccatccacgatgctgatctgtaccttctagatacacgtctgcagggaaactaagaccttcgcgtttccctaatacaccagcccaagaagatcctggacatacagatgggaaagaaagtgatgtaaaataggtgttgggtgcttagtgtgactatctgattttaattagcttcttttatcatagtacctgagtcaaaccagacgtccatcgtatcagtccccttttcataatcagctgctttatcacgatatttctcaggaagtaggtcttccactgacatataccaccacgcatcactacccttttgggaaattatagctgccagacaaggtattcaaataaggttacagaaaacacagccagtaaataacaaccaataaaacacaccatactctcttataggcccttacatttaacatggttgattgtctcttcattcatgagtggttcttttgtcttaacatgataaaaagcaggaatagggacaccccatgtcctttgtcttgagatgcaccaatcagatcgactggaagtcatggcagatattctgtttactgcctgaatgacaattgccaaaagataacaagtaccaaaattaaactccaaacaatatatat

SEQ ID NO: 1489 - DNA, 577 bp, Arabidopsis thaliana columbia
taccagtaaaactatgtagagttaaaccgtccacgaataacttattggtgggtctttttccagtgaaaatctccaataggacaataccaaaactgtacacgtctcccataattgatggatgacctcccataccatattctacaaagttcagtaataacaacaacaagactaaagaatattaggacgactgtctggtctctgcttgagataattacctaataacgattataaattttaaagtaaaataagcatacctggtgcagcatagccaatggttccacgaacacctgcagagctgaattgaatatggaatgtatcccgatcaaattttagtaggagttgtgccaaaccaaagtcgcttacatgagcagtcaaatctttgtctagtagaatattgcttggcttaatatcacagtgggctatagggttgtgacaataagtatgaagataaaccagagccgaagcaacatctatggcaatgttgagtctcgcaaaaaggcccagggttctcgagggattgccagtttcttctatttcatccgggtgcagcacatgtccaagtttccattaggcatga

SEQ ID NO: 1490 - DNA, 523 bp, Arabidopsis thaliana columbia
taatttttgaacaatgtctccacttcactcttacattatcttcttctcccttctcatgaccatccttcttcaatcatcaacaacatcatcccaatcaaatctctgcagatcttcttgcggcaacattccgataaattaccctttttccatcgacgacggttgtggtagcccttattacagacacatgctcatttgctccgacaacgataccaagctcgaacttagaacaccatctggtaaataccctgttaaatctataagctactctgatcctcaccttcttgtctccgatccattcatgtggaactgtcaagatcgagacaattttcgacccactagatcttttagcatcgattcaagtacacacttcactgtctctcctcaaaacgactacttgttcttcaactgcaacaccgataaagttatcgtcgaaccaaaaccgctcttctgcgaaaggtttccagatagatgtgactcgtcctgcgatagttctagctatctatgcagacatttgcctgaatgt

SEQ ID NO: 1491 - DNA, 921 bp, Arabidopsis thaliana columbia
gactatccccttatattctcggttaagtggttcacatttcttacatttcctgtcttttggctgtaatttaatttctgtttatatatgattttgctctctatcacaatgttaaggaaagctctatggcttccaatgcaggaatatagctcagcttgccaaggttaagattgcaactagaaatggccagtggcaggacctccacataccacataggtaatttttattaatcctgagggatcccattggacacagttcaggatggacatgttggatagtcttgggatctttctctgtttgtaacctttaactatatatggttacatttcaaatgttacaaagcaatggttacatgatcgaatatgaactactccaattcggacatttgtttctactcttgcagcatcaggtccattgtatgtctgaatctgcccagcttttcgggaggattaaatccttggggcacaccaaatcccaggaaacaacgtgatgtaggttttacgaactcttgacattgcctgagtgctacataagtttctgatatatcctcgtttgtgtatttatcttcgccatggtaaaataatatgcatttttctttgttgtgacacaaacagagaggcttgactccaccatttgtagatgatggcctcattgaggttgttgggtttagaaatgcttggcatggtcttgttctgctcgctcccaatggacatgggacacgacttgcccaggtaagaattgtacaagttggaaatgataacgatacacacaaataaagatgtgatgattgagtgcatacaaatgataacttctgtgattaggcaaatcgtattcgcttcgaatttcacaaaggtgcaccgaccatacattcatgaggatggatggggagcctggaaacagcactgcactggatgatgaactgtg

SEQ ID NO: 1492 - DNA, 493 bp, Arabidopsis thaliana columbia
gggacattctaaagaagagaagatagaaatcacaaagcacaataaaatggtccaaaaaaaacagaacagaaaaaatctttctgacttgaaaaaacagagctttttcttcatcacctgagaggaataaacctggtggaccgacggaaacaacaacaaccacaaatacgtggtctatggtgattaaccttcttgcaagtcatcgaaaactccgcaagataatgaccaatcatctcaggtttaatcacgatttcattaaacttctttccattgtgcactccgacaacacttccaatcatctcagggacaatgatcatgttccttagatgtgttttcacacttcaggcttcatcttgttctcatcgcttgcttctttcttcgcccttcgtagcttcttgatcagaatcagaggttgcttctttaatcctctgtagaatcttctgcgaacacgagcgttgaagagcttagcgagatcaacgtttgacattttgagcag

SEQ ID NO: 1493 - DNA, 891 bp, Arabidopsis thaliana
cccattggccattgtttgagggaagatgcatgttcgtacgatttcgtatgtcgtaagtacagcttggccgtagttgaccccaaaaaacaaataaaataagatgatgaacaaagacatcttattttcaaaactaaattgataatgacgttccaaatatttatacatatttcttggtaatatatatgtattgaatggaatgtattgtttttcatgataactaatgtagatcatgtattatttgtaaagacgacatggtccaaaaataatcattacccatacctattcatccatataatacatacattgaatatatatatagtagacctatgttagtgactttgtgtataaatacccatgtacggcactagtactaaaccccaaaaacgtctctctctttctctttctcatctctctcataaacatgatgaagaagagcaagctgatcgcaaaggcatggaagcaaatgtcaagcagagttgccaaacaccgcgtcgccaccggaaatcctaaggatcaatatcatataccacatgacgtaccaaagggacaccttgtggtgtacgttggtaaagatgaggaaacttataagaggttcgttataaagatcacgttgcttcacgatcccatcttcagagctttgcttgatcaatcaaaagatgaagcttacgacgatttcacttccggagattccaagctttgtattgcttgtgacgaaactctctttctcgaggtcctccgttgcgcttctcctcgttattcgttatgagtctttgattcaagaagatggttctactactaacgtttaggtttttttaataatgttagaggatccatttaaggagtttgtgaaatgagccatttttaggtattagctgatggtagatatcatat

SEQ ID NO: 1494 - DNA, 700 bp, Arabidopsis thaliana
tgaatttgcagagacagctttggtttacgggaagactctcttttagacaagaaacaaatggtgagtgaaccaaaataatacaatggagaaaatgaatcttatctctttttttcacaatttttgaaaacaatatggtttcataacgatgttgttttttatagggattcgtttaaagaatagagtagagtttagtccaagacctgtacctccaaatctgatcgcagcagagaaagaagaagctaaagctgttttaactctattcttcaagaagcaaggtcttagcaacagtctctcttctcggttaatcaacaaatccgatctattcattgaccatttagtgtccaggctccattctgttcataaagctcgatacctcgtaggttcgatctttcttctttaaaacctttactatttaatgagaagagctcggcgatgaactctaaaagtttgactgtaacaggaagagagcttactacacttgagattcgagattctctcattccttacctcgaacaacttcatgaagaacatggtgatcttctcgctgagcttgttgtgagcttccctgatccaccagctgaacctagacttgttgcttcatctccagtttctgtcctaccacctcgtggtgacacagattctgctgcagacactcgtaaactcagagcggtgtctcgagtcagcgaacttgacacagaag

SEQ ID NO: 1495 - DNA, 882 bp, Arabidopsis thaliana columbia
  unsure (1)..(882): unsure at all n locations
agatccctggcaagttgttggtgtcatcatcaactggaaacagaaaagcgaactggtgatcgtcaaggacaaggttgttctctgttgttatcacagaggattgcccgtttgagatttcttcactttcacttccccagtcaagaagctttgttatgtcctcatcttgcattgtgttcatctggagagactcatcttcctttggtgttaaacctgtgtcaatcaaaataaaataaaattcaaacacttgtttttgcagattgaagcattttgagttgtctgattattattaccttgcaaggaacatagactgttggaagaaacacgatgtccgaaacctcccgagaaaaagttgttgttgttgttgttgtcctcaagcgccgcantgatttgtctccgcttaggagcacgaaagctatcagctagagcctcggcctcctccataagatcctctaacagctgacaggtatttgtatgcaaaccggtgttcaggttttggttacaatccccattgtctgagaacttgcttacttgatagactcctaaagaggcagagtatggaatttggtttgaagagagctcatgtttcatggagtaaaccggattggtagactgataggaggaaagagaggaatgggtgtgaagaaaggtcggagacgagacaaggaaattggttggagaagaaatatatgaggccttgggagagaaggcagtgttataacaacgtttgggacacagagaaggcggttggaggagaggaaaggtaaaggaagaagcaggtgtttgggacgggagaggtgaggagggctgttgaggatacatttgttgttgatgattgtattgggaatattctggaaggtagagcaggaggccttgcgttggaac

SEQ ID NO: 1496 - DNA, 1214 bp, Arabidopsis thaliana
tgaacttgtaggacgtgaattattgaaaaaataagtaaaccctaaatttgaagaatttctctttattaattttaaaaatacataaaaatccaaaatctcaaaataaaatgaaaagaaatcgttgaataattttgctgtaatttaggtgaaataaaaatatagatgtgcaacattattttccttaaatttatgtatattgaaaaagaaacaaattttgttgatttcccaggtggtatatattactatcattaattaaaaaaaaaaaaaaaaaagagaaaagagagaagaggagacaaaacgcaacacacattgacgactttccgtttcttcatcttcttcttcttcttcttttttttttttttttgctgctgacgacaaaatcccaaaatttggcatttctccacatttctctctttgtgcaccaccatctaactcttcatctcctccggtgttcctagggcttccgcttcgctcttctccgtccttaccggattatctcttcgtcatccgctcattctccctgcagtgcacaacagtggctttgctgattgaattcgctttctcattgttcaatttggatggcattaggggacttgatggtctccaggctctctcaatcttccgttactgttgtcaccaatcacctctacgacgacgacgacaactgcgcctcctccgctcacgatgattcccgtgtgtccatcatcgcctctcccagagtcgcaagtagcagctatgagaacctctccgccgccacaagcatggcatacttgcctcagactcttgtgctctgtgaccttagacacgacgacgcatccgacatcgtccaacccccaagatggcgccttaaagagcgagttagtttctcctcccaatctattttgttgccactagattgtgtactcttcttgctcactctttttcaatggcagatgaaaacaggatgtgttgctctagttatgtgtttgcacattactgttgatccccctgatgttattaagatttctccctgcgcaagactcgaatgctggataggcccaactttcacttaactctcatcttcttctttttttatttcaatgtttcccgcaatcatttttcccttctattgtcttgatctcgcagatcctttttctatgttcccccaagaagagctcttgaggctattggccaaaacttgagcattcagtacgagagatggctggctcgggtga

SEQ ID NO: 1497 - DNA, 1000 bp, Arabidopsis thaliana
ccattaaaggatcgaaaaggcttaccaggtttctgcgggctttccatcagcccatttggagagagagaagtgaaccttctcgcgagtaagagcttcagctttgtgtggctccttgagacagttcctcacgatattcgcacagatgtttgaatacgatatatatgtcatccccgccgctctccagaacggaaccgccgcattcgatgccatctccgatcttcttccttgtcttccttcttcgtccgttccgattctaaggagaaagttcgcgaaatgggacagagaccgattctgtgccctagtaatcctaacacagtttagacccaatgggccttattaaatattttaacggcccattaagtagctaactacacgaatcttctatccaactttcatctactgaaatctctcaactttttttttttttttggtttcttgtcttttttatttgtttttatgattgtttcttggagtttacgcgaagactgagccaaaccaagctttgctattttaataccttgattaggcaattagaaatttaagcgaagttacataaaaataggaaaacaaacaaacttatttccaggagtctccacgaaatttactcaaaacttattctcattttcaggtagattgaatttcgtgtatatgtctgcataatttcgtgtaaatgtctgcttttctttgttttgtttcgttttgtagtttttcaaaagttaatattaaatgtgcaacagagagaagacaccaatctcattgacttgtcagaaacaaagaagagagaaacagtttagtttcagataaagatggttgagctgactaacaaataaaacaagactttgggttttgctttaagttaatgattatatgtgatcttgttttggtttatagaagtctttagaagaagaacactggtaattacttattttggtgggtttggtaagaaatttggtttatctccgaggataaaggattgttactaatccatatatagttgttg

SEQ ID NO: 1498 - DNA, 643 bp, Arabidopsis thaliana
  unsure (1)..(643): unsure at all n locations
gaagtgaaacagattcaaataattctagggagagatttgatcaaacacaggaacaagcagaagaaactatgatcgatggtagtatagatactgacaccagcaggtcatcttttgaaatgagacaaggtgattcatatattgaggaggttggcattgagcaacatcgcagtgatcaattccctgaaaaagctagtgctgtcagtaacacggaagaacacattgaagaaatagattctgattcgattcaaagtggttggagtgttgtagaggatgacgacagatcactgcaggatggaggggcaagtcaggcagaaagtaagcatgacgaattggaggaaaccaaagaagaaagtgatgaaatgaaaacaagtcttggtgtagagagaaatggagataagaaagaactagagcaccagtttgagtgtcaagagaatgaaacatatagaagcaatgtggaggcagctgagtcttcctgtcgttttcaaacggagaagaaattattggcgcacgaacaaatggaaacatgaaagaaaatgagggagaggagggagaggagagttgtcgatcatctatggaagaagagggagatgctacttctgatattggcgccgancagatggaaacatganagaaaatgagggag

SEQ ID NO: 1499 - DNA, 919 bp, Arabidopsis thaliana
cgaccggtaaccgaagaaattgttcacgaacgcgagtaccacgcaagaaaccattcctaagaaccatgtacggaatgtcaaaactggtagagatggatcgtcggttatcggtacggttaaacggacctcttcgattggactgtcgttttcatcctcttcttcttcatctgccccagggacaaaatcggtttactcagaaccaaccaaagttgcttagtatgatctacattaatctaaaggaatcgagttgtgtttaagaattatacaaatagagcatcagccataacggtacacaaggaatcaaaccacatcgaaccaagattggtcaaaacagaatcgagattttatttaccggctatgacgatcttggactcaaccttgtgctctggaggcttggatacttcgagagagcctaccattttctgttaggcggccctgacgtcgatcgactcgggtgataatgtccagagttctgaataacttgctgtagaagtaatgttcttgtaagcaacctgtgttaatgacctgacattaaaaataaattttctctgcaatttttccaggaaaaaggaaaaagttagacctctgttttagttaagatgtttgagaggatgtactagtattagagaagatacaagagagtatttcctctaatatgtattggagtgaagactgaaagaatcatgatttctcgacgaatttcttaatatcgacaagtttactgaactcattagaactaaagttgttgattcactttcagtggaaaaaaaactttcacttcggggtaaaaagctaaaatcttgatttcgagtatgaatgtagattctacatctggtatgtttttgaaataggtacttaaactaaaagaataaacagatcataaatatagcaatttttggcatttaatcatttagagata

SEQ ID NO: 1500 - DNA, 497 bp, Arabidopsis thaliana
tgcatagtcaatttctactcagaaactggaagacttggtctccatcaggtgttgtgcagtttgactttaaacctctttgaagggttctcttgacactaataatgcgttgttttgtattggcgtataactatggcaggaccgtgacgaaagcgaagagagtatagcaagagggttgccgatagtgtccttctccataggtgattctgcagagttcttgtacggagagaagagagacgtagaagaagctcaaggagtgatattagaatcaggagatgtgttaatattcgggggagaatcgcgaatgatcttccatggcgtcaagtcaatcataccaaactcagctcccatgtctctactcaacgagtccaagctccgaacaggacgtctcaatcttacttttaggcatttctaatcatctttcaattttatcaaatatataaagaattattgaaaaaataagtaaaccctaaatttgaagaatttctctttattaattt

SEQ ID NO: 1501 - DNA, 848 bp, Arabidopsis thaliana
cctttcttctgccaccttcttaagatgaccttccccatttggcccagaaacatatgcttgaagtttcatctcttcagtgcgggcatataaaatttgcctttcattatcaacaaccatctctacaacaggatctacagcaccaaacttgaatacatttggacaacccacctaaaaccaacagaattggggataaatgtttaaaaaactatcagaaagcttggtttatctcagatttcagattcaaacagcagagagaagagataaaatagaaggacatagagaatgtgtgtaccttgagatcatactacctacgcctgcagtaaggcacactttacgacaacgtttattccagccagagccagttgtatatagcagctcatatatgtgaccatcacgtccagccatgaaaatacgccctttattggtacatgtaacgcatgtcattgtcactccatctgatgatattgtatagtcgggcagaggttgtactgaaatttcagcataaggatctctaccatcaggtccttcagtgcagcacactccaacaagaaccaactgatgagaagtaaagttttataagaaatcagatacagtacacacaaaaaaaaactaaagaaagttgtgatcagattgcatcattgaaaaagagtctcctcaacaggagttgccagcaccagaagatattgaatagcttcaacaaaaactccaggtctacatttcgctagaccaagcgcacaaattgcctgttcctccccactatactcaggacactgcccatccctaatttgacatccatttatcaaaagaatggacaactacgaaagtaaggcaatctcaagcttctaagt

SEQ ID NO: 1502 - DNA, 595 bp, Arabidopsis thaliana
tatctgagcatgacctttaaagttcttgacaaagtccatctgttcatcacaccgtgcaccacactcatcattgctattagtccacagctcatattctactctcttatcaggatgaggcacagactctctccaatctagttttataactatgtttttccctttctgaaacccttgtcttaagtcatctccaaatgatttatcgattaacaccgatgggattgttagcttctctatgaaaccatccgcatctttgctctcctctggtgaatccattgtcaacaatggctcgtctacattatccgccacaagaactgcagccgcgcctgcttgctgcgcgtgccacgcttttaaggcaaagtagcaacctaaaaacatccaataatggagcaaagattacttgagagattaaacttttaatctttctttgtaaaaaaaatatatctttatgctcaaaatgtatttatgcagcataacccataaagtcctattggctaataacatagcaagctaaagtttaaatatttgaactcaaacaaaacaacagtaaatggacaaaacaggggttttaacttttaaagatgtttttacatttttt

SEQ ID NO: 1503 - DNA, 506 bp, Arabidopsis thaliana columbia
ttggcttttgtcttacaaacctgtgaacctgttgtgttcttttgttgattttagtaatgaatttgtgttttcttatgtttttaattcgacgtgtttgaaacttgcttgtcaggttaaaccaaatcaaacacacaagtgccataatttatttagttaggtctgaaccaaaaaaacgaataaaatttcttaagtaaaaagaagtggcctaactaacatttaacttgtgagtttgtggccatcaagccatacaagctttggcacaacctggcggacaaaggagctgaactcttctcctgcaaatattaggtcgttgcctctaatatctaactgcttcagtttcatcaaatctctaagcaccaaatacgcatcctggtatttattaggcacctctcttccagtttcacccgaattagagagcggcgaagaacaaaggtaccttgttgtgtctactgggagtccccacagatgtggttatgtgaacatcaacactctaagctgcttaagat

SEQ ID NO: 1504 - DNA, 885 bp, Arabidopsis thaliana
tgctgtgagcttaataataccaagctccttgagtgtgatctccttttcagggaattcaaatccaaaaccgaaagatctcagaacattaggttggatatcgtgagctctatcttgattctgagcacggtattctgcaagcttgagctgataaaatgcgtgataagggtcagtgctccacacaaatctgtgtcttgcatcattcatactaagttccatcatctttctttcaatctccaacccatttttggaaacaataagtgcagtgttctcgacacaacttctgatttctggaggtggctcaataggtgccacactcgcaggagctttatttgaattgctttgacccgattgcaaatcattctgtggcctaggaggtgacatcatcctcactggaggagaacatgaaggttgaggaacttgaagttgagtaaactgagatcccagttgaggcataattagcggtggtactgttggcatcattggatggtattgttcaggtcgtggttgcaacacgccaccgtccacgttagcaaaaaactctaaagcatgcaaatcagtcaaagccatctccactgcatctttcttttcaacaacttgatcaagaagcttgagaaaaccaacaacaacttcccccaaaccagcaccattctttctggaacgccttaacactctcgaatacccatcaacaagccgcaagtaacaagagcacttgctatcagttgacttaaaacagtcaaatttagggcttataaacactctcttcatcaattctgtccgaaaaagggtcccataaactgccacaaactgtgctgtgagcttaatagtatcaagctcattgcgcgtgaacgttacccctctagtacggaatgcaacttgacaggagcc

SEQ ID NO: 1505 - DNA, 904 bp, Arabidopsis thaliana
caacttggttactttctgtttctctactagactggtcaggtcattgcagaatcatgtgtccgtagaagactgcattttatttacgaaattgaacttatgatacaatatctcagcttgccgcaaaagcagtaattttcgaatctcaccattcccatttatgtgtgtataacaaaggtagatagagaagaacccaataacataaactgatcaatggaaaaattcctctttaagagtgcaaatacaatttaatctgactgaccgataatttcctttgctttccagattcctctgtatatgtacaaaatccaacgaaacaaatttgttgcagaggccaaacccagtctcttgttggtcagatctcgtagtctatatctgttgcattctgggaatcagattgcttcaccaaccgttcctgctcatcataccgatcaaggttatcacacggagctgggaagatggtgcctatcacacgcccctccacgtacgcacactggaatatgtgctttttcttgtatgttatccccactgacatgtccctgaaggttacatttttaacaggaatctctttgcttccttggatacgcactggtacacgcactccctgaccgtatatcccagtgtagtttatgttctcgagtatcggaaaggcttggggattgaatccaccatctgggtgctcgttgtagtctgttttaatgacaataccaactctcaactcatccaatgtgacattccggaatgttatatcccggacatacccacctcgtcctggtgcggttttaatcctaactccacgccgggagctccaaatcagaatattctcgactgtgatattcgagacaccaccagacatctcacttcctattgatataccagcgctgtttttgcacagaggctttaggta

SEQ ID NO: 1506 - DNA, 623 bp, Arabidopsis thaliana columbia
ccgggacacaagttcatcccttgactctctaagacatctgaagcagctaaagtgttggatgtttcacataacgacatgggcggcaagacccagtggacacaacaaggtacctttgttcttggccgccctctaattcgggtgaaattggaagagaggtgcttggtatatactaggatgcgtatttggtgcttagagatttgatgaaactgaagcagttagatattagagacaacgacctaatatttgcaggtgaagagttcagctcttttgtccgccaggtttttccaaagcttgtatggcttgatggccacaaactcgcaagttaaagataaatgttaggccacttgttttaattaaagtataaaactctttcgtttttttggattcattttcatgaaatcaaaagactacaagtctacacgtgcttcaagcttgaggctctaaatgaagtggtaggaaagaatgaaataataataaaaaaagtcagaaaaatggatggtctgagatcaaagtgaaacctactccacatacacatcccaacttcttccccgccatgtggacttttctttttcctactttctctctctgcattctctcttacacctgtctttatctgaaaaata

SEQ ID NO: 1507 - DNA, 916 bp, Arabidopsis thaliana
gagaacctgaaatgaaaaacaaacccatgacacaaatgaatgtacttccaaactaagtactttcataaccttatcccatggctaagttctttaaacaataccaagcagtcttatcaaaagtaagacgtccaaaaattccctatagaacacacctttattatgccttctttaagtttccgcaatgtctccgttgcttcctcaggtctctaatgaaaaaaattcccaaagcagactccattaaaaacttctaaagactacaaaaaaaagaaccggcaacaaacaaacaatttgaggcacacacctggctactgctcaagagaccacccttaatgatagaaggcaaatgcttcaactgatcaatcatcaacgaaaccaaaggactcactacaagcgtgattccaggaagaatcattgccggaatctggtagcagagagacttaccagcaccagtaggcaataccagcatcgttgaactcccaccaagaatcatcttaatcgcctgcaactgtccgtctcgaaaagaatcataaccataaactaaattcaacagcttcgttagattctcatcagaagcctcagtcttcacagcaagaatcgcatcctctacagagctaataaaaccattagcttcgtcttctatctgtttctgtaaatcagactcttcctccaacaatgattcgccatcaccatcagcttctttcttcttgtatctcttccctctgaatgagtaactgcttctagatttagagacgcccttgtatttgctgggaaacttcttccctctcttgccatttaagttcaatttcacgaaattaccctcgccgttacagttgctacgaaacaccataggtttcaccggagagaagttatagtatcggtgatgagattcggaggcttcacctaactgattttggag

SEQ ID NO: 1508 - DNA, 1000 bp, Arabidopsis thaliana
tagaaacacaagtgatgatagaatgccagccagtccgttgagtagttcgatctgaaaagattcttggccagaggttcccatatttcttttgcatagccacatgaaaagaaaatgtgatctctggtttcaagctcatggttacataagacacacgttgcattgaccccgctattccattgaagcatcctatcccccgtggagagcctattgtgaaccgctaaccacatgcaaaacgcatgtttcggtgtagcttgcgcaaattagacccttttgtgccaagaaaccttgttcgccgttgtgcgtgtgtgattccaagtgtccttggtagacaacgttggccggaacacaccattctttcctttccagagtactctgtcttgctcattcgttctgctattccgtttcagagccaacatttcttccattgatctaagacagtccacacggtgccgtctccgtctacggtttgtccaagcctccaaaactgtcgacgttctgcttatccccatatcaatcatccctctatctccggtggctacttctctttcacctatatggaaattctaaagcgtgtgtcatcttcagagactttttggtcatttcatttttgataaaaagagtttatctcacgattgaaagttaaaaaaagtgacaaacaactattatctagactcatgacaagtgatacatgtaaactatattcattttatgaaaaatagacaaactaatttacatttttatatctattgagtttttactttctatgtccagaagaagccatgagaactgcaacagctgaaatgaacataaacaacatacagaagagaagtagataagttttccgtgacgatcttctgtattctccaaacaaaaccactccccaaaatgtactcacaagtggaagagcctataagacacaaaatactcaaaaccataaagattgattcttgaattttgcaaaatattttgaaagaaatgtgaatatatgaacctgaacgga

SEQ ID NO: 1509 - DNA, 811 bp, Arabidopsis thaliana
atttgctagatctatcaagtgttcctgatcttcagggtcaaatgctctttatatataatttcgtttactctaatcttcaagcctcggtttgattctttaggttataaccatcaaagatattgtaagacctccgcaacgagatatcttcaatgatgtctacattgtctatgagttaatggacactgatcttcagcgaatcctccgttctaaccaaacactgaccagtgatcaatgccgtgtaagtctctgtgttgttctaatcatttgtaaagtcatggaactctctgatttgatctttattctatttacttgtcttcctgttacagttcctagtataccagctcttaagagggctcaaatacgtgcactcggccaacatattacatcgtgatctaaggccaagcaacgtgctacttaactcgaaaaacgagctaaagattggtgattttgggcttgcaagaacaacttccgacacagacttcatgactgaatatgtcgttacccgttggtacagggctcctgagttgcttcttaactgctcagagtacaccgcagctattgatatttggtctgttggctgcatactcggcgaaatcatgacgggacaaccgttgtttccaggcaaagattatgttcatcagcttaggcttataacagaggtataccagtaaagtaaaaaaagcatcagttttacacttttcttaaactgcaatgcgcaattctgatttcacttaatatccatttcttgatattagcttgtaggctctcagacaattcagcctcggcttcctcgcagtgacacgcaagaaga

SEQ ID NO: 1510 - DNA, 611 bp, Arabidopsis thaliana
ctcgcatatatataacaacctaactcttgttcttcacataagccaagtactatcaacatgatccaagaaggttcgaacatcatgaagctgatctctagctacaccttcaatcgtaaatcttctgagattttgtgtgactgtatcataataaaccacatagaatgatctctcaatcacagagtcttgagcgaacacaagttctccagttccaatggtacctttgaagaaaaactccatatttccaacatgttgttcccaatgaggaatctcaatgcagtttctccaccaagttccatcagtttcgttccttacccacaattcaaatactccattgccattcggttctttcacaataccaaagtcaaactcagagtcatctactaaggcaacttccccattgtagttcaccaatctccaacgatgatcaatcttgacttcctcaggcaattcaatgacgctaaactcttcagaactcacgttgaagctcactaccacagatttgtcactattggactcatcagctccataatacaagaaacctcctttacatagtccttcagtaactggtgaatgatcatgcttacatgtgatcactctccaagaattagatt

SEQ ID NO: 1511 - DNA, 1107 bp, Arabidopsis thaliana
agcagaaggagcaacaactgcagagacagagagagacattgagaggaaagacagaggattctcatgggaaagaggcgaagaaggtgcagtgggaactctggttttccttggaaccagtgattcaggcgagacggtagtgagatacaccatggaagatctgctaaaagcttcggcagagacattgggaagaggaacgttggggagcacgtacaaggctgtgatggagtctgggttcattgtcactgtgaagaggctcaagaacgcaaggtatcctcgcatggaggagttcaagagacatgttgagatccttggacagctcaaacacccaaatctggtgcctctcagagcctattttcaagccaaggaagaacgcttgctcgtctacgattacttccctaatggcagtctctttactcttattcacggtatgtaccttagcttctttcaaggttcctgttttatatagcaatgcagagatttgatgggttgaatcgaaacttggatacattagccagcttcattgtgttttatgtgtgtgtttgtctgtaggaactagggcttctggaagtggggaagcctcttcactggacttcatgcctgaaaatagctgaggacttggcctcactctgctctacatacatcagaatcctggcttgactcatgggaatttgaaatcgtccaatgtcttgttaggtcctgattttgagtcctgcctcacggattacggcctcagcactctccatgaccctgactcagttgaagaaacaagcgcagtgtctctcttttacaaagctccagagtgcagagacccacggaaagcctctacacagcccgctgatgtgtatagctttggggttcttcttctcgagcttctaacaggtagaacaccattccaggaccttgttcaagaatatgggtcagatatctcaagatgggtgcgtgcagtgagagaggaagagactgaatcaggtgaggaaccgacttcttcaggcaacgaagcatcagaggagaaacttcaggcacttttaagtatcgcaacggtttgtgtgaccattcacccgataacggcctgtgatgagagaggtgttgaagatggtgagggatgca

SEQ ID NO: 1512 - DNA, 897 bp, Arabidopsis thaliana
ttgctatcttggcgtaagatatgtaagccgaaagctgagggagggatcggattacggtctgctcgtgatatgaataaggccttggtagccaaggtggggtggcgtctgcttcaagataaagagagcttatgggcacgggttgttcgcaaaaagtacaaagtgggtggagtacaagatactagctggctgaaaccacaaccaagatggtcctccacgtggagaagtgtggcagtagggctccgggaagtggtggttaagggcgttggatgggtgcctggagatgggtgcacaataaggttctggttggatcgctggctgttgcaggagccgttggtggagcttgggactgatatgataccggaggaggagagaataaaggtggcagccgattattggttgccgggatcaggttggaacctggaaattctgggtttgtatctgccagagacagttaagaggcggttgctctcggttgtggttcaggtttttctgggtaatggagacgagatatcatggaagggtacacaggatggggccttcacagtccgctctgcgtattccctcctacaaggtgacgttggagacaggccgaatatggggagcttctttaacagaatctggaagctgatcacgcctgagagagtacgggtgtttatttggttggtgagccagaatgtgatcatgactaatgtggagagagtccggcgccatttgagtgagaatgctatatgttcggtgtgtaatggagccgaggaaacaatactccatgtgttgcgtgactgccccgctatggaaccgatttggcgtcggttgctgccactgagacgacatcatgagttttttaccacagtctttattggagtggttatttacaaatatggatccagtaaaggggat

SEQ ID NO: 1513 - DNA, 608 bp, Arabidopsis thaliana
gaattcaaggatacttgaaatctgaaaagttggcaatggttaagtcgatagagatacaaagggaaaacacagtgcttacgtgcagctagagagtacctgagcaagagtgccaacttggtgaatacggttaagcaactcttttcttcttttcttttttggtttccctttgactttaaacttctcaacaacattatcttcagtttcagagcgagaagatgaatcagtagacgcgcaatccttcaaaaggaaagcccccacatatggagattgttgtcttgtgctctcttgtaaagctgcaagaactttaggatcctagacaaataaaaagcttacacatacaggtcagagaacacaagataacaaaatccattttttcactaagtttcactaacataccttgacatggattggcatgtaaaagccaggaataagaggtttgtgaggcaacggcaatgctataacctacaattaaacaaggtaaaggattcatcgaaaattcaaaagcatatacataactctgaagaaaaactttttaacttgctaatcatattgaaacttttgtcaattgaaaaaagtgactttgagtgaaatttgacaaccgttagaga

SEQ ID NO: 1514 - DNA, 827 bp, Arabidopsis thaliana columbia
taattatcagaaggtttattaacagatcctagaatgtcatatcggtatatccttcagaaagtcttatgttttaatatcaatagttgaggtggctccaatggcgagaaagataaaattctccaacatcaatgtcatcgttatgatagttttcgaagccttgtctgtatttttcccgaccaaattcttcatcgtcgctatgttgtcgagacaatccgtgacgtcaaagtacgcagtgtcatcatagagttcctccgaagcgttcttgagacccctgctaatgagcgcaagttcaagttgacatgcatcaaacttctccttcaactgcggattttcctttgccgcttctccggcgaaacccgcagcgttattggcataagacactcctaggtgaagcgtggccacagccgcttcgaactatagattaaaataataataaattatgtatcaatgatttagtttgagacatgaacatatatacttgcaattacgaaattatgattttattttataaccacatttcaattctaaacctgtaggattttcattacactttataagaaaaccatgtatatatatttaaaatttaaaccataacttcaaaagttaaattgataatttaaggaaaaaacgtagaacaaactttttaagaaaaaaaataaataattgatcgagcaaccaaaacatttggaaagtaacaagtgatgtatttctatctattacttttggtgtatatatattagtaccgtgctggtggcagaagtcgcgggagggtaagcattcaaggttttggtgcagaaggctttgtccggaacaagatggcatatggc

SEQ ID NO: 1515 - DNA, 964 bp, Arabidopsis thaliana columbia
ctttccaaaccgggaaaccgggtctttgtatgcggtaataggctccattcgtcgccggtatgaggttactagtcaatgttgaaggcaatggcccatctcaggctcccgtgggatctccccaagccgccacttcagggattcttcaaccatcttctaaaaagaataaccctgcgaccggagtcgctagctcagccgcccgttttgttggcgacagcggttggaggggtaccatgggaatttttgtatattttatggtttttgcttttccattcatatggttttgctgattaaaaactatctataataagtgttttcatgtatatgtgtattcatatttgccctataatgagtgagagtatttatttgttgaatttctttatttttgtttgagttcatgaccaaattaaaacctaaatttttggttcgttatacaaatttcgttttgtttgctcagcaaatttcttacaaaaatgacatgtaaacaacgttatgcttaaagttattaatcaatcaatgtataataaaaaaaaaggaattagattctttgactacattgaatttgtatttgttcgattcgatagcggaaaattcaaaaaataaccgatatcggtttatattttaggtaattttatctggttcggtgtagtaaattcaccgtttgaccgtatctatatcacagatgattcactgcgattaaaagttgtggttatcactatctaatcgtgatcgctaccaaaacgcaaacgctagttaccggaagacacgtcttgagtttcgcagcatctctctcctctcctctgttcatatctctctttagaaatttctcaatgaacatactcaacagattgggtttgggatcaagtgggcaaccaatatggatcctctccgatcgctcagggaaatgacgatgacacaccggcgccggggaatcagtttgtccaatcggagctggatgttctggggt

SEQ ID NO: 1516 - DNA, 747 bp, Arabidopsis thaliana
tcaagtcctttggaccgatccagccactagacccatagtgcaacaattgatggctcctagaagcaccttcaacgttgagtttgcgaggtcaatggtcagaatgagtaatatcggtgtggttaccggagctaatggggaaatccgtagggtttgctctgcggttaattaattaaccgattagaatctgtcgtgataaactttcatgacgcaaagtacttgtttcgagtgtggttttaatctgaacaataaataaaccaatagaaaacgacatacaaagaaaaaacccaaaagtgggttgatgaaaattgtatctataaggtgttggtattcgatttcttttggttttagttaaaaaaaactgtaatgtcttcacaaaaatattataatgagtttggtcctagtttggattcttaaatttataacctatgttaacacattattcaattccgaaaatcatattcatgcaccataactaattaactatttacaacgatatcaaacgcaaaaaaagataaaaaaaccccagggggataataataataataataataataatgaattgatcaaactggcgaatcttttgaaattctcagaatctcaaggatcaaggacggccaaatagtcttgtcttcaataatttgcaaaacatgttagtcaacctgtccctatctctctaactttgaaatccactgttattagttgcatgcattgtgaaaattctctggtctaactgcctaagtatgcatg

SEQ ID NO: 1517 - DNA, 1049 bp, Arabidopsis thaliana
ctaggagagggtcatattcatcaaatttcacacagaactaaggcaaaaagagattaaatgcaaaattttacaaaaataaatatataaataccaagtaacctttgggtcttttgcacagatgatgagtttggcgaatttgtgtcagttccttcatcagcttcttcattattattattgtcctctatcctctgctctgcctctttctctacctttccttctcctgtttattcccaagaacaaaaatacaaattttcttttaaaaattaataaataatgaaattttatttacatttatatctaataccactgtaaaactcagtgaactagtttgaatgcatacctggtgatcctttatcagtgcatttcactgttctatacatccgcattaacaatcacacattcttgaaaaatcaaaaacaaattaaaggacgaaaaaaaataaaagaaatgtttggctaagttcatttcaactatgcaatcatgcgttagatagtggcccaattatatacatttcatacatatttacatatacctatatatctatctacatttatgtgtttgaattcgtatgagattccattaatttatatataaaaaatgaagaaaaaataatgaacctgcaagtgactcttgacatgagctagggttagatccttcacattcatgagctccaacactgatttaggcgttgctcctgagacaaaccaatacatgacaaatcttaatactttggtttcaaaacgttacactaacataccaatctcgattggttatgtctttcttttaaaattttttttgattagtataggaaaatgtaagaggacaatacatactttcatggccgccaagaagttgaacagcatggacgaagtgagcatgaagagtagaagtccatctcattcttggagcacgaatgcttcgtttaagaccaaccattgatgatgagcttctcttgaaatctcgaccgtagatttgaggttggacatgtttgagcgcctttgatgatgatggtcaaatcctaagctcaagagaggtttgttgaagaagtt

SEQ ID NO: 1518 - DNA, 775 bp, Arabidopsis thaliana
gggtaaatgatgtaatggttgcatattcttcaaatgatagagtaaatttgaaaccatacctttgcgcatagatgtcgcgctttgttccagttgatttcttcataaggttgtaagtgtagttcttcacgtagttgcataataagaggtgtaatttgacccacgaattttttgccatatagataagagatgggcatatatgttatccgggtatagctaaaagctttccctgtataatatttgcgtcaatgcataacattttaaaacaataatacacactcacacgaatagttctgttctagtttcaagttgattcatatagtaacaaacctaggtgaattggtaggaaataaggtagcaaccaaatctcgggaggcatcgggttgactccagaccaatcatagattccaagtacctacatatataaatatgaacgttgatggtaatcctacaagtttcaacatctctaagctataaattaacttatgctccaaaagattcaccgagagccaaacttttccccaacaaggaatataaatcacaccgccatggctaagaatccattgcctggcccgtttgcatgcgttttctagtcctccatcgggacctactccaagtatacgcaagcatatgtaattcagcgtggtagtgaacataatgcttttgctctcaatgtggaatcccatccaccatcttcgttctgaaaattagggacataaacacatgtaattcatatggagatcactagtcgaagttactcattgatatcaaaccgtgt

SEQ ID NO: 1519 - DNA, 963 bp, Arabidopsis thaliana
cccaatatcacttggaaagcccaacgaaaaagttgtgttttcgtatgtcgtctcttgtcttctagtgcatgtgcaatccttgtctgtgttccggccggttattgagcagatatttgatgcggtcgcacaatctgagttaaaaggacgaatcttttgataatttacctctaacaatctcgaggtttacgtaagtgtaaggccagtttggtgtaacggtattcgagataagtgaaaaataactaaaaaaatgttttaaatctcgatgtgtttattagctaggggtttcttgttttagtcttccattttcgtttcgaaagggttttatttattgatcttctgatggactgatactacatgaatatatcatcatacaacaaaagaaatatattattactaatgcttattaggaaaggcctcgaacaacattttggcattgtttatttcctggcgcaacttagagaaccgggtatgaagtgattttcttacggcatccgagatccggcccctggctgatatctttcccggatccgcgaacgggctggagcaagtgttctcgacgctatgactctcacccgaaatggcacacacttcagcattctttacgtgaaacaagcagtcggtccaactgttacaattcaccacctcttggagtgcttggacagaacactcgcaatctgtactgaacgtatcggtcgatggtgcgcagtcctgaaggatttggaactggctcttcctcaggtgtgagatgaagagcttcgtggacagcgcttggttcagactcacggtgatagctgcatccaagaggtgtcgagggcttgttttgatcgtattggcgtaaaccgagagagtttcaacgcacagggattggtatgttgtggatttgcatgaggattgaataaagtttagtgcttttgtggtagttcggccgggttgactgtggcggtcgtgacaccgacgagaaga

SEQ ID NO: 1520 - DNA, 644 bp, Arabidopsis thaliana
tgacacaccggcgccggggaatcagtttgcccaattcggagctggatgtttctggggtgtcgagctggcgtttcagagagtcccaggggtgactcagaccgaggctggatacacccaagggaccgtagacaatccttcatacggagatgtttgttctggtaccacaggccattcggaggttgttagggttcaatatgatcttaacgattgcacctatgagtctctgcttgatttgttctggtctaggcatgatcccaccactttgaatcgccaggtatttttggatccaagagttgaaagttttaacctttcaagttcggggattgagaaagattctgtctttaggattattgaatctattgggatgtgcctgagtctgttgtgctttggggatttcttgatttttctcaaatctgatagctttctgattttcatcaccagtctttactttgaaactttttaaatttggaaccctgatcatctaagtagaatatgaggaaggaaatgatattgaatcttgatttttgttgaattatgaggcttgagttggtactttggtcgttgatctagtatgatcagattatgtagtactctgtaatcctccctgttgctcctttttaatgaggagagatcggattcagaga

SEQ ID NO: 1521 - DNA, 690 bp, Arabidopsis thaliana
cctatgtgactatgtctcgtttctcttatgagtgtcttatctcttacttcttgttgtaggttatatcaggtaaattatatgctggacctgaagtagatgtatggagttgcggagttatattgtacgctctattatgcggtactcttccttttgatgatgaaaacattcccaaccttttcaagaaaattaaggtactgtacgttatactttgattcagctaaaagactcttcttaaatggattcatatgtatgtgaagtaacttatcaaggtgttttttttctctttagggtgggatttacactcttccaagtcatttatcatctgaggctagagacctgatcccaaggatgcttatagttgacccggtgaaacgaatcaccattcctgagatccgtcaacaccgttggttccagactcatctccctcgttatcttgctgtctctccaccggatacagtagagcaggctaaaaaggttggtttcagtgccatttggagattaatagagttcacttgctgtgatagtaacaatatctcttatgttttgcagatcaatgaggagatagttcaagaagtggttaacatgggatttgatagaaaccaggttttggaatctctacgcaacagaacacaaaacgatgtatgtagtttcctgtctctaatgcttttaatcccgaaactagttccaata

SEQ ID NO: 1522 - DNA, 706 bp, Arabidopsis thaliana
ctctcatttaggatattcactaacatgtctctttgctttaagtacttaaccattgctatttgggccttctgtattaggcacatagtgcttatcatggcattggcgttgtaaaactgatgggtcgtaacagtggtttcattgctatgcaagcctctctagcaagtggacaagtcgacatctgtttgattcctgaggtacttctttgttattatttcaaattccaaaacatgattgatgagctcgctctaagagatcctatgcatctaaaggttcccttcaatcttcatgggcctaatggtgtattgaagcatttgaagtaccttattgaaacaaaaggctctgctgtgatctgtgtagcagaaggagctggacaggtaactataattcaaccccaaattaaggagctatttcctctacttgagttctttgtccagaagttatatctttgtttacattttcttggcatgttgtttcagaattttcttgagaaaaccaatgccaaagatgcatctggaaacgccgtacttggtgatttcggtgtgtatattcaacaagaggttagatataagcaacatttggttgagacttgagatttccatagtgtaaactttgttgcttctttatgatttgacaatctatcttcttcttgttttgtcgaatagactaagaagtatttcaaagaaataagtactccaatagatgtgaa

SEQ ID NO: 1523 - DNA, 653 bp, Arabidopsis thaliana
tattaaacccctcaaaggccaagtatggctggcatatatgataaatctccataaatcactaaattcaacaaaaaaaaaatactcaaaatagtccagctcactagcagaggactatacaaatatatataatatataaagtctcactacctcccaacaataacagctaaagcttgcagacataataattatgtgacattagacaaaatagctccctcataaatcactgaatccaacagataaaaaataaattaaaatagtctagctaaatatcagagcaatgtgaaaaaagacatgtttactcccccaacaaaaaaaaagagtgatggtataggagcctgatgatttcatacctcccgcagaagctcattgggaagaccagtggcttcaaaagacattagaggtggtggtacttggcctccctacgaaattgaaaaatgaatttcagagttcagtaggataaataaacttgtatagttaatggttagtactcaaaggaaatcaaacttaaataatacgttaacattattagcctgtcaccacataggtagagccgcaaatgaaactttcagagtacatgaaaagaagatggatgcaactaattctgtgtgctacacggaggagaaatgaagaaatcaacccagagagagatttat

SEQ ID NO: 1524 - DNA, 602 bp, Arabidopsis thaliana
actatatgacaaaggaaaatgttataaaatgagaatcaataagctaatatatgattattcaaaattatattcggggtccaaattttgatttctctacgtacgtaatcttttgatatagaaattttaagttatggattacaaatactcgatttattttatgaattctcctattctataaataatcgtgagtaactgaattacttatattcaattgttattcatcattcattgattatatatctgaaattatttaataattatctataaatgtacaagattattacagcttacaattttgtttttgttgcttagtgaatttacattttagacttttttttttgtcaaatacattttagactaaatggtgttttcttttgaaaaaatcatatagtttaggtcgaaccgcgaactcgagagagagaaaagagaaaaggaagaaaggataacacaaaacctctctctatctctctcgtcttccaaaaatcgagcactacacattgactctcttctacaaagagtctggtcacactcatggccatcctccatttctctcttcctcttatcgtctctttccttcgtcctcacgcctctcctcgcttctt

SEQ ID NO: 1525 - DNA, 938 bp, Arabidopsis thaliana
attctcctctattttattcaaaaataaattctgtgtatatagcaggatcacaattcaccactttacaaatttaaaacaaataaagagattgtaatcatttttggtcaaaggagtatatatatgcatatgcatgtcaatatgtgcaagattttaattagataatgaaaaaaaatttggtcacctcgaaaaacagaactatgaagcgaatactctggtttgttctcaaaaacaaaaattacaatatgtatgcgtattcttcaacactgactcacgcatttaatatgtatacaacaaatttccatatttatattatactagtactataataaatatgcatgtgcaagatttgaatgagataataaaaaaaatgatcaccttgagaaacgaaacaatagagcgaagattctgcttgtactcgtgaagtggcacatgctgaacccccgagcatctctccggaagacacgcgtcgttcgctccaaagaaaacagtcacagctgccggagaatctccgccgtcttcttctgccaccggaaaaactctctccaccactttcagtgcccacctcgtgttatatccactgtatcctcgtagcaccatatcagcctaataaaattttatgtatcaaattttaagacatagccgaaactacactatactagacaataataatatgatttgtttcctgaaaaattatggtttcatgagaaacattaatcatctataaaacaaattagctatggcatcgaagagttatcaatcaaaacttatgaatctttacttaatatatacaacatatctttaccttgcggcggagaagatcggcgagagaagcaccccagccaccgtcactaaaggattcttcagtgatggaatcaccaaagagaaaaatcttccgtctcatcatcttccacacaatcttcttgagaaaatctgagaga

SEQ ID NO: 1526 - DNA, 1397 bp, Arabidopsis thaliana
cgactatcccgatcttacagaaatcgaaatgactacctctagaaagttagaaactgtcaatactagtccgaatgataagagctagatttgaaacctaataatgagtttttccgatacatcaagactggtttttgtcctttacatccaatttatcgaaatatacaggaatgtacagatatatttactatcaggaactatctgtatttgcgttgtgatgaagagattttcaaagaagatcggaagatggttcaccgcagaaagcttctggttcgaaagttcttgcggtttcatcattgtacgctcctgggattggcagcgaggatctgtccctaggatccctgtatgttctataagacgttgcaattggagaatcaccaaggtttataacaagaatgagcgataatccgagaataactagcgtgtttttcagtctcgcaagaactggctttacctggaaaaacaacacacacacacaaaacaaatacagaaactttagcagacccctgaaatatgatacatacattagaccaaattcaaggattttgacatgcttcgtgatggatagcttaccgagaaagatccaagaagacggtctcgtgccaagacttctggtgttttccccatacctgttccatatcattagagattacattaagcaacacaaatgttttcttctacatagcttcttaaccaaagattgagaggtaacaaaacaaatcataacctgaccatcgtaccaaccagtttcttcatctgcaacaacacagagaaagagaaatttcaaaaacaaaaaggagcaaaaaaacatttgatgaatcacaaaaccagttcttaagcttatcaatacgttactctcaaagtaaaacgtgtatcggaagtaatcaaaaccaacaaaaaaaaaacaatttgaatcggaagagtttagagcaagtacactcgacggtggcgctaagaagacgattaccgacataagcccaaccaagatacatccttacgacagcaagcgtgacaacgaagatcccgctagagctggcggcgagaatcctcttaacaggttcatattcgggtccgatggatccgaaccaggaaacgggtacccgacgaaaaatgcgaaagaagcgccggttaagaaaagtctggtagagtactcgattagatctcctgaagcccaggagaaagggaaagaggtggagagagattgatactcgttgattggctgctgctccggcggaacgggacaatcagtttccggcaacggtcgtggaggttgaggttcggagttttcggcgccgaatttgataagagaagattgaaggggtgttttgggggactaattcgtggtgttaggacactttaggtggcgtgacggtggttttagggacgatgtaattggactg

SEQ ID NO: 1527 - DNA, 832 bp, Arabidopsis thaliana
tcgagtgaagatattccatacccaaagctatctgaagcatcagatcaaccgcgaccgggagggagagagtgttcttcttcctaggaccacatacctctttgatgtgcattccaagggttttcctcatcagttccatgaccaagaaacactctttcttctcctcatccgtgaatccgcagaggtaatatacaatgtttgggtgtgaaagagatagcaatggagtaatctgaggaagcaaagcatcaatatccccaaagaaatgcctaagcgcaaagctctcgcctaaccaggtaatctccttgtactgacttccattccctaatctttttttcacttggtaatcttttgtgttatccagaagagaagaaggaaatagcttggggctctcatttccatctcccaaatgcttcaaaaggaaatcagccatcttccgttcatgtttgctcgaaccggactgctttttctcctgaagctccttgatcagaatccaacggtcctctgtccaagcactctcgaaccggttgcagaaatcctcggtcaccaaatactctctcccaaacttccaggtaaacatctgagagtcattccattgcttcatatacttgttagaatgcaccaacctcttcttgctcatctcttcttcatcccaccctgaaacctcactcgctgtctcaatagcctcgacgatgatcggtagacaagagagcaagttatgtatgtgaagctctgtgcaatctctattgctatgcaacacaatagccttagcccaaaacccaagtttagggtctaaagacattctaacataagcctctccttctctaaccacccatag

SEQ ID NO: 1528 - DNA, 839 bp, Arabidopsis thaliana
tcactaaaatcagaatcagagccagcagaatgcatccaaatgtaaactaaactgttttattacaaatcaagtctttcttaatggtttaattataggctaaaagtttcagagatcaagaaacaaaaacgttattcgttcatcaagcaacaaaaacaagcttataaggccaaaatataatacctagcaagattactaacacagttgacaatcaccaaaatcagaattagaccagaagaatgcatcaaataaacttgatatccaaatctaacttttgtcaatgacttaattaggctcattgtttcacaattcaagcaacaaaatcaatcatacaggagccaatatataatacctgcatatcagaagtccagagagtgaggttatcacgaagaagctgcataatcaaagtactgtccttgtatgactcttcaccaagagtatccaattcagcaattgcttcatcaaacgcctaaataaatccataaacaaaaactcatcaaacacacacataaaccaacaatacataatcatataaaacatccctcagatgagatccaaacctgcttagcgagattacaagcacgatctggagaattgagaatctcatagtaaaacacagagaagttcaacgcaagaccaagacgaatcggatgcgttggagccaattcagaattagcaatatcctacacaacaaaccaaaatttcaaaaacctaaatcacacaaaaatcaaatcacagatcggagaaagagatcaaaaacctgagcagctttgtaagcagtaagagtatgttcagcagcatctttcatctcttgaccagatttgaactcagccagtacctat

SEQ ID NO: 1529 - DNA, 1113 bp, Arabidopsis thaliana
cttctaatgtgtcgtcctcctctcgcgctgctcctgcgccggatatgtcgccggattatgatatttggatgtcggcgccgggatctatcacggagcgtcgtcgaaggcttcttaatggaatgggacttgaatctaagaagactaggctcggagctatctcgattcaacgcgtgagtgaacctgtggcggcgacgggtgagtgctcaggttctcgcgttgcgaagtgaaggtggaggagtcagatcacaattctccggtgaatcaaagagttcgtcgatctccgtcgatgtcggttttgcttgtacggtctagatctgattccgatatcgaagcgtcttctgctgagaaacagaggaaagaagagatgttagggaaaacgtcgaaatcgcgattgactagaaccgcgtctgcgattggagctccgtgtgcgaggatttgtccctacttcacccaaacgcaagcctcgccgccggacgcaccaaacggtcatcatcagtctcaaggccaacgtagtggtccgttgctctcttcggtagtttccaatactcgttttagtgcttttttcttgattaagaaccttgacactgggaaagagttcattgtgaaggagtatggtgagaatggaatgtggaatcggcttagcgatttgcaaactggtaagcaattgacaatggaagaatttgagaagagtgttggttattcatctgttgttaaggatcttatgagaagagagaacgcgaattcgacgatggattttaggaaatttaactcgtatgtgtcaaagagtttgagagtaagtaagaagagaggagctgctttgttaaagaacataaaggacgttgctcattctatgagctcttctaaggtttcagagaaagagaaggattcaactggtagtggcacaagtagtccaaaagtagcggagaagacaattgaccagccgaatcaatgggtgaaagtgaggcattcagggaagtctcataaagatttaagtgctttgcatatgtgtcaagagattcaagctcatcaaggaggtatttggactatgaaatttagtccagattcacatttattagcaagtgcaggggaggattgtgcaatccatgtgtggga

SEQ ID NO: 1530 - DNA, 1398 bp, Arabidopsis thaliana
aatattaattggactgaaaagttatttagtcagttgagcgtaaacaaccactggaaggcgcattaaaaccccaaggaccttccctctctgtctttccaaatctctctttatctctctttctctgtttactaaatcgccagtattcgccgcaagaaagatgtctccggcgaagaagagccgaagttttcctccgataagcgagtgtaaaagcagagagtatgattcgatcgctgcggatctcgacgggactctgcttctgtcaagaagctctttcccttacttcatgctggtggccattgaagcaggtagtctcttccgtggattgatccttcttctttctcttcccatcgtcatcatcgcttatctcttcgtctccaaatctctcggaatccaaatccttatcttcatctccttcgccggtatcaagatcaagaacatcgaactcgtctctcgcgccgttcttacacggtaaccacaatcaccggatctttattcttttcgattttggaaccctttcgatttttaatcttcgttttcaaatgttaggttttacgcggcggatgtgaggaaagatagttttgaggtgtttgataaatgtaagaagaggaaagtagtggtgactgcgaatccgatagtgatggttgagccattcgtcaaagactatttgggaggagataaagttttgggaacagagattgaagttaaccccaaaacgatgaaagctactggttttgtgaaaaagcctggtgttcttgttggtgatctcaagagattagccatcttgaaagagttcggcgatgactcaccggatcttggcctcggtgaccgcacctccgatcacgatttcatgtccatttgcaaggtttctctatctctctcctctctcgtttcattttgcatatccagtttacgttgcttaaacctgatttaggtggtaattaattaaagaactaactacttaaatgcggtgtggagaggattcacatgatctatgggatacacatgatttcataaaaatctagaataatgttttaggatgataaaatccatagtttcaaaacacatacacgtataagtgaatttaagtagaggaaagtaatcactgagagtgacaaaaagtagataacagaatagaataatagttttcataaatgcttccaacctatcaccaactaccatcaccacataagttggacggtccatttaatgaatgatccgatatgtcaatgtttgaaagttcaatagtattttacaacatttcttaccataataatcgtgaatttcagaatgattcttattatatgatatgttaacaggaaggttacatggtgcatgagaccaaatcagccacaacagtccctatagagagtctcaagaaccgcataatcttccatgatg

SEQ ID NO: 1531 - DNA, 530 bp, Arabidopsis thaliana
tccctcgaattttccacgtccctcaagataccttaccagacaagaaacgctctgtttcagacctagagatccctaccatcgactttgcaagcgtcaacgtggacacaccctcacgtgaagccatcgtggagaaagtcaaatatgcggtggagaattggggattcttccaggtgattaatcatggtgttcctttaaacgttcttgaagagattaaagatggggttcgtaggtttcacgaggaagaagatcctgaggtcaagaaatcatactactcgcttgatttcaccaagaacaaatttgcatacagtagtaatttcgatctatatagttcttcgccgtctcttacttggagagattctatctcttgttacatggctcctgatcctccaactcctgaggagctccctgagacttgcaggtaacgaaaatagtcttagcttttctttgttcttcctttactcggaaacaatcaagtattagagtgattaatttctaacagtattgatttgactcagggatgctatgattga

SEQ ID NO: 1532 - DNA, 1145 bp, Arabidopsis thaliana columbia
atctcctctacaactatattccgaatcgaatggacggcatgagtcgttttgggaagaacagatcctacgcgaatgaggggaagaatgttaggttaggcttatgaaacatatctacttggggaagatgtatagatcttttagatgaagaagcaaaactctcgacaaggaaaaaagaaagacgactttgacaaatgctgttatcatgggagggaaaaataaaataataataagccaatttttatgttattttttaaagggcaatttgggtaaagaataaaaaacggaagttttcgaacaaacccggcaaatgcggttaaactgccacgtggattacacgtcattaataattaacccactcgaatacagtcaaataacccacctgtcatttttgacggatccaattttgaagatattttacttgtaaaaaatctcttgacaacatataatttcgttgcctagtagcttcttcacagcttctgatctcactagtgttcgtcatctttgttcgattgaagtttgggaagtggtgatggtaataggagcagcagcgcgtgtagccatcggcggttgtcgaaagctcatctcgtcacatacctccctcctcctcgtctcttctcagtgtcgccaggtaaatcgtctgtcttctcaatcgattcttctgtatttacatatttactcgtggattcgtccgcagtctctcacggagaaaaggatcgagtggtttcaaaatcagaacaatggttatatatctgaattcagtttttctagtatttctcggatcttgtggtctcatggaggaaaagtgaattgggtttcctccggatgtttttgttaaagaacaaatgtgaatacgttatgataatgatactctgttaattcaattgattatcagatgagtatggacgcacaaagcgtttctgaaaagcttaggagttctggtctattacgaactcaaggtctaattggaggcaagtggcttgactcgtatgacaataagacaatcaaggtcatacaactctgccttttaccctctctctttgttttggggatgttattttggaatgctttatgttgacatcatgttttcttcctgacaggttaacaatccagcaaccggtgaaattatagctgatgttgcatgtatg

SEQ ID NO: 1533 - DNA, 1343 bp, Arabidopsis thaliana
tgttcttccctggaaaattgaggttctttattctcatgttggaatcataaatttttttttttttttttggtacagctgatacaaaatcagagggtggcgcaattgtaatagatggaaaggctgtggcaaaaaagattagagatgaaatcacaattgaagtttcaagaatgaaggaatcaattggtgtgattcctggtttagcagtaatccttgttggtgacagaaaagattctgcaacttatgtgaggaacaagaagaaagcttgtgactccgttggaatcaaatcgttcgaagttcgtctagctgaagattcatcagaagaagaggtgttgaaatctgtatcaggattcaatgatgatccttctgtccatggaatccttgttcagttgcctctgccatcggtaaacaaagtctaataactttcttcggaacttaaataaacagtgaattacaatagtgttttgggatgttgttgcagcatatggatgaacagaacatactgaatgcggttagtatagagaaagatgttgacggatttcatccgctaaatattggacggcttgccatgcgtggaagagacccttattcgttccttgtactccaaaaggatgcattgagttgttgcatagatacaacattgaaatcaaaggaaagagagcggttgttatcggaaggagtaacattgtcggtatgccagctgctcttttactgcaggtaatgatgatgataccttctttaagatgccgttttttctggttgtgacattcgaaagttagttacatgtttggtctttattgttgtgttttgtatttgtagagggaggatgcaaccgttagcattatccattcaagaaccaagaaccctgaagaaatcacaagagaagctgatattataatctcagctgttggacagccaaacatggtcagaggaagctggataaaaccgggcgcagtcctcatcgatgttgggattaatcctgttgaggtgagtggaattttctttttgacatatggtcatggcgtaattcagtgatataataagtttcaaatcaaccagtatgcaacattcatacatgtacataatatgaattgcaggatccaagtgctgcgcgtggatatcgattggttggagacatttgctacgaggaggctagcaaagttgcatcagccatcacacctgttctgcaggtgtaggaccaatgaccatagccatgcttctatccaacactttaacatcagctaagaggattcacaacttccagtgacgtcacttaaaaagaagattgctggccttttgggaaacaaacaaatcgtactctgttacttacgggatcctcttactct

SEQ ID NO: 1534 - DNA, 950 bp, Arabidopsis thaliana
cttgtactccaaaaggatgcattgagttgttgcatagatacaatatattttgtagtttgtttaaggtatatatatatatatatatacaccacaaaaaataagatggaagacgtcggtttattaatgtcacttgttaaaccgactttaagaattttaataggaagggatttcacgtcatttaataaaacgactaaattttaattagaatggcgtcacttaataacccttgtaactatagcctgttttaatcaccaaatgtcaattaaggtacgttctaaatttctaatgccgccgcagcttccgttgtattgtccgtcgtactccgtcagtgtattccgagctgttcttctgatgaaaagccatcgcaactttttgtcatattcttctgcttcatcctctaaagaatcgctggttctctcaacatcgtatatggctcttcctcgatctctcgcatttttccctttttcaatgattcttcttcgtctccggtgagtgttctattatttggtcttcgatttagggatttgatctagttcttaaatgaaattggaatcaatttggcgatgattcagtagaaagattttggaactgtgttttcgtgcatagaaatggtgctagtagtcgcatttgagttcaatttctggatttcaaaaattcttcttgacgttaccgtgttctgcattctgattcttggtttagttgagaacctgaggtagaagatgtgatgagctgcatagagatgcaataaagatgctgattattgctttggatgctaaagcgaattcacgttgcaaagaaatgcataagcattgttttagacttgaaacataaggtgttgattttcggtggagaggcttatttcatgacttattcttatttgaaaatgatgtggagaagaatcgatttccttcaagttgttcttgaaaagggttaaaaccttttttcattga

SEQ ID NO: 1535 - DNA, 865 bp, Arabidopsis thaliana
gatcgcacgtcatgccacaaaaaataatcttcaccagacgaccaaggaacatggtaattcctaacgatcgcaaaactcctttcccattctttctacaatctttctcgaggcacccaaacaaatttcgaaaggaaagttagcataagacccttagcttcttcgggatattttttgttagcaatcatccatgcgagaaacatggagtggctgacagacttacgatttaaaatttcatcgacagggtcatcttgattgtaaatcataaactatttacctggagcatgaaacgaaagcttcatcacatacgtagtgcggggatgggtaggaaaagtaagtatacgccaagttgcctcacgtgcagatatatctacatgtacaaaaaacaatataaacctaataaatcttagtacaaatgaatcagaccaaataccaagtcccaaaaaaacatacctacagctagaatatttttctctctcgtcatgaataatattaccattttcatcctctttttgtacagtgttgctgatatagtctggtcctttatggatgtacttaaaaagatacttgatagaacgtgattaattaaactattcgacgtgaataagagcacgataacgtaacaacaacgctctgttgtaaggaacaacataccttttatcgcactcgaaaccctttttctcgataaatctcttatcctcacgtctcctatagaggaggtaaccatcatcgtttactgtcgtcaaagagtttcttggttttggaaagaattttgaacatttcccatttctcatctaaacattatagggaaattctggtccacacggtccatatatcatacaatcagagactatgtcgtacaaatgag

SEQ ID NO: 1536 - DNA, 1519 bp, Arabidopsis thaliana
aattaagagtttttttttttttctcataatccataattaatttcataaactcatgcaaaaatgagataatatcacatttcattaataaaaataaaaacacttctttctctttgctctcactaaaagacaaaaacaatcacgagccaacacctcttcatcttctccaaatcaatccatcaatggagtcttctcccatctctctctcttcctcctcagatctcacactctgaaaaatcccccaaagccatgtcttaccttcttcgctccgatccggtttcacgaatccacccagaacctcaatctctaacctctttcgaccacttcgatctcctccctgactctctcctcctcttaatcttcgacaaagtcgccgacgtcaaagatctcggccgttgctgcatcgtatctcgtagattccactctctcgtccctttcgttgagaacgttctcgtccgtgttgattgtgttatctccgacgatgattcctcttcctccgacgagaatcatcgattctctttaaacactgcatcgatctcagatgccggcggtgctggtgtctccttctccgccttgttccgtctcgtattcgctccaattttcaaaccgtttcaaatgttagggcagattctaggaccgaaacgatcgtcttcttcgttcgatgcgtcgttttcagcgattaacgatgagatcggcgtaacgcatcactctccgattcaggtattgaaaaacttcggtgagattcggtttttgaaaatcgaacttcctacaggagaattaggtatcgaggatggtatattgttgaaatggagagctgattttggatctacgcttgataattgtatgatacttggagcatcttcggtgattcagtcgaattcagtgaagaatcatgagaattcggttgatgaagacaatggtaacatacctgagtcgttttacactaatggagggcttaagcttcgtgtggtttggacgataagctcgttaatcgctgcgtcggctcggcattatcttcttcaaccgattatcaatgagcataagtcgttagatcgtttggttttatctgatgctgatgggcaaggtgttttgtgtatgaatagagaacagcttgaagagcttagagttactcctttatcagcttcttctgcttcgaagaggacgcttgtgcctgcgttgaatatgaggttgtggtatgctccggaattggatttacctgatgggacggtgttgaaaggtgcgacattggtggctattaggccgagtgagtctaagaaggaagtttgtgatgcttcttggttgtctgatgcttttgaggaaccgtttgggactgtggcgaagatgttgatcaagaggaggacttattgtttggagatgaactcgttctgatttcgcattatgaccggtttcaggtaatagtacattgtgtcattctatggttttgtatactgctctgtttggatgtttgaattagcttccctttgtggcattagcaatgatctgaaaatttgattatcattta

SEQ ID NO: 1537 - DNA, 879 bp, Arabidopsis thaliana columbia
gactcataaatttctaaaaccaacttatttacatatacatacatatggatataaaatgtgagttagaaaatagtatggacttgggtccaaaaactcggttaacaaaaaaagtgaaacccaaaagagagaaagtactatatacaaaaatataaatagaaaaaaggttatatttctttgtgtaaatatcatttaatttttgctgaaaaattatcctcacagacccttctccataattgtagatttcatgagacatcttgaagaacaattcaggctgaagcccttggtattgttgaaaatcactatttccataagccgctgagccaccaccgccaccactaccttctccggagctcatttccgcggcagaagctgcaaagttgcaaaaaccatcttcccaaaccaagatcctgccaattatttacatacaacatatatatcttaattatatacaccaagaaatgtttagatatacatacaactttgtgacatatataggttgttttattgtaccagtttctcctgttccctcttgatctatcataagctccttgaccatcccatctgcttgccaacaacatgaaatgatcagtacatatttaccattgaaagatttgtgtttcttaatgaaaaattacctattttccccaaaacaaactcacaataatacttgcagaataattgaaaaataataacaagaaagtagaaatattttcgaaatgaaaaatcgagttttagatttcttatatatgtaggaggttgattttgaagataagcttacttgggaggaggatagtttctaggcaagatccccagaaaacagcataaacccattgagagtctcatggatgcataagcttcttagtgtgtgttgagaagatg

SEQ ID NO: 1538 - DNA, 1260 bp, Arabidopsis thaliana
acatgaagtctcgattacggagagcaaagtgacttactctatgaggtttcctgctcctctcatgtctcttggcctttcccccgatggttccactcgggtaatcggagggtctaatggcatggtgtttgccggtaagaagaaggtgagagatgttgttggaggacagaagaaaagtttgaatctctggagtctgataagcgatgtggatgagagtaggagaagggcactgaggcctacgtatttcaggtacttccagagagggcagagcgagaagccatccaaagatgattacttggtcaaggagaagaaaggattgaagctgacgagacacgataagctcttgaagaagttcaggcataaggaagctctggtctcggtgttggaggagaagaaaccggccaatgttgtggcagtgatggaagaattagtggcgaggaggaagctgatgaagtgcgtgtcgaatatggaggaaggcgagttgggaatgctgctaggcttcttacaaaggtactgcactgtgcagaggtattcaggattgttgatgggattgacgaagaaggttttggagacgagagctgaagacatcaagggtaaaaacgagtttaaagggcttctcaggaacttgaagagggaggttaatcaggagattaggatacaacagtctcttctagagattcagggtgttattgctcctttgatgagaattgcgggtagaagttgatctaatcaatatcacaagttttgtttgtttctttttttcattatatgccttcaattttgttctgctaatgatagatatttcatggtaatgtctaaacttgaaatgatggatttctataacaaagagcagttttgttggtttccttgactgtatcaactagaaacaaacttttaaacacataaattatgtcgattgataaatgttttacccgtcgtcagtgtcccttggaccgttcacccttgagcgctttccgtctggcagccgatctaattgtctcgattagaggagcgtcctcgtcgagcttatcttctctgtctgacccgccactaatagactcatcctcatcgcttccactttgctcatcaaacagtctctttcgctctgtttccggacgttttcttggccgtcccctgcgtcttacatttgctgcttccttgtcgtctgtgacagacgcatcatcacaagtcaagacttaaagcatgcagacatatcatactcatctaccggctttgattaaaccaaatcagatgttgtgcgag

SEQ ID NO: 1539 - DNA, 838 bp, Arabidopsis thaliana
gtctcatccatttatacaaccgcaatggtgttttcctcccccgcccgagcgtcagcaattcagcttacggacaactgcgtctacttggcgctgcactctctccattcgctcctcttcttctccatctgcgattgtaattgatggaaaggctgaggccaaaaagattagagatgatatcaaaatcgaagtttcaagaatgaaggaatcaatcggtgtggttcctggtttagcagtaatccttgttggaaaagaacaaggaatccgctacttacgtgaggaacaagaaaatagcttgtgaatccgtcggaattaaatcagtccaagttcgtctagctgaagattcatcagaagaagaggtgttgaaatatgtatcaggattcaatgatgatccttctgttcacggagtccttgttcagttgcctctaccatcggtaaacaaagtctatcttcatattcttcatcataacttaaaataaacagtaaattacaacggtgttttgggatgtcgtgtatatgcagcatatggatgaacagaacatattgaatgcggttagtatagagaaggacgttgatggatttaacccgctaaatattggacggcttgccatgcgtggtagagaacctttattcgttccatgtactccaaaaggatgcatcgagttgttgcacagatacaacattgaattcaaaggcaaaagagcagttgttattggaaggagtaacattgttggtatgccagctgctctgttgctgcaggtaatgatgattccttcttcaatatgccatttttacatggttaggacaacattctttatcgatgtttatattctaaatgtag

SEQ ID NO: 1540 - DNA, 531 bp, Arabidopsis thaliana
tctagcaaagccgcaagataatcagggaactcacaatctggataaggtaacctctaaaatcaaagaacaagaaccgaaataatattatttctgacttaacgctaagcaaaaatcattggcttcaaaaaaccaaagtaagatttgtttatttaaaaaaaggcgagcaatcatctttgaagtcactggaagttgtgaattctcttggctgatgttaaagtgttggatagaagcatggctatggtcattggtcctacatcaccaggaacaggtgtgatggctgatgcaattttgctagcctccacatagcaaatgtctccaaccaaccgctctccaccggcagcacttggatcctgcaattcatattactttcacatactgtatttgatttgatcattcattatactaccatatgtcaaaaaattccactcacctcaacaggtttaatcccaacatcgatgaggactgcacccggttttatccagcttcctctgaccatgtttggtttccaacagctgagattaggatatcagc

SEQ ID NO: 1541 - DNA, 805 bp, Arabidopsis thaliana
accaatgttgtcttggagaagaagcgtgaggaaggagttatctgagtgtttcgttatccctaacgttaggtcaggttgtggacaaggtgggtaataatggcagatcataagcaaagtcttcacgcaatccatgctctcaagggtctgagatttcaaaccaagtgcttctgagagaagctcaaatagtaaaccaccgaaactcaacacatgctttgagtattcaaacatagcatccctgagtcaataaacaatttagaaatctattaaacgacctaattaagttgttaactaatctcacttctaagtttttaagaaaaagttaaagaatattcccgttacctgcaagtctcagggatctcctcaggagctggaggatctggagctatgtaacaagagaaagaatctctccaattaacagacggcgaagaactgtatagatcgaagttactgttgtatacaaattttttgttgccggcatcacgcgagaagaatgatttcttgacctcaggatcttcctcgtgaaacctacgaaccccatctttaatctcttcaagaacgtttaaaggaatactatgattgataacctggaagaatccccaattctccaccgcatatttgactttctctacgatggcttcacgtgaggctgtgtccgcgtggacgcttgcaaagtcgatgatagggatctctaggtctgataccgaagcagaaggtttcttgttggttaagatatcttgacggtggtggaagatacgaggaacttcagtgattttagcgtcgacgaggcctttcacaccttgttttg

SEQ ID NO: 1542 - DNA, 1082 bp, Arabidopsis thaliana
tttaaactttgggcgtatcatttaagagctacatgctcaaattccttatctagtgaaactatattcttcgcaacgtcttcaataaacttttgcaacgcagtacgcgacgatccaccatccattaaagagacatggcatttctcgctcatatccttcactcttttcctcacgtcactatcttgttccattagacacatgattgctttctctatctcctccgctgtcacagtagccgtcggtaatcccgccaaatgttcacctcgccaatacttccttatctccaccgccaatccaagctcctccaccattaagaaagcattgaacttctgctctgcgtataacggccatgcagctgttggaacaccaaaccaaagactctctagcgtagaattccacccgcaatgagttacgaaacctcctatagccggattcgcaagaacggctacttgtggagcccatccaatcactttacctatatctttcgttcgatcaaagaatccttccgggagaacgttctctagattagtaaactctcctggaagttctttgaatatattcggagatgcgcgacgaagagaccagagaaaccggtgcccacttcgctctaacgcgattgcgatctctcttacttgttcctcaccgaagcctcccatgctcccaaagcagagaaacacaaccgaacttggtggttgctgatccaaccaccgtataatctccaaccgtttctcgtccttagaatcatcacgttggttctcaagatgcaacaatggtccaacaggataaacaggaggagtatcactactagaaagaaactttaacacataaggttcaagctcagcaacagtatttaccaaaatacctttcatctccctaaactttctcgcttggtttacaaacaccgggagccacatattagctgccagagcgtgaggaagacacttcaccggataaggacgactcaaactcggaaagttcaacacagcttccgagtctgcataatcattttcactaacatcgtacttgttctcatcgcacaacatttgaacatgatatgtaactgagagaatccggcactggaggtg

SEQ ID NO: 1543 - DNA, 659 bp, Arabidopsis thaliana
tgtcgtcaccatcaaggagttttcactgtatctctctgtgaacacaacattaggtttcttgctttttttaatcaagggcaagatttttcttcatagcttcgtagacaaggtacgaaatgcttgcggaaggaatgactttgaagaagttggggaagattcctctgtaaaaaccttttagaccttcgcctcttagcgttttcagaaactcttggcccatgcttgtttttgagctatcagcttgcattctgatgataaatgactaaactcagtttcaaaccaaaacgaagaaatagataaactcaaaaagctaaagattgtgagtttttaccttgttcttatgacctgtaatgggtaaacacacgatgctccaagagctccagaagtcattccacatcccagttgtatcaaaggacctggctctgcacatcatatacggtttagtatcatgagaaatatcaagaactttcaaggcacgataagtaactaacccgcagtgtcatgaagaaaatgtgcccttgataagtctttaagagtttcgtaagcagcaaggtcaattcctgcgtaagggataatccaattagagaaggacaaagacccctgtaaaaagctcggggtccttcttgaatccaaatatcctttgtgagttccacagctttggt

SEQ ID NO: 1544 - DNA, 1012 bp, Arabidopsis thaliana
tatccaatttatggatcatccacttctacatattgtacatatgcatgttcattcagatattgatatacataacacaccatatctgtagtcatatataatttttttatatatttaggtgtgtgtagagtagccctagattcagtgttctctatatatgcagagtctaatatgcatataacatgaccctattcaatcatatatatgtacactatatgttaatatagacgactgtatatacctaatacgcgtttttgtagggtcaaaaaaacgtttgaatttttgttttcgagaatatcttttctttggttccattccatgaggtttctatgttttgtgttattcttcccttgatttatgttgcttgtgtcggaagatttctgtttcatcttgttccaaacttcatctcagatctcgagatcttctgtatctctgtatatcttccatgtttcaaactaaaatagattagaaatttgttgaaaatgtattagtacttaatttatttatttttcctgaaaatacagaagctattaccgttgcaccacagtgggttgcggagtgaagaagagagtggagagatcctccgatgatccttcgatcgtcatgacaacctacgaaggtcagcatacccatcctttccccatgacgccacgtggacacatcggaatgctcacgtcaccaatcctagaccacggtgcaaccaccgcgtcatcatcatcattctccatccctcagccacgttacttgctgactcaacatcaccagccctacaacatgtacaacaacaactctctaagtatgatcaatagaagatcatccgatggcactttcgtaaatccaggtccatcatcatcattccccggctttggttatgatatgtctcaagcttctacttcaacttcttcttccattagagatcatggattgcttcaagatattcttccttcgcagatcagatccgatactattaacactcaaaccaatgaagagaataagaaatgaagaagtttttttt

SEQ ID NO: 1545 - DNA, 846 bp, Arabidopsis thaliana
gcaaacgctctataaaaaaaaaaaaaagattcttttgtataataattttctattttgtgtaggtacctgcacgaggcatgttcaccttctgtgatgcataagaatatcaagtcttctaacattttgctagacgcagatctcaaccctcgtctctcagattacggcctctcaaaattctaccttgtgagcattaagttctctttaattttgtagaaatttggatttagttatgagaattaatatattatatggtgtgacagagaacgagtcaaaatctaggagaaggatacaatgcaccagaagccagggacccttctgcttatacaccaaagagtgacgtctacagctttggcgtcgtcatgttagagcttctcaccggtcgagttccatttgacgggtcagttccattttatagcaatagggttaacaattaggttgagctatcgattccgtgttaaatacatgtacttttttttctcctttaagaaaaattggtttttctgttggcttgtgatataaacagagagaagccaaggccggagagatcgttggtacggtgggcgacaccacaacttcacgacatagatgcattgtcgaatatagcggatccagctctgcacggactttacccaccaaaatcattgtcaagattcgccgacattatcgcattatgtgttcaggtggaaccggagttccgaccaccgatgtcagaagttgtggaggcgcttgtacggatggttcaacggtcaagtatgaagcttaaagatgatctttcatcgtcttatcgagcccacgacgattatgattactagagttaagaagaaagagtagtgacattctatcacc

SEQ ID NO: 1546 - DNA, 585 bp, Arabidopsis thaliana
ctaaagctttagaggcaggatgagcgacgcccgccatggagaggattgagggcgctagatccatcaccgttgcgaattgatctgtgattgccccattagaagcctggggagccgtcttcgttgacgaagggaaccgtgctaaaaacggaacgcgaacgcccccctccgttgtgtacgctttgtacaacctgctcggcgccgtggcagcttgtgcccagcgtggcccgtaccaaatgaaactatccccgttcccgagattctcgtagctgttattgtagtattttagtaggtgtggaagaacaccgctctgcacgaggggatatgcctcgtacgcagctccttcagcgccgttatcggacataaagcagacgaatgtgttgtccagctcaccgatgctgtccaagtaatcgacgatcttgcccacgttggcgtcaatacactcgaccatccctgcaaagacttccatcgcgcggcaggagagtttcttttcctccggcgtgagttcttcccagggtttaccttcgccttcgtcgacgacaacgggatgaggctgtacatcctcccgaatcatgccaagtttcttga

SEQ ID NO: 1547 - DNA, 998 bp, Arabidopsis thaliana
taacttagatatatgcagcgaaactattacctttgttaagaactcacgcgtataaatgcgaccccgaggacctgagggtgggttctctggggtgtatttaccagttagagcacctggaaaaaagacaaaagagcaaataacggaaaatgtatgtgttcaataagccaggttgttttgcgtcaatactataagagcctgatgctacttttctagagaacgatagacatgaacacaacgcaaaggagataaaggcagattaccttgagcgatgggggaatatgcaattaaagtaactccaagctcatcacaagcagccttaacaccagtctgctctggagctctgtatatcagactgtagttgacttgatttgaggccagaggaattcctctctttttgagtctttcataagcatcacgaagccgcttctctgaaaaatcgcacaacagtaagtataatgaatttgaaagttcataagatatgcatccgtgagaaggaaaaaacagattgaaatgataccgctgtagttagaaacaccaacagccttgacaagtccttgttcaacagcatccccaagaccatcaagatatcctaaaaacataactcacaatgtcaatggatttgatataatcaccaaaagtgacacgaactctagttaaaagtagattcagtgctgctcttaagaaaaaaccttcatttccccatagtcctggcctgaaatataattaagaaaatagtgagattgttaccttctagtgttgtttactccaacatgaattaggggtgcataccaatgcagttgatagagatcaacagatgaaagctcaagccgggaaagggaatctttaagggcagtgacaacactttcacgaccaaatcgccatggcaatgcagcaaacttggttgaaccgaaacctcagctccgggatatcctctttctctcacggatgaatctgtcgaaaatccccaatgacagtcagaggaattatatgaggatagt

SEQ ID NO: 1548 - DNA, 1590 bp, Arabidopsis thaliana
atttccctaactctaatgtcctagtgctactaatgatcacaagcttcttttgggtgcaatcaattctcaagggtcgaatctcctaaaaaagggatgagatacataatggggaatggagacttgattcagacttgggctgacccctggctcccacttcacacacctagacccccaagacgtctagaccaaaaccaacaaagagtgctgcacatacaggatttcttcttacccaacaaaaccggctggaatgagcaattattacgggaacacgtggtaccagaagatgttcctcacatccttaccctgaaactcagtcaaacacagatgacggactatttgggatggcactatacagaatcaggaatctattcgctcaagtcgggatattggctagcatctcatctaccagaaggagaaccgacaacacgaccacaagcaggaaacccacaactaaaacaacgcattttgaagacaacaacagccccaaagattaaacattttctgtggcgaatgtttctcgggctctaggcacaggggaagagcttgaaaggcgtcacatacaccatgataaattttgtaaccgctgcatcacggagactgaaaccacagaccatctcttctttacctgccctcacgccactcaaatctggagggcctcgtcaattccgattcatgatctcatggatcctcacatcagtttggagacaaagatgataacactattcgaatggcacaagctagggacgaataactcactacaagcacaccttccattttggattctctggcggatttggaaaagcagaaataagttaacttttatgagaagaaacaaccaatggcagaaagatcttcaaagtgctaatcaagatgctgaagagtggagcacatatggaggtaactatcgagatagttgtaaaaaccctgtcctagtaagtgataacagaacaccacatcattggaagcgacctgaagcggattggatacagtgcaactacgatggcagtttcactcaacaatagtagaaatcaacaggagcttggataatacggaatgaacatggacactacaagggtgcgggaaaggctataagtacacagactacaaattcattagaagcagaatgccactcgttactctctgcaatgcaacatctttggtctcaaggctacacaagagtcatcttcgaaggcgattgtaagattttggtggatgtcttacgagggaagacattacgattcgacattgctaattggctgcaggacatcttaagttggaaaagaagattcaaagaagtgaagttttcatggataccaagacaggggaatcaaccagctgacaaattagtgaagtctcacagattcaatgatcaagacttctccttttattattatgttccgatctgtatctctaatctattacactctgattacgtcggctcaaattaataatagttgtgttaaaaaaaaaaaaagagagataaaattctgatgagaagtgttaaatatactactaatatacataaccaatgtccacaagtattcctaacattatttagagactaaatataaattttttgtttaaaaatta

SEQ ID NO: 1549 - DNA, 597 bp, Arabidopsis thaliana
tcgataattcgaagagcttctccaggtttcaactctttgaagaaatctctactttcgtctcgctcacggaaactgaaaatgagatcaacaacaagacctttgaaagtgttgaagaatttgaaaccgtattgaacgatttcgagatcggttaaatctcggtccggtttaacgagtgtagggggtctctcgtgcttgtcgggttcgtcggttaagaagatttcagttgggagatttgacatttttcttgaagcgaattcttccattagcttagcgtagttagaaccagcgtctgctcgttgaagcattctgtctttgaatttgtctaagctcgctgagtacaatgctcgtgtcctctccacgtacttaatcgttcctgtgatgaataaaagtgtaattggtggccataatacgttttctagcgattgcaccaccgcataaacacctgaaaacgacataaaaatgttatgagaaaaccttcataatgaggctatttaaattttttctaattaataaaacaggtaaaatatattttgattattttggatattgatttttctacatgtaaaagggaaatgttattgtgtttttcactaagta

SEQ ID NO: 1550 - DNA, 657 bp, Arabidopsis thaliana
cataatacaagctgtggcggaagagttatgggatgaaattcagaatctagagttggggaggaatgatctggagttgttcataacacatgaagcgtatgcagatgtgttcataacacatgaagcgtatgcagatgttgcagctaggaacagactcagcctaattgctagaccgttgaatccgcgagcttagaaccttttctcggtaatagcttccttacctagatcttggggattaactgaaagagtccatgggagagttttagatggtacttatgtataattcctctttcaatctgaacttgatctttattagttcaaagaagagagccttggctctttaataattggtttgtagttaatcaaagatggaaaatctttccttccatagattttcttactatcatagagttgtgggttcagattaggggtatacctatgctttatgtctgtgtggaaactgttagtgagattgctcaagaacttggtcatattatccatatagacttccatgaggccactactaatcaaatagcctacatccaagtaagagttaaggtttggaataactgatcgcctaaggttctttcaaaggattaggttcactctggggagactgttgtacttcgttttcagtatgaaaggtcaagaagaatatgc

SEQ ID NO: 1551 - DNA, 623 bp, Arabidopsis thaliana
tagtaaccctcgccagtgtgctctaaagcttacgcgccgcaaggtttggcgttggataaccgatagtttcagcaacctgttttgccacatccgggcgcacgaggaagttgatcaatttcagcgcgccttctttgtttttggcatttgccgggatcgccaggctgtccatccagaaaatgccgccttctttcggccacaccacgtcaattggcgtacccgcctggcgtgcaacgaaagcagaaccgttccagatcatgccgaggttaacttcgccttccatgtacgggttcgccgggttatcggagttaaaggctgccacgtttggcatcagttttttcagctcgttatatgcagcttcaatctctttcggatcggtggtgttaccggagtagcccagcttacgcagcgccatctggaacacttcacgggcatcgtcggtcaacagcaggctgcctttgtactctggcttccacagatcggcccagctggtgacagatttcggatccaccgcatcaccgttaacaccaatcgccgtcgcaccccagatatacggaatggagtagtcgttattcgggtcaaaaggcttgttgagcatgtctggatcgagattgctgaagtttgtt

SEQ ID NO: 1552 - DNA, 874 bp, Arabidopsis thaliana
taaaccatggaaagttgaagcagaggccgacaattaagaggataaaagaaattgtcgaagaaaataaattgtaacaagaaattagcacaaaataccataagtaaaaagaactgagccaaatcatcgtccaaaaaaatcataattaaccctttgtcttttcacaaacgataaaagtagtcatcatctgaaaccaaaacgcataacataagtcctaaggcgcaaaagttggccagatccttcaaaatattaacagccaaacccaaaagagataaccgagagccgaatatagttttcataattattaacggcttttaaaactggcaagagaagaagtgaatcattagcaataaaacataacctccttgacgttatcttttattgctgggagctgcgaaatgacttgacccacacctgttgttgagctcctggacctgctcgaacctccatcagacatctcactctccatgtagtagcgggcacggaatgcagccaagtgagcgtagtaggctggtggcacaattgacacagattttgtacacctcgcatacctgcatatgcattttattatatgttttgttagtttcagagagttaaaacatgtcataaggaaaatgtacaatgttgttgtctcttacgtgtagcagaggttgtttgtgagcatttgcaactgatcagcggtgaaaccgttctcatcgagaagtacatggtaatgtgccggcctgcttgttccctattaccattcaaacattcaaaggaagttgtaattctgctgagacaaaacaggtcataaattggtctagattctggaagcaatacctgaataccagcatggctgttcaaatagcagtcgtattcactcgggtgacagatttta

SEQ ID NO: 1553 - DNA, 1525 bp, Arabidopsis thaliana
gaatgttttgatctttgatttgggaggtgtacttttgatgtgtctttgcttacgattgaggaaggtatctttgaagtcaaggcaactgctggtgacacgcatcttggtggtgaggacttcgacaacaggatggttaatcattttgttcaggagtttaagaggaagaacaagaaggatattactgggaacccgagagctttgaggaggcttaggacagcttgtgagcgggcgaagagaactctttcttcgactgctcagacgactatagagattgactctctttttgagggtattgatttctacactaccatcactcgtgctaggttcgaggagctcaacatggatttgtttaggaagtgtatggagccagtggagaagtgtttgagggatgctaagatggacaagagcagtgttcatgatgttgttcttgttggtggctctacaaggattcccaaagtgcagcagcttttgcaagacttcttcaatgggaaagagctctgtaaaagcattaacccggacgaggctgttgcttacggagcagctgtgcaagctgcaatcttgagcggtgaagggaatgagaaggtccaggacttgttacttcttgatgtcactcctctgtccttgggtttggaaactgccggtggtgttatgactgttttgattccgaggaacaccacaattccgaccaagaaagagcagatattctctacctattcagacaaccagcccggtgtactgatccaggtctacgaaggagagagggcacgaacaaaggacaacaaccttttgggaaagttcgagctcagtggtataccacctgctccacgaggtgtaccgcagattactgtctgtttcgacatcgacgccaatggtatcctgaatgtgtcggctgaggacaagacgactggtcagaagaacaagatcacaatcacaaacgacaagggaaggttatcaaaggaagagatcgagaagatggtacaagaggcagagaagtacaaggctgaggatgaagaacacaagaagaaggtggatgcaaagaacgctctcgagaactatgcatacaacatgaggaacacgatcaaggacgagaagatcgcatctaagcttgacgcagctgacaagaagaagattgaggatgcaatcgaccaagctattgaatggttagatgggaatcaactggctgaggcagatgagttcgaggataagatgaaggagctcgagtctctttgcaaccctattattgcaagaatgtaccaaggagctgggcctgatatgggtggtgcaggaggaatggatgacgacacacctgctggtggtagcggcggtgctggcccaaagattgaagaagttgattaagccttttggcttttgtttactctgtttgcttgagattctagttggtttcttgttcttagttttatctttctatgtcactctgaaactggtgtgtgatcattttgatgctttaagaatttagctttaccgtttttaaaactcgctctgacctatgaaagacgactgggca

SEQ ID NO: 1554 - DNA, 516 bp, Arabidopsis thaliana
tgaaagagtccataggagggttttagatggtacttatgtatacaattcctctttcaatctgaacttgatcttttattagctcaaagaagagaaccttgactctttaataatttgtttgtagttaatcaaagatgggaaatctttcttgccatagattttcttactacctatgccttatgtctgtgtggaaactgttagtgagactgctcaagaacttggtcatattatctatatagacttccatgaggccactactaatcaaatagcctacatctgagtaagagttaggtttgaaataactgatcgcctaaggttctttcaaaggattaggtttgactctagggagaccgttgtatttcgttttcagtatgaaaagttaagaagaatatgcagtcactgtcttcgttttacgcatcagaggaatcattgttcctattctttaccattacctaacccaagacatgaagacagagttcagattttggcttgagagggtaagaagggctttacatgatg

SEQ ID NO: 1555 - DNA, 1386 bp, Arabidopsis thaliana
gttcttggttgtcattgataacttggagagtgaaaaagactggtgggattcgaagcttgtgatggatcttcttcctcggtttggaggcgggactcatattttgatatctacacgtctctctcaagttatgaacatggagccgttgaaactctcttacctctctggtgctgaagctatgtcgttgatgcaggggaatgttaaagattatccggtttcggaaatggatgcattgagaactattgaagataaactcggacggttaacgttgggattagcagtcgtaggagcaatattgtcagagcttcctataaacccgagccggcttttggatactataaatagaatgccgttaagagagatggtgtgtagtggtcgagaggggaatctgttgagaagaaatgcgtttctgttgcagctgtttgaagtttgtttttcgatctttgatcacgcggatggacctagaagtttggctacgagaatggttgttgctagtgggtggttagctcctgcaccagttccagcttctttattagctttggctgctcataaactccctgagaaacacagaggtccgaagcggctatggagaagactaaggcgcgctataacctgcggttttacgtcttcaaactccaaacgatcaggagctgaagctgcttcaatgctacttagattcaacattgctcgaaccagcagcatcaagctagggtttatacagatccacgagcttgtgaaactctatgcgagaaatcgagtactggtcaatgaaaacgctcccgcaatggttcaggcggtgataagccgcggctcgactgttgaaaccgcagagcagatctgggcggtttgtttcttgctgtttggttttagcaacgaatctccgactattcagctgaagataacagagctgctgattcttgtgaaacaagtaatcttgcctcttgcaatcagaacgttcatatcattttcgcgatgcacagcctcagtggagctactatgggtctgcacaaacgcacttgaagcagctgaccaaacgctagtgacaccagtagagaaatggctagacaagtcgctttgctggagaccagttcagacaagtgcacaactaaaccctattctatgggaagaacttgctctagctcgagccaccgtgctagagactcgagctaagctgatgttacgaggcgggcaatttggtttggctgatgacttgatcagaaaagcaatcttcataagaacttcgatctcaggagaggatcatcctgggactgtgtcggctcgagagacattgagtaagttaacgaggcttttatccaatgttcatcagattcataacacttcaccgtaatagagagaagcttttagggctttcttgttgtaaaagttata

SEQ ID NO: 1556 - DNA, 428 bp, Arabidopsis thaliana
gttttacgcatcagaggaatcattgttcctattctttaccattacctaacccaagacatgaagacagagttcagattttggctgagatggtaagaagggctttacatgatgaattatgtaggtctgatatgaactctcatcccaactatcagatgattcgtttccaccacaaatctatacaacctccaagagttcccactccgcgtctaaatcatgcagaacttgcagctgcaagacctgagctgtttccatcaacaacaataacaaattctcagaagttggtggtccaacgtcctcaggtgggaattcattcacaacaacgaacggcagattctcaggtatcaccattaactgattacgagagtccatcaaggttctcaagaccagtggagactggagaatcctcgagcagagtcgaagtaagagaa

SEQ ID NO: 1557 - DNA, 888 bp, Arabidopsis thaliana
cgtccagctgcccgagctggactgtcactcgacctgagtaaccgtcactccttccagctgagcttgacctttgggcgtgctgacccaactgattctttatgatcctagcttagcctgcatgatttcccctttgtccgagcttatggccagctccttctcacttgtccgagactccaccttcttctctcggaccaagtcctagccaacgatcctattgaggatcgcgggcgttacaagtctcccccccttgaattggattcgtcctcgaatccgcatcaagttgatctttacccatctccttgaaccacttcggaaaattggccttcatcttattctcggtttcccaagtgtattcttcacggcctccacaattccacaagacttttaacaaatcccttgattttccccgagtccctttcgtcattcggtccatgattcgtaccggccatgcttccaccgtcatgttctcctttaacccgggaggtatatcttccacgctttcttcttgatcacttaaacacttccgtaattgtgacacatggaagacgttgtgaaacgcatttagttttggaggaaggtcaagtttgtatgccaccgcccgtactcgttcgatcaccttgtacgggccaacataccttgggcttaactttttccttaaggtgaatcgccctgcccctttgtaggtcatcgcctttaagtacaccaaatctcctacttggaattccaattcctttcgacgtttgttggcgtagcttttctgtcgatcttgggcttcctttaacttgatttttaagaacttcattctctccgtggtttcatccacgatcgtaggtccaaacaaccgacgttcgcccacgggcgtccaacacaacggtgttctacaagctc

SEQ ID NO: 1558 - DNA, 922 bp, Arabidopsis thaliana
ttgtacataggtccttaaaaaatactctgatgcctatcatgtatctaactaatgtaagttagtaatgacaaagtaataattgagtaaaaacacatatagtatgtatatatataatatatatatatatatatatatatatatatatatatatattacctgcaattgccttatgaatatttgtcggtagcaactctactaatacaaatgacagtaatcgttgcatgaatacgtggcaatcatgacttttcataccagaaaacttttggccttgctctacgcatcttgaaaattttgacacatatccatctgggaacttcacttcagcaacaacccattcgaacaacgccttctttgcttcattagacatgcggaattttgaaaccagtaatttcccatctcgtgtaacatgcaactcaggtctgctgcatatttccgcatttgtacgacccatacagtagggacaagataatcttccatgcgttgtccaccccgttaacatttcatatgccaggaagtcactaatcgtccacattagcactgcccgcatattgaaattttgtttgctcgagtaatcaaacgtatgaacaccttcataccacaacttcttgagttcatgaatcagcggttgcaagaagacatcaagcgctcgtttcggatgctttggcccaggcactaaaattcttaagaacagaaattcgctttgcatacacatatctggaggaagattgtatggggtcaagataacaggccaaagagaatattgtcgcccagacaaaccgaatggactaaatccatctgtgcataagccaagatacacattcctacactcgttagcaaagtcaggatatatcgtttgaaagtgtttcacgcctttgcatttgatgggtgcgttatttctccgtctgcagttgtatgttgagca

SEQ ID NO: 1559 - DNA, 1169 bp, Arabidopsis thaliana
tcttaatagaccttatgataatatatgttgatccgaaaagcctaggaagagaggacagggaaattagttttgtatgtttcgtgctaagatctgaatctacagtgaaatgcttcttgtttccagtcctccagagatgtgatttagtgctctatgtggctgtaatctaggtttgatgcagtaatgcattttgctggattgaaagcagttggtgagagcgtggcgaaaccacttctgtattataacaataacttgattgcgactattacacttttggaagtaatggctgcacacggatgtaaaaaggtaaaatccccttttggtctgtattgcagatttttggtattccttatgtatgtgagtatgtgacagtgaaacatgatttaactttctctcattgatctcaatcagcttgtattttcttcgtccgctactgtgtatggctggccaaaggaggttccttgtacagaagagtctcccctgtctggaatgagtccttatggacggacaaaggtactcagtcgttttcgatagcaaagtggaagcttttattgtagatttgattggtatttatactggaatgtttctcatttcgtagctgttcatagaggacatttgccagtgatgtacaacgtggtgatcctgaatggagaatcataatgctgaggtactttaaccctgtgggagctcaccctagcggtcgcattggtgaggatccttgtgggactccaaataatctcatgccttatgtccagcaagtcgttgttgggaggctacctaacctaaaaatttatggaactgactataccactaaagatggcactggtgtaagaatttcacatccttataccacgattcgtaattaaaactgtcctttaaatccctgcatcactctcacacagacctgcttttaatcgctcttccacatgaatcatgtaaatcttgaaatttggtccatgggttggaattatccaaggaattgtttgctccaaatcctagatagaattgattcatcactagaactcttaagtatcatgatcatttgatagattcacttttcttgcttcaatattaagtaataacatgaggatcaatttaattcctcaatagtcaacttatcttgaccctgatctttgtgatttactatcttgcttttaccttggtgtgatgag

SEQ ID NO: 1560 - DNA, 1263 bp, Arabidopsis thaliana
cctgtgatcagaagtcactaagtcaagccaagcaataacaggttgtggtgtgttctagcagttctaagtgaacatgcagaaaacataaattcaagcagaaacagtaaaacactcgaccaacacagctctttgcagagcactgggtgaggtcgagtgacaagtcaagtaacagacagaaaataaaacagatactcgactgcacagtctgttgccagacaactgggtggtcgagtatgtggacgagtaacaagaaagaattgcagaaactaaacaacatatgacaagatgcagtaaacaacagtagagtaaacaaagaattcaatcagataaagaatttccggggatggggtaattgagtagtttcgtttcctcagtttacaggtgattgacatgctcaataaattatccctagacaacaagttcattaaccaaatctaagtgccactgcaacagagaccctcaagttaacctagtcccagactcaattaccattgacgagagctaacctaacaggcattacgaatcaacaagttaaagccaaaacactccctccaaccaataccttggtacagggtcacgaatctctggaattaatggttcagacatttcatcgaacacgttttgggcgcggaaatgtctgggctcaaattccagttgatcagaaagcaataggcattaagaacaactaatccagaagggatctatcaatcaatactcaaccacctagcatactgagaattctacactactctaacccatcctcagaaacctattcactacttagacatcatagcagaaagcataaacgttgaacaggttgaaaacatgataacaatagtgtaacagcaggatgataacagaatgaacaacagtaaacgaaatgaagaacagaaactgaatactgaatactgaatagataaagagaaatccggattacaaaaggtctagaacacaaggtctgcggaataaaactagacaaaaacttgtctgcaaaaatgtgaagtacatgctacttatagccaaatattccgaaaccctaatactcaaaacgacgaagtattgggacggattaaaaactgtactcgacccatgtggtcgagtgagaggtcgagtgaatagctggagtcttcttttcttccttgtgctcgagtgtctggttaagtgcggaatgaagaaggctttgaagcttgtcatcgagtatgcagtcgagtggtggtgatggtgatactcgacttccaggtagagtgatgaggtcgtgtactg

SEQ ID NO: 1561 - DNA, 923 bp, Arabidopsis thaliana
tgattactggtatgaaagtagctacggcaagcccctcggtatctcatctgttatttgcagatgatagtttattcttttccaaagctagcaaagagcagtgtggagtaatcttggaaattttaaagcattatgaaacggtttcaggacaacaaataaattttacaaagtcttcgatacagtttggtcataaggtcgatgattcacttaaggcagaaataaaagcaacattgggaatcactaatcttggtggtatgggctcctatcttggtttaccagaaagtctaggtggatctaaaacaaaaatcttctcttttgttagagatagattacaaaataggataaatggatggtcagctaagtttttatcgaaaggaggaaaagaggtgatgattaaatcggtagctacggcattaccaacttatgttatgtcttgctatagactaccgaaaacaatcacatcgaagctcacgatttatgttatgtcttgctgaggtcttctagagtgagtaaacaaactggatcaagaggagaatattcaatcttgagtgaaaaggcaagagatcctccgattaaggaaagattcttctctcttggttttggatgtgtgaacagaatgtgtgtcatctctgcagctcctaaatgtcgtgtagtcttcataagggtgaatataaacagcaggaagtcttcaagtacatcatgtggttctttggtaaggttaagtttgtcaactagttcgtcagcgggttcttcagaaagtccttcaggaagtctgtcagaaagtccttcagccggttcatcagcaagtctatcaggtggtctgtcagtgagtccatcagctacaatgtcagctcccattcttatatcatcctccaatggttaagaagcatttttagatcttagctatatttataatctaaatttta

SEQ ID NO: 1562 - DNA, 702 bp, Arabidopsis thaliana
  unsure (1)..(702): unsure at all n locations
aaaatcgaagatcgatgagaccttgatatttcagtttgtggtgtcagatgtgtgtgtgtgtgtgtttgcgttgtgtgtttatgggtgttttgtttagaaaactatgcacacataagtacattttcttgaaacaatgattctgattttactgaaccattgtcaagaaaggtggttccgtatggccattgcctcctctgtttgcagggctttgaaacgcaatctcgaaagccgcggacttctcatcctcgtctagttcttcctcatccatttcctgatcttcctcttcctccatgttattataattgtgagactcttcaatcttttcatactcacctatcattgattcttgttgttgtagttgctgttgttgttgaatcagctctctcatcacaaggtcttctggcttcaattccaacaaatcatatttcagttatcaaagaacattaaaccaatcacattttgacaaggaaaagcaaagtttgtaccttttctgttccttgtggactttcctctataggctcttcttcctcagttgaagctgacccatgagtttgttgaacattaacaagtccttcttgtggcggtttcatcgcagtgacaggactctgtttttggtcttgaggtagaccagaagtgctagaaccacngcnactaccgagtacatgttcagaatctggttgttctacacatgatggggatgga

SEQ ID NO: 1563 - DNA, 1553 bp, Arabidopsis thaliana
cttgattcgatttctgaatatatctctgtaattttttttctggttttttctagggttttagtaattttccgatggcttcaagctcagagaaaacacctcttattccttcaggtatatatgttaatctcgattttagttttagaatcgatttggttgttgtttcttcgagtaatatagagaaattgttttcaacagatgagaaaaacgataccaaggaagagagtaagagtactactaaaccagaatcaggctcaggagctccaccttcaccttcaccgactgatcctgggcttgatttcaatgcttttgatttctccggcatggctgggatcctcaatgtaagttctcttttgtgggtgtatgatcattgaatagtcaaaggttggattttttcttgtgtttgattggtttgtttattcaggatccaagtatcaaggaattggctgagcaaatagctaaagatccttcatttaaccagttagctgagcagcttcagagatctgtgccaaccggatctcatgaaggaggtctacctaactttgatccacaacagtatatgcagacaatgcagcaggttatggagaatcctgagtttagaacaatggctgagcgtcttggtaacgctttggtgcaggtacctttaatacaagctctttcggatcttcttgttattattagttagtcaatacttgaggtgtgatcatgacattgaatctctgtttggtgtttaggatccacaaatgtctccctttttggaggctcttggtaaccctgcagcatcagagcagtttgcagagcgtatggcgcaaatgaaagaagatcctgaattgaaacctatactagctgagattgatgctggtggtccttctgctatgatgaagtaagcatgccattatttgctataaattattaggtttacttgtgttcatggctaatagttgattactggtgttaggtactggaatgataaagatgtgttggcaaagctgggtgaagcaatgggtatagctgttggagcagaccagactgttgcagctgaacctgaagaggccgaagaaggggaagaggaagagtctattgttcaccagaccgctagtcttggtgatgtcgaggtaaactgattcatacactgttagtctctcgtgtttctgacggtctatattttatacttaagtcggaatcattgatcgaggttagctcataaactctctgtgcattgatttcctgaaccaaccagggtttgaaagctgccttggcatctaggtgggaacaaagatgaagaagactctgaaggaaggactgctttgcattttgcatgtggatacggcgaggtatgtcaacgtctcaacaagccttaacaaaaaaaactgtcgaaatgtcactatcacagaatcatggaaggcagtatatactaccaatatttactagcatcatgcacttgatggataagcagcttcggtttcacttagtagattatacacaattatctgtagcattctttacaaaggaaattgacagttgccattattacatctgcaattagaagttgttat

SEQ ID NO: 1564 - DNA, 693 bp, Arabidopsis thaliana
cttgacaaaattagcccacttcaattttttataaacgtgctcaaacgggttttttcttatttttactgtattttttccgttaagaaaactgtttgcctgtcatttgagtagtcatttggtcgttagaaacgttacaaattcaatttgttttcactcctaacgtagtcgtttctgtttccttaattaatctggcaaacttcaatataaattaaaaatataaacatgtctagtgaaaattgaatgaattacaaattaagtactcaaaaaaatttatccacaactcaaaccaatcaagaatcataataataacaattattataagaatttgaaattattaccaaacatttttgtttggaccagtttaagtaaagaataaaccctggatacatatcatatatacccttttattatgacgagcttacaacagtttctgtagatattgtggaaacataacttttataagagatatatgggaattatggaagagattattactagcaagtaactaaagtgaagaccaagcgttggcttcgacccagttgaatgcaattggactcaagaaggcgtctggaatcccgaatgaagccacgagtgcaagtgcgtgaggtctaagctctccacagagctttgaaacttctttcctcacatctccaacattatcccttgagaggtgccatatcttagcagcgatgg

SEQ ID NO: 1565 - DNA, 889 bp, Arabidopsis thaliana
agagagagagagagagagtcatatgatccgtttcttctttaaagacacagaaagagagagagagcgagagtacggatacatttcagaaaacaagaagcaagaagaagaagaagaaaggaagaggaaaatccgggctgtacccgaatacccatctctctgaactcgggttccaaagttgttgtctttcttttgccccttcttggatttggcgttcaaagaaacaaacaaacagcaaagcaacaacaagcactttggtctgaaacgaggttccttgttcctgcataggaatataggataggaagagtgagaatcccttaacctcctcctctgtttataagaagaagtggtctcacattgacctcttctaaattcgtcaaccatcctcttgggtcttcttcggttcaggggaggcttatattgactttttttgcaaaaagattgaattgtgaatcagagatctatccatctctgtatgaagctgaagaacaatgggtgatggtaacctcaagaaaagcaaggttttgttttctctatctctctcaattgattatgatgttatctcctaagatgatctctatctaaatctccttaagttgtttctgctgcagctgtcatggcccaaaacgttggtcaagaaatggctcaacatcaagagcaaatcagaagattttcacgcagacgacttggacagaggtaagaaagaaaaaaactcaagacatttatatttttaggcttagctttaattataagtttgttaaatctctagtaagtactaatagggatgtccatgtagggaatgtgagaagagaacagcttttaacgaacttctctttatgttgttgcaggtgaaggtggtggagattggaggacaatgtcattgaaagagagg

SEQ ID NO: 1566 - DNA, 1117 bp, Arabidopsis thaliana
ctttcaacttgacattgatttcatctggtttatctggccctttggctctgagtccccgctttcaaacctcacctccagcttgttcttaattgtttgcttgagggaagcaaagactaagttcgggggagttgataagtgtgtactttgcatgttttgagcatccatttgtcatcattttggcatcatatcatcactgttttataccatttcacatcatttgtcatcactttgcatgtttaggatagttttgcatgcatgttgcatatttgtgttgtttttaggtgatttggagctgtcgacgagctaactggaagaagcggacctgatcatgacaaaccactcgcctagaggtcgagtaggagcttcaagatctgaagagaccactcgacccccaggtcgagtagaagacaccaccactcgatcacatcactcgacccccttggtcgagtgacttcatctccatcttctgaccaccactcgatcacatcactcgaccacgaggtcgagtgtcttcacctccattaccagaccactactcgaccacatcactcaaccttgaagtggagtattaccatcaccaccactcgactacatactcgattgcaagcttcagagtcttcttcattctgcactcaactagacactcgagcacaaggaagaaaagaagactccagctattcactcgacctcgcactcgacctcccactcgaccacatgggtcgagtacagttcttaatccgtcctgatacttcgtcgttttgagtattagggtttcgaaatatttggctataagtagcatgtacttcacatttgcgcagacaagaagtttttatctagttttattccgcagaccttgtgttctagaccttttgtaatccggatttctctttatctattcagtatttagtattcagcttttgttcttgattttcgtttactgttgttcattcctatatcatcctgctgttacactactgttatcatgtcttcaacctgttcaacatttatgctttttgttatgatgtttgagtagtgaataggtttccgaggatgggttagagtagtgtagaattcatagtatgctaggtgattgagtattgattgatagatcccttct

SEQ ID NO: 1567 - DNA, 570 bp, Arabidopsis thaliana
caatcaagtaatagtgaagagaccagagcctagtgacttactagagagtaccaggaggttgattagggtctaatctaggcaaccctgcacgaccagggctagcaagcaactcttctatagtcaggtcattgagccgagcagctagtggagtagtgtgattggcagaaccgcgaggagattgattggcggagattgattgacaggcggaggagaagcaccatctgcttgattgttggaattgattggggtttggagattaccctgagtggctgaaccgtttccttcactaggagaacgacgttgattttgttgctgagaccaaaaccgggaataatcaaatgacatcttgcaaaaaaaaagagaacattagtaaaggtaattcgaaatacaacaaaaatcaacgaaacagaaaaccctaaacagatctacaatgaaaatcaaacgaaaacgacaaaccctaaaaatatctacaatgaaaatcaaccggatacaagaaacccttattagatctacaaagtagaactcgaataagaataggcgaagaagaaagaaattagggtttggatgaga

SEQ ID NO: 1568 - DNA, 909 bp, Arabidopsis thaliana columbia
ttaactcttacactaaataatcattcaattcgggactccgtgacaaagccgtctccgccgcaatagtaatatccccagaatagttcggaggaggttaggagtcaattggggtaggcaatttcaagaccagctaaataccgaacaagatcttcgggaagagggaatgtcagcccgcaacctttgaaattgacttcgtagacacaaaagaaaccgggacggtgatcctctggggactcgatgggttccggcatctgcgaatccgtcataatttcagacagaattcgacaaagttccctcaattggtcgagggattgaagaatacatttagattggtagtgcggaccggctatgtcgttcagtcgggtgcaaaagtcgttactagaaccaccctcgtcgaaggatggagactcgggtctttcatggtcaggattcattgtaaaaatggatagtccgttggtttggggggagaaaattacagagaggaagtggaagagaactttgctctaaggaaagataaagcgtgaaaaataataaggagggagtaaaatgaatttaccttacgcaagctagtgatgatggcagaaccacctcgggagtcgtgggggaagtggaagagttttccccgttttaatagtaaataattgagatgtagtcataattgtgacatatgtcatgtgagtaattatggataatttcggaatcaaaggagtgacatgatattggcgggaaatcaaaaaatcatttggcgcaatctttgcctattgaagcattaaagtcttcaaattagaatatcacttcgaaagaattggggggctaattgttggtgtcggatcccgcaccggaagatcaggaccaaccaaagattgctacgtggccagggaaggctcaaagacgaatggggccatgggc

SEQ ID NO: 1569 - DNA, 971 bp, Arabidopsis thaliana
cattacttagacaacatgctaaaaaacataatcataggtaaataagtatattgcataagtaaagagataaagagtagagaaacaaggtgatagacgaaatcaaatgcagaatctgaataaaaaccaaaaatctcgtattacaggttgtagaagcaaagcggcgcagcaaagtaaactaggtaaaatagaaataaaaactgaagtaaaaactcaatgtcgattagatgtccgaggacaaaaccctcaaacacctattttatacaaaacgaaataaaatgatagtagatagaccgggaaccctatcgtctggcccatagagtgataatgggccaagatgggcttcatgatcaaatgaagctccagaccgcttccaaacacttcttcttcccctcttctcttccttgagcacagcttgtctggttgagtgcggatttgagtagactatgaagatgtgatcaactgcttggtcgagtgatggcgctgggtgttgactgatatactcgaccagggggtcgagtaacattgtagagtgaatggtcgattggtggtgagtgatgatactcgacctgggggtcgagtaatgtggtagagtgaatggccgagtggtggtcaggtggtgtgacgtagtgttactcgaccacgtggtcgagtggtgtcatcgagtggccggggctgctgttactcgaccacggggtctagtagatgggaagaatggctccaatttcactcgaccaatgggtcgagtatggtactggatgtactcaacctgggggtcgagtatgtcttctggttccgacatggtttttcctatttgctcgccaacaactccaaatcacctgaaaacaactcaaaaatgcaatatgtatgcaaagctatcctaatcatgcaaagtatgcaagaatgatgaggaatttttaaaacaatgatgaatgatatgaaactagactcaaaacgatgatgtataaatatag

SEQ ID NO: 1570 - DNA, 1478 bp, Arabidopsis thaliana columbia
gtgtacagagacgactaagtcaagccagattataatgatggtgggtttctagtaacaatcctaggtcagaattcgaacaagtaaaaatgagaacttaagagccctactcgatcattgggtcaagtagaaccaacatgtgacaaaattaagaactaaaatgcaatcaacaggggatacaaataggggatacaaataacaggtaaataaaagtgcaatcaacagggaatacaaataaatctaatagaagttctaaggatggattcattgataagggcaactcttggattcatcaaatggctaataggcgaaaggtagatagatacccatgacgatagattcaaaaaccgggtcaatccactctcgtgacagagacccccataactctaccactttctaatctcaactctcgttgatgaaacatagcagagcagggtttaagaaacaatctaccaaagccagtaggcagacaagccaatctcttggtcgagtctacaaatctctagaattcgtaggtcagacatccacttgaacgtcttttggacgctggacgtctttgatcgaatctccacattagccagcgaaaaccgcataggggccaagcgaatccagaagggtataaacctaaacactaaccacctaactaaccaagagattaccctaatctaatccgtcctcaagaaccctaatcactactcaagcaacattctcaagaacacaaacccagaaattactaaaatcataccaaaatgtagatctaaacaagctaaacaactttacttaaacaatcaaatgcaaaaacgaaatagattaagagtaattaaagtttcaaaattcataaacacaaagaaaaactgaaagataaagcataaatcctttggacaaaccccaaatgatctatttatactaaaatgttggaaaccctagattcactagaagacaagagacttgaggcggtttgggcgaatactcgaccttggggatcgagtaaagagggtgctgcaaagtctgcgcctttgtgtctatgctccgagtgatcaattggtcgagtagatgcttcatcctctcctatctgtatgctcagatgtatggttgagtggggaatgaggaggatccgaagacgctttgatatctcaacaagtgttgtagagatggtcacccttggtcgagtaaatggatcgagtaatggatcgagtaggagggtcgagtagttgaatttgctgcttcatctgaggttgccttgattgagtaggagggtcgagtaaactgcagcctcctttgtagcatcctggatcgagtagagaggtcgagtaggatgatgcctcttctgtagctgcttggatcgagtgaatggatcgagtagagcccttttaagctccttttgcacctgaaaacacaccaaaacatacaatgcgaatgcaagatgatcctagatgcctaagtatgcaaaacaagctaaaatggtgcacaatgatatgata

SEQ ID NO: 1571 - DNA, 1058 bp, Arabidopsis thaliana
gctctcttcgcacctactcttggggcggtcccgctgggagaaacgcgtccgatcctccgctcgtgtccgcacccgcaacggcgtctccgttctcgtcaccggggccgccggtttcgtcgggactcacgtctctgccgctcttaaacgacgcggcgacggcgttctaggcctcgacaacttcaacgattactacgacacctctctcaagagatctcgacaagccctcctcgagagaagcggagtgttcatcgttgaaggagacatcaacgatctgtctctcctcaagaagctcttcgaggtcgtccctttcactcacgtcatgcatcttgccgctcaagctggtgtcagatacgccatggagaaccccggctcctacgttcacagcaacatcgctggtttcgttaacctcctcgaggtctgtaaatccgctaatcctcagccggcgatcgtgtgggcatcgtctagctccgtctacggtttaaacaccaaagtccccttctctgagaaagacagaacagatcagcctgcgagtctctacgctgcgaccaagaaagctggagaagagattgcccacacttacaaccacatctacgggctctctctcaccggcttgaggtttttcacggtgtacgggccgtggggaagacctgacatggcttacttcttcttcaccagagacatcctcaaagggaaagctatttcgatcttcgaaggagccaatcacggaacagtggctagggatttcacatacatcgatgacatagtgaaaggatgtttgggggctctggacacggcggagaagagcacagggagtggtggcaagaagcggggacggctcagctaagggtattcaacctggggaacacatctccggtgccggtgacggatcttgtgagtatattggagagattgttgaaagtgaaagccaagaggaacatgatgaagctgccgaggaatggtgatgtgccctcacacatgctaatatcagttcggcacagagagagtttgggtacaaccaagcacggatttgcagactggtctaaagaagtttgtgagat

SEQ ID NO: 1572 - DNA, 1166 bp, Arabidopsis thaliana
ttctgggcttgacaacttcaacgattactacgatccatcgctcaagagagcaaggcaagcccttttggagagaagcggagtgtttgttgttgaaggagacatcaatgacgctgctctcttgaagaagctctttgaagttgttccctttacccacgttatgcatttggctgctcaagctggtgtcaggtacgccatggaaaatcctagctcttatgttcacagtaacatcgctggcttcgtcaatctccttgaggtttgcaaatctgccaatccccaacccgccattgtctgggcttcctctagctctgtctacgggctcaacactaaggtccccttctccgagaaagacagaactgaccaaccagctagtctctatgctgctactaagaaggctggtgaagagattgctcacacttacaatcacatctatggactctctcttactggcttgaggtttttcaccgtctatggtccttggggaaggcctgacatggcctatttcttcttcaccagagacattctcaaagggaaagccatttcaatctttgagggggtcaaccatggaaccgtggctagggacttcacttacattgatgacattgtcaaggggtgtttaggggctttggacacggctgagaagagcactggtagtggtggtaagaagcgcggtgcggctcagttacgggttttcaatctcggcaacacttcgcccgttccagtgactgatcttgtcaccattcttgagagacttctcaaagtcaaggccaagaggaacattatgaagttgccgaggaacggggatgtgcagttcactcatgctaatatcagttctgcgcagagagagctcggctacaaacccaccaccgatcttcagacgggtctcaagaagtttgcgagatggtatttgggttactacaatggcggaaagaaagctgcaagctgatgattgactatctgcaatgagtttgtagcctctctttttttttttgattctgagattcttgtgattgtttcactctttaacacttgctctttttgttggttctttggccggctcataccctgtctttgccgtatatgtttttactcaaaaccatttatactccataagaaccattatttcgggattacattctttgtcactcttgtctctcagttcatccaaa

SEQ ID NO: 1573 - DNA, 1109 bp, Arabidopsis thaliana
gtacatgttgcaatgacaacctcaataatttgagtgagtcttttaataggactattaggcaggcaaggagaaagccaatattggatatgctggaggatatccggaggcaatgcatggtcagaagtgcaaagagattcctaattgctgaaaaattgcagacaaggttcacaaagagagctcatgaagagattgaaaaaatgattgttgggcttagacagtgcgagagatacatggccagagaaaacttgcatgagatatatgtgaataatgttagctattttgttgatatggagcagaaaacttgtgattgcaggaagtgtcagatggttgggatcccttgtattcatgcgacttgtgtgataatcggaaaaaaagaaaaggtggaagactacgtgagtgactattacacaaaggtaaggtggcgagaaacttacttgaaaggtataaggcctgtccaagggatgcctttatggtgtaggacgaataggttgcctgtattaccaccaccatggagaagaggcaatgctgggaggccaagtaactatgctaggaggaaaggtagaaatgaagctgcagctccttcaaatccaaacaagatgtctcgggaaaagagaatcatgacatgctctaactgccatcaagaagggcacaacaagcaaaggtgcaacattccaactgtcttgaatccaacaaagagaccaagaggtcgtcctaggaaaaatcaggtttgtgactctcatttatgactctcctttttaacaatccaacattcatttatgactctcctttttaacaatccaacatgtgtttctgactctcttttttaatttaagaaccagaagtgtttggatctcaatcttatcttggatcacaagagcaatcacaatcttatcttggatcacaagagcaaccacaatctcatcaaggatcacaggctgatcttgaatcacaaggaccaagtgctgcaggtcgtggtcttggatcacaaggaccaagtgctgcaggtcgtggtcttggatcacaaggaccaagtgctgcaggtcgtggtcttggatcacaaggaccaagtgctgcaggtcgtggtcttggatccaagaacaagtgctgca

SEQ ID NO: 1574 - DNA, 928 bp, Arabidopsis thaliana columbia
tcccctttggaagataaaagatcttttgttctgaccacggttactaagatgctgtgtgactgagctttaatgttatgggttcatttgccggaaagtgtgaaatagttgaagaaaaagaagaccgtcaaaactcgattggttactcagcgaaatcaaccactattccacattctagatcaagcattgtcgacgacaaggatctggagcgaccggtactgaaattaggttacagaggttcactagaagatgacataaaccaacttttcgagtctataagcattcgaacatcaggaatgattccttcttaccaagttggtgcaactagtagcagtagaaacaacactcctttacaacggaatgctttgaagagtcccgcgaatcccgcaggacctcgatcgcctagcaagagaaatgcggaaccagcgacgttaaaacaagctttgagagatttatgcgtcactaaggcatcggaaaccgcagctaccaaacggattcctaagagtactagtactggaggctcagtttatggttcggttttggttgaaccgggaagtggagctagcgaagaagggaaagcggttcttgtcgagttactcggcgaggatcaaagcagttcatcggatagtatatcgcagcagcttcgtcttctgaagatacattcttctagccaaaactctcagacatcaaagcggtattgcgatgagatgacaatacttaaaaaacacaagaacctgtctcttgacgaccaagaaatgagtatcgagaacaagaacttcggttcatcatcgcccggatcaggaaacaacaagaccgtggttggactgaaatcagttagaaaagtgaggttgttgtatgcaatacaccgagttcaccatagttaacgggaagagagtggctaagttaaccagaaccatttcaagaggaggag

SEQ ID NO: 1575 - DNA, 1390 bp, Arabidopsis thaliana columbia
accctcttactcgatcaaggcaccctcaaatgaagtagttgattgatctactcgcccctcctactcgatcctctactcgacccatttactcgaccaagggtgaccaactctacaagacttgttgagctatcgaagcgtcttcggatcctcctcattccccactcaaccagacatctgagcatacggataggagaggaagaagcatctactcgaccaattgatcactttgagcataaacgcaaaggcgcagactttgcagcaccctctttactcgatccccaagatcgagcatccgcccaaactgcctcaagtctcttgtcttctagtgaatatagggtttcaacattttataataaatagatcactttggggtttaccaaaggatctagcttttatctttcagtttttctttgtgtgtttagaatcttaaaaccttaattactcttaatctatttcgttttttcatttagttctttgagtaaagttgtttatcttgtttagatctacattttgatatgatttcagtaatttctgggtttgtgttcttagttatgttgcttgagtagtgattagggttcttgaggatggattagattagggtaatctctaggttagtcaggtggttaagattaggttagatcccttctggattcgttggcccctatgcggttttcgctggctaatgtgggaattcgaccataggtatccagcgtccaaaagacgttcaaatggatgcatgatctacgaattccagagatttgtagattctattcgaagagattggatgtttagactgcttaatgactttggtagattgttgcttaaaccctgctctgctatgtttcatcaatgagagttaagattaggaagtggtagagttatgagggtctctgtcacgagagtggattgacccggtttttgaatctatcgtctagggtatgtgcctttcgcctattagccacctgatgaaccctagagttgcccttatcaatgaaaccatccatggaacttctattattctcagagttatttgtattcaccccttgattcactacaaaaatatggagcatttgtagcgcccgaaaaacgctatttaattatactatagcgttattagaagcgctctatcatcgtccgtcataatatgtcggagaatattgtagcgcttttttgttccgctatcattatttaatagcgattagtttctgatataaataactattatacatagcatatttaatttgctacatataattagacaatagcatttagttaattgcaatatttatatattaaggcatttttaattatgcaatatttcttcaattatttccagttcataaataaatttttaatccaaattcagaaagagattcatattatttagata

SEQ ID NO: 1576 - DNA, 491 bp, Arabidopsis thaliana
gctaggtatcccacatctatgagtttcttgtgggatattatgcccattgataagcatctgtcaactgttccagaaaccgaagttgtcagcagagaatcgaaactaggatctgtgctttgcctgacgatttgctcttgcagatcttgcctcacgtcccaacaaaagaggcagtcgccacttcaatcttgtccaaacaatggcgttatgtctggctgatgctgcctaaactcgagttcaaagacgaaggcagcgagagcgtggggtggtttattgaaaagtcattgcaactccataaggcaccgaaactagattgtttgattgtggaactcggtccacattgtcctgttgacgtagatgtcggaaagtgggttgagaacgtagttaatagagatgtgaaagagttagatttcaatctcctctggaccgcagaacccacaggatttcctaagtgcctttacacatgcaacacgctcgttgatttaagtctatcc

SEQ ID NO: 1577 - DNA, 879 bp, Arabidopsis thaliana
agggatatgaaagctatgaatgacaagctggacaagttactcctagtgcaacagaaacacgttcattttctgggggatgatgagacgttccaagttcaggatggggagactctatagtcagaagaactcagttatgtgcaaaaccaaggaggttacaaaaaaggtttcaacaacttcaagcagaaccatcccaatctgtcttacagaagtaacaatgttgcaaacccacatgaccaagtctacccttcacagcagcataatcaacgcaagccctttgttccatacaaccaaggtcaggggtatgttccaatagcagcagtatcagggcaactatcagcagcaactaccagccacctgggttcacacagcagcaacaacgaccaagctttaacaactccagattcggacttgaagaacatgttacaacagattctccaagggcaagcaacaggagcaatggatttgtccaaaaggatggcagaaattcacaacaaggttgactgcagttacaatgatatcaatatcaaggttgaagcactaacatctaagatcagatacatagaaggccaaactgggtcgaccgcagcacccaaatttacaggaccttccggaaaatcaatgtcaaattcaaaggagtacgctcatgctatcacacttagaagcggtaaagaattacccacaaaagagagtccgaaccagaacactgaggacagtctggatcaagatggggaggatttctgtcaaaatggaaattccgctgaaaaagcaatagaagagcctatactccaccaacctactcgaccactagctcctgcagcatctcctcttgttgaaaaaccagctgccgccaaaaccaaagaaaacgtcttcattccccac

SEQ ID NO: 1578 - DNA, 1407 bp, Arabidopsis thaliana
caacatcaatccttagaattagagtctgttgtgagggcaatattatacgtttataatctgacgagatgatcattacatgaaattgtatatgtcacggtaaaaggagttccaataggcacgaccgatgttattattgcaacatatatatcaacaagaggaatgacaacgaaacaatgaaacaactacttttcgtattcctttttgtcgctgtttatgtaaagcaagtgacaattgacataggtctataggagactttagactttaatcaaatttgccaaagagcaatacaacataaatagtcaagccgattatcgaaccagagtagcatgaatattagcccagtgaagacgaaaagagattcgaatcggaattacgtgaatgtgatttcgaatgactctgacaatacgttttgacttgtgtagtttattgtatattcagtttaactctgtcacccgccgtgttcaaccttgctggttcagagttccacaggtaagtttttcataattttctcacgctgcagtccacttgagtagtactctaacacaatgttacaggttggtatggttgccatcaacgatgggattctacttcgtaatcacatccacaggattctcaaagcatttccgtgaaaagccttactatcttgacctagttgatttgttaggatatgaaattcactgatccataaaaaaaaacataggggtacgtttagaagaatacataaagtatagggactgaagctgcaaatttatgttctcagtagatgttcgatctttggacagaattgaagaaaggagaaaccctagactgagtctggttacttgaaggggatcatgtgaatacgtcgactggtaaagaaagaaagattgctgctttttagatttagattcgagaatgtatggaagatctggtcttgacaggtttaagaagtcccaaacttcggaacccttctctgtatcagcaaatcctcctccggtggtacaacaacatctgtctccggaggcattgtcggggcaaaaaactcagattggagctggtcaatcaaactggcatccccctgattgggcgattgagcctcgtgccggtgtctactctctggaagttgtgaaagacggccagatccttgatcggattcatctagatagacgaaggcatatcttcgggagacaacatcagacttgtgattttgtccttgatcatcagtctgtttcccgccagcatgccgcagttgttcctcacaagaatggcaggtttgtcatcgctactcaattctctcatcacagctttggccactgttgacatgagtcttttttattttttgtagcatctttgtgattgacttgggatcagctcatggtacgtttgttgcaaatgagaggttgactaaagatactcctgtagagcttg

SEQ ID NO: 1579 - DNA, 860 bp, Arabidopsis thaliana columbia
atgaccatgtactccttatgattctagattgacgttatttcctggcaaattgtcttctcgttggtcaggtctctatataatccattcggttaggctatatgctgttcatgatttctttcctcagactttgaggtttgaggatgttgaccgtaatgtcaactttggagctgtttttgcacatcatttggtctttcttaagaccaagccctttacaggaacaaggaagaaaattgagaggattggtagtctcctcactcatatctttgagcactttcacattagtactaagggagagaaggttgtgaccaagagagtcactatggatgagacatatctgaagaatgctcattagctgaagggcagtttggtttggtgtttcaaagatcgtatagagaaccatatgattcagttaccctgtcctgcgcttacagagattacaggagagccacatgagcttggctttcaccctgatccttcacttctacacgccgcaccgagcactaggagacagagaggttcagcatcaggatctgcgcctacatagacagaagataagttcatcgaccctgcttggggacttcaatttgggtcctcttcttcagctctaccatatcatctgcctactcctcctcctatcctgatggagctagcggtctttcaccagtacgttgttgacagcttcaagagcgtttggaacgctatagctacactttctcgctgcggttgtgttgctcctactctgtcgacgtcatcgctctcccgcgacccagctccggctctaagcatgaggattagccatcctccatatctctgctttgtactctaacttttctgttcttttctttgagacgatttgttgt

SEQ ID NO: 1580 - DNA, 665 bp, Arabidopsis thaliana
tcaataataactaataaataatgtatagaaaatttaaaaattattttttttaaaacaatttttttcctctaaaaaattaaataataaggaatagagaaggaatatttttttatctaataaattccatataataattcaattatattgatagataggttgcaaaaaataagaaagaataaatatgagaataaatggtcatctctcgatctctcagctctgtgcaactctgaacacacccacacatatatactcagatacatacatacacaccacaaaaaccaattattttccaattttaagaaaagtttctgtgtctttttttttttttttggtgataattgaaacatatgaaacaatcgtcgtcatagaagcagcagagattcaccttctttctttatctttccctctcagaaacaggaaacaaaattcaaaaagaacaaaaaaaaaaaggtcaaaccaaaacgatggcgtttcatcacaatcatctctcacaagacctctccttcaatcatttcaccgaccaacaccaacctccacctccgcaaccgcctcctcctcctccgcaacagcaacaacatttccaagaagcaccggctcctaattggttaaacacagcgcttcttcgttcctcagataacaacaataacttcctcaacctccacaca

SEQ ID NO: 1581 - DNA, 587 bp, Arabidopsis thaliana
ctgacttaaattctctatgaagagaactagattaatacctatagttcctccaagttctatgacacaaacatcagctggacctgactgtccatccactggaatcctagctgcacgctcaatccatttttgaatagcatcagtaatatgaggaacaacctacaaaaaaagcccacaaagggctttcaataaatcttccatctctctctatttctcatgaatatcaacaaacacatggtctacgtttatcaagctttaagtacctgaacagtcttcccaagataatctcctctcctctctttctcaagcacatgctgttcacagacgtgtaagttaaaaaaaccaaaaataaaacattccaaacttttttcatgactttgacaaagacacaaaccttataaacttttccagtagttatgttgttttcactagtcagcttaatatccatgaacctctcatagttcccaagatccagatcaacctttttatcaacacacccaaccaaaaaaaaaaacattttttattttgcttgttggcctaattagtaacatttcctctcaaaagaaacagagcatttggtgaaaagtgtg

SEQ ID NO: 1582 - DNA, 610 bp, Arabidopsis thaliana
ccaccacccgaaaattgaatttcctaatcctaatgaagaggtaatacttgtgctctgagaaaatgatattgactgttgtttttggtgatatgaatacattattcgtcaaagtaggcaccttatttagtatttagactatcatttgcagcataaaaaacttttctttatctccatactcattttactcaagtgaggcaggacggtttggctaatgtatgtttctaatatgtgttgcagtcacgttttgacatcttgaagattcactcgaggaaaatgaatttgatgcgtggaatcgatctgaaaaagattgcagagaagatgaatggtgcttcaggtgctgagctgaaggtaaagtgttttctatttctctacttctgtcttgttctctctacattttgcctctctcttatgtttttggttaatacggtcaggctgtgtgcacggaggcgggaatgtttgctctgcgtgagaggagagtacacgtgacacaagaagactttgagatggcggtggcaaggtaatgaagaaagacacggagaagaacatgtctctgcgtacgtgtggaagtaggaactctcatggaaagacttctttactttactgtttgttg

SEQ ID NO: 1583 - DNA, 746 bp, Arabidopsis thaliana
gacacatttttcgagaagcacgtccaagtaaggaaggatttgcatattgaggaaaactttgaggagtctgatccacctttccctaaggatgctgttctgcaagttctccgagttatcagagttgttttagagaattgcacgaacaaacatttttacagttcttatgaggtaaataatctgtgtgccagaatccccctaactatcattcatatttgcactgtttcgttttgattggtgccacaatatagtgtcgttactgatttttatcaactcttattctttgttgatttctggttgttctgctagatatgttgcttgatatactgagatgtctacctgcataattctcacacttttttcttcataactgcagcagcatctttctctcctacttgcatctactgatgcagatgttgttgaagcctgtctgcagacgttagctgcctttttgaaaaggccaactggaaaatactccataagagatgcttctctgaatctaaaactattttcccttgcacaaggctgggggggaaaagaggaaggccttggcttgacgtcatgtgccacagaacacagttgtgatcagctttttctccagctagggtgtactcttctttttgagttttatgcttctgatgaatcaccaagtgagcttcctggcggtttacaagttattcatgtacctgatgtcagcatgcggtcagagtctgacctggaactcctgaacggggatcgcatgtcagacc

SEQ ID NO: 1584 - DNA, 777 bp, Arabidopsis thaliana
cccgctactacatcaacaagttcccaacctgcaaccgatatcataccagccgagacttcatctaccctctgcgccatatgctttgtcgtagaaggtttaaattttgcggcatgttcttgctcaagatgactcctaaacttttaaggataatagaacttctgtgaacaagatcgacacttccacaatttccatgttctgtgtatcctcgcagagtcaagaacttgctccaaatgcatctagtcccactctgccatataatctttcgacataagctgtaagttttgcaatgcttactttcatgaagttccttttactctcaacatccatactcgcccaatacgacctcaatcttttacccgcagcggtctccaggtcactccttatactgtctcgaatgttctttgactccctaagttttggttcagacattttttgcagtaacaccattgaatctgccgcttcgatcattgcctctgtcgcagccgtatccgagtcactccttacacttccttgaagttttgggatcattgactctgccactaggactacattctcaagagaacttgtagtacattcctcactcaagttcaaaccatcacgagtagcactgaaagatctaccttcagctgcaatgttcagagctttcttgtaaaatgatgctgagccaatcagtttacccaattctaacagtgcaattgcagagtaagctgtgtacaccacaatctatccgtgaagcattctacagaagccaacaagaatgggaatttcatgtcactg

SEQ ID NO: 1585 - DNA, 582 bp, Arabidopsis thaliana
caatattcttgtaaaagataaacgtacgtaattaaaaaaaaaaagtaagtttactaacaaagattttgtaacgttaaacctagtggccggaaaaaaagaacaatcgagttatactaagtttcaagatacctgccgccatcttcgcacccaaattggatgtctttgaagcccaagcttttagcgtacttaacactgttcacggccatctcgatcacttcttctttagtctttttcaacttatatttcatgtgaatttcactagtagatgtgaatagcattaccctcggcctcttcgcatacttcagtgcctcccaagttgcctcgatgtctctctttttgcatcgtgcaatgccgcatatcacaggaacgtaaccggtttcctcatccacctaaggaaaacagcaatatatagtagtttattttcgttcctgtcaattttggacaattactaaatatgtgtttgtaattttctgtaagcattcatgagcttccaagttaaaaaaaaatcatttattagtgagtagattgcccatattttttaaatgctagtatagattattacttcttatttctaatgtgaga

SEQ ID NO: 1586 - DNA, 1075 bp, Arabidopsis thaliana columbia
cataatttcagacaaaagttttaactcaataaaatgactatctaagttaaaaatgacacaactgactcataagaaaagaaaagatgaagttagtaactgactcccccagagttagataacactgtccccaaagttattaagctagaggaattgaaagagaaatagtcaaaagttaaaaagttagaaaacgtgagttgccacctgagagtggtgtcgatcgataccatgatggtgtcgatcgacactttggtcgttccgcattgctttgtgaattctgctcgttggtgtagagccttggttagtgttttcacatggatcctccagttagactgttaaatcactaaaagacatatcaatagtcccaacaaagcataagaaaataagtgcaacaagtttcaaaacaaataaccaagagtctgaaataaagcagaaccaaagtcagaaagtaaagccggaggtgggtgcgggagagcgacgacgacgacgactgggggcaacacaaccgcagcgagaaagtgtagctatggcgttctagacgctcttgaaactgtcgacgacgtactgctgaaagacctgtggctccatcgggatggggggaggagaaggcagctgatatggaagagcagatgaggaagatccaactctcggacccccagtagggtcaatgaactcttcctcggtctgtgtaggcgcagatcctaaagcagaacctctctgtcgcctggtgcgtggtgcggcatgcagaagggagggatcctgatgaaagcctatctcctcatgctctcctataatctctgtaagtgcaaggtgaggtaactgaatcatgtgctgacctgtatcatccctgaagcaccacagtaggttgcccttaagccagtgagagttcttcaggtaagtctcatccatagtgacacgcgtggtgttgacttcttcgccctcaaagctgatgcggaaatgctcgaatatgggagtgagaagactgccaactctatcagatttgtgtcctctacctgtgaagggattggtcttgagagaaaccaagtgatgagcgaacacagcactagagttgacatta

SEQ ID NO: 1587 - DNA, 418 bp, Arabidopsis thaliana
gaccgtgatcacccaatcatcgaggacgaagctgggttggcgaatctgctccgtcacatcaaagggaggaactgtcaggctcctggtgtgaagaacatggccgaggcggagctatggctgacatgatggcgaaagagggccaggtaataatcgataacgggctcttactaatacaatctctgtgccagcgagagacacgacactgtctttggcaggcgaatgcatgctacgaacaagctggatgctctggacttctgagccaggttccttcggcaagcgagctcgaggaacggaagacccttatccatgagctgacggcgagtgtgaagggaggtcaagagcgcgatgttgcgatccaggtacgcatctggtgacatcatccgaaatgtatgtctgttcatcgatgatgtgatgattt

SEQ ID NO: 1588 - DNA, 705 bp, Arabidopsis thaliana
tggctctctcaaattctgccatgagagtctgaagtcttgcctccttaactctttctgctccaacgtttttcgtttttatcgattcccaaacttccttcgcagtctcaagttctccgatttgaagggttagagactcaggtactgattggaagatgagggctctggcgatatcgttcttgtccacgtcttctgatcccggttcaacagtatcccaaactttgtgtaccttgagcaacaacctcatccgcatagtccatacgttatagtttgtggcgctgagtagaggacatgagatggaagctgagctcgtttcttttaacttgctgcctgtagtaaccagaactatatctcccatagtttgattttctaaaacaaaaagctttgttattgtttttagagttttgttcgataattcaatattgctctgataccaaatatcgaattatagaataagagaatggtgtatataaagactcactctttattaatctttaggaaacttactcaaaacctaaaactctcaccaaagctctcaatctctcaaactctcaaactctaaacttctcaataagactaccacaacttggcatctctatttatatgaaaactctagctattagataactcctaataacattagataactactaatattgtatttagatactcctaaatacaatctaatcctaatcacttaggatttgg

SEQ ID NO: 1589 - DNA, 829 bp, Arabidopsis thaliana columbia
cgttagccgaactacacaaccaactcttaagaaaagaaaaaatgaagttagtaactgactcaccagacttagataacactgtcccctgagctatcaagctagagaaatcaaaagaaaaatagtcaaaagtgaaaagttagagaaacgtaatttgccaccttgtttgtgaagcggtgtcgatcgacactctagtcgtttctattgtgctttgctaattcagctcggcattgcagagcttaggttagtattttcacatggatcctctagctgaactgttaaatcactaaaacacacatcaataggtccaaaaaagcataagatgataagtgcaacaagtttcgaatcaaacaaccaatcgtctcaaaggaaagaaaaactaagtcagagtacaaagtagagatagggaggatggctaatcctcatgcttagaaccaaaagtaggtgctggagagtgacgacagcgacgagtaggatcaacacaaccgcatcaagaaactgtagctattgtgttccaaatgctcttgaagatgtcaactacgtactgttgaaagttcgctggctccatcgggataagagcaggagtaagcagctgataaggtaaggctgaagaagaggacccaaattgaagacccctagaaggatcaacaaacgcatcctctatcggtgtaggcgcggatcatgtggttgtacctctctatttcctagtgcgtggtgcagcttgcagtagtgaaggttcaggatgaaagccaagctcctctggctctcatgtgatatttgtaagtgcacgacagggtaactgaatcatatggctccctgtgcaatctctgca

SEQ ID NO: 1590 - DNA, 1163 bp, Arabidopsis thaliana
ttattttgttttcggtgaaacagacacagcctgaagaggaagatgaagatgatggtgtgactgaattacctccgttaaagaggtacgtacgcagaaatggtgaacgagggttggcaatgactgtttataacaatgcaagtcctagctccagcagtcgcttgtcaatggagcccgaagaagtaccaccaatggttctattgccagctcatcctatggaaacgaaggtttctgaagccagtgcacttgttatcctcaatgatgaacccaatatcgatcataagcctgtgatttcaggtattgttacatgaactcaagataaaacttagtaatctttcttttattgctttttatgtggttgtgatgagatgttgaaacctttgcattttaacctgatctgtcttttgtgatgtttccttctgacacttcttttcattatttagatacaggaaactgttcagctcccatgcttgagatggggaaatcaaatatacatgtgcaagaatgggattgggaaaccaaagatattctcaatgatactactgccatggatgtgtctccttcttcagctattggggaatcaagtgagcataaggttgctgctgcttcagttgaattagcttcttcgacttctggtgaggcaaagatttgtctaagtttcgcgcctgcaactggagaaacaacgaatttgcatttgccttctatggaggatcttcggagagcaatggaggagaagtgcctcaagtcgtacaaaattgttcaccccgagttttcggtccttgggttcatgaaggacatgtgtagctgttacatagacttgggcaaagaattcaaccagccagttgcttgaaacagaaaccgtatgtgacatgagtaaggcgggtgatgaaagtggtgcagttggcatttcgatgccgttggtggttgttcctgaatgcgagatctcgggagatggctggaaagcaattagcaacatgaaggacattacggctggtgaagaaaacgttgagattccatgggtgaatgagatcaacgagaaggttccttcccgtttccgttacatgcctcacagctttgtgtttcaagatgctccagtgatattctcgctctcaagtttctctgatgagcaaagctgctccacttcttgtatcgaagactgcctggct

SEQ ID NO: 1591 - DNA, 1002 bp, Arabidopsis thaliana
ttagagaaagcacatgcacatgattagttagagccggtcgtatagttaagattttttttttgtgacatatatatgacaaaattatgtgtaaaagtgtaagaatcccatatatatcagaaatacaattctagcatatacaatatatgagttaatattatatagtcattactagttggttttgtgttgaaactcatgaatgctcccaaatggagcgagtaacggtcaaagttgacaacaacgaacattaattactatattgttgttttgcttaggtggatgaggaaacaggttacgtccctgtgatatgcgccatagctcgatgcaaacatagagacattgaggcgacttgggaggcgctgaagtacgcgaagaggccaaggatactcgtattcacatctactagtgacattcacatgaaatataagttgaaaaagactcaagaagaagtgattgagatggccgtgagtagtattaggtttgctaaaagcttgggcttcaatgacatccagtttgggtgcgaagatggcggcaggtccaaatctttaaacctttatatatctcaattgtttctctgcgtttttggtttagttttatttatgcttagtttgtattaccaaactatttttgttagtaacttatgtttgcgttgacatttgggtatatttttggcaagaataattcacaaacaaaaggcatgaatgattgtgagtttttttgtttttttttatatagtttttggtttctggattttagaatttggtttttggattttgcaaaaatagaaaatagataagtggggaaaaaatgttatgttaagaatttgttcaggaaaagtgaagaactcaaataagatggtttttagattgtcactaaaacattgttaagatctttcaaacactagatttctagatcataatagaaaaggcggttttagctgttactagatatgttatggattttgtgcgaattttacatatatgatcatgtcatatatatatatat

SEQ ID NO: 1592 - DNA, 1090 bp, Arabidopsis thaliana
cttatactaagttggcctaaaaggagagaaaggagaatagagatgttcttcatcttcattaggctaaggtgaggtcggtatttgcgaagcatgttatcattgtcttatgttatgcttcttgacgcatgatatgtagccttagatctgattgcataggataagattacgtgataatatgacgtgatgattattgatggatatgtatgataatgatgtttgactatgatatattatgtatgagaatgttaagtataagtatgtaaatatgatgattatgtatgtttgtataaaagactagggagaaacgagctatgggccgtggtctccctagtaatgtggacaatgatgggccgacgggttacatgctggtcaagaaaggctgacgagcccgatatgcatgggagtgtctgagccacgagggccaacctccactcatgaggttctagttgtcacgaggatgaatggacctaaagatatatatatacgtatatatgtgctattatgaataaaatgatcgttatgaatttgttattagaagttaaagcatgtaaggttgattgcttgtgtctaagtttatatgttatgaagatggttgtatagctttagaaattgttctatgttttagtgggcagagttgattcccctcactgagtattctttatttacccccttttccccttttgtctctgattagtaagcgtgaggagttgtgtacaatattttgttcgtgtgtgaagtttaaaaaaaaagtttttgacaagatcagatgaataacatgttgtcttagtctaaatggcggggcgggtgttacatggagtcttcttttcttccttgtgctcgagtctctagttgagtgcggaatggaaaagactcttaagctagcaatcgagtatgagtcgagtgatgaggattgtggtactcggcttggtggtagagtgatcgagtgatggtgatgtggtggaggtgatgatactcgaccacggtgatgagattgagtggttgtcttggtggtactcgaccatgtggtcgagtggtgatgtggagtgatgaggcatctactcgaccagggggcgagtggttgttgaaggag

SEQ ID NO: 1593 - DNA, 1110 bp, Arabidopsis thaliana
cacattagatgtcaagttgcagccaaattaactgtgtttgagcttaacagttacaaccaagaatacaacgtgattgatctcaactcggtaagttttctggtggatttgaaaatgaaaagttgttcatgcaaacgttttgatatagacaagatcccgtgtgtccatgctatggccgcagcaaggcacctcgcccgcaaggaagggagaaatgcgaatacaaccatctacggactctgctctgtgtattacttgatagatagttggtcattggcctattaccggacgttgtatgtagtcccacatgagtcggtttgggttcttcctgcccatattaaagagttagttgcctttccgccggaatacacaccaaaaggaccaggacgaaatcaagagaagcggtttccatcagctggtgaagcgcgaaagaggagaaaatcgcaacctagaataaacttggaggcttggctgcagcctgaggaagattaagtctgatgcagaaagggttcaaccagaacaacctggccaactgcagaaagggttcaaccaatacaactaagttcatttgtatttgcattatattatttgtaagtgtgatgtactatgttttatgttttcgtatttgtattgaattctttgcaagtttattgaattctttgcaagtttattgaattatttgcaagtttaatgtatttttttaagttcaactgagacaactgatatatgtatctgtattttaggattaataaaatgatagaataattctcaataaattcagctattatcaacatctaaacattgaataaatccaaaatatgatattacaacattgttatcaataaacttgatcataaactggtttcctaataaatcacctatgtatgacaaggaacatatagttcatgattgtccaatatacatacgttatgtatgacaacagatatttactaaatatgattctatcaaaacttattaacatccattaatatgttaaaacttatgggtccaactacaactatgagttggtttttcagatacaacttcagtgacacactatttagaatagttcaactgtttgtgatccggccaactgtacataatcatacaactatg

SEQ ID NO: 1594 - DNA, 1206 bp, Arabidopsis thaliana
ataatagtctagggtaatttattgagcatgtcaatcacttgtaaactgaggaaacgaaactactcgattaccccattctcgggaattctttatttgattgattttattgtttactctactgctgtttactgcatcctgtcatctgttgcttagtttctgcaattctttactgttactcgacctggtactcgaccacccagttgtctggcaacagactgtgcagtcgagtatccctgttacattttctgtctgttactcgacctgtcactcgaccacacccagtgctctgtaacgagctgtgttggtcgagtgtttatttgtttctgcttgattttctgttttctgcaggttcacttaggactgctagaacacaccaaaacctgttattgcttggcttgacttagtgacttctgatcacatcttgattgttagcatcacacccatttggattgacaaccttcagtactacaacgacatgatagtgttttaggtttaattgattaaaaacctattatcaatttggcgccattgccgattgggtgtttgtttgttacatttgagatttcagacttgcttagatcaagttctttttcaattttcaattcggttgctaactgtgtgtttttcttgttgtattcttgatccaggtacacctcagttgtatgcaaactcgatcaacaggcaatcagaacctccttttcaatgccaacatcgaccgcatagctcgcgaactcagagaaaggagaaaaacagtcaaccttgaaccacagcaaccactcgaaatgggtgacgaacagtatcaacaaaatggcctgccaacattggtgctggagatgcaccacgtgatcaccgtcagcgaataggaattgcacctcctgctatccagaacaacaacttcgagattaagagtggtctcatctcgatgattcaggggaacaaattccatggtctgcctatggaggatccaatcgaccaccttgatgaattcgataggctctgcaacctaacaaagatcaatggtgtcagtgaagacggattcaagctccgtttgtttccattctccttgggcgacaaagcacacatctgggagaagaatctgccacatgactcaatcaccacctgggatgattgcaagaaggcttttttatcaaagttcttctggaacgccagaactgcaagactcagaaatgagatctctggcttttt

SEQ ID NO: 1595 - DNA, 294 bp, Arabidopsis thaliana
ttgctgttttatcatggcgaaacctcgccttacccgtactcactcaactggctggatgagtttgacgatccgcaacttgcccggcagttgtacaccgaagcttttctgttggtggatatcaccatcgtacctgacgatgagatcatgcaacatcggcgtatagctctgctggaactgattcaaaagcatattcgcgaccgcgatttaatcggcatggtcgacaggatcaccacgcttttggttagaggcttcactaatgacagccagctacaaacactgtttaattatctgctg

SEQ ID NO: 1596 - DNA, 817 bp, Arabidopsis thaliana columbia
tttgatgttgttttcttcgaaaggactctctatcactgaaccattatggtaaaaatgtttcattataaaagttcttatgattttatcatctttgtagtgttataacttgcatgttttttttggttaagtaagtggagcaactgctggttagtcttttttgggttaagtaagtggagtattctcatataagaagaagatgcatagagtatcacatcacagtttctgtgtattcggcgagcttcatgtttgtttgtttgctacctgtgatatgagttattccatgttaaatgtaatgctttcctttggaagacaactcttgttttctttctcgccctttcatgtgtgattttgagattgagccattaaaatgttcaagcaccttgattgtttgttacctttcgcgcctctagacaatcactaaatcgatttacccttggttctgtatctgctttaggccctctgaagtcgttcaatccaacacagagcacacagaagaggatgtgacagaccagatggtgggaagatccgctcttccgaatcagtttgaggataaaaacccgctaaacttcccgggactccgcagagatgtagacgccatcgaacgccatttcttgagcggaatgaagagtttctttgatgcggctgaagagatgacaagcagcttatttgatatcatgggagaccatcacccaagcaccaggagaggagggataccattgaaaacatcccaaggtagaggagcaccgcaatgacgaaactgccctacacgaccacactcctctggcgagattgatcctcgggcttggcaaggacgttt

SEQ ID NO: 1597 - DNA, 526 bp, Arabidopsis thaliana
atctttcatcaaaatttcttccagagaaaaaaaacaaatctcccccacaaagaaaacaacaatgtcgacgaaaaagatcatgttgaagagctccgagggtaaaacgtttgagattgaagaagagaccgcacgccaatgccagaccatagctcatatgattgaagccgaatgtacagataacgtaatcctggttttaaagatgacaagcgagattcttgagatggtgatcgagtactgcaacaagcaccacgtcgatgccgctaatccttgctccgacgatgatctcgagaagtgggacaaggagttcatggaaaaagataaatccacgatctttgctctcaccaatgctgcgaatttcctaaacaacaaaagccttcttcatctagcaggccaaaccgtcgcggatatgatcaaaggcaacactccgaagcagatgcgcgaattcttcaacattgagaatgatttaacacctgaggaagaagcagcgattcgtagggagaataaatgggcttttgaatgagcggat

SEQ ID NO: 1598 - DNA, 932 bp, Arabidopsis thaliana
tttcctaattggaacatttgtggtattaagtgaaaacaaagagatctcgacatgccgtgtaataatattaagatcaattaattgcgtaagacgtgatatttatgcatgcatttatagaaactttgaagacgcgttatgtgtataaaacaacatcatagtgcatttttaataaaaaaagtttatttggaatatttgagtaggtggttagtccaatatataaaattgaattacatataatcttacaagtaaacacgataaaaagttgtggttttagctttaaaagactttagtggaaaacaacatcaacatgagtagacataaaacttcaagctttcgtgacttgcttgacacgatacatgcatctatgaaaattattagggcttattaatagacaaacgcataggttcataacttcattaccttattactgaaatccttctctcaattctcaatcattttctcaattcttcaatcttccagagaaaaaatctcccccactgaaaaaataatgtcgacgaagaagatcatattgaagagctccgatggtcactcattcgaggtcgaagaagaggccgcacgccaatgccagattatcatagctcatatgagtgaaaatgattgtaccgataatggaatccctcttccaaacgtgacaggcaagattcttgcgatggtgatcgagtactgcaacaagcaccacgtcgatgccgctaatccttgctccgacgatgatctcaagaagtgggacaaggagttcatggaaaaagatacatccacgatctttgatctcatcaaggctgcgaattacctaaacatcaaaagcctttttgatctagcatgccaaaccgtcgcggaaatcatcaaaggcaacactcctgagcagattcgcgaattcttcaacattgagaatgatttaacacctgaggaagaag

SEQ ID NO: 1599 - DNA, 761 bp, Arabidopsis thaliana
caattagctttgtattcaccattctcatattcacgaaagcattccattccaaattagagaatcataatttcaaatacgttgaatcattttctttctcgttcagagctctagattagtcaataatggagattgaatcggtgacgtgcgagtgttgcggcttaatggaagattgtacacaacactacattagtaaagtcaatgctaacttcgccgggaaatggctttgtgggctttgctccgaggctgtaagcgccgatttcagccgtagttcgaagacggtggaggaagctgttaatgcacacatgtcgttttgtggcaagtttaacgctaaccccgcagaactcgtcgccgacggcatgagacagatgctacgaaggaggtccggtgagttatcaccgaagatgtccaagaagttcggaagatctaacaccacataattcatgtagtcatctttttctcacttttgccttaaagttttggctaatgtaaagtataataaaagttacaaaattaatactttgagcaaaattaatatttatttgttactaaactcaccagtaatctctgcaagaacacagaccgtttttataacagtgaaacctagttcgatctctcactatgatctctcgttcatacactttagagacgagcttgaagaaaaggtgacaatcctcacacacccttagattcttcactattctaataacaccgcacgagtctttctctgcttctttttcctcattcatcagaccgaagcagag

SEQ ID NO: 1600 - DNA, 803 bp, Arabidopsis thaliana
tacccaaacatctactgagaaatcaaatgtaagggttgtggtcagatctctccatatgcgattcccgatggctggaagtattgaacttttccgtataaaccgatctctgtgcattactctccttagatgaacctatatgtacatatgattttgaaacattagcaacatttctcgttctctatttgtcagtactaaattccaactatagcaaaatgatgaattagcctgtggtgtcaggcaattgaaatgctttctagctacaagctgtttcatgagaatccaaggaaaaaaagcttctgagctacttatcccctgtgttacttatctcgtgtgctgggagtcaagaaagagtatggcttaaacaaactcatgctcaacaattcataatttacaacaagttgtaactttttagtagtcagttctcaaatgaagtagactaccacgaaatggaaccaggtatcccaacaattagttctattactaggaagatgtaatcactattccatttcataaatgggagtaacttcaaaggaaaatcaaccacctgaattttgaaagcatttccaacagcggacaaaatggggctccaaacaccaagaattccatgaggcctctgagctggcgctgtttctagtgagacctttagccttacctccgaaacatctatgaggctgaaaatcacaaacaaaatcatccaatcacttaagttagaaaattgctagacttgcataccaaaacggccaaataatggtggcttcgtatctggtaaaaattctatagaagacaagaatactttatatgta

SEQ ID NO: 1601 - DNA, 739 bp, Arabidopsis thaliana
ggatcccctcatgttttttttttaatctttctttggtatagaactatgttttaagtttatgcttatttaaaacctaagtttaattttgaatgatatttacattctttttaaaaaatgatggttgttgttgttgagccaaggaaaaaatacttttgttgacaaccaaacaaaaaaaatacacttgccaataggaaaaaatataccgtttcaatgtaagtctcatttttaaaataaaacgtctagtttaatatttcttccagctcaaatttataacgaaagaatgatacaattcattgcataagcataaacaacaattacaaaaccgatttagcaaaaaacgaagcaatatgaaattgcattaatcacctctctttttttttacatcaaactcaaacaaaacaatgataatcatacaaatatacaaaacctttcaccacacgtaacaaaagaaaagataaaaaaaaaagatctctacgtagacaaaccaatccggttaagtcaattactcatggaccatcaagtctccggtttccccttacccaaatcaagttgattaaaaggcgttgattgtgacgagccacggctcgcattgctgctcgcaacggtggttctccgtgatctttgacgtttggtttgtcaactacacaatcttcgtcatctgaatcctcgattagtcctcttcatctgaatcttcttcgtctttaaaacaggatgaacatatgcattctgaagaaccctt

SEQ ID NO: 1602 - DNA, 885 bp, Arabidopsis thaliana
ccaatacctcaaccaattttaatccaaattcaactctgtaaactggagaataacgataaaggatttgggaataaccctaccaaatttcgttaccttttaccacgatttgatatgacgaaactgatttctcccaaaccctaacgattctgctccttctccttttctctctttttctcctttataaaacgaaaaatggctaactaaagccctaatttcgagtttccttcttttataggcacactttagggtttccaattaacccaaccaattaaaccggatgatttaaaaacaaaccctaaccgattttccggttcacgggcgttacaccacaaactttggatcaatgaacaaaaacaaaatttttgcgttttggattgtatctaatctcacattatgagaggaaaaggagataaacaaagactaagtacgaaaattatgatcatttactgttccgattgattaggtgttattaaatattaattatattgtatagaagatataattccaacaatattaagaaagaaagaaaaagaaaatatatatcgaaacagaataacacggcgaaacgtagaacgtatcggcggaggaagcagagagacgttgtaggagtgggctaaacaaccgcgaacaaaggagggaggtgagagatgacgtgtcccgacgcatgaaattctgacaattcgcaactccgtttaactaatatattatcttcggctggttttggcggagaaacattagctattccattccagcttgtcccagcttatttgtttctgttaagaaaatggtaatgttagtatataacataggactgtctattttgtgggttttgcaaccataaagcaaatgctaaatctaagaaagtacaaggaacataccttttat

SEQ ID NO: 1603 - DNA, 954 bp, Arabidopsis thaliana columbia
gtaacgaccggagtagaggataaacatttataagtcaatagtcaaatgaatggttatcgtagacttttccaattgccattttcttgtttataaaaatatccaaaatacacagacttaaaggggcctctgactccattatatctatcgaatcatatataccagtcgtagtatgacgcgttgaagaacagaaacgaaacgaaccaaaaagtcttctccggcaactttagatcctccagcagcaaggtactcactcttatgaattcctaacatatgtataattactatacaaccaaggtactaatttgcatgccttcttatgttccggtctaaccacagatcatttctcaatcccatcctttgcctcaacccaatatggacttcttcacttcaagcaaagctaagaaagatagcaaaaaatcatcaggtaactcccttttttgggaatctaagataatagccggaatgtttaactctcgctggggatggtgaaagactagactttctcaaactgatcctatttagtatttactatcatcatcctcttagcatatccaaactttctcttcaggactctttggcaagaaaactgtcagcaagagcactccgggcagccctgctcatccccccggcgctagatccccgcccccatcgtatctttcaaacaaaagagccgaaacagagtacgatttccccatgtccaatgaacaaagaccatactggaaacagcctgcctctgaacgcgtccccaactcccaccctaggcctcccgtgtatggatacggcacggtactcatctatcccctgtttcattccccaaaaccaattgagtttatttgaaacaaacgtagtatacgtatctaatactgtgtttgccttctcctcaattgcagcccgaccatcgtcgagaccacggtagagaaagaatggaggccatgagttatgagccagagacca

SEQ ID NO: 1604 - DNA, 1118 bp, Arabidopsis thaliana
cccaaactttccaacgtcgtcttcaccttaaaggttggttctttgacgagattgattatccaatccatattccagaccctgaaacaaaaccaactagttatgtaacaacaccaaccaatctacaagagaagatgtttcatgttacaaaagagaatgttttgaaacttgacgctaaagccaacgacgaggctgatcaaaagatctcttctattcaagcggtgttagcatatatatggcgttcaatggttaaacacagtggcatgagccgagaggaagagactcattgcaggttacctataaacatgaggcaacggctaaatccgccactagaagaagagtgttttgggaatgtaagccaaaccgggatagctacggtcacggttggagagctgctggaccatggactaggctgggctgcaatgcaaatcaacaacatggagctgtcacaaactgatgaaaaagccaaagcatttgcagagaattgggtgaaaaatatcaagattccggtttctgttggtagcaaagatttagttgtcacaaactctcaccggttcgatgtgtactgtaatgatttcggttggggtaaaccgatagctgcaagagctggaccaccgtatctcaatggaagactcgttgttttcaaaggaattggagaagcaagtcttgattttcaggcttgtttactgcctcaggtagtggaaaaattagtcaaagatgctgaatttaacgaatatgtaagcattgtatgagatgatttggtttagcaatgtgaatttaactaagccatacaccagttctctctcgtgattcaaattaatacaataataagcctatgcaattctatcgtgttcagttcacaacatcaccatgaacaatcagattcggataattcaacgaatttagagagtctgatatatatagtaacgtacctgaacggaatcggaaacactcgccgctggggttgcaacattccgtcgagctctgtaaaaaattccatcaaacttcgacgataggttgataatgggcctaggggctagggacaattaatgggcttaactatataaccaaatgaataacatgaaacacgttgtagttcactagtttggtatgtcatgtat

SEQ ID NO: 1605 - DNA, 1205 bp, Arabidopsis thaliana
ggtaatgtaggaactggatcgtatggaaacaaggatgagaatggtgtacggcgaaaacaggaggcgtgataagggtgttccgatcgagtgtggttgtagtgcagcggttgtcgttgccacttctcgtgatcctattacaagcggaaaactttattttagttgtccgtatgaaatatcagatgtaagcatcttttgagttatgattctttttttatttttatttttctatccctatgatttatgtctgatttataagggtcccggtcgagactgcggtttcaagaggtggtgtgctgttccattgtgtgacgagtttgacaagataaaagaggagaagaatgagatgaagcaggatttggtagcagccaagaagcacgtcgagggtcaggcagaaaagatctttcttatggaaaagaaatttgaaacgctagagaagaagtatgagagcatgaacaagtattcgtgagcttagctaaatttggtttttcaattggacttccttgtactgtctgtttttgaattggacttcgttgtactgcctattttaattaagtcagccatctcattataataacttagccataacatgatttgcgggatgataagtcagccaccacgttctaataactcatccatacattgaattaatctacgatacgcccgccaactcgttataataactcagccataacacgatttgtgcgatgataagtcaaccaccacattctaataactcatccaaacattgaattaatctacaataagtatgccttaaccgttagaataactcagccataacacgaattgtgcggtgagaagtcagccatctcgttctaattactcagtcaaacatcgatttaacttataatttgaacatcgtacattcaacatcatagattcatacaaacataaagcattatcaatcctaaagtgtcaatatttagtacaatcacatgctcaaaaatccaaaaacacagacatatgttcgaaaaggccaatcacgtctcttcaaactgtgaagcatcctttccggtgcctcatcgtagatctctgctgccatcttaacctgtagagcctggatatttgcatcacaaatgccatcaaaatttacaccaagcaataaacattcaagaatctaacacgtgaaaacgccgcaatccctagctactctgttttgcgggaccagtttcttgttcttccgccga

SEQ ID NO: 1606 - DNA, 779 bp, Arabidopsis thaliana columbia
gcaaacaacgtccggcgaacagataaaaaaaaacaacaaacaacttaaaacaacataaacaaaagaaacaaaaggaagcagagtaacaatcagggccctctcgacgagctagcctcatcctcgcgaagtttagcacgacagtacgccctcagaaaaggcggcagtgggttcaacttgcccagtccgaagcgttcccagtccttgggatcggcctccaacctcctcattccaagctccatttcctgcatcatgcggaggagcttagcatggcggcggcagtaagctcggagttgcccctccaactgcagaaaaccaccatctaaaaaattcaggattcaggaaaaagcaagacatgaagaaagattctttaaattaactcaccgtgcgaaaccagtatcggaatcgcgccgcctcttcaggatgaagatgacgaagaagatccgccgggtacttcacactgccgggaacaaaatcacgaccgacgggagtgaatgacggcgaggcggcgatcactggaggcctcctccaggggtatagcggttcgccgactggaagcgccgggcggcgaatcacgcgatcttccactacgcggatcggagaaggtgaacggtcacgacggggacacccgaaataaccacggttcgacgtcgacgaggaatcaggctcatcatcggaatctgacgacgtacctcgagagagcctgagaacctgacatagtcaagaatattctaagaaaatttttagtttcagaggaaaggcggagagaaatcgttggaggt

SEQ ID NO: 1607 - DNA, 613 bp, Arabidopsis thaliana columbia
ctcccaaacttttttgctctgaaaattcaccatcaacttacatttttcataaaattcctacatgtacttttggattcattcctacaactacgcctccaattaaatcggtgattaaaccatacttaaccatataatcgcgtttaggcaaccacgtttaagattgcccatataatcactcagcaacccattaccaaaacgacgtcgtatttgtcctgcaattgatttgggcttaaccgaatcaaaatcgatttgggcctgaatcaaaacagcccaaaggcaaaaccacgtcgtttcattcttcttctaatttaactcaatggattcgcgatttggggattttgagaactagggttcttgagagaaatttgtgttcgagttcaaattatgtcttactggtttgagaattcaaataaagatatgcaggttagtgagttactgtatcagagcgatttggatgatcctgatttcaccgttccagagagtgagagcaatgtcgacggaggaagttgtagcggggatgagggaaacgacgataatgattatacgaattttaagaaaaatgtaagttgatggtgaaattttcagagcagaaaagtttgggggggggggggag

SEQ ID NO: 1608 - DNA, 1268 bp, Arabidopsis thaliana
catatggtgttagaccattcagaactgatgaaggaatacgattaattaaataaccagctgtgaggatacactcaccccaaaattggattggtaagtgtccttgaaagcgcaatgctcttgccacattcagaatgtgtcggtgtttgcgttcggctcttcaattttgttgtggtgtacccacacaggaagtctcttaaagaatcccttgctgtcgaaaatagcttgccaaacttgtgaactcggttccattatcactgcgaaaactctttactcttgttgaaaactgcgtttctaccatggcaataaaattctttatccaagtaggagcctctgttttgtcgttaagaagatgaatccaaacacttcttgagaaatcatcaacaagtgttgaaaaatagcgagctccacaatgcgaaattgttcggtacggaccccacaaatcagaatgaatcaactcaaaagcttgtgtagttttattgatactaatcggaaaaggagatctagtttgcttggcgcggagacagacatcacacgctttattcaaaatatcagaacgaattgaaactgtaacattcttaagagagccaacaacttgtgcacacggatgtcccatgcgatgatgccacagctcatatgacttgtcatcttgtgtcctcaccgatgctgccaactccgttttgcaaaagtagtagcactacaagaaaacagtcgttttgcgagggaaaaattactcgctaatccctcgcaaacagccatacgcgagggacttgcgaggaaatcaagttcctcgcaaatcgcttctcgcaaatggtaaaaagtcgcaattccctcgcaaaacacatccaactacagttctagtacttccctcgcaactgttgcgagagatttgcgattcttttctttctgcctagcaagtattttgcaactaatttcctgatataataaggcttgattagtggttaattagactctaattacctggttaattagactctaattacctagttaattaggatttgattagagattatttttgcttcttaaataaagacacaagaagaagaagaagctgaaattatcattatctaaaatgtatactacaatgccaatgtttgaaaccattttctaaaaagattacaaggaaaaaagagaaagacaatgttctcaaaatactgatgataaagaggatcctgttgcaaggttagctagggcagcagcagcagctgtctcctcattggcttgctgttccggagctgtactacaggtgg

SEQ ID NO: 1609 - DNA, 573 bp, Arabidopsis thaliana
gccagtgtgctctaaagagtacttcgtctcttaatggctccgtcggcttcccgttgcccaacacatctgtgtacatcgttggttctcaaactcgtgacattcttcctgttggttttgccggcgagatctgtatcggtggggcgggtgtggcacttggcgacctagacccaaaaaaaataaggagaaatttgtcggcgacccatttgctactgccggggacatagcgagggggtggaagaggatgtaccgaactggtgatcgtggctgtctcctggccgacaggtcactcgtgttcttaggaagaggagacggggattcaatggtgaagcttcgtggcctgcgcatcgagcttaatgaggttgctcatgttgttcttgccgcttcgcagggcaatttggctgatgcaaccgtcgctgtccgtggagatttcgagtttctcgttgctcacgttatactttctcagcatcatgagcttgccattcagaacctaagaatcattctatcttgactcagcctaccgcgatacatgataccatttatgatccctttggatgtactaccaatgacgccaaa

SEQ ID NO: 1610 - DNA, 1072 bp, Arabidopsis thaliana
tctagcatctcttggaacttcaatggcaggtacacagctcaaaaaccctgatatggatcatgttttgaactattgtcagaagttgagtagttctagtaatgtgagttatgctagtccttggataatctgggtcttatggaaacatagaaataagattctatttgagggagttaattttgtgactcaaagcattgtagacaaagcttatgtggattgtaatcaatggtgttcagctcaacaaggtgtttgtatcaagaactcaaagtcaaagttgaaatggagtcctcctccatagaatgagcttaaatgcaatataggagtggcctggtctaatcgttttcaagtttctggtgcctcttgggtagtgagagatgctatgggaaagatgttacttcatagtaggagatcttattctcatgttcattctatgttggatgcaaagattagaagttgggaatgggctcttacaagcatagcacaacatcattttgacagagtcacctttggagcctcaacacatgatattattaaagctctctacaaactagaggaatggccagcattattaggccatacaactcagcttttgaagttatcgcaaaagaaaagtggctggtttatggctttggaaccaaaattgtgtaatacaggagcttatgagattgctaagagtgttattactgggcacagatggcagtcttatgtttcacggggttttccctattggctaggagatctctttgcttcagaaatgactcagccaggaagaatgtgacagtcatcaatcgaagtttgttttggttacaggtggtttaatccagattatcaagtcagtcggaggtgtcaactgtgggatttcgttgctcagttaactcatgagttgttaatcaaatagagtgttaggtgtggaggtggattagtttttgtccttttctaatgattgtttcttcagtcaaaggtttagtaagtttaggactaacacatattttcgtcgggtttagtttttttaatattttcttgtatttatttccgtaattttttttcattaaggttagagtctatatatatatat

SEQ ID NO: 1611 - DNA, 1218 bp, Arabidopsis thaliana
tttctggacaatatgaaaatactgatccgacactgttgcaaaccgaggatgatgaagctgttttgcagactacaattgaagatcttgtaatagactatccggtagcagacgtaaccccaatcatcctcgattacgatattggagatgctgaaccagaagatgaattccgacgtaatttatcgtcctcggatgaagatgaaatagaagacgaagatgaataataattgtgtgaaacatatgtataattaattatttgaataaattttgtaatatacgatgtatttgaataagtatttgaataagtatttgaataattattaaaaaattattaaataattttaaaagacataaggtgacgaaattacgactattatgcgactaccatgtaagatgttgagcttcgaataacaaagcccaaacccaactcaggtggtgacaaatatacgactacacagcgactatcttgtaagctgttgggcttcgaaatcacaaagcccaaacccaacttaagtggtgacaattatacgactacacagcgacacttgtgtatgttgttgggcttcgaaattactaagcccataacccaatttatgtggtgacggttcggcgactatggggagacaacggtgtaagttattgggcttttaatcgtcgaagcccaaacccaattgatttagtgactattatgcgactgatatacgactactccagtgttgaaaaccctaattcgattcatttccccttcgttccaaacacttagccacttcttcgattcttctcttcttctctcttcttcttcttcctcgatcttcttcgatcttcttcttcttcttcttcttcttcgtaaccctaaatcgattctcttcttcttcttcttcttcttcttcttcttcttcttcttcttcttcttcttcttcttcttcttaaccctaaatcgatccgtctttcaccaacaaaccctaatacatcgatccatctcgattctctcttcttcgattctctcttcttcgccaaactctcccttgcctcttcgatccatctcgattctctcatctccaagaggatgcctaacgccggtcgtggaggatcttgaaagaggaagaccacaccaaacgtgactcaaagagccggaggttcaacgcctgctggaagacctcttcgctaccgcagcagtacgatttcactcggcggcggtgacggttcaagtttctgcatcga

SEQ ID NO: 1612 - DNA, 1436 bp, Arabidopsis thaliana
gtcccaatttattttatgattacgactttcccgaaagggaatttttatttgcccaaggggttttaaaatttgttggttgtgtacccaagagggttttttaaaactttttccttttcgttgtccataggggttttggaatgacacttgcttaaagtatttgcttctaagtttccggatttgcaaagtccgtactttttcaaaaatttgggccatgtggctaaaagaaatttgggccatgtggctaagagagaaataggttgatcaaacccccaaactcaatctttggactttctttgattgcgagaattgtcgtccgcctaagaagtattaggtagatcgactaaacaccgtaaagatctttgttttgctagttgaccccttgtccaagaggattaaatccattttattgactcaaactcgtcagttcaaccatggagttttggtatcagaattaaactcgagttatgcatgggagctgacctcgagttaagttgttgcgaagtgaactcgactttcgaatcgaagctataagcttgagtttagaaagtgtattctgcttatagaatacaaaggcaggttattgagcagcaatctagagagaaactgaagatcttcttccgagcttgtactcaaagacttcgtcataaatgcttgttgatgtgaggtggtatctaaatttgtgaagagcgatctcaacacttagatttcacagagatttatttttccaagagttggaacttggaaaaacccttcacgagatagttcagtgaagagcgaactcaacacttatagtccaccaaaataatcttatttttccaagagttgaaacttggaaaaaccttcttgggatgagatctagtttcgtgaagagcgaattggacacttgaaccccgccgaaattaaccaatattcccaagagtttcaactatgatctggtgagacatagataaagtcgcagcttccaagttgaagtgactacatcaatcgcaagtttctccattatagtgtaacttaattttggactggttgatgacttgctcatgtaacaaatcggctttcactctcttctgtcttcagaaattattactccattaacggcatgatttgaaaatgagatgtataagtacaatttttcatcggcttcaggcttcagagaattagagcaacacttaagtatgtctttagttgaccgaaagcatcttcacatctttcatccaactcaactctttgttcccttttagtatttgatagaaagaaaggcatttatcggctgactgagatgttaaccggtttaacgcagtaatcctaccaaagagtctttagacatctttgatgttccttggggctagcatgttcgaaaagagcgttaatctgtcttgggtttgcttcggtttctctctttgttgctaagtaaccgagaaactctccggatggga

SEQ ID NO: 1613 - DNA, 749 bp, Arabidopsis thaliana
gaccccgttgacattccacttatattaggaatttgaccaagtcggacctacttgagtgatggatatagctggccgtatactaaatctggtaattactctgttaagtccggatattgggccgcgagagatctttctcgtcctatttgtgaccccccttctcagggaccaggtgttacggcacttcaggcacaagtatggaagcttaaaactacacgaaagcttaagcatttcgcgtggcaatgtatttcagggtgtctttctacctgtcaacgtctagcttacagacatatgggtaccgataagagttgcccccgttgcggtgcttcggaggagtcgattaaccatttactctttcattgtccaccttctcgacaaatatgggcactctcgcctattccttcctcagggagtcttttccctagaaattctctcttttataacttcgatttttttctttggcgtggccgggaattcgatatagaagaagatgttattgctctctttccatggattatttggtatatctggaaaagtagaaaccgctttatatttgaaaacgtcagggaaccccctcctgaaactctcgcattggccctccaagaagctgctgcttggaaacaagccatgctaattgacgaggatcatgtagatgctccccctccgcctagcttcgcggaagccccccagctgagctcgttgagtgtcaatttgatgcgtcctggcacgctgaagactctctaagtggcttt

SEQ ID NO: 1614 - DNA, 861 bp, Arabidopsis thaliana
ttttggctcggcaccgacaaattaaagaccgagaagctcatattgaacttagaaatgctttaattgaacatttgtggtcgcaatatactaattctgagaattagtacgatgtaatttatttttattatgtttggtttatcgagggtaatattatattaattaatgaagaataaaataatatgttgtgtttaattaaataatatattgtgtttctttattttgtattaaatttgtttaatgtaatattttgttgtctaacatttgtttcaatattattaagtattcttaaagtattcatattttaggttaataatataataatagagaatagtatttttagtgtgacttttggtgttgtggttggagatgaaaaagaatttagtgtgaaaatcacaccaaatatagtgttattctaacaccattttagtgttgtggttggagatgcccttatacaacaagcaaaccatcctactaaatcatcagtctcacgtaaaacattgctaatttttttattattcttgtataggggaaaccaccatagatgtaatcaagagatgcagcagcagcttgtacaaaaacttctcccccagagataccatgcttgactggcccccagagaatccttttgaacattcaaagctggtaagattaagacctgtgagttttgcttttgtgagtgatgttttccataagctttttctttttttttgcagttgaattattatgagctgcaagaagacaatgactggattcgtctctacttggaacttgcagttgccacactaataggggcacattagggacttgatgacttgccaacttgaagattaccaagtggctatagatctacccccaagatgt

SEQ ID NO: 1615 - DNA, 1033 bp, Arabidopsis thaliana
catgaattcgacatggcggttcagctgctgttcttgcgctcgaaagctattgtgagattaagcctcctggtgttgaggttagtttctcccatcagattcttttgaaagctatagtttgttaaccgaactgaacagattcgtcttccacaaccaggttcatttcatcgttgcagcctgtgaaaatatgattagtggaaccggaatgagacctggagatgtcatcactgcctcaaacggaaagaccattgaggtatctgatgattttttccccctcagagttgagcttttactgtttttcctatgaaatgctaattgttggcgatggtgtgtgtaggtcaacaacacagatgctgaaggtcgtctaacactcgcagatgctctagtgtatgcttgtaaccaaggcgtcgacaaggtattgcattactttattgatatgagaagctaaaggagcttgtttctgttaaatttatcctttcagttaaacattgtcaaatatcttgcagattgttgacctcgctactttgaccggggcctgtgttattgctcttggaacttcaatggcaggtacacagctcaaaaaccctgcagaaaaactcaatctttgtgtcgtttttgagtccaaaattggctcatgatgatcattctgtgttcattacttgataggaatctatacacctagcgacgagcttgcaaaggaagtgattgctgcatcagaaaggagtggagagaagctgtggaggatgccactggaagagagctattgggagatgatgaagtctggagtggctgatatggtcaacacaggcgggcgggcaggaggatccatcaccgcggctctcttcttgaaacaggtgaaaacaaagtccctttagaggctatacatacatgtttttgacaaaaaattcgtcggtgaaagtaactaaaccatcctctattttctgtggtatggcagtttgtgagtgagaaggtgcaatggatgcatatcgacatggctggaccggtgtggaacgagaagaagaagtctgggaccggg

SEQ ID NO: 1616 - DNA, 946 bp, Arabidopsis thaliana
  unsure (1)..(946): unsure at all n locations
ataacgcctgtcaggattatctcgcgcaccttgatgttttaatatcgaatggctggcacatgatgagcaggcggtagatgcgcgtctggcgcagatgcaaatccctgccgatgattacttcatctggataaccggcgaaggtaaagtcgttaagaatttaagccgccgctttgaagcggaacagtatgacccacagcgggtacgtgcagcggcttactggcacgcaaagtaactgatatataaaaagaaaaaggctgacgatttctcgtcagcctttgctatatctggtggcccctgctggacttgaaccagcgaccaagcgattatgagtcgcctgctctaaccactgagctaaggggccatggtagcggattataaagtaactccgtgtcgcaatccagccattaccgcgcgcctgctgtttttataaacaatgtattttcaatccgttatacttttcctggtgatgttagaaaggagtaaatatggttgaggatattttggctccagggttacgggtcgtgttttgcggtatcaaccctgggctttcatccgccgggactggttttccctttgctcatccggcaaatcgcttctggaaggtgatatatcaggccgggtttaccgaccgtcagttgaagccgcaggaggcacagcatctgctggattatcgttgtggcgtcaccaaactggtagtgtgtccaacggtgcaagccaatgaagtttcaaagcaggagctacacgcaggcgggcgtaacgtgattgaaaaaattgaagattatcagccgcacgtnctaggcgattctgggcaaacaagcatatgtacagggattcagccagcgcggtgcacagtgggggaaacaaacgctcaccattggttcgacgcagatttgggtgctgccaaatcccagcggtttaagtcgcgtttcactggagaaactggttg

SEQ ID NO: 1617 - DNA, 674 bp, Arabidopsis thaliana
cgagccagaaccagaagacatactcgaccaccaggtcgtgtgcatccagcaccatactcgaccctctggtcgagtgactttggagccattcttcccatctactcgaccaccaggtcgagtaacctcagctcaggccactcgatgacaccactcgaccccctggtcgagtatcacttcgccacaccacctgacaatactcgaccgttcactctaccacattactcgaccccctggtcgagtatcacttcgccacaccacctgaccacactcgaccattcactctaccaagatactcgaccccctggtcgagtatcatcacttaccaccatcaccatcactcgaccggacactcgatcacgtcttcacaatctactcaaatccgcacacaaccagacaagctgagcacaaggaagagaagaggagaagacaaagtgtttggaagcggcctggacctccatcggatcacgaagcccatctcggcccattatctttctatgggccaggcgattaggttattgacccgtttactatcattttatttcgttttgtataaatagatgtcttagggttctgtcctgagacatctagtcgacattgcgtttttgcttcagttttgttttttgttttactctgctgcgccgcttttgcttctgcaacctgtaattcgagatttt

SEQ ID NO: 1618 - DNA, 501 bp, Arabidopsis thaliana
cctaatagcaattaaatgataagtaacttcaccaccacgttctgttctataaacatcgaaaggagcattctttatgtcgaaattgagataattctctgagcttccagttcccattgtgtaaacagaaggatgttgtagtataattaatgaatctgaacactcttggtttttatcaatcaaagcttttttctcattgagaatgcttttttgccatgaccaagctttcttgtatggaattaattgatcgtagagatcaaaacactcacacctgtaaaaatgtatactctgttatgcattgttgaagaatgcacgtaacgtgttcgttaaaattcctcaaagagaaaataaagagagaggaacattactttcttgggtttgtgtgattcttcgagttcattatcttgagagatgtagatactctgtttctgttgaagtcactaagatggtggtgatgatggagctttgggttcgtaacagagcttgttgcacggaaaaaaccat

SEQ ID NO: 1619 - DNA, 1234 bp, Arabidopsis thaliana columbia
tcgactctgatccccaaaactttaaaccaatttttttattttttgtcaatgaactttaaaccatataattagaacgtattgtgtgtaaaacagtgagtaatgggaatataaaggagtcaatgattggtaaagcccactccataaatcttttgaattttattgggaaagagtaaattgtacaaaatcccactttattccagatttttgttccaaagttcaactctcttccttgcacttacacatcacaaagaatatctttagtgttctttctttataaaaagaaaagaaagaaaaacaacaaagaatgttctctcaattttaaaaatcttggtttcagacgcattagtcttttattccttgcattacctgtcgcttttgtatgatacaatattaaatagtaacttcttcaaaccaaaaattctactaataatgcattacccctaatctcacatggaatgaagcatattcacatttcttgtttcacaagtaccttctgagtaaccctccttgatctctactcaaggaactccacaaaaattaaaatctcacaactccaacatcttcttataacacgtcttgatttatctttaagaaccaaacaaaaaaccaaaacctagaagagaaaatgggagatcaaggagtacaacaaatgcaacagcctattgttgtgtatccaaacgcttacaataaacagtatccagacccttctacaaaaccttcttcttcctctggctcaagcggaaactttgggacggtcttcatagtcctagccgtgatctttgtcttgtcggctcttgcttgtgtctttggaaggctatgtaaccgtgaaagccgcgcggctaagcagcaacatagcaagcatccgaagcatgagaaagcttcttccaagaagagccgtgagattcggcctgtggagcgtgactgagggagagaggtgatatggattttggtttcgatatgaaacggcctgaaccaattgagaaaccttctggaagagacggaggagaggacatagaattcgggtttgataacaagagaggtgaaagaggccgcgaagcgtaggcggaggaggaccacctccaccgaatatcaaacatgcagtgaggttcaagctaccggaaaatggagatcatcattctaaaggagagatcagacgtggaggtcgttcttcgagttccgccaggacactaatgatcttaatttgtttaagaacaaatcacttgatatgtcttta

SEQ ID NO: 1620 - DNA, 884 bp, Arabidopsis thaliana
ctcacgttatcaaatcagtcggaggtgtcatctttgggaattagatgctcagattaattgctgagttgttaatcaaatagaatgttaggtgtggaggtggattagtttttgtccttttctaatgattgttttcttcagtcaaaggtttagtaagtttaggatttccacttaggttcttcgagtctagttttttaataatttcttttttcctaattttttcattaaggttagagtctatatattataagtgtttactcctttacgtcattaggtctcagtctttcttgttccttttctcttttcaatcttacctccatggcagatgaattgtgggatgaaattcaaggcctggatctaggtcctgaggatccagccctcttcattccccatgaagcttatgtgtatgttgaagagttcaatcgactgagtataattgcaagacctctcaacccaagagtccaaaacttgaacgcggtgattgcagccttacctcggtactggggaatgacggtgcatgtccatggaagaattctggatgcaacttatgttcaatttctcttccaaaatgaagttgacttgcagtcagtacaaagaagagaaccatggattttcaacaactggttcgtggctactcaaagatgggaacctgctcctgctcttaactttgttacttctattgatctttgggtgcagattagaggaatcccctgccctatgtgtgtgaagagacggctctagagatagcacgtgacttaggagaagtcatcatgctggaccaccatgacgcgacatctactcaaattacttatatccgagtaagagtgcgttttggcatcacagacaggctcagattcttccaacgaatcatctttaattcgggagaa

SEQ ID NO: 1621 - DNA, 748 bp, Arabidopsis thaliana
aaaaggaaacttccagaaggaatttgcagaggaatggagttattgcagaatggagtgaagaggattaacgagggtttaaacgaattgaggtcagatgaaaatgagagtgaagagtttcaaaagagtttatcgaatcagttttcgtgtcttgaagatttggtctctcatttgttaagcctcaccgcagcttcggactaaagtatcttcagtggctatctatcacacactgttaaaagacttttatgctaacagatgtttgggattaaagatgttctttaagaaagaacaaagcgcttctctcaaatacactttcacaagaggtgatctcccagatttgatccgtagagatgggtgctccatagtaagctgggcaaggaaagttgtttccttctacagtgtgttatttggtgataagccagaaggacggacactttcatcaggtgtccctgtaatatcgcgccaggatcatactcctgtaacgaggaactcactatcttagctatggcaggagagagatttgggcttcaccaactggatttgctaccttctggtgtttctctcccgctaagacatgtaagttggattgccccaaaaaaaaacaaaaaaaaaaaaaaaaaaaaaaaagacatgtaagttggaattgttagagacttgtaaatgtgaggaatatgcaggtgtaatgataagctgttgataacatcagtgtgatgattttccatatacagttctggtgttatatcttttccat

SEQ ID NO: 1622 - DNA, 1517 bp, Arabidopsis thaliana columbia
tctccagaggaccacgtttccggtatttttatgtctacgagatctatttcaagggttgcggatagacctttcctcttcccgaagccctagtttggtacctagccgccctcaaaattgctctaccccagtaaacccaactttctccgaaccattttaggatcataaccgtcgcgacggagaccgggtacatattcagagttcccaaactggtactcaacgatcatgtggagggctctcgcttaagctttgctctattggctgcctcctactcctgctgaggcgagcgactagggacccacatggagaaacgtctgaagtacgactaggtctggcgacatctaaagggggctccatatgtcgatcctctactgtcttggatcctcgaacacaaacacatagcttgatctgagagatagctcgccatatcttgctcatcgtaatgttgttcttcttagtagaggcaattgatgtgagtcaaattaatcctaagaccactctctcaaataagagattgattgtaggattttagggtcgaatttcacaatgctttttgaccacacaatagactaatgttatcgaattaagctaaacaaatagattataaaataaagaaataaaatcaagcaatagcatattgagagttgtaaaataagataataaaagcgttaggcttagggtattctcaggaaatagatgatagtagatcaagcacgttaaacaagttcgataagttcaccttggtagataggccaattcttaatacacgccttcaaaccagactcatcaaatagtagttcttgtaatagatccctatggtgggtatacctattatctgagatcaagttctaggtggtcaatctaaaactagcattaagagcaaacaaagatgaagaatcctacaataacttagcaagttggcaatctaccaaatcatctatgaagcaaacaacatgattagtccacttgtactcttcaatcactcgaacaattaaaggaacattgctggattccgcctgaaattatgtggaatcgaagatgcctgagcccacggaatctccggagaccaccgctccgattatttttgtgtctacgagatctatttgaagggttgcagactgacatttcctcttcccaaagccctagtttggtacctagacgccctcgaaattgctctaccccagttaaccccaaccttctccgaaccattttagggatcataactgtcgcggtagagacctggtacatattcagagttcccaaaccgaacgagcttcttagcgtaagaagttcgtcaaagaaaactggctacttctcggcatacccgaatgccaatagaaacctcatttctcatcttccgaacaaagatgagaactggtaccatccttggttcttagtaaagaaaactcctgcttcgattgggagcctttccaaagtgcttccatcgaaatggtccacaaaacttggtagagattaggacataaacatacttatcttatgtttgattacccgttgcgtac

SEQ ID NO: 1623 - DNA, 973 bp, Arabidopsis thaliana
gtctccgggataacgttggatcatctcttcgtaataaccatctacgctcccacctccacctccaccgccacctccggcaccatctccgcctctaccaccaaatccaccgttggaacctccttgggggagtcgagatccttccaaaaccctcaaagacgccgtttcttcgtgatatacgctgatggttttcgttatgctctccggcgactgaatcttgtagaggtttccatctgaagaagctcttgtaatcggtttagcaacacgaggagtagcagcagagacggttcgagccgtggttaccacccttggaacagacggtttctgggcggcgcgtaggttaaggtccagtgaagacgcgcttctcattatcattgttagttcttgtggggaatatttcagtggaggaagagaagagagatgaaaagatatttagactgcaaaaatatcatggagtttccggttcttgtcaagccccacactattagtcaatattatcaaattgaccccaaagttttatcatttttggttacacccttgcatcattacatgttcattcaaaacgttatcgtaatacaagaatagtaagttaatctctaactttagatacgagaacgaaactaaaagctagttagcaaataaaacattttgaaagtatttgcattatcaggccaaaaacataagtagccttttctgtaaattctacgactatcttaactagatatcatttttggggattgttcccttatttatatatatcaaatcttatcggaaaacaattgttataggcttcaggaccaccataatcgaatacccctaaagaaaatattccaatttgattggctacggaaagacgtaagtaactggatcaaagaatttgattctgtcccacaaataagttactttttgcattcttgaacttatttccacggtcatgagtcatgaccaaaccaagacatttggatttggatatatc

SEQ ID NO: 1624 - DNA, 1008 bp, Arabidopsis thaliana columbia
tggagatgaaggcgtgaacttctattttcgtcactcctcttgaccatcaaattacccacttggtttgggctcttcttgggcttgtaatagacataaaatgacttagacttgatatatattccttgagtccaagttctgaatgttataccatggtttggatcatcaaatgggtgatttgaatgtgaatcatttgtctcattaaaaaccttgtcaagaaaacccattgggacaaaacttgacaagggaaaaagagtacaaatgagacacatacccatttgatgatcatgtatcaaaaccaacgaggttaagataacatctttcctatactctttttccgctagaagctcgttttctggttcaaaatgctcctcaggttcaagctgctcctctgcttcaagctcttcctcggctacaagctcttgatcaaattccaagtcctttgtcctttgtgctctgataccacatgatatgatcctggtgaggaatcaatcccaatttcggcacttgaaagatctggagtggatattctcgaaatagagacgacacacgactcaaagacgagatgatggattgaatgacgccacaaaaggatgcggaaaagccttttgataagtcgagaaagatcaaaattcgacatacgaaaatggatccatgatctatttttaagagagagtttttgataaaaagatagatgagttctcataagagattacaaggagtttataaagaagaagaagaagagaagagaaagagacaaatcttggaatatactcgaaggttgcctagaaacacaacataataattaaatatagaatttgaatagaaaagaccctttggcttcaaaaatgacccttgaacttctattttcgtcactcctcttgaccatcaaattacccacttggtttgggctcttcttgggcttgtaatagacataaaatgacttagacttgatatatattccttgagtccaagttctgaatgttataccatggtttggatcatcaaatg

SEQ ID NO: 1625 - DNA, 757 bp, Arabidopsis thaliana
ttcacatatatcatttgtacacaagtttgaactctatatttggctctaagggaggattcttgagctataaactctaacaacctttagcaaaacctccacagaacaaaatttctttagctatatctaattcatttttttttttttggcaaattaaaccacaacaaaagcaattacaaaaagaccaaaatacccccctttagacattatagatcataccgacttctaaagtagaagcgtgaggcgaggtaagcatgtttctaggacctctagtgttcctcctaagaaactcgtagccaatgttaatggcgagtctcttgagtaatcctgatcctggcttcgctttcatataagcgtttcccattatataagccacgcctccctctcgtgcctctgttagctccattaactcttgcctagtttccttttctatctttggagtctccgggacaacaaacctcactctctttttgaccttactcttactctttttctttggttttggtgatcgaatctctgacgtccctggtttatcagggtcatcaatatcgctttcgtagtgatcctcaattccttgcatgtatgtggaacaagtacctactactgacattctatcatcatcctctccgttggtctctgcagcggtggcggcggtttcagcttcagtacggataaactcggcaatgctacatacaagatcgccttcaaactcgaaatcgtctttgtggacatcacggtacccgaaccggacaatgcaacg

SEQ ID NO: 1626 - DNA, 1093 bp, Arabidopsis thaliana columbia
  unsure (1)..(1093): unsure at all n locations
tcaaaggtagagggaagaaatcagagagagttggcagtcttctcattcccatatttgagcattttcgcatcagatttgagggagaagaggtcaacaccacgaggttcactatggatgagagttatcttaagaactctcactggctgaaaggcagcttcctttggtgtttcagagacgagacatggcgccatatgattcagttaccttgccccgcacttacagagattacaggcgagcatgaggagctcagttttcgtcctgatccttcccttctgcatgcagcaccacgcaccaggcgacaaagaggttcagcttcaggatttgcgcctacacagaccaaggacgagttcattgaccctgctgggggtccgacagttggatctttctcctccgctcttccatatcacctgccttctcgtcctcctatcccgatggagccacgggtctttcagcagtatgccgttgacagcttcaagagcgtctggaacgccatagttacactctctcgctgcggttgtgttgntacaactcgtcgtcgctctcctgcacccacctccggctcagaacatgaggactagccatcctccttatcttgctttgttttctgactttgtttttgctttatttcagactattagttatttgttttgaaacttgttgtacttattttcttatgctttgttggaactattgatgtgtgttttactgatttaacagtctaactggagaatccatgtgaaaacactaactaaggctctacaacaatgcgcagaattcacaaagctaagcgaaacgaccagagtgtcaatcgacaccaacatggtatcgatcgacaccactctcaggtggtaactcacgttttctaacttttaacttttgcttacttctctttcgattcctctaacttaataaatatggggacagtgttatctaagtctgggggagttagtgactaacttcatctgtttttttcttatgagtcagttgtgtcattttaacttagatagtcgttttattgagtcaaaacttttgtctgaaattatgatctatctctcgagtttattgcctggattgcttaagtactgcacattca

SEQ ID NO: 1627 - DNA, 1526 bp, Arabidopsis thaliana
gatttgctggttcattcaattcctcaaagggttctgattcttccatcgctttattggagtctaacagcttttggtatccaaatgtttccaaatgcagaaacccatcttcaccacttttggttaaagcactgttaagatgatcttcttccgccagctcttccagtaattcatcggctaactgatccatttctttgatccaaaagagttgcccttccaagggtaggcttcttcatcgcgtctttgacatcaaaggtcatcctaaagtctttgccaaggcttagatcaatcttccctttcttgacatcaatcatagctcctgcagtggctaagaaaggtctccctagaatcaaagggtccttgggctcttcatccatctccaggactacaaagtcagttggtatctcacagcaccgatcgtgattccgaagtttttgagcaaaccatgagggatccttactgatctgtcagctaggatgagggatatattggaggacttgtattgagtgaccccaatcttttggcaacagagagcgccatgagactgactgatgctcctaaatcgcataggcatctgttgaaagccaatggacctaaagagcacggtagagtgaacgaaccaggatcactaagcttcttaggaatgatcttcttctgtatgatagcgctgcattcatgactcaataccaccatcccttgcacttcttgaattctctccacaatcaagtctttcagaaacttgtgagagtctgggattagcgctagggcgtcaacaagaggtatccgcaactcaacctccttaatgttcttggcaaacatagctctatatgtgtctgccaacgctttcttgtgacggccaggaaatggaagctgcggtttgtagggaggagggacaaagactttttctttgtctttgacagcaactggccttggagcagttggcgatgctgctgggatgacaggtcgagtggtcggtcgagtaacgctgtcgagtggccgctcgagtggttggtcgagtggtttgtcagcttgatctttctcgagacttaaatcctccccatcttgatcttcactgtccttagtgaccgtgttgggttcctccctagttggaagtgcttttccactacgcaaggtgatagcatgagcatattcttttggattctgaactgctttgcctggtagttggcttgtctgttttggagctgaagaagatgcagaatgtccctctaagtaacggactttggtattcagtgtttccatcttgacattgagatcattgtagctacagtccagcttgttatgtaactcagatatcttctttgccatctccatggagccagaggttgcccgtgaagtagttgttgtagcatttgtttcatatcagcgtcacgagcagcaggaccttggttttgctgaggtgcaaccctggtggtggtggttgctggtaatttccctggaattgctgcttaggaacgaaaccttggttgtagggacaaaaggtttgttctgactttgttgatgctgtggag

SEQ ID NO: 1628 - DNA, 709 bp, Arabidopsis thaliana
gactttaataataatttgtacattattaataacatttacatttttgaactcattaccatacacttttttttttctcaaattcaagacttcacattttgataatttggaagaaatttttttttgcgtaactttagtatctatattatttttttcgttgtactatatctctttatcattaatatacttacgcatttacatgtggatcatctgagaaatagccaagacattgctacaaagtttcttaagaaaatcatcaacgttagccatcggcgactcaagctccgacgactcagcgaacgcgtcagagcaagtcaccacatcagcgatcgcagcactgaccacactctcgagccgttcaaagtctccatcatcgacggctacggaagcatctttaagatcatcgagaagcgactcgtagttatcgacacacaagtccaatacatcagccacgtcacgcggcgttgacttatccacgatgagacgcttggctaagtcaagcgtggcgttacgtttctcgtagagcgcactcatctccattcgaaggacgtcgatgggttttggctcgaatttgcggaagtcacggaggagtgggaggattgagacgatgcattcggcggcgtagtcggtgttagagcagacggagccaacgcggggtgacacgtgaagggatgagatgttgagcttagagaaacccgggaggtttttaaag

SEQ ID NO: 1629 - DNA, 683 bp, Arabidopsis thaliana
tactatctactcagagtatatcaatgaataaagataatctgttcttattcacataaagttgaagagagtctgcagaaagtgagaaagatataggaactttgcacaaagaaatgctaaccttacaactcggacaggatagcccattttgcaactaagtcttagagcttcattcatgtttttaaacgcctggtcagaagactgtatcttgttaactcttttgtttccactgagatcccttccaccactgcaacacacattcacacatattaagataaattggaaaaaggctacttcaataagaagggaaacaggtgacaaatataatgtaaaaaatcaaaccttcctgtgtagagaaaccattcaccatgatcctcatcatcgtcataacctccagagagggccacagactgagctccaaccgctgcttgcccggcaatgccagcaacatgcgggaaatgaactccccactgcctacactcttgcctgtcctcccaagattctccaaccaaaacaccttggtttctagtgacatcattcgcagctggtatgggaccaaaatgatcacgaggtattgtcacaaaaaacttaccgctagcagcattagctttcccagtttttactgcccgctcggtagtaaatgctttgtcaggacggtcttggttgcggataatatgatgaccttg

SEQ ID NO: 1630 - DNA, 724 bp, Arabidopsis thaliana
atctaaccctagtttcttaaccctaatcctctatttccctaatcaatccttttctcaatccgattctcctcgaaacatcgaaacatttttcccaaatgacacaatcacccctccagttcaatctccggttctatcgccgccgcaaaacccatcatcttcgtcatcggattcagacagaggaaatatcttgagggctgtgcttataacagcagcaagcactttacttgtagcagccgtgttcttcttcctcgtccataaatgtaggcggaggagaaacagagtcggtggcgttgacaacacccttcaaccaccggttcctccgttggcggaagcggctttagctcgtgaagggtttactcgattcggcggaaacgtaaagggtttgattctagatgagaatggtctcgatgtgttgtattggagaaagttacaacagagtcaaagagataataaaggtggaagctttaggaaagagatcatccacggagacgatgaagagaagaatgtgatttattcgaagagtaagaagaaatctggaccggtgacggagactcctcttctcagaggaagatcttcgacttctcatagtgtaattcacaacgacaattaccgaaatgccaccaccactcatcctcctcatgtcaagactgattcttttgaattcgtcaaaccagatccaactccaccagcgcctccaccaccgccaattccggtgaagcagagt

SEQ ID NO: 1631 - DNA, 1163 bp, Arabidopsis thaliana
acaactggatcttctcgaggaatatctagagtagtgttagctaaggaggcttctagctgcattgaaccgggcccataaatcctccctttcttctttggagccacctatgagaaactcaaaaccaagaacacaacataattgatatggttcaacttgccttaaactctctctctgaaataagatatcgattgtaatatttaagggtcggagtccacaaagttcctttgttcacacaatgagctaagtgtcaagattaaggtagaagtgtgtaagaaaaatgaaaagaatgtaaagtaagcaaaaagcaggttggttggttgagaaacaagatattaaaacgtcaggtctagaataatctcaggaaataattattagtagatccagatatacctaggttgttaccgaaccgttcttaaacttaaactctaatatcagaataaccggtgatgttccgtaaaactcactatgcctagagttatgattctcggtgatgtgccgtcgaatcctatacttaaagatgcatgctaaacgagtttgataagttcaccttagtagatagaccgattcttataaaccaaactcatctatagtagttctggtaatagatacctatggtgggtacctgtattttctggaatcaagttctagttaattactctagagctagtgtgggtactgaaatccacactagaaatttataaggaagtttatgagaaaggagggctagatcttcacaagaactttgagatttatattgctaagaacgactggaattttgtattgataatagtagaacttttacaatgtagaatgagattacaagtgtaaagtatgaatattaatgttaagcttgaatgaatgtcttttccaagtcgtccttgcttccttatttgttctcaagtcgttacacacatatctctcctcgtcagaccaacggggtcctaaggccaaaatactgaattaccacatgggctccggagctccgtaggtcctctttctgatcggcttgttggcctattaggccagcctggcattttcgcaggtggattcctggagggaaatccagctccaacatttgccccctagcccaccgagtgagtaggtgagctcaatgagcagagatctgtgtcaggtaagattgcgaaaatgttattggtaatgtg

SEQ ID NO: 1632 - DNA, 834 bp, Arabidopsis thaliana
gaggatatcagaaagcaataggcattaagaacaactaatcaagaagggatctatcaatcaatactcaaccatctagcatactgagaattctacactactctaaaaccacctagcatactgagaattctacactactctaacccatcctcataaacctattcactactcagacatcatagcagaaagcataaacgttgaacatgatgaaaacatgataacaacagtgtaacaacaggatgataatagatgaacaacagtaaacgaaatcaagaacaaatactgaatactgaatagataaagagaaatccggattacaaaggtctagaacacagtgtctccggaataaaactagataaaaacttgtttgcgaaaatatgaagacttgctacttatagccaaatattccaaaaccctaatacttaaaacgacgcagtattgggacggattaaaaactgtactcgacccaggtggtcgagtgggaggtcgagtgaatagttggggtcttcttttcttccttatgctcgagtgtctggttgagtgcggaatgaagaagattctgaagcttgccatcgagtatgtagtcgagtggtggtgatggtgatactcgacttcctggtagagtgatgtggtcgagtgatgatcaggtaatggaggtgaagacactcgacctcggggtcgagtgatctgatcgagtgatggtcaggtggtggggatgaagacactcgacctcggggtcgagtggtgaggtgaagtggtggtgtctctactcgaccagggggtcagtggtctgctgaggttgtgaatcgtctactcgcctggaggcgagtggttttg

SEQ ID NO: 1633 - DNA, 621 bp, Arabidopsis thaliana columbia
tcaagccattcttaaaacctaataccagcacaagtcttctcctttgtgagcttatagataagaacagcgataccaacggcatgtacagcctcagaagcgacgaaaagattgtcgtgttcatgaacaatcaccctgaggagaacaagcaccgtcattgccgttaccacgccaagaaaagcctttacttttggcggttgccggcgaatccacgccattacggactgaatcggattcttctccgccttcatcgttcggacaagatctctttctctctctccctcgctcagatcaaatgtgtgattaatgaatgattatcacacaacttcgtcttcgtattgaattggggaatgaatgatctgtagaattcttaacgcaaccatacaatggcaatgccattactttcgcgaggaagacacgtggaagctgttaggtgagagactgatagtttcttgttaactttggcttcgtctcttcttgtctgatgcatctatcgtatttattacactaaaccggtttggtttgaacgaaagaatttacaaaaccagtttaactaatttggcacgtgtgatcgatcgtgtggtgaagaacgagcccattaacggcccaatgaagagcgcgtgt

SEQ ID NO: 1634 - DNA, 1065 bp, Arabidopsis thaliana
ggtttactacattaaagcatttacaatctaattttcggtttacactttaaccggaatttcagtaaaagaatgtttttggattaacgatactctatgtgagtccaatattatagacaggttattttcttaaaactctttacccattttatttcattatcctttagttactgtaattgcttactagttactatgtataagtattggttggtgagtataacagatacatgaataaagatcaaaacaagctaggtctaccgaaagatttaaaaaagaacaaaaccatagctagtttgacatttgtttggttaccaaatccgtgtgttgacgactacaaatagtttatgttgccatttagccaagattttttgtatggctatgtggtggcgaattcatgtctaagaccatctccattccacattttatgagaagggtgaaagtaagagcaagacggctactttaggtaatgttttgagtgaactttgctttgtattatttcacttggtctttaagttacaacattagttccctttatagctagacaatactagggtttcaatgattgtaaactgacagctgtctctgtcttatcaagcttcgcaggtcaccaaacaaccaaatctgttctttgtgttgattggctccgtacagacgttcttcttcttcgtcttcactctgtttttgttttcttgcacaggtggtggtcttgtctgttgagaagaggaagaagacttgttgggcttcactgttgtgttggttgtgttgtcattgggcctgtttggtgagtggcccaataacccttttcctttgttaagctgagcgacatcgttctctttctttgactcttcagctgaacttgagctctgattcgatctcatttcagatcttggagctgttgatggcggagcagtggagctcttgctaatatccccccgcaaacccggtgtaggtggctcaactacaccgagtttgtacctgagtgaagtaaacgcattgaacggaagcaatttggtgaagatgtctgcggtctgctcatgtccaggtatgtgtctcacttccagcaatcca

SEQ ID NO: 1635 - DNA, 1060 bp, Arabidopsis thaliana
gggtgagtcagggcctaagatcacgtgaacccgaaatcctaaacccggaaccgtaaaccctaaaccataaactctgaaccctaaacccttaaacctaaaccctaaaccataaatcccaaactttaaaacctaaatcctactttaggcttccggaaaccggttgcggttctagttcttatgctcaatgatacacaaagcatctagtcatatttgactacaaatccgctaccaaagcatcttcttgattcctaaagctttgatggttgataagtgtgtattttgcatgttttgagcatccatttgtcatcattttagaatcatatcatcactgttttataccatttcacaacatttatcatcactttgcatgtttaggatagttttgcatgcatgttgcatatttgcgttgatttcaggtgatttggagctgttgacgagctatctggaagaagcggacctgatcacgacaaaccactcgaccaagaggtcgagcaggagcttcaagatccaaagagaccactcgacccccaggtcgagcataggacatcaccacttcacttcaccactcgacctcttcactccacctggaagtcgaatatcttctgacaccactcgatcacctcactcgacccccaggtcgagtgccttcaccttcactgctagaccactactcgacttcatcactctacctagaggtcgagtacctccatcacaccgctcgactgcatactcgatgacaagcttcagagccttcttcattccgcactcaaccagacactcgagcacaaggaagaaaagaagactccagctattcactcgacctctcactcaaccacctgggtcgagtacagttcttaacccgtccaaatacttcgtcgttttgagtattagggtttcgggatatttggctataagtagcatgtacttctcatttttgcagacaagaagtttttacctagttttaatttccgcagaccttgtgctctagactttttgtaattcggatttctctttatctattcagtattcagctttggttcttgattttcgtttactgttg

SEQ ID NO: 1636 - DNA, 759 bp, Arabidopsis thaliana
aaaaaaaaaaaatgaatagataaaaaaaaaaaaaaaaaaaaaaaaaaaaaaaaactaaaaaaaaaaaaaaaaactgtgaaaacaaaaataaaacaaagcacatataaaaaaaatataccagggtaatcaaatcgcgacacctaaacatgacatcatcatatttgaagaggccaatcaaattggtctaacctcccaaacccttcacgccttgaaacgtggtaagctaccacgcgagaagagttatggaggccataatatcagtttgactcctccagaaagctttagtgaacatatatccaagtcccatgaacatgagtctagctcatgaactctttcaattctcaacgtcaacgatgtccataacatatgttgcttacttttcatgaattttattttcttcaatccaataattcaaaatttaatataaaaattgtctaaaagtgaatagaagaaatatatattttacaatctaaaaatgattaagaaacaaggcaacaccgcacgtgtatcaaagacaaacaactcgccgtcacgaccagctaccgagtccgacccgaacccgattacatcatcaacccgacccgctatcactctacaaatcatcatcgccttccttcctccgccacctccactactcacgtacgcttcaccactacccgaaaacgtacacacagcctgacctttcccaccggcaaaaacacacgcgccacctttaaacccatcaagaaccggataaaacctcatcatctcattaccatc

SEQ ID NO: 1637 - DNA, 687 bp, Arabidopsis thaliana
tgaaccatgatcatgtaatattgaagtgatcccaaggctagagggtgagctgtgaaatctggatattgaagcaggtgatccttgtgtggggctacggtttggaagtggtgatgttactggactttggaccattcgaggtgaaaatatctttgagtgaacatttctttggactgaaactcgaagtccacgcgattcgtcaaccttcttaaggattgaattcggatctgcataagatttatgagaggacattgtatctttctctttttcaggagaggatgtatcaggacttgaaacaatattttccgatatcatcaacttggttttctccttaactttctcaagtgccgattccaataggctacgtgagtcagggcttcgaggagaacctgaatccaagctttcttgaaggatatttgctgctgttatttggttgaaaacagtcacagcaacatcagaatttggatccaaccattcagcttcactaaatatctcttgaaccttagcaaatgcttccataggtaaaacatctttttcctccatatgtggcagatcaacagaggcaagctttttaccagcacccatctccgaaaatataacctgaacagacacagaatgttactcctctcttgacttggaaagacaattagctatgtataacataaaatgcttttaacagatatgccagac

SEQ ID NO: 1638 - DNA, 1338 bp, Arabidopsis thaliana
tgctaatattgttagtggttgtatctgtatggttccagctgttgcagccattgcatctgactctttctttggaaccattcctgttatctcagtttcagctttcatttctcttatggtaaagttaataaagagtccttgacatttgtttttatcagtttctctctgaaacagaaattcactaattctactcttgaccagggtgtagctctactgactctaactgcttcacttgacactttaagacctagaccctgcgaaacagcttcaatactatgccagtctccttcgaaaacccagctcggagtcctttacacggccataactctagcctctataggaacaggtgggacacggttcacattagcaactgctggtgcgaaccagtatgaaaaaactaaagaccaaggaagctttttcaactggtttttcttcacaacatatctagccggagctataagtgcaaccgccattgtctacaccgaagacaatatcagctggacccttgggtttggtctgtctgtagccgctaatttcttcagttttttggttttcgtctcggggaaaagattctacaagcatgacaagcctttgggaagtcccttcacaagtctactatgcgtcattttcgcagcattacgcaaaagaaaagctgtggtttccaccaacgaaaaagactaccacaatgaatcaatcacaatgcccacaaagagtttcaggtagaaaaaccggctcgaaaaccgcagtttcattcttgcactgagaggccgttctaatgagttttcaaatacgcaggttctttaaccgtgcagcattgaaacaggaagacgaggtaaaaccagatggcacaattcgcaatccatggagactatgcagcgttcaacaagtggaagatttcaaagcagtcataagaatcatccctctcgccttagccacaatattcttgagcactccaatcgcaatgcaactaagcttaacagttcttcaaggtctggtgatggaccggaggcttggtcctagcttcaaaatccctgcaggctctctccaagtcataacacttctctccacttgcctatttatcatagtcaacgatagggttctctatccattttaccaaaagttaacgggaaagcacctcacaccgctccaacgagttgggataggccatgcgttcaacattctaagcatggctgtgactgccatagttgaagcaaagcgattaaagatagtacagaagggtcattttctcggatcatcatctgttgctgacatgtcagtcttatggctcttccctcctctagtcatagtaggaatcggtaaggatttgattccggataataa

SEQ ID NO: 1639 - DNA, 1019 bp, Arabidopsis thaliana
tccttgttcgtcaagcttgacaccatcaaagcttcggttcccattttcgcaacaccattgacgatctcagcggttctcttgtaccacttaaccaagaacatttcaccaccagtggatcgtgattccaccaagtgctcgcttgtacagcaagaatccagaagcttccgtgtggtctttgcaagattgggaaactttttaaatcgcagcttctgaatcttgggtgtgtgcatgtgtgtaccgagatcccatgatccaatgagatggcctccagatccgggaatgcgaaacatgtcatctttctccgaatacatgacactggaggagtagaaacaggggtttgcgattctgacgttgatccactcgggtttacgttgagctggtctgcaaaagctgagctgaggtcctaagaacttgacagccacgacacagtcctcatcctcgggagaagatgaagacattgacacattggtgacgatttgagtttggcaatggggcagagttacaagaggaggcaagggaatgcgtttagggttcgtatccgatgcagccgggttaaaatcatcttggagacgcaatataccgtcgtccttcaaagtagctacccaaccatgggatgacccgatcgttaccatgggatcactgtgcaccaactctagaggcaccttcttttccaagcaagtgcgtcgagacatcatcataacatcgagtctcccgagatgatcagctccacaaggttgaacgccgacgattgaacaaggaggggtttgcatcagagaggatcttaccagtacaggtttcctccgaaagcatagtagcttcaaaggttggtttagaagcagagacatgcgtaagagatgttgttaccgaaatgcaaaggctgcaagagatttagattagattaagaaagtattatacaaaccctagttgaagaataaataagtttatgcggtcagtagaaccgaaattttctcgatttgctttggttctgtttaaagttgtgatttgacatgatttgattc

SEQ ID NO: 1640 - DNA, 575 bp, Arabidopsis thaliana
tgttctgattggatcttctggcgttggacggtcttttacaaaagaagtgatagaagccatgtcctccattaatgaggtatttactatccctatcaagtgaatgagtgatcatattaattattaaagcatggttttggttaaagaggtagtgaaaccaacaatatgtttcttgcagagaccactgataatggctctctctaaccccacaacacaatctgaatgtacagccgaagaagcttatacttggagtaaggtaagtctctccacaccgcaccattgttccaatatgtattcccttcagatagaaatgaagttttctgatcttcttcgaatgaagggccgtgccatttttgctagtggaagcccttttgatccagttgagtatgaaggaaaggtgtttgtatctacacaggtagtagtcacagatagtttctcttctcttcatccgttgaggtttacggaactaggttaagaaaaaaatctatgctttacttaaaacacaggcgaacaatgcgtacatattcccgggctttggacttggtttggttactctggacaatacgggtacatgcgat

SEQ ID NO: 1641 - DNA, 908 bp, Arabidopsis thaliana
ctaatattaatatacatgtagggtggcttttattgttttgacatgttctgttagcatacaattagatgttcactgttgcaaatggaactatttagtattatttaactaatataaatcaaacaacgagacattagacataataatcataacacaacatacatacaacatgtaatgtcaacaaacattacgttatttttaagagttacccgactggtgacaagtttccacagatactaaaacattagacatacaacaagtaaaacccagtcatatcatgttatcggccgattaggatgagaagctcctaacagctaacatcgccgacagaattctttggaacaaaagaatatatagcactcttcgcacctattatatatgttgtggattgatacacatgggggatgggccccattctatgtaagcctgtaaactgtaccttgacgcaccgccattcgctcaagagctgcaaatagagagtctcccatagcgaatacctcggcccaaggttgtgcaaacaactgttcagtgaaaaactcacctagctctttctctccaccacaaattgtcaacattgccatcacaaacagtgccacatctactttgtttatcgctttgaaaatgtgtttttagccatgtttaaatctttttcccaacaagcgtacatgagcccttccaagtaatgtgcttcggggttgtttgtctccaatgcgtcttcaaattgttttttgaataacccacccacccgcataagtacaggattttgtctgtactttctcatttcaactcgagctatcatgtgtgtatagggaggattatgttattcattggtcggtgagattcatgtatatatagggcaatactggtggagtgtgtatacacacatttatgtggggttggtggtgggtaga

SEQ ID NO: 1642 - DNA, 395 bp, Arabidopsis thaliana
aagtcattgtgatggtttataacaagctcctacggtgttgtgtttaagaagttgtctgatgctcttttacgttttgggtttgtacaaggccatgaagattactctttcttttcctatacacgtaaaggaatggaatttcgtgtgttagtttatgttgacgatctcttgatttgcggcaacgatgagtatatggtccagaagttcatggagtacttagggcgttgtttctccatgaaagatttgggaaagttaaaatattttcttggtattgaggttagtcgcggctctgatggtattttttttatcacagcgcaagtatgcacttgacattatatccgacagtgggaacctgggatgtcgcccagctttcaccccattagaacaaaaccatcatt

SEQ ID NO: 1643 - DNA, 1367 bp, Arabidopsis thaliana
ttgtaattaatggtgtatgaaaaatcattggtttgtttagttgaattaaatttcagtaaacggtttagagtatgaacccactcaataaagatttgactgccaagcgttactggtgtctggtggattgaatagttaagagtataaggtttgggccattatgtggtttttattaaagttgaaggtctcatttattaattccttagagctgatggctaatgtacaacgaatttgattcaggagtaagataaacggtacacccaaacacgcgacgcgagcgaagaagacgatgacgaacaaggagaaagctcgagagagaagggagaaaagaaatgcaggagatctctctccttcgaactattccttactctgaccaccataggtatgaagagacctaatttgtccaattgtttcggcttctttgtatcctaagatctatcatcatttactctgcgagattctcaatttcacagcattcgatgtgttaatctctaatttcacttgcttaaatccatttcttagtgtcgcttacagtgtttgatgagtttctatttttctctatttgggagttggagactgaattggtattgttgttggtacttacagatttgtgtttcactaaaccaaaagaatttagagaaattgaaaatgatgaagtatgtgtctctcaagccctctttttgaatttgacttgtcattaggcgtcaaatgattttttaggtggtggtcttgtgaaaatgtagcagtagtgactggttcaaaccgcgggattggattcgagattgcaagacagcttgcggttcacggattgacggttgttcttacagctagaaacgtgaatgctggtcttgaagcagttaaatctttgaggcaccaagaagaaggtctcaaggtttattttcatcaacttgatgtcacagactcttcgtcgattagagagtttggttgctggcttaagcaaacatttggaggtttagatattctcgtaagatccttatcgattcgtaatcttggaggatagttctaatgttttcttagatttgaattacatgcatttgtgttgctatgtttttcaggtgaataatgcaggtgttaactacaatctcggctcagataatacggttgaatttgctgaaacagttatatctactaactaccaaggaaccaaaaacatgacaaaagctatgatacccttgatgagaccatctcctcatggcgctcgtgtagtcaatgttagttctcggctaggtagagtaaatggaagacgtaatgtaagaaactctttcactcatatctttgattttttttgaaaaaagaaaatctcgttgaaattcatgaattgcagagactggcaaatgtagagttgagag

SEQ ID NO: 1644 - DNA, 622 bp, Arabidopsis thaliana columbia
ggctaatccttgtgaaaatgattggcaaagatagttgttaaaagttgaaagccgataaagaaccacgctataagcttgagtctagtaatgcaatcatacaatcatacacttagcattaagagcagtgaagaaactagaaccgtaataatgaaaacagaggataattgttcttcaaattagttgctggcttaaaggattgatcatttttaatgttgtgaaaccttcatttattcttctaataaactctgctattggccaacagatttgtggaaacagaaaatggtgaaaacgtgaatctaaaattaacacatttgagccaagatagaatgttgaaatatagtggtaataagactccaactggctctctttcattaagactcttgttatcaaaagaaaatataagaaaatccgaaggtttcataaagactacaggcaaaattccatagaaatcacaagctctaataagaaaccacttcacttggcagcagcgtgcttggccttgttgtgagactcaagtgcattccctgagttgaaagtcctgccaaagagatataagccacaagcgaaatgttatacaaacagaacgtttgagcagtgaagacaagagttagagacagagaga

SEQ ID NO: 1645 - DNA, 583 bp, Arabidopsis thaliana columbia
tttttttttgaaagttactggaaaaagcttttttgttacatctatatatctccgttgcgtagtgctaacttttatttttcaccacaggatctaccgagagctgtggctgactgtgcccctagtatctatagtcatggttctggtggaaaaattaagcgatcctcctctaatcagtacagctatccacgtggatcatgggtccatggaggagagctttatggaataaaagcactatctaaatcgtctgattctcatccagttgattcttcatcaattgtgggggcatttgcaaagctggctggaaatagagcgaataatgttcaccctatgcaatctgtgtaccttggttctggtcgaaggttcaacaggtactggcttttcttaggcacatgcaatgcaaatgaccctggtcataggtgtgtgttctttgaatcttctgaagatggtcattgggaagttatcacaacaaggaggtaatgtcattgtactcttcctgaaatcttaatcactctgctggttaaatggaaacttgtattgaaagtcatatgatcatgtgcctgattatttcgtcttcgcttggtgt

SEQ ID NO: 1646 - DNA, 527 bp, Arabidopsis thaliana columbia
ccactttgaataaccggtgcttcagacgaagaagcagaagatgttgatgacgtggtgtttggtttaggtgaaccaaagaacggagaagaagaatgtaaaccgcaagatcggttaatgatctcaccgcagagtccagggtttgacgaaaacgaagacgcgttgaatcgtaacagagtctttgttaacggaactaaaccggtgaggttgtaactggaaacgttaaatgaaatcagagaagaaagatttaacgacgggaaagttccgttaagtcgattaaactcgagatttaaagaactgagtcgactcagagcattgatccccgacggaatctcaccggagaagttgttaaacgatagatcaagttctgttaaccgacgaagagagagaattgaagaagaaagagtaccggagaaaccattcttgcttagggttagggttttgagattgacgagaggagatagatcaggaatcgaacccgagattgagttattctcaaggctaagaacacagaagctgatcaagacgac

SEQ ID NO: 1647 - DNA, 546 bp, Arabidopsis thaliana
cccgtggccaaactgtcttcagcggatcgcctgcgatgctaccgcgcttcttcgcagagtttggccatccaattcctgaacatgagaaccgcaccgagttcgctttggatttgatacgtgagctggaaggatcagctggtggaacaagaagtttagttgaattcaacaaagggtttagacagaggaaagcagagccaagaagtcagactggcttgtccttaaaagaagccatcagcgcaagtatctctaaaggcaagctcgtctctggagcgaccacaacaactcatagctctggctcgagccctgtttccactattccaactttcgcgaacccgttttgggtcgaactcgcggttctagccaaacggtccatgactaattctcgcagacagcctgaactattcgggatacgcctaggagctgttttagtcactggattcatcttagccactatgttttggcagctagataactcccctaaaggagtccaagaacgtcttggatgcttcgcttttgcaatgtcacaacgttctacacttgcgcaga

SEQ ID NO: 1648 - DNA, 1074 bp, Arabidopsis thaliana
aatctatattttgaagttaattatctacttcaaatgtgcattttcctcaaatacatcaatgatgatcttatgtttttctataatttgaatcacgagtgtttaacattttcataatgttaataatgaaacctatacaatatgtttttgtgcatcaccatataaacaacttgtatgattatatggtcacttagattcacattgatatatgaaaatcaaagatcccaaaacacttttaagtattttagggtttagggtaaagatttgcgagatggttgcggaagatttgcgacgattaaaattgttcttgcaaaatactcgtacttccctcgcaaatattgcgaggaaagtgtccctcgcaaatattgctacggatgtgcaatgtgcgtctatttcctagcaaacgacttgcaattctctcgcaaatttgcgagagatttctttcctcgcaatgttgcctcgcaaagcgactgttttcttgtagtgaccgagatcaatcccataattagctactggatgccgggagaaatgtcagtgctgatagatactaaacgccctcatgtatacattgacagtcagatgggtctcgaaacgttttttttggttcgtggtgggtatctttctctcaacttgttcgtctctttcaataatacagtgaaggcgttcgggaatactgtctctaggtctcatggtgaagtttctgaaagtgaccgtgtgtttgatagtgctacaaatgttgatgaaaataatgaggatgcagaggaacaagccgatgttgaagacgatacaacagaagaggatgaagtggaggagggcaacgaagatgatgatgggtgtgatgattatcttggtgtggatggatctattgggggaagtaccacgtatcctaccacagacggtagtgaaggtattggcgaagaatacgattacaacaagtggaacgatgtaatagtagaagaatatgtacaaggaaatcttgaggaagacatcagtctcactcaacagactgctcaacatccaggggaattcagtcgtttattggaaacgtgtacgtacacgagtgttagtgtacctggc

SEQ ID NO: 1649 - DNA, 1167 bp, Arabidopsis thaliana
taacctccacataagcttgtctttgtctgtctgatttgttttggcaggaggaacgttttaagcgtcatgtatcatatggggaagtgtttatgcaaacacatacaagggctgatggatcttttgtagatcagagatctcagaatgttggtgaggcttatgtgaagatgctggaagagaggatgtctcaaatggacgaggatggtcctcaagtgtcagacaattcctcgcaacattcaactcatcgtacgctcagcattgatgaaaagaatgagattttccttaaggtaattcatttctgtttttattttgcttacaatctgcttgtctttgtttgcttggaatataattgattatgagcaatggatagttagagtaattatgaatgtctttggtgattgtatttgtcttcttgtttcagtgtactcatacagatggcaaagggaacccttttggccttggatctcatgtggagacactgaacaaaagaagaaggaaagagagttatgcgagctcgtctacatcaacggttgtgcagcttcaagagcagctacagctcaagatatctgaacaagaggagcaaaatgcaaaacgtgatgaggagcactgccaatctcaatctcggatagccaacttggagaagctcgtcctcttcatgaaagaaaaagatcctgagttggctgcttatttgtcaactgattctactgaacctgaaccaggcacacattcaaccaccacaactccatccacacttccaaccaccacagacaccgcactagccatcacagttgtaggcaccacacccttagtctccacttcacctactatttctaacacttcttctaaccattaaacttgatcttttgttgcttttgttgtttttgttgtttttgttgaaacttgtttaggatttctatgactatggttttctgaatgtaaacataattagtgtcttaatgttaacatgattagagattattggcttttgaatcgatattaatcatgtatatcattccaaacataagaccaatttgtgactataccaaaacaatacatgtgactactttgtgaccaaacctaaacaatacatgtgactaatttgtgaccaaccaattatataactatgaccactttgtgaccagacttattcataatatgtgacgataatgt

SEQ ID NO: 1650 - DNA, 1006 bp, Arabidopsis thaliana columbia
catgcctgcagctagaggatccccctctgttctttccgtctccaaaacgcccgtctccaccaaacttcgaaccctctctggatattaggacagtcttcattagagttcaagaaccgatcaaaccaagctaggaaaaactcttgttgccaagcaagaggaagagtcagaatggtattgcttaaaccatcctcgattaaataccgatcaagccctttcgaagctctcctcatccacccaaaatcatcatagaaaggtgtcaaccaattcctcagcagcaaacacctcacttctttcggtgtcagaatttgtccctttccaattccaacaaagatcctcgctgttactctgctaatctcaaacctgtgaacaacagggaccttagaatgtacctcggatagctcagaaagagaagcccacatcacaataaaatcctctgcgatttgtctatctatcaaaatatccaaaatccaatgcagattatccgcttgtcttgctatctggtcaacattctccaaatccgactctgctgcttgtagaaactgccgcttaagcttatgcaaacacccatcacaagccaagtacaacgactctttcctaagatcatttccagacgagttctctctaagcattttggaaacaagtgttttcatatcacgccttgctttctcatcttttccctcaagaacaatatgcaaaagattcaaaagcacctcgtcattgctcccaccgttactcccgttattcccattgctagcttctacagaaactcttctcaaaacttcagttgccccaacgttttcaaggtgtagctcagacaacaaagaagcaatcctgtattcttcatcctctgaccatggtgctgcttccaagtactccagacatgaaagcactccagcatcaaacccaattgctgctgaaacctgagaggacaacaatggcaaactgaaattgacaatgtgattgcacatatttaacagaagagtatcacaatggagacttttgagta

SEQ ID NO: 1651 - DNA, 493 bp, Arabidopsis thaliana columbia
tcataaatctagtgtggcttacccattgaccatgagaaccactctgttaccacgagtaattggaacataattggtctcctgcagaaatggaaaaataattggatctatatgactgaggaaacaagacacttccataaagatagcacatataagtacatacaggactaagtatttgctgaagaacatgggacaccaccacatccacaggttcaacgtcaaccacagcagcaccaggttctccatgctgagagaaaatgatacaagatgtcaacgtacaaaccaaaacactgaagcaaagtgaattagtgtgcaaactcggaaagatagaaaataacatacaattccaagcccgagttccatcttctgtgcgccaagacgatctgatgtaacctgtccaggaagtgtacagacggataatgcaacacccatggtaccaaccatctctgacgcacattttgcctcagcagcaactttttctagagaaagaccagca

SEQ ID NO: 1652 - DNA, 647 bp, Arabidopsis thaliana
aggctaaggagagaccagctaaagcttctaggacttcgactagaacatctccagggaaaaaagttgctgctcctgctaagaaagtggctgtgactaagaaggctccggctaagagtgtgaaggtgaagtctccggcgaagagagcttcgactaggaaggctaagaagtgaagaagattggtttaggataggttttggggggagattgaatacatggtggtggttagcttctatagggtagtcttgtataattgaatcatccttgaaggagcttgctttccaaagttttttacttgtttctttggtttcttcttgaaacttttttttttcttctttgtaagttttggtttgtttgaattttaagctttttgatcaatagctataatgtgatggtttcttcactcttttacttgttcagaaactgttatagaagctttccatttcaagcaaatgacattcacatgtttagttctgtcttactgtatcattgtctttgtggattcttcagttgtggttttgaaggaactggtctctcttaagaacaagcttgaccaatgttaaggtgagattcatatgttttcctctgaatcatgtcatacatttgcttccttaaacatctcttaagaccaagcttgacaatgtaactat

SEQ ID NO: 1653 - DNA, 804 bp, Arabidopsis thaliana
tcccgcatatgatttatcggcttctctggttatcttagctctgattacagagattcgactgaacgcgagcattcagtctagaatcataagcttgagtaccggaagggtcggataagaatcctaatgttaacgagattctgccggaagagctacccgagacaagtctgagacccgacgctgtaatcacctgagtctataactcgtttacttccttatattgtcgcttacattcaattacttcatctagcttattcaacaacatcataagtctattctgtgaatattgagagctcagtggaattcgacccttaagtgctacgacgatctcttatttgcgggagtaagcttaacgcaatttgagctatatcaacctctttatccagattgcacaaacaacagtaagctctctactattgtttcactctttaggctaaagactcagggtggttggtctacttgagtccttgtcaaatatgctacccaagggtaatgtcttgcacatatccttgtacgaggtgaagaagttttttaaaacttttgatatgggttatgaaaagatacatgcttgtgtaaatgactgctgtttattcagaaatcagtttcaggagcttgacacttgtcctaaatgcaattcttcacgatggaagattaacacgcgaactggtgaggtgaagaaaggtaatccatagaaactacttaggtactttctgatcattctaagtctcaagaggatgttcatatcagaggagcatgccaaagacttacagtggcattcactaacaagagcatcggtggaaaaatgtg

SEQ ID NO: 1654 - DNA, 1002 bp, Arabidopsis thaliana columbia
caaggtgtacttaagcttggctcgggtgtgttttctggtataacacccgagccgattatcgtttatccgaggtgtttcccttggtctcgaggtgttaccgcaccgggctcgggatgtgttttctggagcccgagccagaatagtgacgaacttagctccccaagtgctgatcgtatctgtacgattggctcggttacttgggtgaaatccgatcccaacaatttgcccccagctcgttgtctttaaccagaaggatgacgagcttcatggataagatatctgagctggccgtccgtcttcctaacccgtgacttttggcgtttcagcttctcgaacggtcaaacttccattgcgtgtggtcgccttctttcttgagaagcggaacgtctcgcttattcccgagatttgcgcgggcgtgctgtatcctcccgagctcacgcgcctttgacgcgttttatcaacttctttggacccgacgcgcctttatatctctatatatattgagctcttcctctgaaatcgttcacttgaagtttccgaagaaaaatttgaggtttgctctctcttctctgatcttgatttccttataacgttctcttttttccggtagatctccgccgctctttagataattttttatttctccggttagaaaattctcatcttctgaccctcatttcgtcaaaaagttgcgagccaagcatgagttcttcgcattctaacgcctctctttcggcccctaccgattatctcgtcgattccaatgactcgaatcaccgagacgatctccccccaattcacaaacgaagaatggtctagacttcatatgagggctccgagactgacgcggtgtcatctactaacgcttccgaggaggcggcgcctttttttgctcgggaggattctaccgctaatattgctcgggacatggacctgcctaaagatcctgagccgtctctcatccgcagaacctgcgctccagctgttaatgaggctggagca

SEQ ID NO: 1655 - DNA, 871 bp, Arabidopsis thaliana
tgagatggctattgctctaactagcaaagaaaggaaatgagttcacaacagaatggcttgaagaagaagattacccagcagatcagaaaggagtttattttgaggaaagagttattgagtgctcagtttcagacttatcaagagaagatgcaaaaaatgaagatgtcttcatcaaggaagaagaggaccttttagctcgattcatacatgcatttgtcatcatttagctctgtaataactcgttgtttcatatctttatgcatcactttaggacattttgcacatttaggcatttaggatcattctataaacgcattgcatgtttgggtgtgttttcaggtgcataaggagcttactcgaccatattgctcaatcacaccaaaggggaagcattcactctatcacatagctgcggaggaagccagagatcaccactcgacccaccactcaaccaatcactcatccaattactcgagcgtaaccgacggattccacttgacgagatgatcgatccatgcgcctgcggatcctcctcatttccccacttaaccagacagttgagcgtaagaagaggagaggaagaagcaaccactcgacaagtgatcactcaaagcatagaggcaaaagcacaatctttaccgcaccctagtcactcaatgataagggtcgagcatatcactaaaccgcctcaaaactattgtcttctagtgacctagggttttcaactttttactataaataagtaattttggatttgtccaaaggaccaagcttttattctctgaaccatttttgtgatttagaatctttaaactctaattactattaatctattttgtttttgcatttaattctttgaagaaagttgttt

SEQ ID NO: 1656 - DNA, 693 bp, Arabidopsis thaliana
gaaaataaataaacgagagatcaaattatcacggcggatattatttcgtccacatttgttgttcaaacagatttctaacacatataattagcatatatacattaaacaacattatctccttaataattttgactctggaacagatctttccagtttcagacaatatatttgaacaatcggttcgttgaatcgagaacaaaccaatcaaatctcttttgacaaagctcttcttcttcttcccataaaacttcacaacggcacacgtctacgaaaaaacctctctcagtcatcatgttctctaaagtttccattcttctcttttccctcgcatccctactcttgttccgatcaaccacaggcatcgaattcatctacaactccaatttcaccacaaccaacacacttctcctcggcaacgcactgttaaatctccaccgtcgatcctcaccctcaccaaccaaaccactttctccatcggacgtggcctctacccttcaagaatcaacgcctcctcctcctctgcctcgccgttacctttcgccacatcattcatcttctccatggctccttttaaacacctctctcctggccacggcttcgccttcgtcttccttcctttctccgaaacctccgccgcaagctcatctcagcatctcggcctcttcaacttcaccaataacggtgaccccaata

SEQ ID NO: 1657 - DNA, 549 bp, Arabidopsis thaliana columbia
ctttaccaactcctttagcgaaaacctcgactaagttcttatcaaccgtaagcttattaagcgtaagagtaccagtcttatcacaacacaatacatccataccagccatttcctcaatagcagtcattctcttagtaatagctccttgttgaaacaatctatgagaaccagtcgccattgtaacagataacacactaggcatagctataggaatccctccgatcaacaaaacaagtaaattatcgattccgtctcgatatctccggcgttgaatcggatacattactaaaagctcaacgatgattcctaaagcaatcgaacagatacagaagttaccaatcgaagtgagaactttctggaaatggccgatttggtttgtgttgtcgacgagatgagctgctttgccgaagaatgtgtggactccagtggcgatgacgattgcttcgatttcgccttgtttgcatattgagccggagaagacttcatcgctggggttttttgtgacggggattgattcaccggtgagtgatgattgatcgattttgagag

SEQ ID NO: 1658 - DNA, 1168 bp, Arabidopsis thaliana
tagtttctggtgtttgggcctcctatctgttgcagcagactcatgtatggtgtcctcggcctattatcataggtgcatatcggtgatcaggagtccttggtctagtttctggtgtttgaggccttcttcctgttgccgcagactcatgtatgggtgtccttggcctagtatcagaggtattggatcggcgttcaggagtcctcggcctagtttctagtgaaaaagcgtcctcttggtgtgcagagcggtgttgcggtgtgcgtggcctatgctgaggcgtcctaagagggtgttcaggggtcttaggctgagttccaaaaggccttggtgatacatcatcatcctcatctccacgctgatcagcctggcttaaacaaataccaacaaatgagtgagtttcagaagtcaagtgagcaagtttagctattctttgatttatgaaataatacttaccctccttgcaaagtagtctccccctgagtatagagcgagagaaggcgaaactggcagcgaatcgacattgcttgaaggctcgatcttgcgtccctgtagcggggaaaggcgacttaagaagttgccattggtgtgatcataagaggatggtgaactctctgctgacgactcaaccttcttcttggcgaaatagctggccagaggtgatctgcttccacgagccggactagctggaggagtctgatccctgctgggagttctcttaccaaaccctgacacaagacaaaaacatcagagactcttcttgatgacagaagactttgacccaataacagaatcagaagcatatttgtttcataccaaagagtttcttctccttcttgtggacatctggagagtttactctctcaaaacagatagcagtacactcatggaaaggattgcctgcgttggagcaacctggaactacttttccagacactaattccatctcacaaacttaaaacaaaactctatgataagatctcaaacctgaccattccaaaaagaaaaaaaaaagcgtcagatccattgacccagcaaaacaagtagatatcatcacacaagaagagagtcaacggtttctatatatggaaactacaataaaagattcatgttttctctttgcttaattatgtttcttctccaaagagagagacttgacaatcttccactg

SEQ ID NO: 1659 - DNA, 776 bp, Arabidopsis thaliana
tcctctccatgcggtagcatacgaacaatgcaaacccactcttccccgaacaatactcattatgcttttaggtggtggagtttgaaacttacctggataattctcatgcaaaagagacgcggctaaccgtggtgtgccggtatgttaacaatcgcttgaattcttatcagaccgcttgattgtatgcatcttcctgtgaactctaacactgaaacaatttgagctcgttacttttgcacatcgtaaatactatttacaagcagttgttgtagattgtcggcatcgtaacatgagtcgctttagatccaattttatagttgcggtcgcaaaacaatacttatttgcagctctgtaaaccaaatcttgcaccgcctccttagaaaaaaattcttggtgtagttcaatccccattccatcttcccattccgtaacactttgaattttctcactactctcacttctttcactagcagcacatgaaagatcataatactcaaattctaccaacctcaccattatctttttccctatccatctggctatccacatgctcaataagtacatgccataattactacctccacatgcaaagctggtcttattcccttagcattcactaccattagataccctaaaaagtcatcaacatctacaatagatatctctctcttagatgtgcatagaatgtaactcaagttcaacttccttgaggtttcatctattccaatcatcttgcatatgttttctactaacaatgagtatgttatctttgacgt

SEQ ID NO: 1660 - DNA, 925 bp, Arabidopsis thaliana
ggtatatcatgaaagaactaaacatatagatgttaagtatcacttcatcagagatttggtgaataatggagaagtgcaggttctgaagattgatacagaagacaaccctgcagacatattcactaaggttttaccagtgagcaagtttcaagacgcccttgaattgctcagagtgtctcaaaattaaggtggagcactgctccaagaaaccagctgagtgggtttactcagggagaagaagctgagtgggtttactcagggatttgaagctgaacgagtttgttcaggaaccggagaggaattcaaactaaagcaaagtggcataaagatcaaggtggagatttgaagtttggtgatctatatgttaagtctcaaaaaacactctaagagaatcagaaggtctcagaagtctgttttaggcgagctaaggaggtggcgacatcaggtctggtttaggcgagctaaggaggtggcgacatcagaagtctgttttaggcgagctaaggaagtaagagagagaagagaacaattgtagagagagagagctcgagtttgagctaagtgtttttagtgaattccggagacatctccggcgagacgtagggttccacatcggagcctgaactcgataaattcccgtgcgtctcttttacgttttttctttgaatccgatctcaaatcaagtcagaacctgaaatcgatccaatttctgaaggttcaaggttcacaaattggtatcagagctaaaggtttagctcaagaaggtaagatcgaatcaaagatgtcgagtacgaagttaaagatttctcagtttgatggatccggtgacttctcactatggaagactcggatgttctctcatctaagagtgatggggttaaaagacgctctagtggaacaagaacagttacctcctctgaaagat

SEQ ID NO: 1661 - DNA, 1263 bp, Arabidopsis thaliana
acacggataggacgtattctagttctaatcctgaagaagtgggtaatgttgtagaaaatccatatgtggatatggtgaacgatgcatttaattataacgtggggtttgatgataattatcatcaggatagttatcatcaggatagtagttatcagagtatggaagaaccggtccgtaaccattcaaagaaattctacgacttgttagaaggtgcaaatactccattgtacgatggttgtcgtgaaggccagtcgcagttatccttagcatctcgactcatgcagaacaaggcggattataatatgagtgaaaagttggtggattctgtttgcgaaatgtttacagattttttaccagaaggaaaccaggctaccagttcacattaccaaaccgaaaagttgatgcgcaatttaggacttccatatcatacgattgatgtttgctcgaacaattgtatgcttttctggaaagaagacgaaaaagaagatcattgtcgattttgtggcgcacaaagatggaagcctaaagatgaatgtcgaataaccaaagtaccatatagtcgtatgtggtatctacctattggagaccggttaaaaagaatgtatcagattcacaagacagctgcagcaatgcgatggcatggtgagcaccaatcacaggagggagaaatgagtcatccttcagatgcggcagagtggagatatttccaaaagttacatcctcggtttgcggaagaacctcataacgtttatctcgggttgtgtactgatgggttcaatccgtttggcatgtctcgtaatcattcgttgtggcctgtgatcctaactccatttaatttaccctctggtatgtgcatgaatacagagtacttatttcttaccattctgaattctggtccaaatcatcctcgagctagtcttgatgtcttcctctaacctcttattgaggagttaaaatagttgtggtctactggagtcgatgtgtacgatgtttcattgagtcagaattttaatctaaaagcagtactactgtggacgattagcgactttccggcgtatagcatgttatcaggatggactactcatggtaaattgtcttgtccagtgtgcatggaaagtacaaagtctttttatctacccaatggacggaagacatgctggtttgattgtcaccgtagatttcttcctcatggtcatccatcccgtaggaacagaaaagactttctaaaaggaatagatgcttctcctttctagggtatagagt

SEQ ID NO: 1662 - DNA, 557 bp, Arabidopsis thaliana
tctagtaacgtgcgccagtgtgctctaaaggctgatggtttcagtaacgttctgtccctcttccgatactgctcccggatacttctcgacatcaactttgatgttcagatcccaccaggaacggcccagcatcaggcgtgtcagcggtttttccatatagttgagcgggtagctcgggttcatcatgcccgctttgctgctaccgtcaccgtagatcatgttgttatcgaccagcgattttttcagatctgcagaacacttggtgccgcctgcataggcatcattggcgtacagttcaggaactcggtgaacgttttaaagcccagctcgtcatttttgccttcttcataacgatagctcgtatcgttccacagccagaccgacatgttctggtacagacgttccagatcgacgctgctcagacgctcacctttgcgaccattggtccggaagtagagctcatgctgatacagacgctgaatgttggtgcctaaatccgcagcctgcaccatcgcttttgcagtgtcggcgttaaggcttagttgcgtatactgtgg

SEQ ID NO: 1663 - DNA, 802 bp, Arabidopsis thaliana
taccagctgattactttatttgcaaactcttcccccactctctcgcgagcatatgaacatcatggttgcgtcaactggaaccaggttcctaaaccaattggaatgatacaaagaatgcattcatgaatcacttcttcaatgaatccgtgacagaggcaattcgtttgcaaatttcttcgttcacccaagctccagcagagtcccttagagcatcttggctccgattcaggtcttatgagcgtgaatgtccccaacatggtttccaagagagccaactaatcaaaatattctacaaaggaatagacaagccataacagattcaactcgatgcagcaacctcttgtaacatcatgacaagaaccactagtgaagcgttactcctaatcaccaatgctttaactggtcattcgacgcagcagaggtgtacctcagtcgagaagacaaaaagaaaaacacatagtcagtaactgaactgaaaattgaaaaagaacttgatctaagcaagtctgaaatctcaaatttaacaaacaaacacccaattggcaacgacgccaaattgataataggtttttagtcaattatcctaaaacaccaatcatatcgttgtagtattttaggttgtcaatacaaatgggtgtgatgctaacaatcaagatgtgatcagaagtcactaagtcaagccaagcaataataggttttggtgcgttctagcagtcctaagtgaacatgcagaaaacacaaagtcaagcaaaaacaaataaacactcgaccaacacaactcgttgcagacgactgggtgggg

SEQ ID NO: 1664 - DNA, 844 bp, Arabidopsis thaliana
ttaccaacatgtcatcaatgaaacctccattggattcccagcagttcggcgaacatttcgttcaccaaacgttgatacgtcgcccctgcattctttaaaccaaacagcatcactatgtagcaatacgttccgcgatcagtgatgaaagccgttttttcacagtcgtccttgtgcatcaggatttgattatatcccgaaaaggcatccatgaaagataagagctgatttccagatgttgcctcgactaggcgatctatgtgtggcagtggataactatctttagggcaagccctgtttaggtcagtatagtccacgcagactcgccacttaccgttcttctttttgaccaccaccgggttagctaaccattctgggtattggacttctttaatcagaccggcttttaggagccgctcgacctcatcttggacggccttggcgcggtccgcccctagccgccttcgcttttggcgaactggtttgaaggttggatccgtgttaagcttatgacaggttacctctggagcgattcctgtcatatcctttgtggaccaagcaaaagatgatgacctcgatttcaggaaggcgatcagttcttcctttatctctccttccagttcgcttcctattccaaccgttcgagatggatctgattcgtcgatgttcacctggataattttgcagcttggcgctcttattgactcacgagctggtcgctccgacggtgcagctcgctcttcgtcctttaattgctataagaatcccttctttcgttgtgtctgctcaatcacgtagcacgtccgtgagaccttctgggttgccgtacagggtgaagatcctgtgt

SEQ ID NO: 1665 - DNA, 1035 bp, Arabidopsis thaliana
cgccctaaccagtgggccccacatccgcgctcatctatcaacagtgcctcaatgtaattaacttttggatcatcaacttcatcatcccatgaaagggatggaggacaaacattgtccgcttgtttcacaatatagttgacctcaacctacataaataagtttgttaaccatagagaatgtacacttactttttatgtacgtacataaacaattgaacacacctcatcagcagcctcacactccaatatgctagatgtctggattgcccgcagtgaggcaagacgatggatagacctctaagcaaatgtcctgttagcttcatcatcaggtcctaccttagcaatggatgggagtgtttcgaaagcaaacagctggagtgctaatgggaagccatggagtgcataagaccctttcagtaaaccccttatcagtagttgagcatcagaaggagtttggaattttcctatcctcccaaagtacgggtaaaagacacccttccccatgggtatttgcagaagaactgcacgttcttcgtcatctcaacagtcttcaaagttagcctgttggggttattgtgggacatcatcacaccatctaccagaattataagagagagagccagttgcttccacccctccatgctttactcctcctacagccagctcaccaaatcagcaattgttggactcggtttcgcccaaaacctctcagtaaacagagtagtccaaacactattacactcatgtttcactcttataacagcctccacggctttcttctagggatacttcccacattccagcccagttacgatactaaattctcttaatccaaatctgattggatgaccgccgaataccatccacatctcattcaccttctttgtcactaactgacggcatattagtccaaggacaagcttaccagagaaggaagccttgtttgcaggtattttaaaaaggtccctaaatggagaatcgagaagaaactgcatctcttttttcccttttagtgcatttgctatgtcataaatgc

SEQ ID NO: 1666 - DNA, 1169 bp, Arabidopsis thaliana
gtgttgttgtggcctttgtattgtctatgctgaacctcgatgtcgcccttcttgtacttgtttaatagaatgctttgtaagtgccgacatgcggcggtggaatggccagatcgcttgtggaaatcgcaatattggtccaaacccccctctttatctgttcgccgagccttttcaaggttggctggctgagcactgggtctgcctcgcttacgagatacgatgcagccttcctttcggtcttctgccggtactcctggttatagtgttgacggggttcgtaataatcatcctgaactttttcttttgactgtttgttagaagtatgtttcttgctgaaggccagcttttcttcttccatttcgatatagcgcgttgccttgtggagggcgtcttctagatacaccggccgatttagcaacaaatcatcgcgaaaacgcgactcgtgccacacggtattgcgtaatgccgagatggccgcctcatccgggacggcgatgcgagagacgactgccttaaacctgtcaataaaggtgcgaagcggttccttcgggccttgggccatagtccaaaggtctgcgtgtgtcgtgccgcgttcaatgtacatggaataatgcttcaggaaggcgattgaaagttccaagaaacttcctattgaattagcaggtaggtcggagaaccaattcaaggccgcgccgtaagatgttcggaaaataagtgacatttgtcggcctcagcttcgctcggatggaaatgggccctttgtgtggcgacgctgaaagcgataaaaattgttgtggatccgtgttaccttcgtaactttttaacactatcttgttatcatgccgaactgggacgttgctgatatgtgcggcaaaaggtgtcttttgggttttttccaggatctgttctaactcaggagcggaactggtcgcctgatgaactttttgggacatcgcttggatcgtacttctcagctcctggattccctcgttctgagatcgctcttgatatctacgtccaacggcatttagaccactcggccttgtgttatttgctcggcgcatggcgttgcgaatccttctgaatgtcgagctgttggttgactcgaaggtccgtgtatgcgttagtgagacgtcgaaccgttcggcattctttcgatcctgagcttg

SEQ ID NO: 1667 - DNA, 867 bp, Arabidopsis thaliana
cacatgacccgattctacccagcccattagtcgttcctttcaaggaatcccgactcatttaacgcattctagaatccttagactcgaggtctaggattccttaccttccttcacgatgttcggtcgatccgacccttcttcttccttgccggccacagtccgactaccgatttcctccgatgatttattctcccgaaaggagatgagtttaatggtgagtttccggtattttccgtgtgttctgctgcctctaaaggtcttgggcgccctcccttatataaggagcgaattgatgcttcccgaaggatcacctccgttccttgcacctttccgaagagttgcatctctcggtccgtaactgctcgcccttatccaccctttgggcgagcacccgttcgaccgtaaccgcccaagtaaccgtccgggtaaccgcccagctggtcagacagtcgaccagctgcctcgagctcaaccgtcactcgcccagctgctcgaggtggactgtcactcaacccgagtaaccgtcactccttccagctgagcttgagcttcggacgagctgacccagctgattcctttacgatcctagcttagcccgcatgatttccctttgtccgagcttatggccaactccttcccacttgtccgagactccaccttcttttctcagaccaagtcccagccaacaatcctattgaggatcgcgggcgttacagataacctgccctacaggccaaatgtttgtggttaaggttttcccagaaacgatgacgagtatactcaatgttttcatataatggtatataagaagagtgatcttccacactggcatcactcatcgccacgttgacacctctacattctgta

SEQ ID NO: 1668 - DNA, 1595 bp, Arabidopsis thaliana
ggatcccagataatgaggagaactatggacgtgtcttacgcaacacaacaattttactttgaggagtatccgcaccgagtcaaagtaaagactcaaaggaaattcacaagcgccttggtttcctccagagctggtgtaagttccacaacaaggctctcgcgacactcaacaagaagtttaacaatctccgactcaagatcaactgttcttcttcaactacaacaatgccacataacatgccttttgggagaagcggatccactcgtcatgaacctatgcatttcgatccgccttcaccaccaagacagtcgtcatatgagccgagggaacaccatgctgcaccttcaccaccaaggcaatcatccttcaaacctagagaaaggaaaagaggagcaagttgaaaaagcgaagaagaacaaggaaatcagatgctggagtaagccactctaccgcaccacttgaggggccactcgatcaacaacccgagaaaagggtcgagcatccagctatccaagttcagcataacccgttccttggagttatacaaaggagagtatggatgattttgtctcctcctacttcacctgattactgaggtacaccacctcaaccattgtacataccattagctttttattttccttttgtgttgtttgttttggtcttgaattctctttcagatttttattacacaggggattgtgtaattgaagtttggaggagggttcaagacatgtttaacattgtgttctcttttcttatttcacattttgcatcatctctggcatagaaaaaccataaaaatttgaaaaaaattcagaaaatgatttcatcaaaaatagagtgacatatagattgcatattattttaggattgtatatagtgtgcttgcatttaggattgctcatttgcataggggataatgatgatttcaaaccgataagcatgttttgattcaatgaagtaagttcaatgcccatgttgttagttctctgttgcataactgattgtatctctgaagtaagaccgcactctgctttgaatttgtaacttgactatactactttgatcgaaactcgcttatctgatgtcattccctatctattagaacctgaactgaatttgcaattatcatgcttatgcattgtttgtgaactcatggctaccatatacatacttggatcatcttattcatttcatcaccctctgttaatccaagtagctgtctctcattcttagagcagttttccacacccttagcctagccttatttcaagccaaagatcatttgtttgtgattgtgaggtctttttcgattgagcttggtataacatgttaggtatgagccgacaagagaagtctttcatgtagacctagcccatgctttttgggttagataggactaggtggagacttgtatttgggattgagaatgtgtatggaatgaatgggaatgagagtgagaatgagaatgaaaaaaaaaaaaaaaaaaaagagagtaagagtttagagttctaagggggatacaaaagtgttaagtctagtaaagggtttggaatttaaagaagttaggaagtgtgatcaaagaaaagggt

SEQ ID NO: 1669 - DNA, 602 bp, Arabidopsis thaliana columbia
tgaaagtttccagaaggtactagaatgaaatattccaattcattttgtgcattacttaactaaggtaatatttctcttacctttcaggagggctcaaatcaccttcgtcttcacagtccatatgagagcccgcctaagaatggcgttgacaaggcattttcagacatgtcgttgtatgcagttcctccaaaaggttttttccccccaggttcggcaactatgtcagttcactctttgtcatctggaggctcagatacgctacatggtcacatgaaaggaatgggtatggatgcttttagagttagtctgtcaagtgcgattagttcgtcgagccatggttctggtcatgatgatggagacacattgggagacgttttcatgtggggagaaggaataggcgaaggtgttttgggtggtggaaccacagagttggaagttcgttggagatcaaaatggattccttactgccaaaagctttagagtctactatagtacttgatgtccagaatattgcttgcggtggacaacatgctgtccttgtaacaaaacaaggagaaagtttttcttggggagaggaactgaaggtaggcttgcatggtgtg

SEQ ID NO: 1670 - DNA, 583 bp, Arabidopsis thaliana
ctctcgaacgggattggcgcgtagaggcgtagtgattcacacaatgcaccatgtaaatataccatcttgtttaacttgtctgcatctaaactcattccggatcctggtagatttgtgttgatctcttggcggatcttggtcacagcttcagggttcttggagagaagccagaagaaccaagtgagagttgttgcaatggcgtctcttccagcaagcatgaaactcttgatgatgtctttaaggaagttatcatcgtttgggttcaaaagctcatacttggaaatatctagattcatgtagacgcttaataaatcctctgcatgagcttctcctccaatattagaatgatgacttattatctcctccctctttgcagatatatactttgcacaagatctgtcaaaagcggcattagcttccttcatcttcttctcttctccgagtccaatccagttttgcagcttccacaagaccacaggcttgacatgtctgtacacaacacttcttcagcatcatccatagctttagcatactcattctttggcattcaatggaaagagacttgagtcacaaccgtaccaga

SEQ ID NO: 1671 - DNA, 823 bp, Arabidopsis thaliana columbia
caaaacaaattctttttctttcgtgattgattttatgaatagcttcttggacgattccgcaatagcaactcttccaccaagtcacggatccacaatatacggttctacatacagtgatgggcgctggatttatattcattataaatttatgaagatgcagattctgacaacaacgagctgataaacatcatggagctgttggaaattaggaagctgcatcaaatctgttagtttataattgagtttggtctataagttataattatgttgtattaaaaggtgtttgttagagtcgtgacttttagattaggttgtgtcgtttatcttagagagaaagagacacaactctttacttattgtgtctatttgttttctatttaaactttttgtatcgtgatgaaacgaacaagttctccattcaataaaagtcagtttctcttttgctttgtgtatctcataagaaacagaacaacaagtaaacacttgttttttctttgtaacaagaggcttcaatttccaacatggtatcagagccctactgattcaagggccaaacatttcaagtaaagagtttaataaacacgagagagttatggagatggtgtcacacattgtgactccaatcttcaacaaagagaattatggtttttggcgcatcaagatgaaaacaattttccagacaaagaaactgtgggaaattgttgacgaaggagttccaaaaccacccgcagaaggagatcatagccctgaagcagtgcaacaaaagacacgatgtgaagcagcatccttaaaggatctaaccgctttgcaaattcttcaaact

SEQ ID NO: 1672 - DNA, 1284 bp, Arabidopsis thaliana
aataagagacggaacactggatatgacatttatatgaaattcttgaaagatataatctctgaaggattaatgatatgagaattatgttctctagaactctactcgatcgaataaaaagaaatatgtaacatgacatataatcatataaatatatatttacgttgagtttgtcaaaatatattgatcaaactaatatttgttttgaaaatcattaaaactcctatagagttatcataagtaatacgatgacaataatctatgataaaatatcactagataatgatatttataagtctatatgaaaaccatataattttgatcattaagattatggttattaattccaacgagatattgtatttgattgaaaatcatctccttaagaagatgtttccgagggggagattgaatgatatgcgtggatgtaccctttttccttatcatagtttttatcccacatgatttttctatgacaaggtttttaacgagacattaaagaacacgcaaataatacacttgatgaatattaagaaattctatcaatcatccaaatgaatattatacactaatgatatttagagaaataaataagatggtcaagatgaatcatctaaaagattcatgagcagaagaatgacgttgtactttatccagaaatttgttcaagagaagatttggcagacttattctcaaatactgtttattctctgccacatcttctaatcatgcagagattttactaattcatgaagctagccgcgagtgtgtatggctaagatccatagttcaccatatacaagaagactgtggtatgtatgcagggaaaaagactccaacaattatgtacgaagaaaatgcagcatacatcgcacaactcaaagacggatacatcaaaggcgatagaacaaagcacatcctaccaaaattcttctacacacacgatctacaaaagagcggcgatgtacgagttctacagatccgtttgaatgataatctggctgacttattcaccaaggcgctacctactgctactttcaagaagttagtctatcgtatcggattacgctgtctcaaaaatctcgacgaatatactcataagggagagtaattgtatgttgcactctttttctcttaaccatggtttttcccattgggttttcctggtaggatttttaatgaggcagcatttcaaatattttacgagttatggtactataatggtcatcagggggagtgttatgaataaagatggatgcccattataaggcccatcatctaagtcca

SEQ ID NO: 1673 - DNA, 876 bp, Arabidopsis thaliana
ctagtattagcgacgctgtaatatcgaagtcagtatattatattaaaatgaaaatctttttagaggttttatatgaaatatgtattcaataaaggtatatagtaatatcctcaatccctatatcaaaataaattacttaataataagtataaacataaatatattcatatttacttaataaatgacagacaggagagaggtatacaatatctgaaataaataattatattttaaggcatgttaattcaatggtagaatattgtagtacggccacaagaatataagttcaaatcttatacatgtcttagagatatagtatagataaatcaaaaaaaaatgtaaaaaagttattatgaatttttcaatatttttatttctaataggaatattaggttttgttttaaatagaaaaaatataatattaatgttaatttcaattgaaattatgttattatcaataacatttttaatactaataagttcactaagttttgacgatattttagggcaaacatttgcaatatatatcataactatagctggagctgaatctgcaataggtttaggaatattagtagcatattatagattaagaggaagtatatcaatacaatataaataatgtatttaacattaataattttacctttattaggatcaatagtttcaggtttttttggtagaaaagtaggagtaacaggtgcacatttaataacatgtgtttcagttgttactacaacaatattagctatattagctttcttagaagtaggttttaataatataccagtaacaataaatatagcaagatgattagatgtagaatcattatatgtattatgaaattttagatttgattctttaacagtatcaatg

SEQ ID NO: 1674 - DNA, 473 bp, Arabidopsis thaliana columbia
gaggaacccccaccaaaaaaaaccaagcaaaccaataaaaaaagaaaaaaccaaataaaaaagtaaaaaagcagtaaaaatccaccgaacaagaaaaaaaaataaaaccctaattacagcatcgtcatcgcactctgagaaaaatcgcagagtagagactagaaggagaagaagatgagagtaaagaggcagaagaaaaacaggagaaccgtgagaatcttcacggtctgtaacggataccgtcaaccctacaaagtcctttgcgacggcactttcgtccaccatcttgtcactaatgagatcactcccgccgacactgctgtctctgaactcctcggaggtcccgtcaagctcttcaccaccaggtttatatctcttattgcatcttcacattcacgagctcatatcaatttaccagatttcttattatgctttcgttggagctgttatgtagatgtgtgattgcggagttg

SEQ ID NO: 1675 - DNA, 603 bp, Arabidopsis thaliana columbia
gagatataccggtgatggaggcggctttggaacctggcttcgcatggatggtgatagcgacggaggaaggtgtaaggagacgcaaacacgtcggaaagcttgaagattctgtgaccgtcgttgattccgccgccgatttggtcttctttcctttcttcgtcggagccattttagttttctcgacgaaaggcctttttgggtttatatgttgtaaataggcttttgataaaaggcccttttgggtttggtttgggctttggaatgaaaaagtgaataattcttaagattagcataattttggtgtaagtcgaatttatttttttgcatcctcaggtttcaccttcaaagacgagaagatggcagtaataagctctttgaacaatagatggataacatcaacaaacgttggaaaataaatataagaagaaaaaaaagcgtttgatggaatactaagctgcagtaccatagattatatgctatcatgatttacgagtacaacgaagcaaaatcgcagagtagcaattggctcgtagaaaccagttcttgcttctaaaacatgatttccgattttgaagttagcagtgtgaatatatatcattggag

SEQ ID NO: 1676 - DNA, 565 bp, Arabidopsis thaliana columbia
tgcgaaaaataatgatctgttaaattttctctctatacatcaaaaagaaatatacttagacaaaaaaaacacatacaacaaaacagtgaattccctaaagaagattgtctttagctcacaagtgacttaagagtaaccacaaaataccaacaaaacgagaaaggggataaataagaaactagaagttgggagaggctcatccacaagctgtggtcatttctcaacctcatcaaatctctttacaagaatatggttctgtaaccggacaacatctcaaaacttgttctgttttttttttttcatttcttagacagaaaaatggttgcagcattctcttacactgcctgcaccaagctttctctattacatccttctatggttgctcaaatccgaccaagaacaacacaaaaggcgttcgtggtgacaaatccggaacaagacagtactcttgaagtacaagaaacagagacactcatagaagagcaatcaacagagaagatgaagaagcagccaacaccattgagaccagtggaagaacagctgaacgtgaagagcaagggtatgg

SEQ ID NO: 1677 - DNA, 556 bp, Arabidopsis thaliana columbia
ccatgtgtttacaggcacataaaacaccgacgaatgttaccttgtccggactaattccggaatttttcatctcatggaataaatttaaggcctcagttccatgtccatgtgcagctaaaccgttgatcatggtattccaacttatcaaatctcttctctttatgcctttgaagacttccatagctatctctatagctccgcattttccatacatatcaatcaaagcattcttaacattaacatctaccttattgtaaccaagagtttctccatacttatgtacccatttcccgaaatcaaaagctcctaactttgcacaagcggataaaactaaagtcattgttgcatcgttaggaacaacactcccttcatctaccattctcttaaaagaacccaacacttcagaaacccgcccattttgagcatatcccttgatcaaaccattccaagagaacacatttctctctggcatatcatcaaaaaccctttcacatgcttccatatctccaatatttgcataaccgtctaaaaccgtattcacgacatgacatcctac

SEQ ID NO: 1678 - DNA, 624 bp, Arabidopsis thaliana columbia
aagtacccatgaagtgataaatgggtttcccattaaccgagaacctcgacttacggtcattcatcataatcccaacaccagtagcagatctcaccttgccacaaaggttagtcttcccagatttgcaaaacttgcattcacgacactcagcttgataacaagggataacatgatctccagcttgaacttcagttactccttcaccaacactctcaacaatcctatacccacaaaacaaaataagaactttagcattgagaagaccttaaaactgaatttgatgatgataatgaccattaacatacatacccagcagcctcatgacctagaatacaaggaaagagaccttcaggatcctgtaatcaaaagtcaaaacattaggacacagcctcaaattgattcactaatcaacaataaatcgattcagatcaaccacaaaacactaaatcagactcaaacgaatgaaaatggagagaacgaaccttgccgctccaagtgtaagcgtcggtgtgacaaagagcagtgtagaggatcttgatccgaacctcaccagcttgaggtggagcacttgcacatcttcgatgaccagaggcttgttcggctcgtaagccaccgagctatgtg

SEQ ID NO: 1679 - DNA, 612 bp, Arabidopsis thaliana
tacaagtttctaatttgatgatatacatgcattaaacgtgctttgcagtttgtgcatataacgaaatttagtgtgtattttaaaaagcatctccttacttgtgccctgaagtgtatgcttataaatttagttctcattgtgtcagcaaactgtgtgttatcaattgccttactccaatggcttcaataagcttacttcaagtttccgtagctatcctttgctttctcatccttcattactttctcttcaagaaacctcatggccggtaccctaggaactggccggttctccggatgctacccgctatgctcaaggcgcttcaccgaatctacgactacagcgtgaagattctcgaaacctctgacttgacctttccattcaaaggaccgcggttcacaggaatggatatgttgctcacggttgatccagctaacattcatcatataatgagctcaaatttctcaaactacatcaaaggaccggagttccaagatgtttttgatgtgttaggagacagtttcatcacacggactcggagctatggaagaatatgaggaaatcttatcaagccatgctccatagtcaagagttcaaaggtttcaatgagtacat

SEQ ID NO: 1680 - DNA, 527 bp, Arabidopsis thaliana
taagagtcggattgattaataacaaggcatggctaatgtttttgagtaggattcgatcatatcgtagcttagaactaccaacttggacatcgatttcatctgatttatctggtgctttggctctgagtccctgcttttaaacctcacctccagcttgttctttattgtttgcttagcttgttctttattgtttgcttgagggcaagcaaagactaagtttgggggagttggtaagtgtgcatgttttgagcatccatttgtcatcactttagcatcatatctccactgttttataccatctctcatcatttgtcatcactttgaatgttaggatagttttgcatgcatgttgcatatttgtgttgttttcaggtaatttggagttgttgacgagctaattggaagaagtggacttgatcatatcaatatacgtcgacccctaggtcgagtaccgccatcctggactttctgaagtacccggtcacggcctccgcataacatcactcgaccgcaacactctggataac

SEQ ID NO: 1681 - DNA, 1137 bp, Arabidopsis thaliana
gcatcgacgggattaagagccgccgcaacaactttaatcaaaacctgatcttctttaatctccggcacaacaatgttactctccagcttcagaacatcaactccgccgtagtcactatacacccacgccttcatctctttcggaatcgaagcatccgccgtgacattgaccgccgctgaagcgctctgagagctcgccgagattttcaagaatttcttgctgactgtttgcacgcaagatccgaatctaactctgttgatttggtaaaccggcgattttgttgtgagagaacaataatgaagaagaggcgtctcacggcggagtacgggagttgtggcggtggttgttgcaagcgctgcgttcatttttcagtctgccactagttttgtctaaaaggcttatctctttcgctttcctctgtttttaaaatactctgtttcgtggctttctttgattggttgatattttcttgtggttgtcattttaatgtttatatcacaaaaattgtggcccataatcgtttttgatctggtgctgattttgtgattcatctttgtttcatttcttttagaactacagaagtctagaacaatcacaaaacacttcggtttttgaacattacaatgtacaatttttacgtaagaagatacaatcgacattaatgggcctaaactttaaattgggctttatgaataagcccaacagttgagaaaacgcagtactaaaagtcgatcatctaggcacgatgagattaaccatagaaaccgcgcacaacgaagcacgatcagtacacgtgttaaattatgattgggtccttggtagagattaaagatccaccgtccatttccccagaactagaaaaaagagaagggagaaaactttctccgagctcgattgtttttggaaatcgtcaatcagatatttctcgttcgtctccgccttcgatttatccaaaggtaagctattgataaaaaaaactaaatccctgatatttgattttgaatctcttatactcatacattgctgtcatgtgttgttgtcttgattcaaatctgccagctttttgtaataatgatgcagcactatgtttaatgcttgagttcgattccctttgttcagggttttgcccattgttat

SEQ ID NO: 1682 - DNA, 1250 bp, Arabidopsis thaliana
caaaccctaaaaagcttacccaatctacgaacatacgcactacgcagtttaggtaaaattgcatactgtcactacaagaaaattgccatttaccgactacagtattagtcactctgtagtcgttaaactcctatttacgacaaataaacgactattaaaattagtcgctaatcgagagtcgctaaataacgtaatcgtattttagtcgcaaaagagcgacaaagttacgactaagtttgggtaatcgcttttttagtgacattttagtcgttaaatttagcgactattagacgacaaattaacgattaacttgagggttatttagtcgttgtaggaaattagtcgttaaaatttacgactacgttgtcactaaatttagcgactattagacgacaaattaacgattaacttgagggttatttagtcgttgttggtaattagtcgttaaaatttacgactacgttgtcactatttttaagactgatttgcgactaaaatagcatttagtcggaaatttttgtgactgaattgttataaataaacgactgcttggttacatttttgatgactaaatttgcgactattgttgttattagaacatctatatgattgttataatgattgaaaccttcctgagaaaacaaaactttacaataagcataaacacaatacaagaagcatgaaaacaaatttattgtcatttcagaaaagtacaaaacccaaattacagaaacatgttcgattcactacaacttagaattttgttcagcataagcacaagcaacacaagtacacatataaaaactttgagccttgatattgagtcttgaggaaggagttaagattcagacctatgaagcagatgaagagggagaggcagctggagagggtgagataggatctgtggttgtctccttagctgaatgagattcgaggaaattgaggaaccgaggatcattttcgcgcaaaaacttctccactaaggacaagtgttcaagcttctttttctgctcatctgcagctcgggaattctcattttcacgcaaagcaatctcagattcacgcctctgattgtaagagacctgctcttctatcttgcgttgagcttcaagtaattgttcttgcaaagccacaaaagaagttgagtcacctgcttgcttccgtttgccattgacaagagaatctttgaggcttcctactccataaggaacgcctatcgaatccctctcagtggactgcatagtatgata

SEQ ID NO: 1683 - DNA, 903 bp, Arabidopsis thaliana
taatcccaaatgtgcttacaaaggaaagctctcaaaaagttgcagaaaaagaagcgtaaaagaaaacgtcgaaataaaattatgtttctgaggttattatatccaattacagaaaaaacagataaatccggttaaggaaaaccggtctggtcgtcgagagggtggatcgatcgatccctccctgacggatgggttttgttaggtagatgacttctggatcgatcgatccccacctgggatcgatcgatcctaggtgatcgatctagagttcatgatcccggtttctcgattccatcgtcgtttctggtccaaatgagcctgataagtcccgaaagcattcgcgtcccgtttaaacacctaaaacctgcaaatgactcaagacacagccgaaaagacgcaaaagacggactatgacacgacaaacgactcaaaactaagggacttaagacaccaaaaacgcaacataacaacagggaaggatgttccttttgtgtggtcattggagtgcgaggagagtttcgtgagcctgaaggagatgttgacgagtacaccaatgttagcattactagagcatggagagccttacatggtgtataatgatgtctcgagagttggtttgggttgtgttttgatgtagtgtgggaaggttattactcacgatttggagatggctgcgatgatctttgccttgaagatttagaggtcttatctatggcggaaaagtgcaggtgttcacggatcataagagtctgaagtatatgttcactcagcaagagctgaacctgaggcagaggcgatggatggagctcgtggttgattatgatctggagatagcctaccatcctggtaaagctaatgtggttgcagacgcgttgaaccgtaagcgtttgggtgcggctcaag

SEQ ID NO: 1684 - DNA, 1482 bp, Arabidopsis thaliana
  unsure (1)..(1482): unsure at all n locations
gttttctagttgtacctaaacactacatcaatattcacacaaaattttcataaatttgtatatacctcagaaatcttttcttcttccggttcgtgaaggtttttcggaggctcttgttcacagttttcgtcttcaaatttgttttcctcggctgcaacttcttcacggttcatatctgcttcacggatgatcgtgaccctctcgtcttcactttcactcgaactaggagtgactagccttacacgacccatgattaccttgcaaaaccactcaaaaatcaaggaaaccgttcaatcaacacaacgaaaacctattctaatgtttcaaatcaaaaaccgctccaatttctatacttaaagccctattcgacacttacaatttggaacgccggcggtttggaacgccgacggtttggaacagcagcggtcacggcggaattgcaacggcggctaaacgggatgaacgactaggcgaaatcgaacacgagccacacaatcggcgacggagagagaagagaaagtcggcgacggtgaactgaacggagagagaagagaaagtcgacggctttggatgagaagttcgccggaatcgaaacgagagagttgagagttgagagtagtgagcgtcgacggtttttttgaaaagttacttaggttaaaaaaaattgatttggggaaacccaataatactgggtcggattctgggctaacccgtgaactgtggttggatcctgtagtttcactaagtcaccgaggttatatggtaatctccctctgttttggtatttaaaaataaatcaaaaagaaattcatttttttgggtggcaaaatggaattttttttcccggatgatggtaaaatagataaaaatccgatataacctttcttgactcccagatctgatctttaacgagtttgccctgaagagtgatggtccgtgtctgaaactccatactaatggttgattttgactcataacagaactccattgtgtaaaacgtgagtggaactgcgttttccctacaacattaaatctccaatgaccaccaccttgaacacgtaatcgatcttttctggcatcgtcggtttctttacgtgtttattattctccggtgactcaccgctcatctcttcgttcattattgcggtgatgaagaaaacaactagtataaagtttgagtctcgtttgagtaaagtgagagtgagtgaaaaagtgtgaaacaaagaaatgagaagaaaaaaggttcgagtgttaaatttggtttaatacagtttagtacgaattaaccgaatcaatctaaaccaaagcgagttaacaaaaatctgaaccatttcgattcggtagattagttggatgaaaagtcattataaccatcgaaaccanatttaaaaataaaacctgcttccgaccagaatttcgtaaatttgatttggttttagtcgtaaaagtgttatatgaagacaccacaatgtttgtacgccc

SEQ ID NO: 1685 - DNA, 960 bp, Arabidopsis thaliana
acatctacaaagaaagaacaaaagcttttcatgaaaaaaagatctctccaaaagatttcaacattggagaccaagttctgcttttgaactccaaactcaagttgtttccaggaaagctaaaatccaggtggtctaggcctttcaccatcaaagaggtactgccatatgggacaattactcttactaagaagggaggttatgaatttactgtgaatgggcagagagttaagcgttatatggcagattgtcctattcctgaaggaactacagttgacctccaggaacccatcaatgcctaaaatagtaagaagtctagcttaagactttaaactagctcacttgggaggaaatccatgcctatatctgtacagatttaattttgatattttgatgtgctttttagtgtttttggaattcaggaaataaatcaggatttatgagctgtgaactctgtgatctagaaatatttgcaacagaagcaattctactctatcaattggtcgagtaaaattgcatcaccattgtactctatcaattggtcgagtaaagcaactaaacgaccaagcttgatgatatagtggcccacttgtctccccatcattctattactcggtggacaaagcctttacccatcatgctcaatcactatttggtcaacacccttatcccaacaaagaaagcataggagaccatcctcctccactcattcaaatcgaaacctaaagataagttatcaactctctctcactttcttctttgtgcgcacttcaataccatctttctcatttgtcttctgcttcacacaatctcgaaaattttagttttcagcttcctctaaagaaaaaaatcacttgccccccccgctatttcactcgatcaaaatcgcaagtatttttctttgtttgagacttatctactaaggtttagttttgatttttgagagtttagcttcaccatgag

SEQ ID NO: 1686 - DNA, 640 bp, Arabidopsis thaliana columbia
aaacctttcttttaagattatggacccaagagggtttcctttgtgctaaatttaagtatggatttgcaaagtccatcttttaaatagcatctttgttaaccatgtggtcaagttatgggattcgcaggttgatcagacctacccctaaaaaatgcggactcgaatccgcgaactccccaactcgggtttagtcagttagatttattttctgggctttgagcttttattatttttcctttatttaatggcccacttgtcttaaatgcgacggttgccattttgtcctcggaaaaaaaaaaagtgtcacgcttctaaggcaataattaccttttcctcgattcccaaaaatggataaactcattccgacacgccacaattattaaatttgtggtttcgagtaaaaccctaaatcactataaataagggcataatctaaactccctcaaaatatgatctcaaaaatttacttagtaaacacctctagaatggaaaacgaaggaacctccaccgtttgccccctcgatcccggaactccattgtttctgtccagcgatggcttcgagcccttggaagcgcgtgaagaacgaacccgaggtggatgttaagaacgaggcgtccacgtcaaccgcagatgaaggag

SEQ ID NO: 1687 - DNA, 679 bp, Arabidopsis thaliana columbia
tagttattctaaacctttcagataactacaacttccatcatattaagattttcaaagtctgtaaaaaaatggctattgcaggccgatactaattcagggggagattcctaatcgacgcaaataggcctctccaacaaatctctctttctctctatcacactctttatcactctctgctatcgtagatcggagaatctcctctgagagctctaatctctcagtaatcttcaccgcgtgtccggatctaattttcctgtaagtaatctcattttcaagatttatctgcgatttcttctcttgatgctaattttcctaattttccccgaagaatcgagaccattatgtggaggagaatcgtttcatcgcatcttaaatccatctccgccgtcgggtcctgcgcggctccgtcagatttgattttcgatatagcctttagctatcagtgttacaatcaattatcacagtgagaattaacaaccatcgacattgagataatttcactcggcgaaggtaacttccttttctgtaaatatcaactgtggatttattagaagggaaccaaatcaaaacaaacatttctaaccgggtaagtaaatttttggtttagatgagtggggatataattgtccatttatttttcaaaaacaaggaaaagtgccttgtacgtgagaagtgcctc

SEQ ID NO: 1688 - DNA, 665 bp, Arabidopsis thaliana
ttcttccacaaaaaatacctcagcctttacacaaatagcatgccagcatcaatcagggaattcacaacaaagaacaggttccttatcactttcattacctatatgttgttttttgtattcctgaatgtgattaaagtgtaccccacctaagtgtgagattaatttaataacaggaactgtgaagatattgcaatgtcattcctcatcgcaaatgctacaaacgctcctgctatatgggttaaaggtaattctaaatcgcaggctactttgagaaccatgtattgccttgtgattctgataatctttgatgataaagagcatatcctcctcttttggcctgtttttgtaggtaaaatatatgaaatcggttcaactggaattagtagcataggagggcacacagaaaaaagaacacactgcgtaaaccggtttgtggcagaatttgggaaaatgccacttgtatacacttccatgaaagccgtggatagccgcaatttatggttctggtgattgctgcttttgcatggcagtacatttccgctgtctcttccactggttactactcttcacgttctagctatggacgggtttgacgccaagtaagacttaaaaacagaactgatcttacttttacggtaagaggaagatagagagcaaaagtttat

SEQ ID NO: 1689 - DNA, 711 bp, Arabidopsis thaliana
ccctcaaaaggaaatttatattagataaaatcaaagatccgaaattacatttaaatgtcaaagtcaaacatgattttatcagtacttaacaaaaaaaaacacataatatttacacgaacatgactttatcagtaggtcaagccacaatgctacctactgtatcagctatggtttgaatttcaggtttggtctccacccagcaacatctccaatctttgaaacatctacccatatcttgctcgcatttggacctaggggtatatgatggactgtgtctgaaggattagaggaacatactcttccttgtgctactctttctctcccgttcttgtaatctaacaagatgcatttcttcttggcagatttgctggtgctagcagtactgttacttaagctgtacaagaatcaaaaataataccaagcattcaggcgattgtcttttataggctgtaagttaaagtggagaaatttaccagtggaggtgatggttttttatctgctgatgctgtttcatacagtggaggagataaattcacatattgtatactatgaagtggccatgcaatgttctcatttagtacatctcccattacaaacattcttggacttggtctccataaatacgcggctttgttaaacatcttctcaaccttaacaattgcagcagaaagaccaagaggcatattgttccaagttcttgtcggtatgttg

SEQ ID NO: 1690 - DNA, 1234 bp, Arabidopsis thaliana
caggtcaaggctggtcattgcaccaccaaactttgttatcaagattgttgacaaggacggagcccgtgagtacggatggcgtatcagcactgctgatgcctaagttgttttcattgtgtttattagtccatttatgttactcggctcacatttatattctctgttgaacttcaagctccctggatattaaagttcctagataatgatgatgatatgcatgtgttgaactttttctttccttattgcgtatatgaagcaaaagatagtgcaatgtaaacctaaacatcttcttctactatatcatctctattctctgcgtttctacatagggaagactttaacacaagcccaatggtaaaatcttaagtatcaatgaagtaaacataagcagtaaaaagcacagagagcttaaaacagttcagatacgagcgagaatagaagtggcaaaagtcatgatgatagtcgatggaaaccagaagtttctgatcttgagagagtcgcttgagaagtattgtagaactggtagtggtggtggtggtggtggtggtgctagggtggctgtttccggtgagaatagatcggagcttggtgaaacttccggtgctaagtcgactgattgaggagaggcagaaacattattacctgcagaatatgaatgaatgaagcaagttacatgtcaacgaaacttaaaacagaatccaccggaataatccgtttcttaccggaaacaaacggatttgtgaactgaatactctgaagcggaggaagctccggcgactctgcaccacagatcaaaaccatagaaatcacacatctgagattcgaattcaatcgattcaattacataggaggattcgaaattaacctgataccgaacagagagattcgaaagattcttcggaattctgatcggtacagatctgagaaagagaaatcaatctagatctatccaacgggaatccaaggatcatcggctgccggagaagataacagagacagtttccggtgctagaatgaacggaggaggtaaaaaccgagcagcaaataggatccggagtctctgacatattgtttggtggagaggagacgtaaggaaggcaaggagagaacatgacgagctcctccgtacaagtcagaaccggtggagaagacgaaggtgcttgctgcgtcgcggttacggcggaggaggaggagaaggtgatcgtgagtatgaggatgaaacgccggtgatttt

SEQ ID NO: 1691 - DNA, 475 bp, Arabidopsis thaliana
gtccaggtatgtgtctcacttccagcaatccaagagccactctttctctgacgtagtgatagtggttctcaaagtgtttggtccttttgtggaacgccggatttactgttaggtagactgcggagagattgtcacaatagagggttggagctttgagaagaggaactcgcagctccttcataattgagctgagccaggtgatttcagaggctgcttcagatagcgttctgtattcggcttcagttgagctcttcgatacagagttctgcttgtgagacgaccaagagatgatgttgagtcccaaatacgtgcagtaaccaccagttgaacgtcttgtgtcaggacaaccagaccaatcactatcactctaagctcgtagtgtacaatctgactgctttcgaaagtttattcccatagtcattgtacctttaacatacctcaatatttttttcagaagtaagaagtccagagttgt

SEQ ID NO: 1692 - DNA, 733 bp, Arabidopsis thaliana
cccaaccggatcatcgtcacacagctattttcctatcctctgtcctgaatctgaactaggttaatgagtttagccaaacactctcgaaatgggatctgacaattgttgttgagaagcgtgagttgaagcaaaagatcacgagattgagtctgagattcagacaagccgtcgcggatttgtaagaaagtgaagagaggatggtctgaagatttgggcgcgttgaagcgcgtgtggatgatggtgatcgaaaaacctcttgagtaaaggatctttgctagctgaagcatagggtttatgcaaccttgtaatggtagaggaaaaagaatcacttgtctctcgtttctcttctccattcaagtttctttgttcttcctctctttgcaattttttcttttcttatctgcagaaagcaaaacaatgattttggagaatggagtctattcaataagacaaccactggcctacattgctaaggcagtgacaagtgtacttgactatgacacgaaatgtttttttttcttttttggtgatgacaagtgaaaccactcaagtttttgattcagtaataaaatagcaatgagcttttttgaatgtttggtttgttttagcaacagacaatataatcaagtgcttttctttttgcaatttatagaaacgttgaggtatctttagcaaatattccgacattacacaatagtatatgattagctagagtctcatagattgaaagatg

SEQ ID NO: 1693 - DNA, 1404 bp, Arabidopsis thaliana
tgtatggaaattgtgaataaatacaatttgagaactaggggtatgactaaatacaattttagaacattaatgataacaaaagttaggcaggtaattaattaatttgacccacaaatgaagactcttttatgtgaataaatacacaaattaagtagataagaataaataataaaaataaaaacaaaatagataagaacagcattctttgataataaaaaagttgattgtgttttacttgctaaaagttgttagtaggcaatacttattttgtttactaggggatgagggttgaaaactctcaccattggccatcattaggttacattcacttggatgaatatattgaattcaaaggactatatatagagagtactgtaccgaatttaagagaccatttttctctattttgggaaaccatcacaatagaatcttgttttttaagacggttccactagtcaaaggctcaaaacaaatgaagacaaattacagtatttaactcaatgatgaaagatgttgaaatcgttttcattactaagacattacatatcggagttgtttacacataattaagagttacaagaaacggcaaatgcaatatcttaaactagaaacttaacaaaaattacatagaaaatgttcttataccctctatcaagatatttggaaatgaatacactttcgatatcactcaaaaccctaccaactaattactaaatcttaccaaatcgttaacaattgttttagtttctataaaatctctaacaatcttttttaaatcatcagaatatccttgacccccaccaaatttattagatccacaaatcaataaaacagcaatgaaatagcttgatgaatcatattgtacagaacattcaaatgcataaaggaaagaaaaaatgaaaggattacgtaaacggtaaacgaaactaacacaaatggttgagagatggattttagggtttaggtcggaaacatggcacgacacaccggacaaatcccactacacctaagccaatcttcaccacacgtgcgatgaaacacgtgagaacacggcattcgacccgcagccacatccaatccaatccggatcttatccatgcatatcacacaccaactttcattctcaacaacaaccgtctccaagtgttgctccaccgcttcattgctcgccggggccaccgcaagtctcacatctacatcatcatcatcatcatcaggaaacctccacacaataacattgatgactacatctacctctttcacgttagagatcttatcacacttctttaaatcaaggatcgcatcaatgagttctgtaacaacatcaatataacgaggggctttaatcaaatcaagaatgtgacagacaatgacttgtatttgctccctatctccactgaaaag

SEQ ID NO: 1694 - DNA, 1155 bp, Arabidopsis thaliana
cccgttggtcatcctctgcaattaatttgaatccacaaatcaaccccaaaaacattaacgaatctcaagtaaaaaaaacaacaacaaaaaagtcaaccataccatgagttgatcgccaatgataacaaccacggcggagtcgatatagtcaaggtccaaccattgttcgtccttgaaggcttgaagtccaggaacctcatttgggatgaggagtgcgattgcacgcatatcgctgtgcgccgcggctcctatgactaattccgtatcttgagttggcggatagaaattgaccctaagcacatactctgccgtgtcaccacctatactttgcgtgaacgtctcacgctgtaaccctaatccctctgataaccaaccaagaatcttctccgttagcctcttcatatgctttgtatactcctccgtcacctccctggctacccccaaaaatttggacgaaaatccaacgtttaaaatttgatattttgttaaagaaatgaaatttaacgtaaaacatgaattactaactcatacgattttattaggaaaggtacgtacctatattgaggaggattcttaggccaatatttataattgataattgagggtggagagagtctgtgaaagagatgttcgtcccaattgtttatacctcctagataattcttcttgtatccttcgaagtcttcctctttcgccacggtttccttttcagcatccgggagctcgaaaaactgcgtaccaaccatttgcagctgccgcatcagctcggttggaatcccatggttaaccacctgaaaaactccccactcttcactcgctttcaccacctcacgcaccaagaagtcttcatcagaaacgcttagatcaacgacgggaacgtcgaccgcgcttcctccaagagtcgagctctccaactgcttgctcaaagatgggagagacgactcagatgcattgtggtctctctcttcttccattgcttcataggtgtgagaaggaaaacaaggctagaggggatttaaatagggtaactgctcgaggttattaaatttcttgtatttgtgaattggtggtgtattattgtgcgtgtttttttttaagaaatcactttcatctctaagtcgacatgaatgtaccattattgggttgaatatttta

SEQ ID NO: 1695 - DNA, 543 bp, Arabidopsis thaliana columbia
ttaaatgtggaacttaagtggaactttgctgatatatatgcctgattacataggatacatcaacagatagagttcgcattattgattgaacttttgatgaagttatagctgaaggtatattattttcaactgatccaaaagaaatggtgaactatactcaactaggtctgaatgttgcagttgttaaagttgatctggtaattaaaggcgatgcctttttgtggagaccaagtattgaaatgtcaatgatgagtgaagcacttcatgagaacatcgtctggcctattcagaagatacaatttataagttcatcgccgctacatgaatcaactaacagaccatcaccactacaagaatcagctaccagaccatcatcaacggtatgatatttcatcttctatgaatttgtttagatacagttgagtagctgcaatggtgagaacttctctaatacatatatactttcaaattttaaattgacagactctaagtaacacttcgggtaacagcaatagtgggaaacagaagtgtattttgctggat

SEQ ID NO: 1696 - DNA, 564 bp, Arabidopsis thaliana columbia
cgtcttagcacactccatcgaaacaccttcaagaccctgtgctacagcaatattctccattcttttcctcagcatctctatatcaggtaatccaccactgtcatagcaactaattaactcagcgttggttgaaacaggtatcgttctaggggacccaccgacactagctgaacaaaatggaatccctagaggtgcaataagaggactcattgatagatttactctagcctgctcttcttgattctgatcatctctcatagacacagctgcaatcttttccttatttggtattctcggtttttccacgggacgaagaaactcaccatctttttcatcagcaacatatctgcctgatctttgataaccccattttccataccaacactacctctattgtcttctctacaaactggctgatgcaacatatgttcaaccttcccatttgaccctagtggactaggcctatctctgctcttcctgttctgcattccagacctaactttccgcggagagataggcaaaaccccgttagacaaacaggctcatgctgactatgattaggga

SEQ ID NO: 1697 - DNA, 1118 bp, Arabidopsis thaliana
cgcaaataaatttggtgtcgctgttctacacagtccaactctaaacacagatatgatatcttaggggtctttgatttgacgagccacactaattttgtagccatccatcgtcaagccacggaggcaatattcgcatccttacgacggaggagctcgcagtcactggaggcatttttgacaacaaccgttaatctctccggcgtcccgctaattcaaaccctagcttcaatttcaacagagctcgtctcgtgctttatctcttcctccaccgttccaaatttcaaagagactccaaacttgacctacctcaaattcatttgcaactcttgatatttcttgagaacgagagatggtattagttcttttgccaccgacgagaagagaataaagctttgagctcgtagcgttctctaggctaaacttttaaaaacactctccataaaaacttaacaagagaagaatggtgaagtaacgtggatatcagaataggcaagagaaaaccaattataacttaataagaaaaagggtcctaatagcaaaattagaaaatagaggagcccaaaaccctagtcaaaatagatccgagggtcttaattgcaaaattaaaaaacagaggatctctcgaaaaaccttaaaccctactctcaagtctcaattcggcgcgacggactctttgttcacttttgtaattaagattctcttgtagtgtatatggagatcgatttgggagctaacgcgtttggtatcgacttccatccatcgacgaatctagtagctgctggtctcatcgatggccacttgcatctgtaattccttctaaagcccttctctttgcttcttcctttcgttttccacattcccaagaatcatcaacaatctatgtaatctccaaatttttctcttgcagataccgatacgactcagattcttcacttgtcagggtatcaaaaacgctcttttcatctccaaagtttgtctctttcgttgactggacagactaagaagagaatcgctgaaatttgtgtagggaacgtaaagttcgtgcccataaggagtcttgtagagctgttcggttcattgatgatggccaaagtttgttcctttaaacttcaactatc

SEQ ID NO: 1698 - DNA, 614 bp, Arabidopsis thaliana
  unsure (1)..(614): unsure at all n locations
tatttactttctgttggtgacatgcatagtgctgatttcactgtctcttatatttttatgatccaaacatgaaacacatacataatccatcctcaaccaatggaagagtctatcaatcaaaatcctgaagctatggaagcacttatctccaatctctttggaaacatctcgtccttgaaatctgcttatatcgagcttcaaagtgctcatactccttacgatcccgagaagattcaggcagcggacaaagttgtcatttctgaactcaagaatctttccgaaatgaagcatttttacagagagaataaccccaagcctgtatgtgtctctccacaagactctcgtttagctgcagagattcaagagcagcagagtttgttgaagacttatgaggtcatggtgaaaaggtcgctaatggtttgttctgtgtattggcaacacttaattattggatgataatcacatatcaaggagcaatctttggatgcatacgatgagaaagagaaggagatgatgatgatgataggcagcatcaacagaaccgagcttctatctgttttgaaggcganaggtactaatatagacaagttacggtttgcaatcatgtacttaat

SEQ ID NO: 1699 - DNA, 766 bp, Arabidopsis thaliana columbia
caagggttgttgtcctcttcctcgtcgtcatcctcttttctgtcagacgggatcacttggaccaaagcgtttacggcaccggggacttgacctcgagcacagaggtacatccgaagcatgtgcaggatcttcgccacacagtcgaagttcctccattggaagggatcgctctccatggccctcaccttcctttcgatacgggcaattcgggcctcgagcgtttgcctcttgaggcccaaccgctacctctcatcgcataggcggcggtgcttgtcgacaacctagtacaagaaccatttagtatgagaaggagtcgtttcggtaaggaaaagggtaaaagacctaccttttccataaaatcgtatacctctttcttgtccttcgcggggaagtgaaagacggcgtgaggaaagagaacgctggcgggctcaaagccatcgccggacagaaacagtgggctaacggggtcaagaggacatacggtggaggctctttcgttttcctttcttgaagtgtttaccaagtaaatttctgagatcattttttgagacataaatgacagtttgtgctcttatttatagagagttagggtttttcttgaaaccacaaaattaataattgtggcgtgtccaaatggtttaaaccatttttggaaatagaggaaaagacaattattgccttaaaggcgtgaggcttttcctatttcccgaggaaggaaatggcaaccgtcgcattaaagacaaacggttaattaaataaaagaaaa

SEQ ID NO: 1700 - DNA, 796 bp, Arabidopsis thaliana
tatcgcggccaatttcacagttaagatgaaagtcgattcccattgcggtgaatatctcttgcgcatggctgaataccgttttatcgagtttgaaaggaggaatgccaaaagtcagcataccgccaatttctggatggcgatcaaagacatcgacctgaactcctgcgcgcgccagaatatcagcacaccctaaccctgcaggcccagcgccaatcaccgccactttttcgctacggggaacaactttgctgacatcgggacgccagcccatcgccagcgcggtatcggtgatgtagcgttccagattaccgatagagactgcgcccgagtgatctttcaaagtacatgcgccttcacaaagacggtcctgtggacataccctgccgcaaatttctggtaaggaactggtctggtggcaaagttctgccgcttcaataatctttccttcctgtaccagacggatgtaatccggaatagcgttatgcagcgggcaatgccagttgcagttagctttttcggcacaataaacacagcggtcactctcataagtcgcttgttgtggatccagcccgcaatatatttcgccaaagtgggttttccgttcactcgctgaaattttatctgcgcctttacgcgagttaacggggagcaacgctgcactgcgagatggctgagcgtctgatgaccttgtcctgctgccgttttgcgctggcgggccacctttatctgctgcaaccctttatcagccatcagtcgtaacgcctgtgttgggcaaatctcaatacaggcttgcgtg

SEQ ID NO: 1701 - DNA, 638 bp, Arabidopsis thaliana
tgataaagaatagggaatcagctgcaagatcccgcgctcgcaagcaagtgagtgtttgtttaaattttggagattaaagaaaccttaaaactgtgaccatgttatttactttttcactttcttgcttgacaggcttatacgatggaactggaagcagaaattgcgcaactcaaagaattgaatgaagagttgcagaagaaacaagtgtgtctcgcttcttccctatcacaattaagaatctcgagattttcatattttcttgaggttgtattcactgaccaaatgtttcatgcaggttgaaatcatggaaaagcagaaaaatcaggtactgtcttgatttgaatatcctctatggttgttggctaggcttttaactctcactcataatgaattacacttttggacagtattctaagcttttgagtagaatagtgtaagctataccatgaagtgagacatatcatcacatttttgatttcccactctgcataaagtatttaagatttgtgaatatgttgcaatgccaatttggatatttcatgagactaatctgacgagcatggatttaacggaagttggctcatttgttgttgcagcttctggagcctctgcgccagccatggggaatgggatgcaaa

SEQ ID NO: 1702 - DNA, 767 bp, Arabidopsis thaliana
cagaggaagggagatggcaagatgtggagaaggtacgaacgttgatgaaaaagaaccgccttagaaagtctactggccaaagcaccatttgcgatgtttcagtctgagaagtagctggtttttgtcaatagaggccagacttattgctaaatacggtaatcaagttcatttgtaagcacatttgtatttttctggctcggtgaaaatgcggccaccaggtttgattagtttctaatgaattgattagaacaaaaatctgttttgttcggtttctttcaacaaagaaacacaactacgccaatagtataatgcacaagaagtttggagtcgacttactactattaaaacttaaaagaaaaccagaatagagagagtgagatgtctgattcataaaacgtgaagcaaatcaccaatgctgtcttggtttcctacttgatatactgagatagccatttaaaaccctcgccataacccattttgcggacgatgctgcacatgaagacctcaaggggacgaacaccagagtcttcaagattcactatgcctttaccggtagtgaaattggtgagacctaagtgatacctaggtgcgtgaggaagtggcatggtttcacatgattggtccatttaaacatcaacagactgtcagaagtgcgggagatagggaggcagcaggccagtcaggacatgtaacgacggtcctgcccgggcatgtcctggcctgttctgctatgttctcactttagagcacactggcgaccgttacta

SEQ ID NO: 1703 - DNA, 760 bp, Arabidopsis thaliana
cctcagtcacataattaaattcgtgaaaacgaaggattatctactgttcgtatattgatctagaaaatttggagttcatttgtggatgtggtggagacgtggagtgatgttactaattcactcaaacataaccattatttatttttctctatccaattacgaccacatatttttaaagtacgtaatacgtataatatcataattcatgagaagcctatacatataaataaataattatgatggaatatatatatgtatgtatgtgactaacacatatatagacgtaaactatatagaggtgtttgagtaataatcattttggattcgaaggaggaggaagttgttgttgcatttgctgatataatgtagccatcctgctatacgcttccatcgtcgttggctgcaattccaaatatataaaaatataaatggtactgaagcattgtttagacccaagttgtatatctatatatagaaaaagggtcaacctgagtagagcatgcaagaaaggcagacataggatcggggatgagaggagactgaaatcgagagtcattggaagaagcatcccacgatggacaattcatgggcaaaaatgggtttggcatcatgttggcatggatattaggagcgcttgcagcagctcggttcatagaattaaggtcgaggagaccgagaccgggcatcccatgcccatccctaaacccatgggattggacatgagagacatttgtagttgttgttgtgctgcatgccatag

SEQ ID NO: 1704 - DNA, 1096 bp, Arabidopsis thaliana columbia
actcttgtaaatccacgtagctgactctccttattagagcagtaacccgaacccaaacctagacattctttcaagccctatatcacttgtgagtgtttgtgaggtcttattccgattaagcttggtagaaagtgttaggttcgtaacgacagagatagtgtctcatgtagttctagtttgcattttttggactagatagaacttggtgggcacttatactttgggttggggtgtgtttaaaataaaaaaaatgggttgattcattgatgagaaaaggtaaaagactctaggtgaagtaagctaaagaagcagaaaaagtctagtaaaggttttgggatttttaaagaaaagaaagagtttttgttagctattgaagatgggaaaaagctctcggttttaaaatgttaaaaacaggaaccttagttgttaaagaaatccaaatccgctagatgtatcaaagtgttgagaaaccttctcctaaagttaagagaaaagaaaagaatgattagaaaaagggcttaaaagattcatgaatgcaaaaggtagaattaagttcttatattgagattggagatgggattaccattagagcttcatttgacatactccgggtagatgggatcttatctctgtatgcatagcttgggacttacctttagcattctaataaagtttaatcatttcttgagagatcccctgttgctgaagcctattctataagggaccatctttatctcttgaccttttaccgtagccaaatcagttcattgatgatgcattgcttgatacacgttccagaactaatgaatgttaaagggattagtagatttgaaaacatgtgtaggtcgagcatatgagtcagattgattgataatgaggcatggctaacgtttttaagtagaatgcatttagtttagtttcatgtctcttttcatgcattcttagtctcttttcctttttttgcacattttgcattgcattgcatagcatacttgcatttggagtgttttgcaggtgaattaggacttttggactcacttggaggttctacacaagggatggcaactcgagtcgggggactaaggaaggattgaag

SEQ ID NO: 1705 - DNA, 620 bp, Arabidopsis thaliana
gttgcttcaagagtttaacatggaaataattgacaagaaaggtgttgagaatggagttgcaaaccatctttccaggatgaggattgaagattcagtcccgatagacgacactatgcctcaagaacagcttatgttctacgaccttgttaacaaaagcttcgacacgaaggacatgctggaagaagcatatgtagttgaagaagaaaagttgtcctggtatgcagatttagtcaattagttggtaagtggtatgatccccaagagtttggatgcatataaaaaaagaagttctttagagacatccaccattactattgggatgagccgtacttgtataaaaagaggagtgataggctattcaggaggtgtgtctctgaaggggaagttcaaggtatactaggacattgccatggatccacctatggagggcattttgcaaccttcaagactgctcagaaaattctgcaagcaggtctatggtggcccacaatgtttacggatacttaggaatttatagcgaaatgcgatccatgccaaagagttgggaacatatccagaaggaatgagatgcacagaatccaattcttgaggtagaagtttttgatgtgtggggaatagac

SEQ ID NO: 1706 - DNA, 903 bp, Arabidopsis thaliana
taagaccaagttatcttgtttccaagtaagcacaagtgtatcgctgaaatgcaagagaatcagcttcgtctacaaaagaaggtcaatgagctacaagaagtaattgagaaaatgaagaaccaggttagtgcacttatctatttatatataaagaattacggctcaattagtacataagattttactttctttttctttttttgtaacagagacaatcagctgaagtaggtgaaaactcagctgcaagagtaagtcactcatatcatatgctttgatttgttctaacagatacactaacttaatactttgtctatcttttacttttaaagagggtgaacaaaagaacacaaccaaaatgtttcttacttgattgggctggttctgatgcaaaagttgctgagggatgtattatttcttctgattcgggtgaattagtgaataactgtcgtttaggccataccgatgttaaagtcttgattgacactgcttttgaaccagaagcattactttggagacctgcggctaatatgtttaccattgagaaagctgttggacatatgattgcatggcctgctgctatgtgtgttagcgtagaagaggatctccaacaagaagacattgcaggccaggtaaagtttattattcagtctcattctcatatatagagtaatgatagtaggattttactcaattaatcctaaaacactatcttgtcgttgtagtattttaggatgtcaatctaatccggtgtgatgcaaacagatgagatatgatcagaaagctctaagtcaagccaagcagaaagttggttggttctaacagttctagtatgcaataacaaaaatgaaatgaaaaagcagaaatggcaatagcaggcatgtgaataacaatgcataaatgata

SEQ ID NO: 1707 - DNA, 667 bp, Arabidopsis thaliana
tcttggtcctcggagttcatcatgatttggttgtatccagcgaaactaccatgaacgatagcaatttgtcccctgaggttgattccacgaggcgaccgatatgcgacattgggaaactgtcctttgggcaggctttgttcaggtcggtgaagtcgatgcatactctccacttgccgtttttctttttcaccacgacagggtttgcgagccactcgggatattttgccttagtgatggagccgatccttagcaatttttctacttcggctttcacagcttccgctcgctcccgacctaactttctcctcttctgtttaacaggtttaaacgttggatcaacgttgagctcgtgcgcgacgatttcgacacttactccaggcaagtcttccggggaccagacaaaggtgctgacgtccatgtactgcccataggttgtgccaaatgcaggcgaaggatctacgagaggaatcgggccattaatgacggcgacgagggaggagaagtgtttgaatgaatggatgccctcgtttttgtgggtaaaatgtgagtgcccaagtgtaggaaccttgaccgatggtccgtaagatcatctaggaagaatatagttaactttttagctaattatagaatcggctgagtcattgcgaaattttgtatgtaatatgtt

SEQ ID NO: 1708 - DNA, 1543 bp, Arabidopsis thaliana
cctcaaaaacctattaactactcagacatcattgcagaaagcataaacgttgaatggaatgaaaacatgataacaatagagtaatagcaagatggtaacaggatggacaacagtaaacgaaatcaagaacaaatagtgaatactgaatattgaatagataaagagaaatccggattacaaaaggtcaagaacacagtgtctgcggaataaaacttagataaaaacttgtcctcgaaaatgtaaagtacatgctacttatagcaaaatattccgaaaccctaatactcaaaacgacgcagtattgagacggattaagaactgtactcgacctaggtggtcgattgagaggtcgagtgataagctggagtcttcttttcttccttgtgctcgagtgtctcgttgagtgcgaaatgaagaagactctgaagcttgcagtcgagtatgtaatcgagtgatagagatgatggtactccgtttggtggtagaatagtgtgatctagtgaaggtgaagtggtggaggtgatgatactcgaccagggggtcgaatggtgtgatcgagtgtatctcttggcggtactcgaccagggggttgagtggtgacatgatgtgctgaggtcttctactcgaccaaggggtagagtggtctgttgaagtcgtgaagtgtctactcgaccagggggtcgactggtttgacatgatcatgtccgcttcttccaattagctcgtcaacagttccaaatcacctgaaatcaacacaaatatgcaacatgcatgcaaaactatcctaaacatgcaaagtgattacaaatgataagaaatggtattatacagtgatgatatgatgcttaagtgatgacaaatggatgctcaaaacatgcaaaatacacacttattaactccctaataatatgtttttagtcaattatccttaaacaccaatcatgtctttgtagtattttaggtgtcaatccaaatgggtgtgatgcaaacagatgagatgtgatcagaagtcactaagtcaagccaagcaataacagtattggggtttcttacagtcctaagtgaacatgcagaaaacagaaacaataatagaattactaaaatcacccgaccacaacaggctgatgcaagaagtaggatgtgatcgagtaagaggcaggatatgaaacaaatatactcgattgcacagtctattgccagacactgggtctggtcgagtatacatgtcgagtaacagacaggaaatgagacagctgtactcgattgcacagtctgttgccagacactgggtgtggtcaagtaagttggtcgagtaattgcaaaaactaagaaacaggcaatgaaaacgattaagtgataacaataaaacggagaaatcagatagacgagaaattcctaaggatggggtaatcaagtagagttgtatcctagcctattcgaatggttaacaagcgcaatcaagctatccctagactgatcaattaactcccgtgatagaaatcctcaagcaaagctagcccagactaatttctatcgatcaaat

SEQ ID NO: 1709 - DNA, 823 bp, Arabidopsis thaliana columbia
gagcaagacatggaaatcattgagatgcttatggagctgaggagagaagcgtgtaggatcaatacggagagctgaattccaaagagcagagcaacctctgtagaatccaatcagctcgcctgtctcgaacccgagtttcaaacccagatgacgagcgtcttcacgaccggacacaagaccttcttcgtaaccctcatcgaagccttgttgaacatgtgtctcctctaaacgcacgatacaatcgaggaaatcttcgttcagaccagaactcatagaagaaactttgtttgattgtttttatgttgacaaagatcaagaacaagctaaaacggtaatagagatcgatctgatatacagacaaggacgaacgaggaaagagattaacaaaactcaccagttcgatagaatttgcagcagcagaattaatggaggtgatgaaagttgtaaaataattttagggtatactatttgataatggacaatgaatacaaaacttgggccttcttggatcataaacttgggcccaatataactgtcctgagggatctaaagaacgggagagagagaagagcattgaatggtgaaagctgtatagcaagttgggggatcacgttcatgtgcctttctgctttttcctattaagtggtgttcttaccaaacatgttttgaagagacttgtaagtaaaaggatcacttgcattagtcagaaacagagagataaatgaaaaacaaaaacattagctaagacttaagagtctaaagtaggcaatcaagcgacatacaatggcaagtagcttgttggaaaaaaaaaacgaatgaatta

SEQ ID NO: 1710 - DNA, 1011 bp, Arabidopsis thaliana
cctgaaccgaaagatattgagtagatacgcaagataagtcgctgttgacatggacggctgagatggagcgtctcttcagggcaccacatctgacggcccagatcagacgctgggaagagatctctgcaatctcgaaaaccgtggtgatgatggcttctttatgtcggccgcagtgaccgcaactcaaaacagtctaaatgtttccagcaaatttgcctcggcctctcatccttcactccctgagattaatatcgggacctctgctgcagcggatcgggcagataacaatcaggtcgctcaggtctctgagccatctggagctgttcgtgctgatggtgcactgacttctccgaagagagctcggatcctaccggagtgcgcccggcagctgagctgttcgtgctgatggtgcacctgcggcagctaacccggaggcagctgtgtccgcagacaggcggtcatctggtaggtcccaaggcagaggccgaggatcaagaggttggggcaggtcttcctttcaaggtttgaaccggtctcaagaagtgaggtagaagtccaattctggtggagggtcagcgggaagcaggcccttccattggtcttacactcacgaccgtgatcatccgatcgtcgaagacgaggctgggttggcgaatctcgttcgccacatcaaagggaggaactgctaggttcccgatgtgaagaacatggccaaggcggcggcttatgctgacatgatggcgaacgagggcaaggtaataatcgataactgcctccttctgattccattcttatgtcagttctaattgctgttttgtctttggcaggcgatagctattacgaacaagttggttgctctctatgagcaacatctgagcaaggttccctcggcaagcgagctcgaagaagggaagaccctcatctagtagctgacagcgagtgtgaaggctggtgaggaacgtgaggtttcgttccaggtatgcttcagttatggtttgtttgtatatcggg

SEQ ID NO: 1711 - DNA, 820 bp, Arabidopsis thaliana
gttccgaatcgtatatataaacatgaaaattgggattatttccttgtctagatgcacgaaccctccaaagacatctatccacccagcactcgtaagatactgtagtcttattagaagttggtacatcaaaatcaaacccatcccttatcgcaagaagtttgagtcgatactccaactcgaatttgctacggtattgttggcctaccgcgagtgttagcgtagacagctccaactttaaatcagtcaggctcccaggagatccgatcatttccatggtctgagttctcttcgaaggagaaggtttcggtgaatcttcgtcattattcttaggctcgccgtatacaacaaagtcttcatcatcagatgaggcaccatcggagttgtcgaaaaaatcaaaccggctagaaaattcatgatcttcttcttcgtcacttgcttctttgtcagatgcttcatcgacacctgattcatcttcccctgcttcatcgtcccctgcttcatcctcttgataatcgtaacagacaccttcaaacccccaacccggaacttcgaatctagattctactcttgagttagattcaatagggcgtttcgaaccccttcctcttgatctggccttctgactaatatcacttgaatctttcgccgtaaactccacacagggacgtagctgctcgaatttcgtcaaacctagataacattgcaactatcgatcattggagatataaactggtggagtatcgaagggcatatttttaagagtcttgttggagaacatgtaactcagccgtaactgatgggtcgactgattcaatctgta

SEQ ID NO: 1712 - DNA, 1236 bp, Arabidopsis thaliana
aatggaagatgtcagtgaaaaggaagcttttgagtggctcagttccaatcccctaatcatccaagcgctaaatgtaatgttccgtttagcaaatgacgtaggaacctacgaggtacacggcacattaaatatagggatgtctttggttttcttgtgatttttgtttttttagttctcatgaataaatgatatttgtagaccgagataaacagaggagaggtggctaatgggctcaactgttacatgaaacaatatggagtcaccaaagaagaagcatcccaagagttgcgtaaaatatacagcaacaacaaaaaagtggttatggaggagttcatgaactcacatgaccatgtgccacgccaggttctgctgcgatgcctcaactttgcacgcctcttcgatgtgatgtacacggagggtgatggatacagtgaacccaaaggcaaaatcgaacactttatgacctccttgtacgtccacccaatacccctttcataatgacgtgcaacacacaccaattctaagaagaaatttatgactctgttacctgcctcaagactgaatatctaaaatattcttaatttttaatttaatataaagtcattttgttgaatggtaaactcgtaaaacttataaccatgttgaatttgttcattcttaagctagctcaagttaagagtgtgcctctctatatcttaagaccaacctccgtatgtatacaggcctgaaccacagttgacccgatgtggttcttgttgcagaacatgatcactataacggttatgtgaccagttaactgaaaaacacgatagcttgtattctccataaaatcaaattaaatgattgtctgactttgtccattccatttttcccggttcacatacgtgtccaacaataaccgaagataagattagtatattgttaagctctgtaaagtaacgttagaagcagttaaatctccggagtagacgtattgagtatgagctgagatgcatcacagatagaagcagagatagagacgaacttgaagagttgtaactttagggattgtttgtgtttttaaccactatgtccagtatatggagaaacccctgattaaagatattgttagaaatccaaatgacgaccttacttgaacaggatctgttctattggctcgtacctctgtttccttgatttctcaagagacatgctcttaaccctggttgatgaaccataaaaaaaccaagtgtcatt

SEQ ID NO: 1713 - DNA, 655 bp, Arabidopsis thaliana
tgtcttttccaggcaccaacaaggctggtgagatcattatggctccaaagttgttgtcactcgataatcgaccttctacattttctactataatgttgaaacaacaaacattagaagagttaggctcttaggaattggagacgatgaagaatttaggcgctgttccggattcgtagacgagggtgaatgtcatgtccgcatcgcacctcaacatgtagagagtattgcccgttttaaggatcctatcatgtcaaggatcctaatgtaagagaagagttgaacaagccagtttattgttaattgttatcttatgactgacgagatgtgtgttattaattgtgttcatatctccggtgactatggcctgtttgttccccatccacatgatccatccaaatggagatgaaaaatgatgtttgtttttgacaatttaacaagcatttggatggatcatctggatgatacatctgaatgagtatctaaatttaggcaaatttatgaaattcatttggatgaatttgtttgaccatttggatggagatgtttcaccaaaaataacaaaaaactaatatacctcatttatagtcataatttaaataattttattttctatagatttctcaaaaaatcatgaaatcacgtattattcttttat

SEQ ID NO: 1714 - DNA, 874 bp, Arabidopsis thaliana
ggtcaaacatgtccttccaccagattttcttcctctctttgattagacggtttctccaactatcaacaaccggatcaacaaaacctatcccatcatcaacaacatcaccatctacaatgcgtctcaacaaatatttctcttcgttataagatcagaataatcatattctagctcatagtcacatgtaataagatataattgggacaactcttacctttacacttccaagctcctcgtttatctcttccaatgagaaccctttcatgacactactagagaatttactcttagactttctcggacactcattatcgaaccttacagggtctctaaactttagtcccaaatgtgggatagcctcaaatcgcaaaatctacacattcaaagtaaaagtcacataagtattatttttaagtctaaaatgcatctcatcatagataatactctaaattgttagctctaatggaagaataaatccaaagaaacatgtcttgcacttttgctttcccttacatgttgttcattatcgacttaatcccttccatacacccatcaaatgtgaaatgaccccatggaaatatctcgcatgcatgcacatcatcaacaatcttcagcaagaaacgctcaatgttaccatcagcctttgatttcgcaacaatcaccttgcacaaaaatagcaagatagccacttctttctattcgccttcttcctttctccacaatccttcatttcattcagcttcttttcaacatcaatgattttaatcccaaataccttttaaagatcttttttgcaaacttcaattatgcatccatgatattcatactcggctgcaactccttcgggtactcatgaaatgaaaaccacataaga

SEQ ID NO: 1715 - DNA, 1224 bp, Arabidopsis thaliana
cgccagtgcgtgcaatcatcccaagtggtgattgagtcatggggcagattcttcttccagatgtgtgctttgtcgcataaggagaatggaaaaaaacggagcttgaatccatcttcattgacaccattgatttttgttaggttgcagagcctatcgacttcatcaaggtggtcgagtggatcctccattggcagaccatggaatttgttcccctgaatcatcgagatgagaccactcttaatctcaaagttgttgttctagatagcaggtggtgcaattcctttccgctgacggtgatcatgtggtgcatctccggcaccaatgttggaagggccattttgttgattctgcttgtcagccatttcgagtggttgttgtggtattaggttggttgtgtttctcctctctttgagttcgcgagctatgcggtcgatgttgtcgttggaaaggagtttgcatacagcagaggtgtacctggatcaggaagacaaaaagaaaaacacacagttagcaaccgaattgaaaattgaaaaagaactttatctaagcaagtctgaaatctcaaatgtaacaaacaaacacccaattggcaacggcgccaaattgataataggtttttaagatcaattaatcctaaatcattatcatgtcgttgtagtactaaaggttgtcaatccaaatgggtgtgatgctaacaatcaagatgtgatcagaagtcactaactcaagccaagcaataacaggttttggtgtgttctagcaatcctaagtgaacatgcagaaaacagaaaatcaagcagaaacaataaaacactcgaccaacacagctcgttgcagagcactgggtgtggtcgagtgacaggtcgagtaacaaacagaaaatgtaacagggatactcggctgcacagtctattgccagacaactgggtggtcgagtaccaggtcgagtaacagtaaagaattgcaggaactaagcaacagatgacaagatgcagttaacaatagtagagtaaacaataaaatcaatcagataaagaatttccgaggatggggtaattgagtagtttcgtttcctcagtttacaggtgattgacatgctcaataaattatctctagacaacaagttccttaaccaaatctaagtgccaccgcaacaaagaccctcaagttaacctagtcccagactcagttacggtcagagtaaaatgaagttaaagcacactg

SEQ ID NO: 1716 - DNA, 583 bp, Arabidopsis thaliana columbia
ggacaaagatatccgtctaaaaacaacaatttgagaagcaaacccggggtctcctttaccagacccaccaacaccgctaaaatagacgctgtagttgtggcgtttagcgagtttagatgcccactgcttaaactgtttccttgtccattcaaacttgtggtcttggttcctgaattttggtagctgtgaagacatggatctgttttttgggtggtttggaggaccagacttatggaaatttgtgttgtactcgatgtttggtgtggagacaatcagaagtttcgggcgaaacaagcttagaactgttttcccgaattgactggcttgatcctcctccatgtgttcaatgacctaaagattcaaaacggattatattgaatattagagaagctgctgatgaagaaatgaagcaagaaaatagaatcgaacctctaagcaagtgccgatgtcaatgtcatgcagcctggaatcaaactcaaggatggaaccatcatggagtaaagtagatttgaggttgcaagctcccttgtttatttttgaatgtagcaatctgaaattataacatgcaaaaatatcaatgtaa

SEQ ID NO: 1717 - DNA, 648 bp, Arabidopsis thaliana columbia
ggtgatgaggtataatcagaagttagctcccaaatattatggcccttataagattgtggataaatgtggcgaggtcgcttacaagctgttgctaccacaagattccatgattcactcggtctttcacgtctctcagctcaagaaaaaaatagttataactctattaatattattcctacaaaatttctacaacaatcctacgactttgttttcgtaggaaatatgaaggagtatgtcctaccaattttctataaaaaaaaatttggtaaaagtttcgtagaaaatttgaaagaaagtttcctaccaaattcctaccaagtattttcccatcaaattccttccgatttcctacaaatattcctacgactctacattttataggattttcgtagaaaatttcctaccattttcctaccgtatgttttgtaggaaatttcgtaggaaaatcgtaagtacttggtaagaaagattttttaccaaacttttcgtaggaaaattggtaggatatcccatgttttcttgtagtattatgagatacaagttagtatatagtattgggttgcttcagagatgatagatgtctcattgataattgcatgatattctggaaagaagatgaccaattgctggaatgtcgattttgtggga

SEQ ID NO: 1718 - DNA, 563 bp, Arabidopsis thaliana columbia
  unsure (1)..(563): unsure at all n locations
gagtctagaggatctgtgctctaaagaactgacgcagcccgccatttgtatggctgatgaactgacccccagccagttcctcgaactggataaaaatcacctcaaaggattgttgctcaaaagcggcggcaccacctcacatacggtgatccttgcccgttcgttcaacattccaacgctggttggtgtggatattgatgcccttactccgtggcagcaacaaacgatttatatcgacggcaacgcggggcgattgtggttgagccaggggaagccgtagctcgttattatcagcaagaagcccgcgtacaggacgccctgcgtgacaancagcgtgtctggctgacccaacaagcccgtaccgctgacggtatccgcattgaaattgccgctaacatcgctcactccgtggaagcgcaggccgcattcggcaatggtgcggaaggcgttggtttgttcgcactgaaatgctctatatggatcgcaccacgcaccgggcgaaacggagttgtacaacattttttgtcaggcgctggaatccgcaacggacgcagcattattgt

SEQ ID NO: 1719 - DNA, 539 bp, Arabidopsis thaliana columbia
gacgtcgcctcttccgttcgcgcctctttgggagatgttcttcgacggaatctccaagaatctttacaatgtctacgttcacgcggatccgacccgagaatacgacccgccgttctccggcgtgttcttgaaccgggtcattcactctaaaccctcgctgagacacactcccactctaactgcggcggcgcgtagactactagcacacgcgcttctcgacgatccattgaattacatgtttgcggttatatcaccttcatgcgtaccaattcgctcctttgacttcacttacaagacattagtctcgtcgcgcaagagcttcatcgagatacttaaagacgagccgtggcagttcgataggtggacggcgattgggagacacgcgatgcttccggagctgaagctcgaggagtttcggatcgggtctcagttttgggttttgaaacggagacacgcgcgtgtggtggcgcgtgatcggcgtatatgggtgaagtctaacagacgtgcgtgcgggaagactcgtgttatcctgaagaaag

SEQ ID NO: 1720 - DNA, 1985 bp, Arabidopsis thaliana
taaaaacttcacacatacctccatttctgcatttcaaagaagagaccacgagcctgatcaacccaattatgcctagcatgaagcctaatcatcatattgtatatatcattccttgcacagtagttcttctgaatcttcatccacttgaaaacattcacacaaagctcaatacaccctcttctactaagctcctgcaaagttacaaaattcaaaactccaataagttcaaaagagcatcagtgaataataccaatcgaaatcgagacatacataccctgataagaaccgggaaattcttcctagcaaaccggccgacccaggaattaagaacgccatcaacttcttcccaacgattgagagccataagccggtccacaacctccgatacactccaatccttctgaaaccggtcgttctcaacccgaattcggtaacgtctcggaatatcagctttcctgagcccgccgatgttgaccgagacctcatgctcaccacggtcgtagttcacagacacagatttcttctcctggaatgcgtcggaggccttcgtagctcctggcttatcggcgcgggaagattccggcggagtgacgagcttgaaattggtaacggtagccattcacagccaaacgagtaaggaaggctcttcggtggataaaagaggataacattactctcgcggctacggatcttaggccccatatccgatatgtttcggcccattatggtcaatttgtaaactaacttgattttctaaaaataacttttatttattttaaagtatagtaaataaatactaacaacataaaagactttgtttcgataaatgcataaaaaacaagagaaattccttgaattggggtgagaacatgagtttgttaattccttacaatcgcctctttgaagaagggaaattgaagtgacgagcaaatgacatgatcatatatatatgcttatggatccatccaatgatgataatgaagaagatgatgtgattaagttgtcttgaagatcaaccaatatatattggtatctggagatggttcatcaaaaatgacaatgggaggatccttctcgaggtttatcagacagtacgtatcaccatctaacagtaccaaccaattaccctattatgagatccgttttatttattcatagtttgtcttaaacggtaaaataaaggttttttgttagaatgttgtgcacatattttaacttggccaaaatcaatatttctcggtcacaatagaggcattagccaaagaaaaggtacataaattaccaaagacaaaaaaaactttgtacattataacactaagagcaacaaaattccatataactacataagaagattaaatttcgacacaaaaagttaaaacagctagcatacgaatgatgctacgtttctccagctctgaataataacaagagtaactaataataatagcaaaaggaaattaaaccctggttgatgggatcaaagttaaacatcaaagcaaagataaactatcaaccgattgatcaattggaagtcatttgagtctgacggatctgccacatgttcttgacaaagagaggcaaaagatgtgcgatcaaaaccgcagggaaatctgttggtgatcaactttgccacatgtctctttctcagtagagagagacattgattccttgcgagaaacaaagaaagagtgagaagagatttagatgatttaactagatacgaggagagatatacattgggtataaatgtttttattacatgttcgagctgtctagcgatttcgtccattcttggttcaagcatctaagccttgacattggtcaaggtatcgagtagacgaccttcgaacaacatcagctcgaagacggtcatgccatgtagatctctgccatacattctcttgagagaaagaataaaaagggtcatgtttcgtcaaaagtgaagaacaataagggcaatgaaaaaaatggtaagacaaaatgtg

SEQ ID NO: 1721 - DNA, 514 bp, Arabidopsis thaliana
tgaagataaggaagttttgtggacatcattggccattgattatagctttgactgctagtactgaagatcatgttagggaaagatgtttgcaaatggggatgaatggtatgatccagaaaccggttcttttgcatgttatggcttctgagcttagacgggctttgcagaccgcgagcgagtgattcgagctcagagaaggaagcagatatcaatgaatcttgaaaagcaaaaatcttgaaacgaagaaaagcagagtgaggattctttgaagatgtgaagcatagagacacctctctggggaaatgtttttgttgttgttgttgtctcggttctacagtgatgagaattgagtcagttttctctatttagcctagtttggagattggttggttcgaaactatttatacgtaatgatttcgcatttttagcgaaaaaataacataagtttattagatttaataataattaattttataattttgtcttgagtaaattctctctgaatatttataca

SEQ ID NO: 1722 - DNA, 595 bp, Arabidopsis thaliana
tctttcatctgaatctagaatacggatatactccaaatggctttcttaagtaaagttggaaggttattcagtcagaccagcagccatgtcactgcctctagctcgatgctacagagcatccgttgcatgtcttcatcaaaaatctttgttggaggtgactatgactctaattcagctgtgcgagagaatactctcttttgttttgtttgtctcaaaaattgtctatgtttcttcaggtatctcctacagcactgatgagtttggcttaagagaagcttttagcaaatatggagaagttgttgatggtaactagctttctccctttaagttattgcacaaaactctaacctttgaagtattaaattccttttgctatatttttgtggttttactcttaacaactgactaatttttatcaattgcagcaaagattattgtggaccgtgaaacaggcagatctaggggctttgctttcgtaacatttacttcgactgaggaggctagtaatgccatgcaattggatggacaggtatcacataaatgttccagcttcttgtgatactaagatgttgtgtggctttagtttattcctttg

SEQ ID NO: 1723 - DNA, 496 bp, Arabidopsis thaliana columbia
gtaaaataaagaaaattagataataatttttttttctaactttagatattgatttaataacacgaaatggatcatatatatcacaacttaccaaccaatattgaaaacaagagctcgttcaactgcttctttatcagattcggaatcaatgtcataaggctcaaaccaataaggggacaacactatgcctatcttagcatcttgtgaaatctgttttaaaaatatcataaatcaaaatgttacttttttgctttcaaatcctttataatagataaaatgacacgaaccaatccatttttttttttgttgtgttaaaaaatcttgaaaattgaaagtaattatatatattttaggataacatagttattcttatttaccttgtcacatttcctgaactcttcgacggcagcagcgtgacgaagaagaaggttgtgagagactaaataaggttctgtgcccgaatcaccagcaatacacaaacgtgttacccattttg

SEQ ID NO: 1724 - DNA, 331 bp, Arabidopsis thaliana
cttgatgagtttaacatccactctaacgtcctttgttcccattgctttcaatgcaaacttcctgatctctttaatggcattgggtgccttcttcttgaaggtgctgttcaatttagaaaccatcaaactcagtatttcttaaaccacatgatcaatcttgacaacgaaaaaagctctaatctaaaatgtacctaagcaacaagccaacctttctatacgataacaggagtctaatttctccattttaacctatcatttagacaaagatgcaaggagcaaaggtggtacccaacaactaggagatctttatgatcattacgcaactacagaa

SEQ ID NO: 1725 - DNA, 406 bp, Arabidopsis thaliana
ttctaaactatctgctgccctcaagtaaaaaaaagagaaaatgacggggttttatccccacggcggagtttcctgactaagaaactcggaaacaacgttggcctccaatatcttgacggcttcttcacgtcttcaccgacctcggcgtcttgtactgactcacagaagatcctcgagacagaaagaaattcatgagttcgacgaaggcgccatgcttaacaaccttaatctcaagaggtccaatgttctcatcttttcttcgttcttgtctatagagatggtccagatacttctcaacggtgaagcaacattcttccataacatcgcggttaggttcgagcttggcgtccttgactttgctcgcaagttcccaatagagcacatagtgtcctacaaacgagtgacg

SEQ ID NO: 1726 - DNA, 610 bp, Arabidopsis thaliana
ctttcccccaagttgtatcaatcttttgaggatagggaaaaattgtgttttgggttaatgttcaggtcgatgagaggtgatgaggctaaagctgcttgtcctcagattcaattggttcaagtacatgggactagaggtaaagctgaccttaatttatatcgcagtgccgggtctgaagtagctggttctagtgtaagtaactttactgtttgtgtttgtcgaaataatgaccacgagggatgcacaccagtcacctgtgttgtcgctgcaggtggtcgcgaagctagcaaaaagcggaaaatgtgagagggcttcgattgatgaagtgtatcttgacctcactgatgcagcagaaagcatgcttgctgatgcacctccagagagtttggaattgatagatgaggaagttcttaaatcccatattcttggaatgaacagagaggtctgttttggtgtcttttagtctccaacaaaagtatagtcgatagtcaatattatgatctgaatttatttagtttactttcaggatggagatgattcaaggagagtgttgcaattggatttgtcgagaagatgctgatcgacgtgataagttattaagttgtggaat

SEQ ID NO: 1727 - DNA, 591 bp, Arabidopsis thaliana
aaggaaaaccaagtcgtcctccgcaacgccgccacaatcttctcatcggaatcaagaacgcttttaaggaaattgtaagaagggataagctgattaacaagggatctagtcaaaatggttggatcagaagctaaagttcgagcaagtaaagattttgagacaccaattgagagaaagaagctgagtttcgggaggaggacagattcagcattggctaataagagaacaggacgtttcttgacgagagatgagatttgagctgtggtgaatccatggtcacgaagaaggttgagaactgtgttgggtcgttctggtgaatctagtaagagcttacgagaggctacggtggcggaatctggagatagtccacatgagtcgataaggtagttgagggtgaaggagagtttttgctgttgctcatcatctttagggtttttggaggtgagtgtggttactggagaagaaaattgagtctggagagagaatacgaagattggtttccgatgatgcttaggtagtatggtggtgaagcttcctcgtgggattaatttcgtgaggaagacgaggttcgtaagagaagtggcttgaggt

SEQ ID NO: 1728 - DNA, 558 bp, Arabidopsis thaliana columbia
taaagtcatataaagtggatgagtactccaaattcgttgtaaatttccagcatggtgttgtaaaataacatctctttctcctattgtagaactgaaaccaccaacaactaatacattaattttattcgttgaaggcaattcatactgttttttatttttatcatacctgttggagctggatttccctccaggaatccacctgcgaaaataccaagtcagcccacaaatgcccatcaagcccaccaagtagaggacctacgcagctgatgagcccacatacgctaatgggtatttgggcccgataagcccggtcacctgatgaagggagataagcgaataacaacctaggaactgatgaggagatattcgcggaggatccgtgatattcggaactaacctgccgaatatccaggaggacctccgcagatcccggacggagctaccacgtgcgtagacctatataagggagcaaggacgacttggaagacacattcaattcagcttacattcacacacatacttttacacttgtaatccctttcacattgtaaaagcttt

SEQ ID NO: 1729 - DNA, 772 bp, Arabidopsis thaliana
tagtaacggtcgccagtgtgctctaaagaaaaaagccgtggccgcccaaaagtgttcgacagggatgccgcgcttgataaggccatgaaattgttctggcaacacggttatgaagcgacttctcttgcggacctcgtcgaagcgaccggagccaaagcgcccacgctatacgcggaatttaccaacaaagaggggttatttcgtgccgttctcgaccgctatatcgatcgttttgccgctaagcatgaagcacagctgttttgtgaagagaaaagcgtggagtctgcgctggctgactattttgctgccatcgccaactgctttaccagcaaagacaccccggcaggctgcttcatgatcaacaactgcaccaccctctccccagattcaggagatatcgccaatacgttgaaatcacgccatgcgatgcaagagcgcactttgcagcagtttttatgtcaacgacaagcgcgcggggaaatccgccccactgtgacgtgacacatctggcagaattccttaattgtattattcaggggatgtcgatcagcgcacgcgaaggtgcatcgctggaaaaactgatgcagattgccggaacgactttgcgtttatggcccgaactggtgaaataagtcgcaaaaaaagcccctcagcctgagcgaatgaggggccaaattgcagagtacagccttgttatactttgttatcaaaatcagttgcccgttgctatctacgggatctcgtcccggatccggtcatgcggattttgcct

SEQ ID NO: 1730 - DNA, 1367 bp, Arabidopsis thaliana columbia
taagatttctataaaattgtctgtattgttattttattgaattatgtcaaaaagtatattggcccattgatatatccctatttttattgattttatctatgatttatggttaggattttgagtctttatgttatttctcaaatctttttagtgtcttttcaggtattatatgcagttggacaacaatggagataaggagacattttggagcaaaagctaagcaaaaagaagctaatgacgatttttagttccagattcagaggagtgtcgatcgacacactccatggtgtcgatcgacaccagtttcgacccagcaaactccatgacgctttcaagtttacaaaagagtaaatttgccctagaagacttctctatttgcattattagtccctggacgttttatagggtttttatatagtttttagacctaagtttctattatcaagttctttgcaaaccctattttgaaaaatataagctattcatccatttcttcagagattcattgagttttcattacaatgaagagatcccttctttcccttatcttatttgctgtgtttatgctttctataccaaatatgttgtttgcttcattccatatgtctaagtagtttgcttgttaggaaaagggtttctcattagggattcatatggtttagtagatcgccccttgttaggttttctgtagaattcttcatctttaattattcttaatgctaggtctagagtaattaactagatcttgaatccagacaagaaatatgcccaccataggtatctgtagttggatctattatttgatgagcctggtttataggtgtgtaataagaattggcctatctactatggtgaacaatggaactcgtttagaatgcatgtttaggttaagatttctcgacttctccggttattcatagctatagacatagggagtttcacagaacaccaccggttattccataattggagtttgagtttatgaatggttcgataacaacctagcttttattagatctattaaccaatagtttcgtgagaataccctattcctaactctttatttcatcgtttacaacaactcaatctgctgtctttttactttgtttacttttattttcaatcattccctgctagtttaatctcgacatttaactcattattcgaacaaaagaactttgtggaaatcgatccttaatactgcaattgatctcttatttgagagaatagttcttaaggtaataaccataccacccatctcagtactgaaaaatatattaataatattttgtgaggctaataatttatcgactatcgcgtggtggcgataagcccgagtagatgaatagaatactgtagaataattt

SEQ ID NO: 1731 - DNA, 1278 bp, Arabidopsis thaliana
gttgtggctataagtcttaggaccacaactcagcttatgttgacccgctcaaagtaaccctgagtggatcaacatcgagattcagaactcaagcttcttctcttcccctgtcatgttttccaagagagttgagatgttctgcataccttcttctggaggtcacgttactggatcgtgggatctccacaaacacaagttgcagagggtgcgatttcgaaaccttgctaagttgacaaagaaggaatggaagcttttggattcgtgtagcaggagcgaacatttggtggagtcagcagaaaatgaaactttcttggttaagtggtacaggaagaaaagcaaagatttgaagagaatgatgacaacaaaggctgtaatggtgttcaagcttgacaaagaaggaaatgctaaaaaaaacaaaaaaaaaaaaaaaagaaaaaaaagaaggaaatgctgttacactcgagacattggagatctctgcattttcctctcaaaatctgaatctttctgtgtctctgcaactagtagctacaaatccgttccttccctagtccgtaaccacgtctatgtccaggcttacgacgagtatggattcatggatatcgccaagccttttgacgattcctgggtcattcctgcctcacctgatgcgaacccgaatcctttctatattccacctcaaactatagaatatactttatctacgatgcacccggatctatgaattttttactttgtcgtctcccgttactagttttcgtacccgtttcaatgctacttagtcaggtagttctagtagcaatatatgtattattgttccaattaataaattcaactcgcttaaaaactaaaactcaactaaacatttttctataatacttttgtctaatcctagcaatacacactccatttactaatatatacattacctataaactgtgttgtatactaataccccatattcaccagaagacttatagagcatttcagtttggttccgtgtataccacatcatcagccgaatcaacaagtgtaaaaatccacgtgtgcatcagactgccacgtaatcaatcgtaaatagttgatttcaatagggatagtttcgtattttaattctttttaaggggcaaaaaaaacatttttccgtccattgaggaagcaaaggttttcgatattaataaaatccgagagagagagagaggaagaaggagagaatctgaagaagctgaaccagacgaaccataaaccgaggcgagagaggagagagcgagggaggtg

SEQ ID NO: 1732 - DNA, 1339 bp, Arabidopsis thaliana
tcctgaagttgttgttgccaatgtctaactcatataggttagatggtgaagatatatttccaaactcaagagtgcctttgagttggttaccattcaaacgaatgtaagtcaaagaaggaatggtgaagagaaaagaagggaacgttccggtgaaggcgttgtcacttgcatcaaaatccatcaagttggatagtgaagtgatattaggaggaagcgtgcctgtgaacttattgttggagagtgataaaagtgacaaccctgtcaagttcagtaggacattgggaaagtttccgctgagcttattgtcatcaacatataagcgggtcagctggtttagattgccaaaagaagatgggatttcaccaacgaaattgttactaaagaggccgagaaaggtaagttgagaaaggtttccaataaaagatggaatctgacccgaaaaattgttattagaaaggtcgagagtggtgagattagaaagatttccaattgaagatggaatctgacccgaaaatttgttactgaaaaggctgagagtggtgagatgagaaagacctccgatagaagacggaaactgaccaaaaaaccgattataagaaagatctagaaaagtgagatgagaaagattacaaattgatgatggagcctgacccgaaaattgattatcaaaaaggttgagataggtgagacgagaaaggtttccgattgaattcagaatctgacccgaaaaatgattagaagaaaggtcgagataggtgagatgagaaagattttcaattgatgacgtgatttgacctttaaaatcattaaatgaaaggtctagagtggttaggaaatgaaggtttcgaatactgctgttggaatgaaaccggccatggagagagctgcagcttaggtctagctcgatcacttccccggacttggcattgcacgtgactccctcccaattacaacagtcgctgttattcccccatgagtccgtcttccgaggagattcaatgccataaatcttacaatgatcaggagaaggcttcccaatctcaaactcgtttttgaacgcgaggagtgcatccctttgttcgggacgacacaagttcctagttggagccgcaagcacgtccagaaaatgacaaatgaataagaaaataaaagagagagtaatacgaatgatactctttgagttccaaaagccttccatcattcttaagctaatttaattttcttgaatattgatagtgaaaaagcaaaaaaataaaatctggaaattgtgatggtacgtaacatgttttcatgcccatctctttatatacaaaaataatagactctattccacaaagat

SEQ ID NO: 1733 - DNA, 614 bp, Arabidopsis thaliana
tgatgacttgatgttgcctcgttaaaaacctttctatgtaaacccattgggacaaaccctaaataagggaaaaagagtgcaacggtcatatccccacaatatggtgactcggctcactgatctttgacccttcttgaatcatcattagtcttcttaggattattttgctggtgaataattaaccctaggccttgtgcctgattgagactccaattgggcaaaagtcctccaaaatgctcctcatcaatcgctttattaattaaccctatgccttgtgctggtttggtatgctcccggtttggtttgatttggatgtccgcatcatactcctctaaaaaaggtaccaagaagttgtacctcactgaagccatgatgcgggcagtcccgttgatactccttgaagcgaacccaagcggccttgaaagcttcagctggaccttgtgtgaaggtagacagcttgtttctcagctcctcagacttagcatcatcatagaaattgttcaagaaagctatcttgatgcttctccaagtcttgagggaacctgcctttagttgtttcagcaaagaagcggcttctccatcaagtggataagggaagagcttgcacaataggt

SEQ ID NO: 1734 - DNA, 1362 bp, Arabidopsis thaliana
cttacttgaaaagagtagagatcgatttctctgagatcgtaatcgaaaatcatctcactttctctacttccccatatgatttcagctgttttctttgatctcttcaatggactgatgatcacaatgtataacaacaacaaatgcagccaaatttacaaaaaggctttaacaacaataatctccatcacaaagaacaagaacaaaaaaattgcagtgattactatcataatctgtatctctgattcttcatagtcaatttcatcaattcgatgtaaaatccaaatccaagtgactagatttcaaataccgattcaatagatataataagaaaatgcaggacctggtgaagcagacatcgaaggagtcgtcgataagcatctgacgagaaatttcagcctgagactcgcctttcttcgtcaaaacggagaaatcggagcttccttgaatcctcccttcttcgttccacgtgctctgtccatgtctcacaagaaccactcgcttcgtcgtctccacggtgaattggtcttgtaagctcgatgatgatcgaatcaataagcggcggcgagtcgagttttgccggcgggttttgtggagaagacaccggctgggtaaaatcggtgtagtgagtggtagagaaatcattttattttattttttgttttatgtttttagaaataagaagtgattcttattttttcatttagcgggaagttcgattttatcgtgggttttatttgggccgtaaaggcaggcccaatagacccaatttttatcatgcttaatcaagtttttttatctttcttttttttgttcactaatgatttggttttcacttctcactgatataattcactttgaaatacaaaacactggcaagggccgagggaaagtacatggagactcccaaaaaactataccaaattaaggtgaaacaaacaaataatgttatttatcatatgttatgttattaacaaaaatacaatgatactatgttattaaaaggaaatagcacaattttgcacgaattcggaaaacatttggggaaaatcgtgaatttttgtttgcctttatatatgatttttaactggaattattccgaaatgttcatagtttcataatctcatcaagatttaaaactaaattctgaacacttgttaaagattcaggtaaattttgttgtaatattgtatgttttgtttcttgaattttggttagatcacccctttctgaatttgtacgatcatttatcaaacgcaattaaacatattcgtttggcatttattgtcgattgcaaccaaaagctgatcttgcatattagttttgttcgttttgtacttcttgttatatgttgtcagattttaa

SEQ ID NO: 1735 - DNA, 1061 bp, Arabidopsis thaliana
taatgtgtccaagacccttacactcagagcacttgagatcttttctctttaaggagggacattcagctttaatatgtccgtatccttgacattaatgacattgaatctcatccctttttgagcttcggtctcgatatctatcagttccctgatttcttctgaatcctttcttctcaactctcctcattgctctactgaagtcttttgccatcatgctcattgtatccttcaattcctgtatctcattcttctttgccgatgcagctaaagcaagtcctttggagtaacctccctttccggaagtgatttctaattcatatgcttggagcattcccactacttcttcaaaatcgattgagtcagtgtccaacgacgttcccatggtcgttctcttactttcaaaccttgatgggagacacctcaacagtttcttgaccagtttcttatctttgtatttctttcctagattgtgtgcttcactcgctatggcactgattttcccactgaactcctcaatgttctctgtttcttccatagtgagattttcaaactgagatgctaacatgtcgattctggatcttttgacactacttgtcccttcatatgctttagcaagtttatcccatgcttctttagctgattaacagttttgaatccgtttgaattgattttgattcacggagttgaatatcaaagacagtgcccttgaattagctatggcctttgcctcttctgcatcattccattgatcttcagtttttagcacatcttctccatcttctcccttgatgaccggagccttccatccaatgttcgtagcaatccaagcttcctttcctagaccacgtatgagagctctcatcttcactttccagtgtccgtaatttcccttcctccaaccttgattgctttaccgaccgcaacgaactctttggggtagtccatcctctccgcaggatttgcacctgttgttaagtacaacttggttcagatgcccgctctgataccaaatgaaatttcggatgaaccaagaatcgtattccccaaactcagaaccactg

SEQ ID NO: 1736 - DNA, 1382 bp, Arabidopsis thaliana
cttttcttctttgttccttaatcgccatgatgatcatcatatcctctaatcgatcttaacagatgaatagatgagccttgtgaaccagagacaagcatagaaccctattgttcctgtgagcacaaaaaatgcgtaggaggcgatgagcatgtacccaaagtaaagcatcgcagagaccagtttggtgatctgaagctttgtgaagaagtagaacgtggcatagaggaagaggtagagagctgatgagcctgatgtgaggtatgatctccaccaccaaaggtagtcctcactgcaaagctggaagtagcagagtactacggttatctcggcgcaagtcacaatgaggattacaaagacgaggaagaggaacccaaagatgtagtagaactggttgagccagatggatgtgaggatgaagaagagctcgatgaagactgcaccaaacggtaagattcctccaatgaggattgagaaaaccgggttcatgtaccaagcttgctctgggatttgcctcgggattttgttggttttcactgggtcatcagccgctggcttcttgaacccaatgtaacccccaacaaagacgagaggaactgagatgccaaaccagaggaagatcaaggcgaacattgttccaaaggggacagccccagatgacttctgtccccagatgagagcgtttaggacaaagaagattgctgacacaactgcaggaaacaagaaggctgttctgaaagcgattctcttccactctgttcctttgaacattttgtagagacgtgaagaggcgtaaccagcaaagagtcccatgaagacccagagcaagagcattgcagtcatcagaccaccccgattggaaggggagagaaatccgagcatggcgaagatcattgtgacaaataccatgcctagacactggacccctgttccaacatagacgcagagcagatcagaattggtaggaagtctgaaaacatcaccatggacaagcttccatcctgtctcttcttgagcttcttcttgagtctcgagctcgttgtatcgtgaaatgtcacggtaaagggtcctcagcattatcattgccaccataccagataggaataggacgatcatcagagaattgacgatagagaaccagtggatttggttatcactcatcagaagataagtatcccatctagatgcccacttcacttcactttcctggacagaaacagaagaggaaatcagaaaaactattgaaaacaagaattcatgaaatttttttaagacacaaaccgcagattacttaagaaaaaacttgcctggaaatcgacgtcatatgtgaagataatctccttcttttgttcaacttcttgaggggtagccgagctaacgaccag

SEQ ID NO: 1737 - DNA, 1009 bp, Arabidopsis thaliana
tgagtgtcttcagatgacacttctcgaacaggtgctgcacgtcctctggtagccccaactgggttaaagtctcgtagcaggggtacctcgttccctagaaatctttcagctcaaagagtctgatatactcttcgactggaacctcgtcgggtttgttcagtagctttgtctccttgcgccatgactctgactcatactcagtctcaatgtcctaatcaatcaactcatacctactcaacatcgctctctttcctctaccgatttcagcacttctctgacttgtcaagctgctgagcgttgcatttgtgctctaaaactttcgtaaacatgttcctctttctctggtctagtggacgaagattcagcttcatccacattataatctggatccatagaagactcaccactgtagttactcatgttgatttcctgtaaacagatggaactcaaagagcaacgttaatacgttagttccaacaaaaccaaaaacacaaactggtcgagtaaaatgatcgagtaacagggtagagtaaaccgaaacaggtcgagtgaaattgttgaatttgatgtattggatcatagttggttttcttgcccggtttggtgacgcggtcgagtgttgagaagcgagagatggtggtggtttcggtgagagatagcaaagaggttcacgacggtcgagtaatggtagaggccatgatttcttggttgcgagtgtgagaagtgaagaagcgttcgagtggtgagcttttgttgagaagagagcagcggcggtggaagtgatgaagagatgatgagtttgaagactaaatcgttttcgtggtcgaatacttctcttctcttccttctttggctatggatcaagtgattaacggtggtgagactagctcgatggtttgcgagagagagaagtgaacggatgagcgatgagcattgcgatcgagtgaatgaagaccatcttcgttctcgtttttccgttgagttagtcgagtgataaggcgatggagag

SEQ ID NO: 1738 - DNA, 936 bp, Arabidopsis thaliana
cgactctcccctgaatcatgttaacaatattttaaaacaaaattttttgttaaaacaaatattattcttcctaaacgttttttgtttaaataaataaatcatgtatttgaacttatttacaatgtcatgacactgacattaattacttaggaataaaaatattaaatcttctaaatccttgcttttagaattattatgtcattacttaaaagactcaaaatataaaaaaaattaaatattattatttatatatctagactttataaaacattattaatatttaaacttataaaacgtttaatatatagagtttaaaaaagtcttaattctttccgtcatattttgtgactcgaaattttaaaaataaacatatattaaccaattggcaaaaaatgtgtgagttatacgtcccacatggactaaaatatttagacaatgattcatacacatatcataaataagattaacattaataaaataatggtttttttacaggacgggtttggcgggacgggtttagcaggacgttacttaataacaaatataaagtataaaataaaaatattttataaatagatacaatttgcaaaattttatgtatactatgtttaagatataaattgctactccggtgtaccgcggtgtaaaatctagtactattaatacaatacattataaatagtacaagaaatatatggaaatagatataggtatatatatatatatatattaaaattttcaaaactcagatttttatgtaatcaatttcagattaatctgttaactgaaattatactaatttagtattattataactaatattaattaaaaacagtattaatatataatttcaactcatacataatggaacttgttagataaattatgatttacattaaacttttaagctattatggattttatttagttataata

SEQ ID NO: 1739 - DNA, 1059 bp, Arabidopsis thaliana
caatagtagtgattaatgtctctgaaaaactttttcttctggtaggagcttaactcactagggactattccagcagttaagtagttaacaagatccacataccaaggcaattttccactccttgtagcacacattgtttcaatcttaaacttgtcaaaactggtaccaactgctaggagttgttcttcgggcatagaatcatcaattgggactgcctctgtcatcctcattcttgaaaggtgatctgctaccccattctctgatcctctcttgtcaacaatctccatgtcaaattcttgcagaaatagtatccatctcaaaagtctaggtttagtgtctttttttgcatagatgtgcttcaaggctgcatgatctgtatagacagtgacttttgaaccaaccaagtaactcctgaacttctcaaaagcgaagactacaaccaataattccttctcagtggttgcatacctactctgagtgtcgtccaaggtcctgctagcatagtagatcacatgaagcttcttgtcaatcctttgacctagaactgctcctacagcataatctgaagcatcacacataatctcaaaagggtggttccagttaggtgcttgcagcaatgggtgccaacaccaaggcttctttaatggagtggaaagccttcaaacagtcttcatcaaaatcaaactcggcctctttgcatagcagacgagtcagaggtctagcaatcttggaaaaatccttgatgaatctcctgtagaatcccgcatgtcccaaaaagctcctaatatccttaaccgtcttaagcggttgcaaccgaaccataacgtcaatcttggctttatcaacctcaatcccctttcctgagattttgtgcccaagcactattccttcttgaaccatgaagtgtcacttctcccagttgagaactaagtttgtctcctcgcacctttctagaaccttacacaagtttaacaaacatgaggagaaagaggatccatagactgagaaatcgtccatgaatacctccattatcttctcgatgaaatccgagaatataga

SEQ ID NO: 1740 - DNA, 540 bp, Arabidopsis thaliana columbia
tgaaactagtttattttattttttatgtatacacggaaaaattattttatcacattttatttttcaacatgtctctttgttctacatgtagaggttgaaactttccaccgcggcatcaagactcgatgcaatttgtgattagcagtttagagacttccttttgatttggctcagtttcttttaccctccctattgtgttttccactttcttaggctttgttagtaatgaaaaaaattaacagattatgatcaatataagatcttctctgattagtttaaattagaagacaaacaaaattccggccaggtcctccgaagataaaactaacaaaaaaacaggagaatgaacattgacaaaatcaacatgagattaaggacaacgagagttccggccaggtcctccgaagtaaaagtggggctctgacatatatgttttccggtggagcagtgtagaataacagttgtactcatcagcatactcggatagaaactgggggtatttgagctgcatggaatagtccttgatcctaaggtttgtgt

SEQ ID NO: 1741 - DNA, 612 bp, Arabidopsis thaliana columbia
tccgctagctattgactcttatttgttgttgcagatgatcatggagagaaaatttgaaccagtcattatcttcagcttcagtagaagagagtgtgaacagcatgcattgtcaatgtcaaaactcgattttaatacagatgaagagaaagaagttgtggaacaggtgtttaataatgcaatgcagtgcttgaatgaagaggatagatccttacctgccattgaactgatgttgccactgctccaacgtggtattgctgtccatcattctggtcttcttcctgtcatcaaggaattagtggagcttctttttcaggaaggacttgtgaaagcgctttttgccacagaaaccgtaaatgttttggaattagcttgtctttttcagctgttaaacgctcttttgtgctaattaatgattgttcctcaaatgctgctcttgtaacagtttgctatgggtttgaatatgcccgccaaaactgtagtgtttactgctgttaagaagtgggatggtgacagccatcgttacattgggtctggtgaatataccaggtgggtggtagtttgttgacgtaagtggtgaatttgatgtaatacacaaaatgatattgtagtaat

SEQ ID NO: 1742 - DNA, 1014 bp, Arabidopsis thaliana
ccacaacatgtaaaaattcaatttggatgatagctaacaatctcccacattctgttgtgtgtttctttgttttgtactaactcctggttacgagtagagagacattcatataagaagcacatttacaaagtcttaaaagttcattataaccatagaccaaaaggctagttagacaacttagctaattcattacaaccatcgaccaaaaggcttgttagacaaagctaattctcacacgagaatccaaagtcctaaaagttcattagagtagatagaaagatgaagcctaagatagataacaaaataaggcattacatcttcattaaacccgagattaaacggataaacatatacaatccaatagcttcctcttcttcttcttagttggtttgagtaagcactgaagtcacctccttcaaaacatccatgttcgccaacaacaactcacatttcttagcatccacaagcttcatcttctcttgaatcctcttcttagtctccacggacaccttgctccacttcttcttcacagaatactcatccaaaccgagactagcgataaccggaacaagaaaagactcctcaaaccactccgaatcttctccaagaatcacgacttgctcatcttctttaaccaaaggtttcacgttcttctccttgctattagccttaacaagaacagattcatctttcactttcttcttcacaggagtttcaaggctcacaccatcagatccccaaaaagaaacagccaaacccaaacacttcttatcatgatccgattcaacacttctcaccttccggtcaccaaaatactttctcttaaagcttctaatcttgtcaaagaactggactttactaacatcaaagcttatagatttcttggcgatatcaaaaaacctatccttatgatcccaaggacttgtacctgtctcagctttgaaatcgatcattgcttgcaggagagagatctcgtcttcttcactccatactctctgagcatgccctttttgt

SEQ ID NO: 1743 - DNA, 584 bp, Arabidopsis thaliana columbia
ccatcgacttcgagaattgctcgaagaaagccactggatcctccgcatacttgctcacgattcgccgcgtttgtatcccgaacaagctcgtgtacatctcctggtccgaattcagtaacccttctcctcttagcagtgtgtggtagatcgagttatcgaagagattcggcgtcacattgtctatcgccgtcacgttactatcaccttctccgctactcgccggacaaatctctcgaagacttgccaagtacgtctccgaaactggatttagggctgacgtcacttgaaaatctccataaattcgggatcggaagttgcgacattgtgcttttccgatcgtgtgcgctcctaggagatagattattggtcaagttagggttttagtaatccggtttacgacattttatatcatattatattcaatcatatggttttaacttctattacaaggaatttcggtttagtttggttaagaggattgatcttacctataagagcgaccatgtcttcaaccgagagaccttgagaatagaacttagcaatgatgctgattaaacgtcttctggagttggaaggtctgttgt

SEQ ID NO: 1744 - DNA, 593 bp, Arabidopsis thaliana columbia
taagtcttctcggttctcttagttatgcaacacatacgagcagctccacttcaagggcctttggatatagtttcagaccgtttgcgaggagatatttttctcaagtcgctagtactgagattaaggatagcattgttggtggtgttgaaaagtttggtgggaataaaataggtttcaagaaattcaataagaagtggaagaagcatagggttttggcttccacaaaagctgaagtggtggcttctactgaaccagttattggagatgttaacagtggcatcaaggcgaaactatcaactgcagcttcacctgctagcaatgctaagcaagcctctactgtcaaaacaaaacggcagccaaagagcaagaaattcgaagataaatcttctccaacggtatcggttttggagaccgtctctgtagacgagagtttgcaaagctttcccaagcctagacattcgggttccggaaatcggaagtcttcatctgctgaggtattaactagtaaagttttttgaatcatcgtcttcccttgctcatatcttctaacagtacagttctcagaaggaggtggtgaaacaccaatgtggagg

SEQ ID NO: 1745 - DNA, 775 bp, Arabidopsis thaliana
cttccgaaagtgatttgatacccaatcctccttcttgtttcggtttgcggcgaatgtccatgctatttttgctctcttgtgattaagctcaggttcagaccacaagaaagcagaacatagcttctcaatttcttttaagcatcctgctggtaggcgatatgcagacatccagaaattggacagacttactatcacataattgattagagcaagacgtcccgcataggagagtgagcgagctgtctaggagcttatttttgatcttactttgtcaataagaggcgagtaatccgcagttgtcatctgcttcgtcataagtggaagacccaaataacgaaccggtaactgaccacttgcgaacgaaaaagcagagagaatgtggtctctattcggttcagaaaccccggcaagataaagtgtggatttctccaagcttatgtgcagccctgacttgcctgcaaactcatgaaaaatattgataactccttcaatcgatctctgctgaccatctatgaacaccattaagtcatcgacaaaacataaatgagttagactgagcttcttgcatttagggtgataccaatgtttctgcgaactgcagcttcatcaatcatgtgagacagaacattcatgcagataacaaaaaggtacggagagagagcacaaccttgtctcaaacctctcttgttgccaaagaaacctgccagttccccattaacttggacagaaaatgtggccgtcgagatacaaagttttatccaatggcggatttttt

SEQ ID NO: 1746 - DNA, 495 bp, Arabidopsis thaliana
tcatcaagaaggtgctttgatcccaagtatagttgaacatgttgctttaaatcttgttaagagaaaaaatgggacttgcttctgtgcccaatagttcacgagcatgttgctaatcttgcttctatgcccaggaaacggaagtctcgtggaacacgagatgtagctgagattctaaggaaatggagagagtacaatgagcagaccgaggcagattcttgcatcgatggtggtggttcaaaaccaatccgaaaggctcctccaaaacgttcgaggaagggttgtatgaaaggtaaaggtggacctgaaaatgggatttgtgactatacaggagttagacagaggacatggggtaaatgggttgctgagatccgtgagccaggccgaggtgctaagttatggctcggtactttctctagttcatatgaagctgcattggcttatgatgaggcttcaaagctatttacggtcagtctgccgactcaatcttccactgct

SEQ ID NO: 1747 - DNA, 536 bp, Arabidopsis thaliana
cagttttagtcaaattcgagttttgacttcaaagagaaaaatcatgagattcatcacttttttgttcttccatttgactgcaatgtggagggattggaatttattggtataccaaaaaaaatacatgatatacggttaagttcctcgtgccatttaccttcaaaaaccgaagttggtagacccggttcacaattcatttttttccgaataaccaaaccggcccaaaaagttttatccttttgtctcggtctaatccatttctctagtgccaaagctaacaatggcggttttggaagcttctctctccattttctccttctctgcttcttcttcctcttcaaaaccttatctctttcctaaacgctcttcttccttaaaacttactgcccttagtcttcgaattcccagcaatctctctcccgtcttctctctacgttccggcagcgataactcacggcggctcgtctccgtactctggtccgtcgcggagaaagaaacatcggcggatgaagaaacgtcgcaggaggagaagactg

SEQ ID NO: 1748 - DNA, 629 bp, Arabidopsis thaliana
  unsure (1)..(629): unsure at all n locations
aggtcgaccnnnnnnnnnnnnnnnnnnnnnnnnnnnnnctaaagactgtgacgcgcaagggcgagcattctcgacgcattcacagtgctgatgacaagtcctacttacgaccagacctacttgagtggttcaagcagcatagccgactacagtgacagtggagaaagccgcaaagtctacgtaactggagtcctacacatactacacaaatcaccctgagcgcctacggtatcagcatgcatgccatccgtaggccaggttcgtcatccgccgtctttactttacaaataccgctagaagcagatcgcggataacgcctgtcaatggttggatgaggtttttctccgaccaaaagaaatgtctgatattcataaactgacattcattgaaaagcgagaacgactaaagaattccgtcttcaaatcgctccatgacgtcagcgaatttttgggtcgagtgctgttgccgcaacgatccggcagcaccacgaaagccagcctattccttgcatgctatacgtggaaaaagcaggggctgaaaatattcttgaaaacgtgcatatcgttcgccgcgatccagaaggtgatcagctttggattggcttcagcgagttggtgactgatataaca

SEQ ID NO: 1749 - DNA, 544 bp, Arabidopsis thaliana
  unsure (1)..(544): unsure at all n locations
nnnnnnnnnnnnnnnnnnnnnnnctaaagatgggtaaaatggttgtcactattctatctgcagtggcccaggcagaacgacagagaatactagagcgtaccaatgaaggtcgccaagaggcaatggcaaaaggagttgtttttggtagaaaaagaaaaatagatagagatgcagtattaaatatgtggcaacaggggttaggtgcctcacatatatcaaaaacaatgaatattgctcgttcaacagtatataaagtaataaatgaaagcaactaacataaaaggttgaatatggaattgaatattacttcaaagtctaatccgtttggtgatacgacagcagaaaatgataaaaagatgttgagtaatgctttcattgaaactgctgactttaggactctaattgaaactgatgacaggaccattgttgttggtagacgagggacaggtaaaagtgctttatttattcagctaaatgagcattggaagaaagacaaaaaaatattaatcctgagtttctcaccagacgattctcaaattattgg

SEQ ID NO: 1750 - DNA, 517 bp, Arabidopsis thaliana
cattcccataacatcgatgcctggacgttacatgcttggctggagacacggcctcattgaagaagtgagtgatgattctatatgaaaactttagagactataaatttgatatcttcttctcattttacttgtaaacaactttgttcacggtttgttctattaggacctaaaataaaacttaaagataatgaagcattctttttggctaactcttgtatgtgttttgtgaggaaaataggttgcaagggcactagatgttggtgtgaatagcgtaaagttgtatcctaaagttccggaagcgttaaaggtttcatcattttcttcttaatcagtgttgtgcatattttttgagttgtttgacacatattttgacaatggtttacaaaatatgaatacatcaataactaacctttctttgtttagtctccaacaggggaagaggcatttaacgacaacggtctaatacctaggacagttcgtcttctcaaggacagattccctgatcttgtaagatata

SEQ ID NO: 1751 - DNA, 1133 bp, Arabidopsis thaliana
gcttggaagacgtagcgaaacagaaagagagagtcctttgacattgtggagctgcagagtagagctaataggcggtcccagtcagttgagtactcatgagataggagacgccttgttagattatcccaaattgcagtggtgtaatggcaagagaagaataagtgatttcttgattcttcgacgttgccgcagagaacgcaattgacttgttgtccggaattccactttttgatccgatcacccgtggataatctatcatggatcgcaagccacaacaggaaagagtatttgggtgtgttgtatgagaaccaaacacccttataccattgcctatgcgtgtgaataacccggatgttgtgccaagtgacttttgttatgaaactttgtctgaaattatcacctgaggatcgccacagaaaaatgtctggtgcccctgatctctctcgttgaagaatactctgaatctctgcctctatcttgttgtagattgcagtacgatggtgtttggtcctgtgagaagccaaaacagtcgcgacagtagctgctaacggtatccccatgtctattgttctacgagcatttgtaacatcaaccagttgccctagctgtgaccaattatcataccagaacgaagtagagctgccactttttatctcaaccttacacatagatttagccacatctctgtacttaagcaacttcttccacatccaagaccccagactagaacgatcatttgcggaccagaatgagcccttccgaataatataagtccaaacccaattaacccacaaagaagactgccgagaaacgagtctccaaatcagcttcaaacaactaactttatttgcttccaagagagatttgatacccaatcctccttcttgtttcagtttacatagcgaagtccatgttatttttgctttcttggggttaagctccggtccagaccacaagaaagcagaacatagcttctcaatctcttttatacatcctgctggcagcctatatgcagacatccaaaaatttgacaaacttacaatcacggaattgataagagctagacgtccgcataggagagggacgagctgccaagagcttactttgatctcctttgcaagaagagcgaatag

SEQ ID NO: 1752 - DNA, 851 bp, Arabidopsis thaliana
catcttcctttggtgaagccatatcttcctcggagtcttcatctaccagctccaacctcctccccacgggcttcttcccttgtgtgatatctgccttgttcctcgcgaattctcttgcagaagacttactcgacttttgggatctagtatttccagctggagagctgaaggtctcttcttcttgcatcacttcctcctcttggctcgattcactatgatcgatctcgaaacttgtttgatctctcctactcgaccccaagggtgatggttctgaaggtcctcgagctgctgcatgcgaagaaggtgttgggtacctctttaatggggagagagctttgttccgaatctttgacaaaagcgagcgcctgttcatcgtcacgaactaaggtgggagaaactcaaaaccaaaattcagtagattaggagattgaatgatggaagaaacaaatgaatttgtgaaaagtttttgataagaaagggaagtgaaggagataaagagaggattgtagggattcaagatgaggatgctttggtatgggagatggagagatgaggttgttgagttcgggaattgcaatggggggaccaaagtgattatgggggggacaagaagacaaagggacaacatcgtttcaatggaggcgggtcacgaggcgtcggtgtctacgaagagagtctctttggtttcttcactcgatcggacggtgaggaatgctccatctttatttactcaatcaaacggacaaaaacgaatcgtaagaaatcactcgatcaaacggtggtgatgctcctctcatttggtcatccaaatcaatggctcaaaatactcctcctcattttactcgatcaac

SEQ ID NO: 1753 - DNA, 612 bp, Arabidopsis thaliana
cattctgttcaagggaagaagtatttttaaaaatggacaacataaaaaagtattgttgcaaaaggatattaaaaaagggtagttttgcaaatctcccaattataaattggcaccttttatctttgattattgaaattcgagagagatacgttatgtgtggtaaaaaaagatacgttatgtgtttcggacctggcaagtaaagtttcggtagcaaattaaaactttctttcacacgtgtcaacatcttaatcatgtgtaaggaggagacgttgcttaaggagtttgatattattttggaacaggaggagacgttgtggtttcaaaaatcgagatagaagtggattcatatgggagataggaacacttcatactttcacacatctactgtgattaggagaagacgtaatcgcataaaaatgcttaagaatgatgaggatcagtgggtatcagatactcgtgatttagagaagcttgttctggattattattctcgtctttattcatggatcatatagcgcaggaggtggagaagctgccacagggaggttttgtgcaaattcacacacagaccaagtgggtctgagtcggagatcgtgctgaggaagtggagag

SEQ ID NO: 1754 - DNA, 482 bp, Arabidopsis thaliana
  unsure (1)..(482): unsure at all n locations
nnnnnnnnnnnnnnnnnnnnnnnctaaagaaaaagcattcccgcgcgttcgccaatcttactgctatcaaccagtaccaccagtttccctaccacgctcagcatcttctgctctgccattgctgtcagcatatcggttttatacaacccttctgcggtcagcccttttccgctggtaaacatccagtgcccggcatagagactgttttcgctgccctgcggcgttaaagtgatggactgacttttgttgtactgtccgcccataatgatcacgctgtcatgttcttgatcgatcaggtaatttgccagcggtagataattagtgatgatttgcactggcttgccacacatttcccgcccaagcagaaacgcggtggagcgcagttgatgactacgctttcgcccggattaaccagctgcgaggccgctttagcgatacgtactttttcatcgtgattctgcgcctgatgcagattcatcggc

SEQ ID NO: 1755 - DNA, 531 bp, Arabidopsis thaliana
tatgcattgtctctgtttcatcttcaggtattgggatctcgtttggggaggatcaggaacagctggcggctttgatgtgtaagtctcttctatgtaagcttaacgccaaaataagattaatcacatcttttcagatagaatttgaacttacatatagcagccaagagagattcaataaagctcaaagaaactagtgcataattattttcttttggaaacagaatcaaaggatcaaactttgaggtcatagtgaagaatgaagaacagattgagctttctttcacaagaaaatgggatccatcacaagaaggcaaagcagtccctctcaatattgacaaaaggtacttagtcttctgagatgcataagtttcatatttttcatattgtgacctgaagaactgtggaaacagatttgttatgcttagtggatcgtcgggattctacacttacgctatctacgagcatttaaaagaatggcctgctttctcacttgctgaaacccgaattgcttcaagctcagaaaagagaagt

SEQ ID NO: 1756 - DNA, 547 bp, Arabidopsis thaliana
tattatttctatttagctccgaaacttcagcaagataaagggtcgatttctccaaacttatgtgcagccctgatttacccgcaaaatccttgaaaatattgataactccttcaactgatctctgctgcccatcaatgaacaccattaagtcatccgcaaaacataagtgcgttaggctgagtttcttgcatttagggtgatagccaatgtttcggtgaactgcagctacatcaatcatatgagacagaacattcatgcatataacaaacaagtatggagagagagcacaaccttgtctcaggcctctcttactaccaaagaaacccgcctgctcgctgttaacttggacagagaaagtggctgtcgagatacagagttttatccaatggcgaaatttttccgggaatttaagagcttctaaagtgttcaacaggaattgccattgtacagaatcaaatgctttcgatatatcgattttcatcgcacaacgaggagagattgaatctttgtggtagtccttgactaactcagtagccaaaagaacatt

SEQ ID NO: 1757 - DNA, 503 bp, Arabidopsis thaliana
  unsure (1)..(503): unsure at all n locations
nnnnnnnnnnnnnnnnnnnnnnnnnnctaaaggcgtgctgatcgatgagcaccagatgagctgggatgacgcctgggccattaccagcaaaactttcgcttacaccaaccataccctgatgccagaagcgctggaacgctgggatgtgaaactggtgaaaggcttactgccgcgccacatgcagattattaacgaaattaatactcgctttaaaacgctggtagagaaaacctggccgggcgatgaaaaagtgtgggccaaactggcggtggtgcacgacaaacaagtgcatatggcgaacctgtgtgtggttggcggtttcgcggtgaacggtgttgcggcgctgcactcggatctggtggtgaaagatctgttcccggaatatcacgcagctatggccgaacaaattccataacgtcaccaacggtattaccccacgtcgctggatcaaacagtgcaaccggcactggcggctctgttggataatcactgcaaaagagtgg

SEQ ID NO: 1758 - DNA, 634 bp, Arabidopsis thaliana columbia
cttggttgtgctttatgtatcgttggttcggttacaatcgtgttacatgctccacaagaacaagatattgtttccgttttagaagtttggaatcttgcaacagaacctggtacaaacctctctctctctctctctctctctctctttcaaagctcaaagctcaatctggtaactaagacttatatgatagttttcgtgacacattgtgttttcttttaacagcttttctcttctacgctgcggctgtggtaggagcagctattgtacttatagttcaatttataccactttacgggcaatcccatgtcatggtatatatcggtgtttgctctcttataggatcattatcggtacgtgatcactctataatcttacacgttgatacatacatctaccgtgttagagtgacaatatgcgtgactgattgcaaacaggttatgagcgtgaaggcgcttggaatagcgttgaaactcacattttctggaacgaatcagttagggtaccgcaaacatgggtcttcacgtgatagttcttttctgcgtgataaacaaatgaactatttaacaaggtaagtgaaagtgcaattctacacatttttgcccctgtaatgttagggatgaaatcaggtttagga

SEQ ID NO: 1759 - DNA, 632 bp, Arabidopsis thaliana
gtgactgttcttgtgagattacagacagttgaaagctatataggacactgaaaaatttaggtttccacaaagaaacaaccattccttggtagcataggctttattccatggtaacctcttagtctctattcttcccctttgcatatcaggtgatgcgtcccaaccctggtgatgagtatactattactgagcttaaccaagtcagctggtcattcgagggtaccccacaggtagctttcaattgcctgtctggcaaaatgaaaagaaaaaaaagactggcaaaacttttcacacttgctttactgagctcatgcgtctttcttaatcaatcttccgtacactgagagatcatgtttttccttttcagattcttgtacccattgcagatggctcggaggaaatggaagctgttgctatcattgatgtcctgaagcgggcaaaagcaaatgttgtcgtagctgcgcttggtaacagtttggaagtggtagcatctcggaaagtcaagctggtggcagatgtgcttctcgacgaggctgaaaagaattcgtacgatctgattgtgttgcctgtgagtgctaacttcttcaaattactaaagtttatagtgtcaagcaagttgaggccacatgatg

SEQ ID NO: 1760 - DNA, 609 bp, Arabidopsis thaliana
taaataatgtcttataaaaccggtaccttgactcttaagttaacctttttagtgaataaaatccataaggtttttgctatatcactacctcgtgctagaccataaaagcttgcgttgggaacaaatgagccaccggctattgtggctgtatgcgtgccgtgaccggttgcatctctgttggatttgaaatcacggatgattattctgttaaattttcctccattcatggcgagtagaccgctttgatagtacttagctcctataagctttttgttgcaatgcattgtggcgttaaacttttctcctgatctacattttcctctccaacgcttaggtattggtccaagaccttgatcgttgaagacctttgactctggccatatccctgcatatacatacatacatgatgtgcgccaaggagagagagcgagagagttagatttagagagagagagagagttagatttagagagagagagagagagagagacctgaatcaacgacgccgatgatagcttcactgcccatgctggtgttatgaagtagacctttcgcttttgcagatgatgatgaagaaaaagaagttggaattggagagaggccaagatg

SEQ ID NO: 1761 - DNA, 892 bp, Arabidopsis thaliana
gaggtcgactctcgggcgtgtcatgcgtgggctgcatgacatgaatgcaaattcttagaatcggaatgccattaacgataaaccatacttccttcttcttctctaaacatgttgtgcaaagaaataacagccacatacccatcaccttatgatttgggtccttatgcatgtgaaagaagtgtttgaactgtgtgatccaaaaaccacttcaattaggagtctttaagatgagtctccaataatcccactgccttatgaagataacactttgttgtaatcttgtatgactttgtatactcactcggactgaagtacatttgtaacgcccgtctccctcaaccttgagacggcaccctttttctttatgattaaattttattgataaccatcttaaatataatatcaaaatatttgaaaacatcttaggtaaaacttaattgaaaacaagttgataataataaaataacgctgaaatttaataaaaccgagtttctgaaatacactataaacgagacagctactcaacattctcatcctcacccgggaaaatggagaaaaaggggtgagtaattaattacttagtgaggcggtcacaactgccccccgaagcacattatcacatttatactttcacacaacttccattcataagcatataatcaaacaacatgcatatagcttatgttttcgtagcaagctataacagtcaaacatttcgtcttgcacaccgcaagatattttactttcatttttcagtttaggtagtttacttatggctactcaagcctcatttaactcatcatggctactcaagcctcttatggaagaccacgcccttagtttgatccttcctcttattgcatatcacgctaacaacctatcgcataatatc

SEQ ID NO: 1762 - DNA, 611 bp, Arabidopsis thaliana
gcgtaccgatccggtattctctcgaagaatttgcacttatgtcaggattatactgccataattatcccaaacccttggacagcttgggctgtaccacttttgctggcaagatgtttggactcggagcaacagttcagtatcttgatgtggagaataagttattgtctatgaaaaaaccttctgatgctcgtctgagggtagctgtactatattttttatgtagtgtaatcgttggaaagggtaagacaggaccaaacgcaccaaatgtggagaagttcttccttagggctgtggctgatctagagttgtgcaaaacatttccgtggggaagatttgcatttgaaaaaaatgtgaaagacattttctatctgatgaaaaagtgcaatggagtagttggtccacaaaaggtgtttcctagttttgttatgcctttggaggtatgtcatttcattatgcatttatgaattgttttaagaaagttaaactgtgtacaactgtgtttttattagcagttatacttattagtttttgaaaaatcttgtattgtttttatgtagtatctagcatttgaggcgatccagttctcagggaaaatttctgcgaagatattg

SEQ ID NO: 1763 - DNA, 535 bp, Arabidopsis thaliana
tccaaagcaaagaaaatctcaggtactcaacaaaactcaaactcacatttaagaaagtttcatatctttgagcattgaagatttttgtacataaacacagagcatccagaagtaatccatgttatcccgaaccggattctgaaactgaaaaccacaagaacttgggatcatcttggcctctctccaaatccaacttctttttcttcatcatcatctgcaaaaggtctacttcatgaaaccaacatgggcagtgaagctatcatcggcgtcgttgataccggtctttctctcgctctctaaatataactctatctctatctttctccttgattcacatcatgtatgtatgtatatctatgcaggaatatggccggagtcaaaggtcttcaacgatcatggtcttggaccaatacctcagcgttggagaggaaaatgtgaatcaggagaacagtttaacgccaaaatacattgcaacaacaagctaataggagcaaagtactatctaagcggtctactcgccgagactggagggaaa

SEQ ID NO: 1764 - DNA, 807 bp, Arabidopsis thaliana
ctcatatttcacttttacatatcatggtatatacagcaaagaagacgcacaaaactccctgatctacagctaccaacatggattctctggtttcgcggcgcttcttacatcatcacaagctaagaaaatttcaggtactcaacaaaactcaaactcacatttaaggaatattcgtatctttgactctgaaaacaaagtttctaaaccagaatcttgtaaataaacacagagcatccagaagttatccatgttataccaaaccggattcggaaacttaaaaccacaagagcttgggatcaccttggcctctctccaattccaacttctttttcttcattatcatctgtaaaaggtcttcttcatgacaccaacttgggcagtgaagctatcatcggtgtcattgattccggtatctaactctctccttctctaactctaactccctccctctttccttggctcacatcatgtatgtatgtatatgcagggatatggccagagtcaaaggcagtcaacgatcaaggccttggaccaatacctaagcgttggagaggaaaatgtgaacctggagaacagtttaacgccacaatacattgcaacaacaagctaataggagctaggtactatctaaacggtgtagtcgccgcaattggaggaaaattcaacagaacaatcatccaagatttccaatccaccagagatgcaaacggtcacggtacacatacagccacaatagctggtggctcatttgtccccaacgtgagctactttggtttagccaaggtactgatatatatatatatatat

SEQ ID NO: 1765 - DNA, 974 bp, Arabidopsis thaliana
aggatccccgatacaacatgcaatcaaaatttcctgaacaaatatgttgaagaaggatgggagctggtagaaacttagcccaatctgatggcaaatataatgaagattatgacagagccattagagggaattttgatttagaagagaagcatcacaaggatataaaagctatgaatgacaagctagacaagctactccttgtgcaacataagcaagtccattttctcagtgaagatgaaacgttccaagcccaggatggggagagtctctaatcacaagaagttagctatgtgcaaaaccagggaggttacaacaaatgtttcaaaaacttcaagcagaacaatcccaatctgtcttacataagtaccaatgttgcaaactcgcaggaccaagtctaccctccacatcagctgaatcaacccgaaccctttgttccatacaaccagggtcaagggtatgtcctaagcagtagtatcaaggcagctatcaaccgcaacttccaccacgtgggttcgcacaacagcaacaacaagcttccacaactccagactcagacttgaagaacatgctacagctacagcagattctccaagaacaaacaataggagcaatggatctggccaaaaagatggaagaaatacacaacaaggtcgattgtaattttaatgatctgaacaccaaaattgaagtgcttacctctaaggtcagatacatggaaggccaaagttacatgacttcaagggaagtcaatacagagtccaaaggaatatgccactgctcacgccatcactatctgtcatgaccaagagcaacttgacatgaatctaaatcaatcactcaggacaatgaagttcaggacggggaggcttctaattggattgaaatcttagttgttgaactcgaccattcagctggatctcgccatcaaattcagtctaccttggaagagaaagcaaccatcatcgagagaatgg

SEQ ID NO: 1766 - DNA, 611 bp, Arabidopsis thaliana columbia
agactactgaaccatgtacttcatgccatctccctctgccatgaaaatcgacatcggaggagctagagaagctcggtgtgcttgaagagtttgggaaccttcacaacaaaacgatgaaaggtttcaagaagaagatgagaaccatgaagaagtcgcttaagagtattgatgctcaaataaaagacttccagagcaagccaaggcccccgtctcccacccccaaagtaataagaagcggttcaacgagctcagctacgaggagggctgacaggatcgatcgaccccgagcttcatcatttgagcctcgggaagtgatctccgagttgagagagccaagcagaggcagagaagagcatccacacgctcgaccaactactcgaccagacaggacgagcaaaacccttccgcctcaacatcagtccctgcttatactcaagaaagtatggacgatttcgtatccgtctacttcacctggccgatgaggtaacaccactacctccattgtacataccatagctttttatttgtctttatgtgttttgtattgtggtcttgaattctttctcagatttttattacacaagggactgtgtaatttaagtttgggggag

SEQ ID NO: 1767 - DNA, 651 bp, Arabidopsis thaliana columbia
  unsure (1)..(651): unsure at all n locations
cagagttctcgcaacgggcacgaacaagaccgagattcttgtcacaagacaagacggtaagagagattgtaccgtcggaacagagaatcacgtcaccggacttgagatcttcagcaagtttcttgtaactcattgagattgtgtttgaatctccttccatggtgtaatcagttgagattgtaatctcttgaccttgaattagctcaacccggtttgccttctttgagaaacccggttcggatctcaggaccctataaaccagaaaagattaaaccgagttagattatgtccctagaccctaatagaatcttaaaacaacataaggagaagttgaaaagacggttcaaaattaggttaccttggtgtcgagcatgacggcacagggaatacaagtgttctccatggcggttctgagattgtcaagagtttcttgatggtatgagtgagaaccatgggagaagttgaaccgggctacgttcataccggctttgagaagcttctcaaccatctcaaccgatctcgaagccggtccgagagtacagacgatcttcgtctttgacttgagggaccattgtttgtttgccagcaagtacttctcattgtgaaaaactttaaacngagagaaagattaagctttgagagagagacgag

SEQ ID NO: 1768 - DNA, 484 bp, Arabidopsis thaliana columbia
  unsure (1)..(484): unsure at all n locations
nnnnnnnnnnnnnnnnnnnnctaaagcgttcctgcaattcagtcagcataccggaaacggcatcagccacttcacctttcagatgaccatacatcttgccttcgaactgtttttccagttctgggatgctctggcccgttaccgctgaaaggatatccaacaggttggaaacgcccgctttgttctgcacatcgtagcgaactaccggcggctcgtcggagtcagtgaccgcacgtttgattttcttcactaccgatttcggatcttccagcaggccgataacgttattgcgattatcgtcagacttggacatcttcttggtcggctccagcagcgacattacgcgcgcgccagatttcggaataaacggctccggcaccttaaagatctcgccatacagcgcgttgaaacgctgggcaatatcgcggctcagttcgaggtgctgtttctggtcttcacccaccggtaccagattagtttgata

SEQ ID NO: 1769 - DNA, 618 bp, Arabidopsis thaliana columbia
tggtatacatatacattcatacttcaactacatatatagtctaagtaattcctctggattgttctctaaatagtttatgaggaaagtgtttgatccgaaaacgaaatataaagtatagacgatgattgatgacataaacaatctagatcatgcaaaacttttcaagtaaaccagatagagttcaactaaactgaagaacaaaagacctgttccaaggagaatgagatggagaactgaatgatttgaagagccggaaactgacctcatagaaacatgagattctcaacctgagtagaggaaactgagtctgcattacatggtagatagttctctgtccatccttcttttacaaattttctcagtttattttccttcagatcacaataaatagcactagatagtgatgaatgcgcataagatggtgtgaaaataatctcacgatgtgtcagcgtcagttgtacggaacttttgaagcttaagaatacgcgagtttgttgatgaggcagctagattaggcaatgcaaaagtcttcttcgaccattccccattagaagcatcttccagaatccacaaaccaataataccactcgttttctttcatagaagatgcagccagtt

SEQ ID NO: 1770 - DNA, 621 bp, Arabidopsis thaliana columbia
cacagctacatgtacggtggctgtaggcattgctcgtacacatgcatttgtgcaacaggggataataggtaagtttggtggataaatcttgttattgctgaatatgcagaaatattccttttcaggtgtttgtactgaaaaactaacaaaacgatgttaaattgtttgtagtgctggtcttcattatgggcatgctgcggctccaaatgatagggtaaagggaacacacattcctcgcttttttagttctctcattattccctgtttgaaaatgttttaatacttgttgcagacttttgaagatggagatttggcattgcttgatatgggtgctgaataccatttttatgggtctgacataacatgctcattccccgtgagttcttctagcatcaaatctattcttaattttcctctgaattgtctttgcaccgcattgacttgtgtttttaatcttgtttacatgaacatcataatttgctgaatgtagttatctagagaaagtggtctctaatatttatcaattggtgtgcaggtcaatggtaaatttacaagtgaccagagtctaatctacaatgtaagtgcttacaagattggtgcacgtggatgtatagaaatgtg

SEQ ID NO: 1771 - DNA, 606 bp, Arabidopsis thaliana columbia
gggccctatggaaaatgtggtcagaaatccataatagagtccgaccacaacgaccgaatttattatcttcatgcataaggatactagattacctagtataaaagattgaaaaaccatcacaaacctcccttttttcttttctatttcaatttctggattattatatgatgattttgcaactttccatatatagaaatagaaagagatagactagaaacgacatctcttatgtcaatgacaccaaagggatattaaatgaatggaattgggatatggatggaatataatgaaatagagccgctttgaggttccctattaaattaggcatggaacggagccactacgaagaagttccgggggttacgaaggaaacttcgagttcatattggtcatgggttgagaacgggaattgaactctatgagatctaatctcccgttgttcctcagtagctcagtggtagagcggtcggctgttaactgattggtcgtaggttcgaatcctacttggggagatttgattcattccgaatttaagaattcagaatgtaagaatgaacgggttcgctttgaccgttaagagtcggtaacctgttccctgtgtctttg

SEQ ID NO: 1772 - DNA, 772 bp, Arabidopsis thaliana
gattgaccaacctgggcctcagcctcatcttcatattttggaaatcctttcacggatcctgagtcgatagaacggaatatctagaagtcaaagaaaccgcgtggttagatcaaatcaacaacatttgttaacatgaaataagtatagtttggaaggaatcaacaaggacctgaacatgccagttctctggatcatcttctttagaaacccaaacacatggatcgtcctctggaattatcgaagtaccatccttcagaaatttaaacactggactcagaatccatgatatacgccctatccggatcaaagcatcatcttgccagtgagttttccctttaaacgtaagctaaactccttccatcgtgttgcctttctccatcgctgctcaaagtttatgagaacatcatatgccgcaggcccatctatcctacagtgcaaatcgtgccaaggttgtcttggggccttggtaccagcctgaggaagtaaaaacagagtatgtatcagtaataactaaagaattaggattcaagcttgataacagccggtatataataataaacttactggaaatgtaggattgtggaaatcatccttaaatacagtgtcaagatcgtggagtatcctatgctcaggtgtgtcataacggccatcacaaagatctagacctccaataaaagcggtgaccttgcgattattaccaacagcctgagtgtctacaagaacacacttttgatggtgcgtgaagagagttccaacaacctggccattaaac

SEQ ID NO: 1773 - DNA, 558 bp, Arabidopsis thaliana columbia
ttggaccacaaatcattcacagaccctgcctaaaacctgaccatctttctcttttcggatttttcaactatagtcttattttggagcgtcggaataattaaattttgtttatcttgttgattagttattgacttatttcaaagcctgattaaatatttatacaaaagtaaacttataattaggaagaaaaaaagttaaaataaagagaagggtgtctaagaacattctgacaaatattttatcgaatattggattatcgtatgaaatagttgtaaataaacacatcgcatgtatatagcttgtcaacaacttcatatataataataaagaacaacaacttgatatcttatatatggtttagaaaggaaaagtcttagtgacggtgtggtggccaacttcgttaagttgagaatttaaccagaaagaacctaaagaaagttctcatctctcaaataaacatgtcttttgtcggaaaactcgcagatactgtggtatcttttgcaaacgaatctgcgaaatctgttgtagaagaagtggtcaaccaacggtgtcttttgc

SEQ ID NO: 1774 - DNA, 569 bp, Arabidopsis thaliana columbia
ccaaatttgaagaaactctaatttgctctgaaatatttgaaggtaaccattggagatgccctaagtctttctcttagataattaaggactaatacattggagcctttgaaagatttgagaagacagaagtagactcttacccaccttcttgatcgattcccagcttccttttaatttcacaccttccttctagtatattctttccaaaagttatgcacaatttcaccatgcagagatttatttataaaaacctgatatcgcactgaactaacacactctattataagaatgattcattttgtattcaaacccaaagttaacatggtgtcttttagaaaagcccattccacacgctcataggcgatgaactcctccgagcatttgctgttggagccgagagcgtggagtaactcgtgggccactagaatgttgtcactgatgagtctccctttgaaaaaagctgcttgagattacgatatgataagaggaatcaccttcttcaatctggtagccagaagtttccaataaattttgtagattaattatattgcagaggtttgtaggtgtga

SEQ ID NO: 1775 - DNA, 574 bp, Arabidopsis thaliana
gatcatcgtgggatttccttacgtattttgctccaagtaaaacagttaagcggcagagttcctcctcttctgataatacctctgataaagaggaagttgaaacggaagagacgcgaggtatgtttgtccagttgggggatacggctcatgaggcatgcccattcgctacaaacgaggctgactcctccagtacagtatccattatttcgccgagttatgcctctagaggttctatcgtcccttcttggctgaagaggaaatttctgggacgagtatcattaggttttgtgtatgaaggcagttcagggtaagtgctaatatctgtagcattatctcattgctatatcttttattttctatgggagattgcactacttagtcagcttcagcatcataatatcatgtcttcttctagttcctccgttggttccgagtcgacttgttccttgatgacgccttctctggagttcccggatcgcatcagtttccggaaaaaggatttcagtgaaaaaggtcctagtcgacacgtttgggaaaagcgtaaattgacgcgtgccaagttgattggaaattt

SEQ ID NO: 1776 - DNA, 537 bp, Arabidopsis thaliana
gaaaacttttctcgccaagctggtgtttttgtcgacagtttgagcagtaccaggttggccaccgctcaaaaatttggaaccatattggatagctctgcatatcttatctctagcctcagctttgttcaaatagagaacaataagagcaagctcggctctggtcaaatctagtgtagtcatgctttcttctgtcagaaaaacaacaacaacgcaacccaagattcatcaacacacctttacacgagctcaaactaaactatgaatctagaaacagagttgttcccatctaaattaaacacacaaaaaatcaagagctatagcaaaattcatccttctctaataaagtcacgtttgattaatgagaaacatgagaaaaatgttggctttgatcaaattcaagccagaacattaacttcatcaccaaccacaaagatttaaaacacaacaatgcaattagcaagtttacaaaaatgaaaaagaacgtcaaatctaaggcatgtgaaacttgaaaacattcaaaaatttcagaaattggga

SEQ ID NO: 1777 - DNA, 501 bp, Arabidopsis thaliana
atgaccaagcgctccaaaaccaccataacccctaacaacttcatttttaatttatggaaccatcacattatgcagaaccaaaagatcaaaacacaaatgcaaatctagctaacattgcatcaactagctcaaacagtatgattccaaactcaaatgaagactatagaagctagagcttttaccaagtgaatacatctccttgatgtgttaaagctactgaatgcaaaccaccaagagctatacatcgaatcgaatgttcctcaaaaagcggatttaaattggggacgaaaaccgaattctcttggccaaaccctaaccttcctccgtcacctttcccccaaatccatagatctccgtctatagttaaaccagaatggaacaagccgcaagagattccaattcgaaaactggaagaatctgcgtcgattcttccaggagtttgagcgagagagaaggattgatcagagcgaaagagaagattagcgactggagacggataca

SEQ ID NO: 1778 - DNA, 676 bp, Arabidopsis thaliana
gtctcattgtctctaaagtatatgcttcagaaactgtttgcacatccttcacaatatgccacttgagggggaagagccggtccacttatcttgctgccagtactccacatttgtgtgaaatcaactggtcctgtcatttcagcaagaccaacaaattgtccacttgcattgacctgaaagacaaaaactggagtataaagaacaatatcataaaacaaagtaaaaagagcacagtttttaatttcaggattatatacacaccgagaaaaacagaaagatgggacagccgccagctttctgttgagcttcctggtatgctgcagcaagcttcttgtttccatttggtgtgctagcccaaacattatatttaatgctcttgtgcacatcatcttcactgtatgacttgatgataaagaacatggcatttgcataatccactgggaaatcttctttattgtactgttctctgtcaggaacaacacatgtgttatccgcctccccaacctcagttacatttgattctccagtctgctccttaacctctaagctatcatctagatttcccttctggttctttgtgcccttagctctaggtcccctgttaagttcattcaaaccatctacattgttctcatttccgtaatagtaactgttaccctgccccagcttctgtatt

SEQ ID NO: 1779 - DNA, 513 bp, Arabidopsis thaliana
aattcaacaaaaatatatagctcaagttagttcaattatcatatagataattttttatatgcgaaccaaatttatatatttatgttcgtgttattcatttaaatctggtaaatggatgtactagcaatggaataatgcatatgcaggtcagagtttgaatacaagtcttttgaggccatacttagattcattgggtagaacaaggtttcaaaatggtgcaaattttgcaattgctggatccccaactcttcccaaaaacgtccctttctcgcttatcattcaggtcaagcagttcagccatttcaaatcccgatcactcgagctcgcttctagttcaagtaaacctacctcatcccaaatcattattatttatcctaagttcttaatcagttaatgatcttgactagagttagcatttgtgttttctagattcattaaagggcatgttcataagcaacaatggattcaaaaacgcgttgtacatgatcgatattggacagaacgacattgcgc

SEQ ID NO: 1780 - DNA, 572 bp, Arabidopsis thaliana
ataaaaatttgttaaaaaagaaaacgtattattggattaatattcgtctaacgagtagtgaaacactattcgaccatatataatttcttcggaccgaggaacacaacatgttacaaaagcaaaaatagtcaaactcgtaatttaacaaatttggaaatcttacccacaagtggcgggtaagtcctccggtctcgggggatctggtgctgtataacaaccaagtgtatctctccaattcgccgccggtgagctaaacagatcgaagttgctgctgtataccatcttactagctggatctcgagagtaaaaccctttcttcacttcagtgtcttgctcgtgaaactcacgaatcccatctatcatcttctccaacacatccatcgggatcccgtggttgatcacctggaaaaatcccatttctctgccgcgtctccgatcttctccaccaagctccgccgcgtgatcgagtccgtgccacctcctttgagatcgattgtggggatggagaaatcagaggaggaaggtggttttggacttgttaaagtagccggagtgcacgaaatatcgaagga

SEQ ID NO: 1781 - DNA, 514 bp, Arabidopsis thaliana
gatggccgggtcaatagttgtggaggttcaagggattgagataggacaagggctttggacaaaggtgaaacagatggctgcatattcccttggtttgatccagtgcggtactacaagtgatgaactgcttaaaaaaatcagggtcattcaatccgacacactaagtatggtgcaaggctcaatgactgctggtagtacaacctctgaagcgagtagtgaagcggtaaggatttgctgtgatggcttagttgaaaggcttttaccagtcaagaccgctttggtggagcaaacaggaggacctgtgacttgggatagtctcatcagtcaggttcatactcttgaaacattcatgcttttgatgttctctggtaactttgaatgaatttacagtgctctactcttgaatattctggtgtaggcttatcagcaatcgatcagcatgtccggtagtagcaaatacgatgcctgactccactggcgaatacccgcactatggaattgcagcgagcgaggt

SEQ ID NO: 1782 - DNA, 418 bp, Arabidopsis thaliana
tttacttcaactctcttgatgagcttcaggacgaggaatcatgtgaaacatattgtctagaatcttgatcattttgaaaagacatatagaccgagctaagaaggtccgcgctcggtgagtcccacaacatatcatcaaagctaagttcgatggttgaagattgaatattttttgttaagaacaagattgtgtggattgttttgtctgcagattcacagaagaacggttatagagaatcgcgaggtacaaggcaagattggctcatcagctgccaccctcttggagagcaatgcaggaacgagtaatgattgtaaaattagggacttcggtgtgaatatacttgcagttgaattagaaatgacatatattatcttagagccagagttatgtcatatgtctgtgtgtaatataagaaaga

SEQ ID NO: 1783 - DNA, 955 bp, Arabidopsis thaliana
ggtttcgtaatgagtaactacagtggagaatcctctatggaccctgactacaatgtggatgaagctgagtcctggtccgctagactgagagagaaacatgtttaccagagcttcagggatgaatttgaacgctctacagcctgacgtaatcagagaagggctgaaatcgccagaggaaagagggcgatgtcaagtagatatgagctgattgatgaggatatcgagaccgagtatgagccagagtcatggcgcagggagacgaagctgctgaacaaacccgacgaggttacagtggaggagtatatcaaattcttcgagatgaatgaattctggggaacgaggtatccgtgttatgagactttagcccaattggagttactggaggacgtgcagcatctgttcgagaagtgtcatatggagacactcatgtcttacccttatcctgcctttaaggaggagacaaccgagtttctttccacgctgcaagtggagatgtatgagacactcacagactttgagctggataccatggggttaggcttcttgacgttctcagtgaatgaacagcggtatgagctttcgatcaagaagttagaagaactgtttggtttccctagtggaaagggaaccaaacccatatttgacagagaggagcttaaggatttgtgggccactatagggaacaatctaccgctaaactcggcgcggtctaagagcaaccaaatccggagtcctgtgatccgctactttcaacgatcggttgccaacgtcttttactccagggagtctacaggcaccgtgtctaacacagacatggagatgatagattatgcgcttacagggattctccgccggacgaaggggaagaatgtcttgagaggagatctcaacaacgcaccaccagtaatgcctctgttgatccatctgtgtggatacaggaagtgggcgttgacga

SEQ ID NO: 1784 - DNA, 904 bp, Arabidopsis thaliana columbia
cattttaggcatgtatttatcatcatttagcttagtgatcactcattgtttcatatcattttgcatcacatttagcttattttgcacacttaggcatttaggatcatcttgcatacatattacatgttttggtgtgttttcaggtgcagaaggagcttacaaggaatctactcgaccctctactctatcaaaccaggagggaagcaacagagcaatctactcgaccagttacttgatccaggcaactacagaggaggcaacagactctactcgaccccctactcgaccagttactcgatcaagggcaacctactctacaagacttgttgatcgttcaaagcgtcttctgatccttctcattccccactcaaccatacatctgagcataagaataggagaggaagaagcaactactcgaccaattgatcactcggagcatggaggcaaaggcgcaaactttgcagcaccctctttactcgatccccaagatccagcattcatcaaaaccgcctcaagtctcttgtcttctagtgaatctagggttttcgagattatagtataagtaggttctttggagtttgtccaaaggaccaatcttttattctgtagttttactttgtgttttagaatcttgaaacattaattactcttaatttatttcgtttttgcatttagttccttgagcaaagttgtttatcttgtttagatctacattttgatatgattttagtaatttctgggtttgtgttcttcattatgttgcttgtgtagtgattagggttctttaggatggattagattagggtaatctctaggttagtcaggtggttaagattaggttagatccttctggattcgttggcccctatgcgattttgactgggtaatgttggaattcgcctag

SEQ ID NO: 1785 - DNA, 917 bp, Arabidopsis thaliana
gtacattgccttcaccaaatttgatattgcctatgcggtcaatcgtttatcacaaattatgcatcgtccaacggaagatcattgacatgctgctaaaagaattctaagctagctaccttgatgggacacccactcatggcctctttttctcggcaaacaacaaacttaattcttcatgcatattcagatgcagattgcggtgagattcagacgattatgtactcgtacatcttgttagtgcaccttcagtcaggtcaaaccagaaggagtgttgattgctggaacaaactggaagctgtttcagaagattaaagtgaagatcaagtaattgatgctgacgtggatataccgccaaatgaacgaatgacgtggagatcacaacagaatgaattgggtttggaaagaagatattcacgcaaagatctggagtgatccaagatcttgaagactaacctagaagaccaaagacctcgatgatataaatagaggtgctaaggtgctggggagagtgggccatgattgtgagtgaaaaagcgagatcagcgcttttcagtgttagagactaaggtttagtctgattggaattctagagagatcaaagagtgtgttcttgtgatatactcttgtgtgtttagagaaatctcaggtgacaagatatagtagtttagatcttgtgtaaaaccagttaaggtagttgtaaacttcttaatcagatttctaataaagtgatactcagtggttcttagtttggggaatacgattcttggttcatccggaatttcacatctacctaggacgacgaaacccaatatcttggacaaccaagaaacggaaggggtggcaagatcatctatagaagtagagtatagggttgtcgcaaacacggcctctgaactaagttgggtatatatgtaata

SEQ ID NO: 1786 - DNA, 867 bp, Arabidopsis thaliana
ctaaagagcgctggaggaatacgttaaacctatcggcggcggttatttttttgcgctgccgggggtgaaggacgcgaacgattatttcggaagcgcgttattgcgggtttaatgtttttaggcggataaggcatttgtgcgcagatgcctgatgcgacgcttgcgcgtcttatcatgcctacaatcagtgcgggtttggtaggctggataaggcgttcacgcagcatccggcgatcgtgcactgatgcctgatgcaaatcctgctgaaagacacagcttttttcatcactgtcatcactctgtcatctttccagtagaaactaatgtcactgaaatggtgttttatagttaaatataagtaaatatattgttgcaataaatgcgagatctgttgtacttattaagtagcagcggaagttcccggcagtgatagtcagtcactatggagatcgcggatggtaacgtcctgtactggacatgttttagataatcaacgcgccaccactcgcggagttttctcctccggtagtcatctcgtcactttgcattttcaacctcatcctttcttttcatgtgttaccgacgccgtaaacggtgcgcgtagctgtttttcggcattttatccaaaagcaaactatggcttacaaggaagccaaccctctgatgttcgtgcgcataatcgcgctgccaacgcggcgtgtgatgaatacaaacaactcaaggtgctctccatgggaagacaaaaagcagtgatcaaagctcgtcgcgaggcaaaacgtgtgctgagacgggattgcgccgcataagcagcgtgaagaagaatcggtcactcgcttgtgcagatgggcggcgtagaagcattggtat

SEQ ID NO: 1787 - DNA, 560 bp, Arabidopsis thaliana
attttttaaatataaatgggttttgtgctactggtgttggagttgtgttcccaagatccagactttcaatattagtatattatctcgttttgccaatcttgaagatctaaacatgtgtgaatgggattaagtaggattagaatcttgttattgatctgatatgtgatatgaatgttgaaaacagggtatttgggaagggcagcgatggatcctgagccaggcagatgcaggagaacggatggtaagaagtggagatgttcaagagacgtcttcgctggccacaagtattgcgagcgccacatgcaccgtggccgcaaccgttcaagaaagcctgtggaaactccaaccaccgtcaatgcaactgccacgtccatggcttcatcagtagcagccgcagccaccactacaacagcaacaacaacatctacgtttgcttttggtggtggtggtggtagtgaggaagtggttggtcaaggaggatctttcttcatctctggctcttctaactcttcatctgaacttctccaccttagtcaaaggtaataaaaagaaactgtttt

SEQ ID NO: 1788 - DNA, 781 bp, Arabidopsis thaliana
ctctccatctattgcttgagtcataacatctgttggttcaattgtttttagtatcttgtttaggacaacatctcctttggataccaaatctgtgatgatctgaaatcttgtgtccataagttcggttcccgattccttcccttctgtagttaagctcaataatctgaaatgagatgtagttggtaccaactactgtagcttcattcattttgaaagttttagcttccttttcctgactttcttgtaacagagctagaactcccttagctttatctctgttaacctccattccctgaatccttgaagctttttccaactctttcatttcaactttaacgagtcccctttcttaatgatactttctggcatcgtaatcctttcatccttcattttactatcacacaacatccactccttgttgtgatctctcaacagtggctggtcatcagaaggtccttcacttttcgcagatttaacctcctctaaacaatctgattcttctgttgaggattcatctccaccttgaactgatgattcctttgttccaaagccatatggagtaggtccttaaattaaattcacgttgaaagtcaccttccttgacttcttcttcctcactccaactacagccttgacaacactttttccgacattttcagcatgtggtacactcttttcagccttaacaaccgtgcctttcagatagtaaatcccttcgtgatatttccctgatatcactttcttacgatctttgtagaaaatcatggaaaaattatagaag

SEQ ID NO: 1789 - DNA, 849 bp, Arabidopsis thaliana
gttcatttattccgtcaaagcaacgtaggaggagctactcaaagttggagtggaagaggattacgaagatcccggagaatcttgacgcatgtgattgtgctatctactcaataaagtacatcgaatgtttggcgcttggcaagtcctttgatggcttgtgtgatgagaacatgcagtccctatggactaaacttgctgtggagatgtttgaggaattaggcaagaatgctggaacactacactctgaggttcgttgcaaggccttcaaattcccaagcctcatggatgattagaagcttctattaagaaccatgttcctttttaagcttttcattttgttatgtctatgacttttaggacccatgttttgtctcaaacttttaagtacatgtatctaaacccttttaagtacatgagtacatgttttgtctcagattttttggttgttcagcttcaataacaaccttcattttgtccatgatagactcggtttccaactgcagtcttatattaaactattaaacataataatgatgaaatatttgttaatctattaaaaggtgaataattatttatcttacagaaaaaaatatataaattttattaaccttaacatataatgtttgaacgttatcaacaaaacttgacatattgcaagactgttgatatatctctatttttactgcttttacctataattttggtataggttttagagtctatttgttatttctaaagtcttttatagttattttcaggaatttacaagtttgggatgcaattggagataatggagcattctggaggaaaatagagaacttatgttgcagaagaaattcggagacaaaa

SEQ ID NO: 1790 - DNA, 1501 bp, Arabidopsis thaliana
cttctcttgcccatacacctcgcagcaaaacggcaaagccgaacgcactcttcggacactgaataattctgtccgttccttactcatccaagcaaacatgcccaccagctattgggttgaggcacttatgatggcaactcatctcttcaacattctcccctcatctaccattcaaaacgaggtacctttcaccaaacttttccacaaaccggccatatacaatcatcttcgagtatttggatgtctttgttaccccaatcttcttccggtttcgtctcataaactcgatcctcgctccactgcgtgcgtttttcttggatacccatctaaccataaaggatatcggtgtctagaactcgcaacccgtaaggtaatcatttcacgtcatgttaccttcgatgaatctaaatttcctttctctaaatctatctcagaatctccttcaatcatagatgaaccacaacttccggtgtctatttctcctctccttcgccaaattgatccacctcaaacaattcccaatgaaccaactccacaagtagctcctccgcagcctccaaccgtcgttgcgcactctatgagaacgcgaagtaaaaacggtattaccaaacccaaacaaccattatctcttcacactgacattatttctcctcttcctacctctcacctaaaagccttagaagatcctaactggaacgcagccatgaatgaggaatatgcagctcaaattaaaaagggaacgtgggacttagtaccacggccccgagatactaacattgtgcgttccatgtggttatttaggcataagtttggtcccgatggcaaactatataggtacaaggcgcgacttgttgcaaatgggaaatcacaagaaataggcattgattgcgacgagactttcagccctgtagtcaagccggccacgatccgcctcgtattggaactatccctctctcgcaaatggccaattcaccaactcaacgtaaaaaatgccttcctcaatggcacactcgaagaacccgtgtatatgcatcaaccttcgggattccgtgatcccaccaaacccgaccacgcatgcttactcaaacggtcactttacggtcttaagcagtcaccacgagcctggaatcaacgatttacccaatacgcgtgtcgaatcggttttgtgcaaagcaaggctgacccatcgctttttgtctaccatcgcgccaatggaacagcctatcttctcctatatgtggacaacattggcctcaccgcatcttcaactaagcttctccaagatatcatttcatctctaagccaagaatttggaatgacagattcaggagaacttcactacttcctcggaatcgccatcaaaagaaactcctctggattatttctcaatcaacataactacgccgccgatatactacaccgggccaatatgacaaactgtaagccatccaccacaccagctgattcacgagtcaagctagcagctaacgatggaccagca

SEQ ID NO: 1791 - DNA, 588 bp, Arabidopsis thaliana columbia
taagttggttgtacctgcaattgcttcatggacaacacttggcagtagttttgtaaacgcaaaaggtagttaacgttgcatgaagacgtgactgtcatgacttttcaatccagctaatctaccactgtgatcatcaacataatatgatatatttgatgcataaccatcaggaacttaacatcatcaattatccactaaaaaaacttggacttcatgtttccatctaatctccaaataggaacatgatctactccgtttgcaagcaaatggagatcctcgcgatcacatatattaggtaaatccattctggactttacattatctttagtcttacctgccacattcaaaattgtgttaatgatgttgtcaaagaaattcttctcaatatgcataacgtcaagacaatggcggagtagatgacttttccaatacggtagatcctagaaaatacttttttatgccaattatgatgctctccatatccatcaatccggacatgaccattacccccaacccgatattgtacgatcaatatcaaaatcacaaaattgattcagtatatagtcccataatactcatctggtggtg

SEQ ID NO: 1792 - DNA, 487 bp, Arabidopsis thaliana columbia
  unsure (1)..(487): unsure at all n locations
nnnnnnnnnnnnnnnnnnnnctaaaggatgtcgcggattaacgcctgcatcacatcatctgactcggtcatcagttgtagctgattccctttgaccccagcgatcccctgacgacgctcgcaaagcttgaataatggcgcaggacactgctattttcttcggcgaagatatgcttacaggctttaaggtcgttaagccattttgcggtggaaggccacatcgctctggcgcgctcagcggcgtgttgcctaaatggagctcgccaacggcaagataggcaataattccgactaacggcagaatgtaaataatcaacagccaggccatcgcggagggaactgcgcgtcgtttcattagaatgcgtaaagttacgcctgcaatgagcaaccagtatcccagaatggccaaccaactcaccaacgtataaacggttgtcatagattagatatccttttgaaagcgcattgttatgagtttacgcatatgg

SEQ ID NO: 1793 - DNA, 343 bp, Arabidopsis thaliana columbia
tagaggatgcgtagtggaatcatgaaacgagcgactggagcggttttgaggttggagggtgggattgtgggatcggcgctcgcttgaggctgtttccaggcaagcgcgaagtgagttggtctggtccattcgcagttacggcagtcctaccttatggtgctatcactcgtagcgggagagaatggaggcttcacagtcaatggacaacggctcaagagatacatgatagatcagtttattccagaaggaacttctgttcctttggatgagcctataaacgcctaatgagtatgaagagtcaagctagagacctaaaacaagctcacttgggaggaagtccatg

SEQ ID NO: 1794 - DNA, 510 bp, Arabidopsis thaliana columbia
  unsure (1)..(510): unsure at all n locations
catacaagttacatatgaacttatatgcgacataaaaggggatttgaatccaataataaatcctaattaaaaacctattaatccccctcaagaaatactaaagacgtttttgaaaatgaaattttccgatacaatgctagttgatgcccaagtcgtcctgaagtatagtggtactcatagcaattcacctatgactagttacatgccttaaaagttaaaacgcactagatctacatatcgaaaaacgttataaataccataaagaaaagatggaatcacctggggagattgcaaccggaaggttccnaatcgatacttgaggtactcgctgtcagggcgaccattggacttgcagttaaactgtctctcgatgaaagggcaattcttggaatcatagagagggtaagatttgtcatagacccaacttccttgataaatattacaaaactttctaggtggtagcctaatgatgaccattcgcactagcactctctatttgttttaacacac

SEQ ID NO: 1795 - DNA, 463 bp, Arabidopsis thaliana columbia
  unsure (1)..(463): unsure at all n locations
nnnnnnnnnnnnnnnnnnnnctaaagaacatggtgggcgggtggagtatgttacctgtgaatttctaagctgcctgtacggcagtgaactcaaatactacacgtttagcccgttgttaataaagcaaaaccatcccattctcctgcagcacccttttttatccttaccttcccgcagcactaattatcaacaacttaccatcatcattaaaaaaagggtctgaacctcctccaccccataaacaaaaagtccgtaacctctttcgagattacggacttgaccaacctacctaacaatcagattaatgcgctgcttccgccttgtgcttttgtgcactgtggaatccgtaagtcagctcatgtttctctttatccagcgcgacggtgacctgaccgccgtccaccagcgaagcaaacagcagttcgttggcgagctgttttttcaggttgtcctggatgacacg

SEQ ID NO: 1796 - DNA, 683 bp, Arabidopsis thaliana
accaaagccttagacaaagagacaaagttccacagttctgttaatctatataacaagtacagtcatcttgaaatgcatacgaaatgagaagcttcttaccaaaccgttttttctccttcttggggacatctccggagcttattctcttgaaacactgatcgtggcactcgtggtagggatttcctgagttaggacaatcatgatgtactattccagacatgccactaccctctcagagacttggagatcaaaacttagaacctgactaattaacagagaagcgtatatctttctctctctctctggaaagatcctccacacgaagaaagtgagaagttgttataaaagtgagggtttacgctaacaggaaaaaagcaaagaagtttacaaccaaagacagagtcaaaaggtttcagaggaagaaggaaggaaattgagatggatgattgtgatggaatgaataggtctgagaacacgacacagaattgacttgaaggattcacgaaatgaggaaatttcagaagtaaagaacaaattgttgaaatctgaggctgaaaggagacggatgttttgttttttctttgcaatgcatacaagagactgagagagtactgctatagtttgtttgtttgctataacaagtgttgacaccaagtcaatcaagttttgatacacagaagata

SEQ ID NO: 1797 - DNA, 613 bp, Arabidopsis thaliana columbia
tgttatcagaattctcgcattttaaattgtgtaaaaacctcttgttgttgaaggtctataccctatcttcatgtttatgtccaacaccagtaggtaaggctaaattgattccttggccagccaaatgaagcttttctaagtctgacagtgatttctgaacttttctggcaaaaccaataagatacaagaatcatctcagcttcagcaaatcattttcatatctcaaccaaaaaagaatgcaaggaactgagattttgtgactaaccctatcagatcgtgattgccattgccattgaagtctaagcactctattaccagtgggctgtcctgcaagattacaaaagagaaactaatacatcttcctggtcagacaaaactcagatataataaacccctttggttggtttaccttactccccacgttgttgaacacttagagagactggtttccaaagtggattgggatcattctttaaaacttctgttttagagaccgggattggagtccgtgctctacaatcttagatatcccaaaaacgggtcctgagcatgaacaacaacagtgttatattcatgtctgaagtatactgagataaactggtcaaagagtata

SEQ ID NO: 1798 - DNA, 532 bp, Arabidopsis thaliana
gaggatctcctacaaacactttgctatatctaataaagcaataacttcgccattttcaacaaccggcaaatgtctgaattttcctgcagtaggtaaggttaagatatagcctcattaaggatctagacacagcaatcagataaacatcaagtttctctagcttaaaaacaatgagacaaaccttggaccatcttttggagagcttcaacagcaagtgtttctgagagaacaaacattgggttcttcgtcataaccttagatacaggtgtttcctcgacattaagttcctgtgaaatcactcttgtagctatgtcctgaaaatccaaaaaagacacacatacacacagatcaatgaagtctccatttccttcttccaatctgtttctaactttttaactacacttagcgaatagtggcataccttatcagtaagaataccacaaagcatttcattagagtcagtcaacaacaaggcatcaactcgtcgtgaagccatccttttacaagcttcagatatagttgttgttgctgg

SEQ ID NO: 1799 - DNA, 707 bp, Arabidopsis thaliana
atatatatacggtctttatactgcttccttgcatagtgacagacttggagagaaaccaaacaaaaacctcccaaaatccccaatattcaaaacccctccctaattaacttaaactctcacaatcttaacactaattactatatttactcgcaaattaaattataaaattctcaaacagatatataaaaactcccggtgcgcttctttccgctgatcggagccgtccacgaaatggaaaacggacggctaagattcatccccgtcgttgtcatcaaaccactcatctcactcacacaaccaaaaagagaaacccagaaaaattctggggaagaactcatcaaattacttatccaacaaatgatcttggaaaaactcatcaacatcccatgagctgaaatctccgatcactcccaacggaaaactatcagacagattcgtatccttatcacacactgtgttgttgttgttgatgtttggtaacaaggactggtggaattcgtcgagaaacaaagggtcaggggtaatttcggaatcccaaaaataatctccggagcgaaacaaatcaggcaagaaaaacggattttgttcttccgttggctctgttctgtactctgtttcgtcgttgtgactaaaccggagaacagaagtcggagaacacagactgatttgcgattccctcgccgaatcacaaccagagacagtttcaa

SEQ ID NO: 1800 - DNA, 548 bp, Arabidopsis thaliana
ggtgtctttcgatggatctgaccaaagaatgtcaccaggaatcaaatttgaaccttcagtaggaggatctataacacgtcttttcactttggataaatccttcaacgagccaagaggcaaggactcagatctatcttcagtgtcaaggacagtattatccgtttgctttttctgagttcgcttgcgttttctgttccgttcttgcttgtctgaaagaaagcttgatacatcacggaaaagacctccatgagctgtatatacctttccagcaattacagaagccaaagggagtaactggaagcactccaagcacttcttgtagacagctgctcctttatctccatacttggttaatacttcatttttaaatccatacattgatgtacaactttcactctcgtgactgccacgtagaagatacactcttgccggtagaagaacctagcagaaaaatgaaggtcctacaattaaaatatgctgcggcatgatttaatttagcagcattaaagtagagtatgtgtctgcgtcctaagctccactgacacgat

SEQ ID NO: 1801 - DNA, 452 bp, Arabidopsis thaliana columbia
  unsure (1)..(452): unsure at all n locations
gaccacgattacaattcgtttcttggcttcatctaccaggtcccgaatagtcaccacttgcttctgggtgctcatagttgaatccgtcttttctgatctcacacacgcttgcttaatccgtccttcaatgaaattaccagacagagcggacggatttcttccagaacttaaggacccattcccggggaattaggacccgatcttcgaaaaacgtccggatcaggaaagatgagctggtttagaaacaatgaaaagggaagagagggagagagaatcaatggctgggtagtcaaatacggtatacgaattgatagaatcggcggtaatggattctttcncggggaaggttgttgattccgtacgtttctccggcgaatgttcccgggaatacggtaggaggatcttttaattctctctcttcgttgttgttagcatttcattaatggttaatt

SEQ ID NO: 1802 - DNA, 572 bp, Arabidopsis thaliana
aaagtgccggaacaggctacggctggatgagaaatcgggaagaggcctcgcaaaacgaggctttggagagcgattaatcgcaggcaacgatcttcattgccaggccgccgcgagaggtttcgcggtacttggcgttcatatctttacctgtttcgtacatggtttcgataactttatcgaggcagacgcgcggctcgctggtacggcgcacgcctatacgtgcggcgttcaccgcttttactgccgcaatggcgttacgctcgatgcatggcacctgtacctgtccggcgaccgggtcacacgtcagaccgaggttgtgctccatggcgatttccgccgcgatgcacacctgcgccgggcttgcgcctaatagttctgccagaccagccgccgccattgagcacgccacgccaacttcaccctggcaacccacttcagcaccagaaatcgacgcgttcatcttataaagagaaccaatggcgctggctaccagcaggtaacgagccagtgagttagcgttcacttcgcggataaacttgtcgtagtacgccagaactgccgggatactttag

SEQ ID NO: 1803 - DNA, 1463 bp, Arabidopsis thaliana
gacaaagaaaactttattgacatatatataatgtaagaaatactggtctagtactgtctgtttttgaaaaaacaaataagggcctagctatcttaaattgtaaatttgccactttcacgttgggaaaccatttccaatattgtaaaagcttataattaatgttttctttttagttctaacaaaagtctccaaggttttcttcaaaggtataaattaataaaagtaaaatgaaatattaaaacaaaattaagataaaataatatttccgctgaacattgtttgtaactgaatttatctttttcgggatttattaaaaatcacctaaagactatcttaaagtagtaggcacggttctgtatgtaaccattggattttatttccatgactgatagaaatttagttacaactaccaacagtaatagccaataggtaaatgtgtagttccaaaagagaagcctctttggaagcttaatttagatctcaacgaacgaattacacttactaacatcataatggaagtgtcacagtatttagaaagttcaacaatttctttgtaagaaaggatttttgtttttaattattataaacaacaaaaagcctgtgaaatttttgtgaatcatcaaactctattatgcaccaacaaaattagaactattaccattctaatatatcgtttaacgttttaacaacataaattgttttgtttgaccagctcaacaacttgttatactccagcaggagcggaacgttagttaccgtgtcacaaccatttatttttctgaaagtaaatagaaacttaaagttgatatcagagcgtttggttatagcatttacaattggcattaactatctacaccggtcgattttattgtatgtggcctttcttggcctttaaaaggacccaacatatctcccagattttgggcaaggcaacaaacataatcaacttaaatcttatctactttctatttctttttaatcaaaattaccgttcttaactatggcgaagtggtttttcactatcttcttggtttttgccctagcctcagctttagcttgtggcgcaagaaacgtcccagtaggcctctctgaccaaaagaactacctcggatatggtggcggatattccggcgttggagacaatggtttaccctttggtggcgtcggtggaggtgtgtctggtcccggaggtaatcttggttatgggggatttggtggtgctggtggcggcttaggcggtggtttgggcggtggagcaggcagtggattaggcggtggcttaggtggtggaagtggaattggtgccggaaccagtggaggaagtaccggaggagttcatttcccttgagttgttactttggtttttaaggcgtcatacggtccttattaagctaggtctagcttaagatgatgtcataataataatttatcatatctctttagggttttaaactttggtatta

SEQ ID NO: 1804 - DNA, 537 bp, Arabidopsis thaliana
ctgcaatcgtagaacgaaccatttaaagacattttacacaaaaacatctcacaaaagcaaaacaagggaatatttcaacagatttcacaaacatttataaagtcatcttcatccttttttttgtgcagaaagtttaacagttccttggtttcataacgattatggagtggttaaggatgtgcaagctgaattgtccacctttctcactagtatccactttagactgtcctggaggaggaagaagctcgaagttctggaccatcctaccaatggtgatccccaaaataggcaatgccaatataatcccgggacagcttcgacgtccaacaccaaatggcacatacctgaagtcattaccgttagcttccacgtgcgattcttcttcaaagaacctctctggtctaaactcttcaggcttcttccagctgttggggttgtttgctagccacaagcattaacaaggattttgctttctgctgggatatcgtagccagcgagcttcgcatcatggaggttcatgtgaggcacgaggagagg

SEQ ID NO: 1805 - DNA, 564 bp, Arabidopsis thaliana columbia
tttcacttgtggctttgaccaaagaaaagatatctcaaatatataacgaaatgacttgggagtattaaattttcaggtctagctaaaacacttaaagaaattaatgggagcacttggcatgacactttcttggggctttggatagcagctctccgacttgttcaaagggttagattactctcttactgatctttctgtttgtgatttcaccactactttggtacccagaaaagtgcaattgctattgcttgcaagttttacttacaccgtgtgcttttgtaattggttctgttatttggttataattcccaagacttttgttacctgcagtttcagaggactttcttacacactttctcttgactgaagctgtactatttgattgttactctgtcatccatgataagtttagattttccgtatctaatggctgttctgatattctcgtttttctttattactaggaaagggatcctattgagggacctattcctcgactggacacaaggctgtgcatgtcattatgtattgtgctcttgtggcgcaaccttattgaagagggga

SEQ ID NO: 1806 - DNA, 972 bp, Arabidopsis thaliana
ctcatgcataaagagtaatcatcacaaaccgtacaacttaagggatcatgatctatttttgtgccacaagcctgacattgtctggaactttgcaacgtaaagtataagggatgttgatggagatcatggtgaaacggttctgatacagagctacaccgaacatcatacttaatacttttaacgaggtatctacaaagcccatcatgacacgcgtatatgaagccatcagtgtgggtttgacaagcaatacacgtataaaagaaattgtctgatcgacgaaaacgtgtgaatgaaacctctagagagagtttatggttgtgcaataaatgtcgcatcttccgaggaagattagcacacttttcatgaagtatgaaatcacattccaggcatctgtagcatggatccccgtcgatggcaagaacacaacaccgacaacgcatgttaacattatccgtaacataattctcatccaatctgagaacatgttcttcatgactaaaatgaatgatctctttttcattaattaccacaaatggttcttcgacttcttcctcctcctcgggtacatcttcaagttcgatcccatcccacacttcctttttcgttgcacatcttgaatgaacggcgtaattaggacaacgagagcatttaaaagctccatatacccaatcaaccgtcttccgacaaactccacactcccaatgttcttctcgttgaccaagatggaaagtatgaaagatgcgatgatcgtgccgattgatgcatatgactcgcggtagattctcaatacagtctttgtggaccatcagattgcattgaagacatacataaggattgcggtcgccttcacaccacatgcattacaagtaaagatgactaaccttaccaagagggtgaggctatgcttgtggtgctttgggtacaaatagtgagtggtggttgctttaccatcaaagtggactaatgtttatg

SEQ ID NO: 1807 - DNA, 653 bp, Arabidopsis thaliana
caaatttgcgtggcatgcatcatatctcttgtcgcccttgagtcgaatcgaggacaactgatttcgaacttgtttatctatccatctaataagttgagaggctgtgttcagaagctcgacgtgacgcctaccattccgttctctccacacggtgtaaactgtggcttgcaggacatagccgctaagaaagcattccacatggtgaagctgagcgtttttaatgtgattcattatcgattgccagtttaacgtgtattgcaatttgaagactgctgttgctagagctgcccaaatcgttgaagtgtagctgcaagtaaaaaagaggtgttcccgagtttcgatattaccttggcataagacatagtccgttgcaaacccatttgcccatttgatcatgcaatcgcctgtcgagagtctaccgtgagctgcaagccaagtgcagaaagagtatttcggggtggcatggctgaaccaaatcgccttataccatggaaccttagctgatattgaacgagtatgatgccaagtatactttgtagagaaactagtccctgaaaatatcagattttcctctccaaagcggatctatgacagcgatgccgataattcgtccaagcctccgcaactgtcatgctacggtttatcccaagaca

SEQ ID NO: 1808 - DNA, 612 bp, Arabidopsis thaliana
gttcctattaggatagaggggggggaatattagaaacctaagatcgttgttggattggatgcagatgtcaaggcaggggtcggacgagaaccagtcgagagatgtgttgtctagtcgtggaaactttgcgcagtatccggattcggataactggataccgagtgagagtggtgagattaccggagattatattcacttggagccgtatggattacctgaatgggatacccccgattccacacccaagcactcgtcgcccggatcgatattttttgatacatcgaacgagagttattgcgtctcgatcgcataaccccgtacaatccccatcgctcgagcaaaatcaaggaaatcctattcccgaaactcagaaccaaggagcccccgaaacgcagcacaccctggatatttttcagagtctattgggtcacatgattcaaacacaacaacaccagcagcagatccaagaaagccagcgagaggaatcacatccgcaaagttcttgaagctcgtgatgatgatgagagagttaggaattcgcgtgtttaaaggagagcaaaacacggtcgtgggagacaagtggctaagagaccttgagaggaattttgaaat

SEQ ID NO: 1809 - DNA, 426 bp, Arabidopsis thaliana columbia
atatatatatatatatatatataaaattcaatctagtatgtataaaacaaaaacgaaacaattacatttatataaatgctatattaaaaaaaacataacaatttcaaaacgttgttaataatataagtatgacaataaaaagacgctattatacaatatttaattgcaaaaatataaacgctattatatattacaatacaatagcagaacaaaaaaacgctatataaagtgtctgacctacgatgacgggcgcatacatagcgcttatcaaaacgctataaaatagttagatagcgttattccgacgctacgaaaagtcatttttcttgtagtgttgcacttgcagtagtaacttcagctcagaagctttgcccgtattttcaatctcacccaatcgaagtgttatcaaatcaaccacttcgaaca

SEQ ID NO: 1810 - DNA, 458 bp, Arabidopsis thaliana columbia
tgcatgcatccaccacattttaatatattcgagacattttgatcggtgatctctgtggtgacgagaaaagttgagaatacgtacctggattctaacgtaatcagtacggttccagcagaaagcgttccccagcatctgatcgacggtaacgggaaacgccgtcaaccactatgtccaccacacttgacgttgaatagtctccgttacgacggagtttcctccctggtgatgatgacatggtcgacggaccgtttcccaacgacagtacaagcaagtcatctacgccgtttactgacgggaaatctcgtttgttgtgtagcacgtgcgtgacggcagctgctgttggattgttcatcagcagaccgccgtctacggctgagcatgaggttttcccgtcaccgacactacactgaacggcttgaagaggcttggttgtcctgacgtggcacggcagactt

SEQ ID NO: 1811 - DNA, 630 bp, Arabidopsis thaliana columbia
gagcttcactttgcgaagatatcaatcgaatcggatttcaccgataacaatcgttttctctttaaagattgttaccacaacctcagtaccgtgtcccaactgctgcgaaaacagctactggaataagaaactgataggcaaaaccggagaccgagaaggttcttcttgcactgttcttgttaggtgctgcagctggtggaggaggcggtttctcaactaaaacagcgagcttcatacctccgtaacatccaccaccattaccactaatcagatagtaatgccttgtcacattgagatgaaccaagtcccttccagctccacgactccaatttgcgatcgggttattgggattgcagcttatgtagttcgtctcgttcacttctataacgttgtattggtttctctcatatacaaaatctgaccagacacaatgagaatgaaacactatataagtcaacaagattcatgatttgagatcttactgaagtacagaaccagaacctaatctatttccaattacaaaggatgctgtgaaagaagcatccttttttttaataagaaaacagagctagtgaagaactagtggtctttacaaagttgtaaatttgaaaccatcatttgccactgatg

SEQ ID NO: 1812 - DNA, 561 bp, Arabidopsis thaliana columbia
tctgaagccttgtgccattgcataatccaccttttgggtctaaattccttaacaacataattggggcaccaatattcaaacgtaaacaatgatttggtagacctgatatcttgatagagtttaagaaatctggagtgaacactggattgtactctgaagtagtgtcggaaagatctattgaatcaatacttaggtactgaatttcttcacctgatatgaaaaagttaaaattaaacattaaatttaacatgcaactaataatacagataatatagtattctaatacatacctggtagcttctctaacagacgctgattaatagtattaacatcctcattggtaggagacaatatagctctctcttggatgaatttgagatctttattttcgagtaaaagagttggatctccacaaatctctaaacttatagctttaataggatcttctccctctgtaattaaaaactcttctggaataccaattaacacttctccatcgtttggtttggcgaagtgatggatttcattaaccatgacttgtaagttagtgaccatttgttt

SEQ ID NO: 1813 - DNA, 506 bp, Arabidopsis thaliana columbia
gccagtgtgctctaaagggttcggcgagtatcagcaacacaaccgctgaaatgcccataccgataatggcaatgaactgccacaatttcgctcccgccaggaacaacatcgccagcgtagtcacaaacaacaccaccaccgtaccaaggtctggctgtgcagcagtaacactgccaacaccagaatcacgcccatcggtttcaggaagccgcgcaggttattacgtacttcgtcgcctttacgcaccagatagttggcgatatagcaaaacagcgacagttttgtcagctccgcaggctggatacgcagcaaaccgagatcgatccaacgcgatgcccctttaaccgagctacccactaccaggacgatcatcagcaggatgatagatccgagcagcatcgtggcactgtagcgttgccagaactccatcggcagacgcagcgtaatgatcgccagaataaacgccaaaatcagatagacaccatcacgcttcgcgaagaagaacg

SEQ ID NO: 1814 - DNA, 1180 bp, Arabidopsis thaliana
  unsure (1)..(1180): unsure at all n locations
ttaagttatgtgagcaaaatggtaaaaaaaaaataagcaactacaaaaagaaatagaacgaaaattttgtttctaaaatttaaaattagaaatcttgaatatcgagaaataatttagatatatacgagaaaagattttttttatgtttcttgtgccagtacattcacttattttgggganaaaatacttccgtttatttgtcaaccagattttgactcgcaattttttcctaatccattttatagaaatcgaagaaaacattgactagtgtttagttttattttttttagttaaacagaaaaaatttgtttgtaaattcaatttttgactcgtaaattcaaaatgatacaatcataccactcaactcaagtgatacaaaaataacattttcactttcactattggaagtcattagttaagttagtcgtatagatgatacgtaccttcgctccggtcacttggaggaagggtttggatggaggagagagccatcctctcacacattctctcaagtgtgacgatccaacgcttagctccatagcctgacccgccacttaaaagatctctatagatcttatgtgtatccaatttatggtccacttccacatgctctatccacattacctacaatgttttgatagcatcaatcaaatgcaatatagaaaaagacatatatgagctcaatcaagaggcgatgaagagatatataccttggagtgagcatcgggcaaggcttggatgaggcaaccagaaggacgtttgtaacaagcagcattgccaaagtcaaagttagcacggtgtgacacgtcagcaataatccagatccctttctcgatctcttggcagcacctgacgaccatgaattcccttgctggcactagtggcgacagaatgtgtagttgctcccacatctatcgaattttattcacattcaaaacaccaaatgtgttagtgattctattgatcatgaagacaaaccttatctaatatccttcaaacctaaattcgaataaaaaaatccttaaactcaattaacagtaaggaaaatagaagtaggttacgttaatattgattggtaacattttgaagttacactacaaaaatagttcttacacttgcaaaacattgcagtttcccttataggaagcccgatccgagcacatgaattgtgttggccttg

SEQ ID NO: 1815 - DNA, 462 bp, Arabidopsis thaliana
aattcattggctgaaactagttcattctcacaataccaacaccagatgtctgttgaggaattcccagaacgcccggatcaaccagagtgcacttattatcttaaaactggggactgtaagttcaaatataaatgcaaataccatcatccgaaaaatagattgccgaagcaagctgcattctctttcaatgacaagggcttgccctaagacctgtgagtttttttcccatgctgttcttttgtgctagcattaggaagccactgagaaattttgtttgtagtgctacagaacttgatatttctggtgaatttgattcaggacaaaaattatgatcaatcacacacttctccgattcacacttaaaactcattttcctttattttgttatactttcaggatcagagcatgtgcacacactacagccgatatggcatctgcaaatttggtccagcttgtagattt

SEQ ID NO: 1816 - DNA, 601 bp, Arabidopsis thaliana columbia
tcccagaatggcggatttgttacccatttacctcattattttggcatttctatgcactgtcggagccattgctttggctttattccatatctacaagcacctattgaactatacggaacccatttatcagagatatattgtgcgcattgtcttcatggtccccggtgagtattagcagttccaagagttttcttctgtttgtctatcctgatctgtgactgtcaactccattttaatgttgaattctctctggctaacatgttattggttctttgggcatgtcaggtttatgccttgatgtcattcttggctctcgttttgcccaagagctctatatattttaactctatccgtgaagtgtgagtgtttctgattttttcgtattactagtttgacatgggatgtacttactcgagttactatactaagttctcattgactcttgggaatagatgacgaacataattttaacctttggtttcaacaaatgcagacctcatggttaaggctttgtaatcttttttttctttttctgtttcagttacgaagcatgggtgatatataattttctatcgctgtgtttggcatgggttggaggcca

SEQ ID NO: 1817 - DNA, 588 bp, Arabidopsis thaliana
aagcttgcgttggacaggtagcccgaagagactaccggtgagaaactcaatgtcttggagaagtcccaaaggcacgccgtggtttgagatttggaaggcaccccaagttctacatgcatgaccgatttggttagtcgcgtccgggtggtcgaggtcgatgagagggatgttttcaccggtggccggaggagaaggagcagcggagaagaggagatcgtctttaggggtccacttgtaagaatccgggagctcccggagagatgtgaagtcaggtatgtgagagtgtgggaggtgaatgggatggcctctaaacacatctgttaacatagcaggcatcttgctcttttttaattagttttaaaactttgtaaatttgatagatgtttgtgttttttttcttatgagaagtgtggtgtttggtgatgggagattggaagagttagagagttttatttatagtggtggagtagagccaagaggaggcaaaagcatatgttaaagcacttgttttggtccaatattattggttatctacttgtttattggattaatcaatacgaacaaccaaacctctagaaaattatagag

SEQ ID NO: 1818 - DNA, 480 bp, Arabidopsis thaliana
gaggaccatcccgatctatttcagacatcctctcttcaaggctcctcgcatatgcctcaccaacttgttgagatttttgatccacaaaagatccatcagccctagtatgtgttgcaataaacacttctccaaatgtgacaggtcgcttcaaacgttcctcctacaatgaaaataaaagagattaaaatcatagaagcaacattagataatatgttaagtgaatcgtttggatgaaaagagaaatcttaccatctcttgatgaacttgcaaaaacgatttctgcccagctacatgtttgtgcactccaagacctccacgagtagagtttctacattgtgaagcattctcacttctctcaatagcatctttagtgttccaatgctcccacatccgagcccaaagtttatcccgaaatccacggtggttgtgaaccacttttctttgcttgactgaaaatccttacatccgcttcttggctat

SEQ ID NO: 1819 - DNA, 558 bp, Arabidopsis thaliana
taaaaatggcttattgcttctatagccatagggctaaacttcatttcggcaattcaagaaacgctctgattacaccgtaccttcaattactccaaatatcttacaagcatgctttgactttgtgagcctcgattggaactgattgttcaaccaatagtcgtgttttacagtgtctcatcaaggtttggtttacgtcgacccttcatagccgctggcactatcctcctctcaccattgtggtactacttatcggctatgcaatcgacgttggggttttgattggtgattattgtccaatccatatgtattttactcattggtttatgtagcttagtccttagacatcgctaagatcatgttcaaggtccgtgtagggccttctagttgatgtagaggcgggaaatgctaagagaacacaagttgaaaaccagcttttataaaaatggtgaaaaaaaagacaaaattggctcaaattctctagtaaattaggaagattgttaaatcaaatgcatgcttcgaagatgttgtaaaatagtgtggactacaagcaaacagagt

SEQ ID NO: 1820 - DNA, 444 bp, Arabidopsis thaliana
cacctcattcctggtgtatctatgcccactgctcctcctctcaatcctaataatgcgagtcaccagcagcggtcatatggtactccggtgctccagcctttcccacccccaactccaccaccatcactcgctcctgcacccactggtccggttatcagcagagacaaagtgaaggaagcccttttatccctgttgcaggttcgtcctttaccacatcactttatttgagctgctgtgcaaacctaacgagttgcttttgacaggaggatgaattcattgacaagattacccgaactttacaaaatgcacttcaacaatgaagctgcgctggtcagcatctacgtgtgggatagtggctgtttgatctagaatgtgtagttaaaatgtagttttgtccctctgaaagtgttgttggaccttataagatactgcactgcccctttg

SEQ ID NO: 1821 - DNA, 562 bp, Arabidopsis thaliana
cgctcgccgttgctggggttttatcgtagacacgtgacgcgcacgtgcaagctatttccttgggcttgggcttagactcatgagataaagcaaataaaacccaaatgggctttttagaaaagaaacccaaataacagagtatctcttcttcttcttcgtgcaacaacctaaccatggaaattgcaatttgcaaacaatggcgctcgcggtctcgactgtcggcatgttctcctccactccgccgcactcgtcgtgccggttttcgaacaagctgctcgatcttcgcgaatccagcacagcgagccaagaggaagctgcttgagctgatctccgaggaggatcgaggtctgagaacccagaaagaccccaagaagcgagatgaaatcgtgaacgccatcgaatccatgacggttatcgggcgcagtccatcaccacagacgactctctatctgccacgtggcggctcttgtggacgacggagaaggaacagttgttcatcatagaaaaggcaggcttgtttgggacgacagcaggagacgttttgcaggtgatcgatgtgaat

SEQ ID NO: 1822 - DNA, 900 bp, Arabidopsis thaliana
ccacttcaaaagaagtttagctaataatttgaacaatcaaaagaaaatagacattcttatgaaaataggtccaaccatatgttatatgaatgtctaccaactaacaaaaccaaaaaggtaccggaccaaaatactcctccatatataaccaaaaaactttccaaatcattgtaagattccatagcgtcaaccaagggggttcttgcacataacacgattctgacctacacctccacatctcccacacttattaggcgttttagacttgttatttccctacataagacaaaaattatggttacctaggtatctagaaatatgtggatgtacaaaaaaataatttacctcgtatttcccaactgagtgtatccgcggcttcgcgggtctcccgggaggtttttttgttatcggaggcattcaacagagaatccttatttcctcagggacattaactcggatggatcgtgttggagctggattcccctccaggaatccacctgcgaaaatactaagcaagcccacaaaagcccaccaagcccaccaagtagaggacctacgcagctgacaagcccacatatgcgaatggacacttgggccagataagcccagtcacctgatgaagggagataagcgaataatgacctaggaactgatgaggagatattcgcggaggagatctggtaactcggaactgacctgccaaatatccaggaggatctccgcagatcccggacggagctaccacgtgcgtagacctatatataagggagcgaggacgacttggaagacacattcaattcagcttacattaacatacatacttttacacttgtaatctcctttcacattgtaaaagctttgtcataatcaatacaaaaagtccattcgttcttagcaata

SEQ ID NO: 1823 - DNA, 744 bp, Arabidopsis thaliana
ggtacacctttgctgtatgcgaactcgatcaacaggcaaccagaacctcttttccaacaataacatcgaccgcatagctcgcgaactcagagaaaagagaaacacagtcaaccttgtacaacaccaataaccactcaaaatttctgatgaacaaaatcaacagaatgaccctgcaaaattaagagtggtctcgattattcaggggagcaaattccatggtctgtcaatggaggttgtttccattctccttgggcgacaaagcacacatctaggaaaagaatctgcccctgactcaatcaccatatgggttgattgcaagaaggcttttctagcaaagttcttctccaacgccagaactacaagactcagaaatgagatctctggtttttcacagaaggctggtgaaagtttatgtgaagcatgggagcgtttcaaacgttacaccaaccaatgccctcatcatggcttcaagaaagcctctctcctcaacacactatacagaggagttttaccacggatcaaaatgcttctggataccgccatcaatgggaatttccagaacaaggatgttaaagaagtttgggaattggttgagaacctagctcagtcaaatggaaattacaacgaggactgcgacaggatcataagaggaatagatgactcggatgacaaacacaagaaaaaaatcaaagcgcggaatgacaagctggacatgattcttcttagccagcagaagcatgtgca

SEQ ID NO: 1824 - DNA, 623 bp, Arabidopsis thaliana
taaaaaggcaacctttaactgcatgcttcaagaaggttccatctatccctatgagtggcctacaaaggtagaatgcattcttcattgctccaagacatacgtagatccggttgaatacatgattccctttggcatcagtaattgtatcaacaattgcagttgatcccttatttgagctcatgatttcagcaacataccctcgaagatgagcaaattgttgctcatattcgtctttcagccacttcagagccagacatctccctgtctgaacttgtcctatactactcaccaacttccactattctttgatatgcctttgaatgttaagagacatgtaattaggctgcaacctcagcttgtccataaacaatcttccaatcactcgactcttcttttcttttttttcgcaaacaccatttatattaaattatcgggaagagagtctccgctagagaaagccattcaggaaccgatgtgcttacatgggaaaaagactatttcgagcctgagcttttttagctagacaatgtgctcaagtattagaactacgaggaagaaatctaatatgaaaagaaggaaaaaaacaaactaaagatcgataggaagccaatcggctgcgaatg

SEQ ID NO: 1825 - DNA, 768 bp, Arabidopsis thaliana
cccgaatatgtttcttcataatcaactcctggtctttgagagaaaccttgtgcaacaagtcaggttttatatcgtgtgatctcatctttttcatttctttttcgcacgaatacccacttgtatccaacatgttttacactctcagatgcagtgacaataggtccaaagacatttcttttattaagggagtgcaactcaacttgcatgacatttttccatttctcccaatccggccttttctggcacttggataatgtctttggatctggatcatcattctcttgatcgatctctttagataaagaaaagaagaatattccattatcatcatcaatatcatctctatcccatatgataccatcatgggcatagttaatggaaatctcatacttttctctatcgtcccgaggacttggttcttcttgaagaaccttttcattttcttctcccaatttctttttctttcggggatttttatcttttgagccaataggcctcccacgctttaattgaaccttaggttcattaattttgctcccatctaattccagctcactaggaattttaactcttgatggggcatttgcagcggggatatatgactttgtcacttttcttgtatcggtgaacgaatctggtaattgatttaccatattttgtaaatgtacaatcttttgtacttccagctcacgatgtttcgtggggggatcaagatattttaaagatggtgcgcacattctatatctttatgcatatgcatttgatgaa

SEQ ID NO: 1826 - DNA, 946 bp, Arabidopsis thaliana columbia
gtcgtttctagtccttttcaagtttttatatgtttgggatgcatttggtgatcatggaaaattctggaagaaaacatagaacttatgttgcagaagaaatctcgagaccaaaattcgcataggtgtcgatcaacaccaggggtggtgttgcctgatgatatatcccgatttttaccgtttttaactatgttttaggtataggttttagagtttaattgttatttctagagtcttttctagtcgttttcaggtctttacatgtttgggattcatttggagataatggagcattctagagcaaaacaaagaatttatgctgctgaagcaaagccggaaactaaaatgcgtgtaggtgtcgaacgacaccacccctggtgtcgagcgacaccaatacctgacggcaattcgaagacgcaacttatcgaatacccagaactttctcctttggttaatgaaggccaatcacgtgttttagacttgtatatatagtttttaggtcattgtttagacctaagctttgggaggctattccatatctcttttgtacttttgggagcaaaaccgtgtgaagattccctttagagaagattcttcttaactctattcttctcttgttttattcattgatttcttattcaatcatgttttgttcttctatgatcatgcttgagtagttttcttgttaggtttacggtttctcattaggaatttagattatttagtagattgccctgttgctaggttatctgttaggattcttcatctttaattgttcttaatgctaattcttgagtagctaactagaatttgtatcctgacaataggtatgccaccataggtatctctagttggatctattatttgatgagcctagtttataggtgtgtaataagaaacgacctatctacgtaaggtgacaattgaactcgattagaatacatgttta

SEQ ID NO: 1827 - DNA, 835 bp, Arabidopsis thaliana columbia
cccgacagcgaaggtttcaagaacgagatcgagttctccgaaaagtctttcaaaacaccgccgaaccgaacgctgggaagctcgggacgaattgggaaggaccatacgtaatctccaggatcgttcgacccggagtatacgaactcgccgatttaaacggcaaagctgttccaagatcctgtaacgcaatgcacctaaagaaatactacaactacactcagagtcttcggacgagttcacccaccccccccaattaaaaaagggaggagtggatccgtatattcatactcccatttttatcatcttgtaagtttttgaactttggcataaataaaatttcttcacatttttaaacgcttcggctaatacgatgagcgacgactctgagtatcctttacgcctgctcggctacaacgcgctatacaaatacgagatgaaatctattagattacctttgagaagaaactttcatcttcagaaactcggctatactttaacaccggtaccccagctcgtttctaaacgctggtcgggaagtgaatctgatcggatcgcaaccgagaagtttcacttaaaaacccagtctctcacactggtcgataaaacagttcggatctaaagaaagattctaaccaaaaaatttcgaactccaaaaacttattggataaagccatccaggcacatgttctacaaattattggataaagccatctaggcataagtgctacaaccaaacatactaacaaaaaaaagggcaagaaaaatcccgcttcgggtccctaatcgagctcttcggacgggcggttactctcgcaggaaggagcgatccggattg

SEQ ID NO: 1828 - DNA, 498 bp, Arabidopsis thaliana
tttacaaattatgaatagtaaagtgactacttttccaattaagttttaaaaagtgactagtatgcaacttaacccttcttttttatagtagactcatcaaatcaaagaaacttaaaaaagattaatgttaggcttaatagtttatacatatatataaatacaaagagagaaccagtcattcggcttatggcctcaaaaaaggacattctcggaacatacaaatggcaatctaaagctttattgaatcgacgacttttcatggaagtacacacacacacacttaagctatgtctcagtactttgacattatttgccagtagagttcctttggagctgcacaacaaagggaccaccattaagtaggcttcttttgtttaaattttaatacaacacatggttttgttccagtattagtgtcacttaccgggtaaaccggtgaagatctcaaactgctcgtaagcctgcctgacaaacatctctgaccctgagacagttatg

SEQ ID NO: 1829 - DNA, 516 bp, Arabidopsis thaliana
tacatgcctttggttgagttttcttacaataacagctatcactcaagcatcgatatgtcgccatttgaagaaatgtatgagaggccatgtcgaactcctctttgttggacggaaataggagagaggacgagttttagtaattgattgattgatgagactacagagaaaattcagtttatgtgagataatatgaagaaacctcaagatcgaccaaaaaagtatgctgaccgaaagaggcgtgaagtggaattccaagaaggcgacatggtttatcttaaggtaaccgcgttaaaagggaaggatcgctttggaaaagttggaaagctcgcggtaagatttattggtccatacaaaattaaaaagagaatcggggaagtagcataccatttatatatggcggaagaaatgcgattacataaagttttccatgtgtcgcaactaaagaagcatgttccggatcctaatgctatcatacccgagccgatacaagagttaagaacgaatctcacctatccc

SEQ ID NO: 1830 - DNA, 1595 bp, Arabidopsis thaliana
attcaaggagaaagagtcagattaagatccaccttttcataagaactgtcttaccctccaactgcgtgagtgcagcaggtctagcaactttgcaacatttgatgattctcttaacgtggagttgcgtaaacctggcttgcatcgtattgagcatacgcggactggggtgattgggttttcactggtgcggtccctggagcagtcgcatacactgcagcttgagttgcaggctgttgctcatatcctgtttgagtaggtgctgcttgtgaataagcggcttggcttcctggttccgcaccatatcgttagttaggatcttgagagcttgtgttgtatccatagttttgggtctgagatgtaccataagcaggctgtgaggttggatatgtgtatccaccggttggagctacttgcccaccgtacccagctgctgcagcctgctgtgcaccagtctggtcataggtggaagaagctggctgaacactttgctgctggtaagctggaccagttgcaggtgtttgtgtaccattgttgtaagcgtcagatggtggagcggaactataggaaggatatgtttgctgttgcactggcccatcacttgtcgtgtagccatattgttgttgttgtggagccatgttagtactgccatatgacggtgctgctggagttgcaccttggtaaggcacatcaccggaagaagctgctgctgcaggctgtggaggcccatatccttgctggacaggaccttgttgcatcccataaggcctaacaccaggttgctgcatttggtaatagcctgactgaccaccacctgctggtggatatgaacctccataaggtggctgcatcggaggattactgtcatacttaggctgttcatacgtctgcccgtaagtctgctgataaccggtctgggagtaaggagcagcatgtccatactctgggccatggctctgaccgtaaccataacttacctgcgaaagagggggacaccagaggcaggggagggtacagggccagaaggaggtggaactgggccagcgctttgagctccttgtcttccataataattgtacggaccagaatacggaggtctttggtcccaatcagtaccatatccacctctaggaggcatatgctgtggaggatagccaccgaaaccgggagaattgtaatatgaaccttgagatgaatatggtccacgagggtggtaatcatagggatggggagcatgaggacctcgtgaaccccattgaggtggaccgcctggcccttggggacggtaggcaggctgattatagccaccggaataggatgatggccttgcattctacaaaaaaacacaacaatgaaacttcccatcagagacaatagagatcaaacatttcaaacagtaaatattatcagagaacatgattctattaggacaaagaagatgaaatccatggcacagcataaataatagatattactaaaaagtgagcaaagaacaaagcaagacagcatgaacaaaatggatctcatcacagcagtcaggtgcacatgacattcaaaagcaagtgccacacgtttaagactcctatatgcagtgacag

SEQ ID NO: 1831 - DNA, 923 bp, Arabidopsis thaliana
caaacatcacccatattagtgaaagtggtgtacaaacatgtgatgacataaactttaatatatagtaatatattatatatttaaacattaatgatctgctagaccaaaggagtgttgagtaaaccattattccaagatgaaaccatcccattccagctttcccttccgggatcaatctacggtacaactccggcggaatctccggtcatctgccatggaaacccccagaacaccttgctaggattctctgagttattattgttattgttcacattctcttgctttctctcgtttccttccaaagacatccccaatgtagaagccatcttgatttcattttgattattattaccatttccggacataaacccataacacaaactattgttataagtaccggttttgccctccgaagatccctacatcattcgttgagtttccataaatagaaagatcacctccaaacccaaaagaaggcgtagtagcttgagaggataaatgatgcttttggagagtagcgaaacgggtgttgagatcaatggagtgatcataaccaaaagatgatggtggcattcccgtaattaaagggttctgaagtggatcagtatggaaattaatagacttattgttgttgttcttggagaaagctgaggaagaggatcgtttgtttcgacggcaaccaccaccgacgggaacgttacgaagagtaccgcctttagtccaatatctccgacaagatttgcagaagtaacgaggttgtgagagactatagttgttgtagtaacaaaactttgtgtttggagattccatcttggacaattttgagcttcactcctaattccctcttgatactttcttcttcatttcttcttccattttcttattgttattattgcttcgttttgttgaacttaccaatatag

SEQ ID NO: 1832 - DNA, 549 bp, Arabidopsis thaliana
ctcaactccatattctgcagacccgccaaacgttctgcaccttcgagcaccgtcaaaaccttggcctgttccaactgttggtggttactggcattcacggaaaggtagcagagtaaagctagacactgtaactgcatttgctgctcgacgttccttattagtttcatcaataacgggattgctccgtattcgattatgttcttcgagtgctctgcgcagaggaagttctcgggacatacgaatttctgcaatgaaattacagctgttatagccacttcttggttgctactaccgagtttctcaaccaatggcttgatcattctcgtttctcttgccgggaatgtccgtgccaatgacccgatagattgaatcgctgggatttttaaaatcgggctatcgacatctttgattatccataacatctgatcaataacagctttagcagcaggagaattagtcttgaatgctgcccgtctaaggtcagcactcgacatcgcagcagcggttatctccatcagagtcatcaaacaattatattgcaattcacca

SEQ ID NO: 1833 - DNA, 550 bp, Arabidopsis thaliana
caaatgttttccatcaatcaccttcaccggatcagcaagagcagcctgcgcaccttccgctgtcttgtagacaaacaatgcaaagcctctagatttaccagtaaccttatcaaaacccaaaggaccttcctcaacatctccataagccataaagtgattcaatagcctatccgccggcatatcaaaaggaacattcgccacatagatcttcctcattgatatatctgcaatctgggaacccgtaccttgatttccagatgccgcgagctgcgttactgtaacacgcccatcaattttcttagatggttctttcagagctagtaaagctccatcaacgtgcataaaagtgacgaaaccataccctttcgatttcccagtgaccttgtcaaggatcacaatagcttcttctagatctccgtaactggaaaaaagcgaacggagaccttccgtagtagtatccgccgcgagaccacggatgaatagcttccgctgcgagatatcagagtcggcggttaatcggacagattcaagcacgtcgggatggcgtacg

SEQ ID NO: 1834 - DNA, 483 bp, Arabidopsis thaliana columbia
tgacacttaaagcacttgatgtctctagttcttgtcataacagctttgccctttcctttctgatcttgatcctcaacttttggtttgatgaaaggcttataatctttctgaaatcctgatcgttcatccttgtggtagctaggctttcctgaaccaaaactaggcttagagctccttctcttcagctgtttttcaaacatgattgctttgtgcagtagctcctctaactccacatagtgctgaacctccaatctgtctatgatatctctgtttagacctcccatgaacctagacattatggcttcattatcctcctgaatatcagctcttaacatcaaggtttccatctctttgtagtactcctctacggatttgtttccttggacaagatttctcaatctgttgtgtagctctctgtagtagtgacttggcacgaatctcttcctcattatggtcttcatttgagtccaggactcaattgga

SEQ ID NO: 1835 - DNA, 521 bp, Arabidopsis thaliana columbia
cgaactagaagatcacccataggccttaaagggcatgcttttaataacttcatccgcctctcggagtttacctgctcgtcctagcaaatcaatcaagcatccgtaatgatcaatgtatggatgaatcccgaatttcgatctcatagagttaaacaaaaaattttccgagatcaaacccaaccgacatgactgcaagctgaaaggattgcaatgaaagtaacatcgttcggtctcacgccagctttaaccatacggttaaacatcgctaaggcttcagctccgtgcccgtgcgtactagccctgcgattatagtcgtccaagtaacaacatttctctcattaacacactcaaacacatccaacgcctttgttatattccctgatttcgcatacatatcaatgaccgcattgttcaatgaaaccgctctgttcaccctcggtgatcaacatagctacatattctttcacccaattcaagtgaaccaagatcagcacaagatgagagcacagccaaaagcgtaa

SEQ ID NO: 1836 - DNA, 2243 bp, Arabidopsis thaliana
gtgcttactaaatgatcatctctgatatgatttcaagcatgtactgtagttttaggctaggtactaagttgaggccagactttatgttcagcttgaaacagcttggaatgctattgacagcataactgtatgcaaagttatcacttgtattgcatataataatttctggcccatgtcatgtctccgaatgccatctgcatatgatctgtttgatgaaattccttgctgtcttgctatgttcttagtcatatccactttttcgattcttttgtcaacttagagattttatgttatgccatttttaatttgaatttataacagtgctttcttctgtcagctgtatgatatattatgtcccactttgtttttctttaaaggagttttcaattttttatgttttgtaggatggaaggccatcgccctattctggtggttttaaccagcaggcttaccaacctcgaggaccaggtggtccacctcaatggggttcgcgtggtcctcacgggccacattcaatgccatacaattaccaccatggtggaccgtacccgtctcaaggctcacatttcagacctcccaattctggtggttatcctccacaacatatgcctcctagaagtggatatggttctggttgggaacaaagacctccacattctggtccatatgattattacggtaggcaaggaggtcaaaacccaggccctgtgccttctcatggtgcttcttactcccaggcaggtgctcagcagacttacgggcagatgtatgatcagccacactatgataatcctcctatgcatcaatcttatggaggatatggtggctcccaacagggctatccatcggcaggtggtcagcaccaaatgcagcagccaagtagaccttacggtatgcaaggatcagccgagcaagggtatgggcctccaaggcctgcagcacctcctggtgatgtgccttaccaaggtccaacaccagcagcaccgtcatatggttcaacaccagcagcagcatcgtatggttcaacaccagcagcaccatcatatggttcaactccagcagcaccatcgtatggttcaaacatggctcaacaacagcaatatggttatgcatcaagtgcgcctactcagcaaacttatccttcatatagctctgcagcaccatctgatggttataatggtacacaaccaccagcagttgccccagcttatgagcagcacggtgctcagccagcttctggtgtgcaacaaacttcaggtgggtacgggcaagtacctccaaccggtggctatagttcgtatccctccacacagccggcttatggtaataccccggctcaaagcaatggaaactatgggatacattggctctcagtatcctagctatggaggtggaaacgcatcagcatatgctgcacctactggccaaaccgcttattcccagactgcacctcctcaggccggctatgagcaatcagcaactcaatcagctggctatgcagctgctccaggaacagcacagtgatatcattgtcgctcaaatcagtacgatgcagaccaggcttatgatgtggctcgctagaagatcatatgtaatgcaaggttagtagacttgcattcctaaactgcacatcctgattgagacagagcattagcagttcctcagctgttcgttatgtcttcttataatcgttggatctaaatatgcatgactcattctccctttagattatgtactgtgatctgagtaaaccctaattcgctcctcttctgtatctgtactgctgctattgcttaaggtgtttctaagaagttgtgatcacttttacagtttcttgcttcagtttttgtttttttttttttttttttcagtagagttaggttcgagagccttgttacagaaaatcttaagcattgtcgacagtagaaagtttattaacatttgcttctgtctataatcgtaaattaattatccaacaaatgaaataaacgcataaaagagggtcgcaaaaaccgtgaaagagaccaaaaataagtatggatatctgaacagaacttggatgtcctgagacgcaaagttaggtcgtggcctggcctataggcgaatcgtcttgaggaatgtctcatacgcagtctggaggcggtttctatggtcctttcccttagtgtttttcagatagtgagccactttgataacccagcgtgttgttgaacaaccagacgttgcatcttcccttgtggctg

SEQ ID NO: 1837 - DNA, 820 bp, Arabidopsis thaliana
gccaaatgctacaaaaatcaatgcatcctatgagtaaacacatcgtagaaagcgtcactgctaaagccagcttaagtcctccagtgactgatctttttctcttgaaaagtgctgggtttgcagcgatagggcagctatttgtagaaccaaagaaggatctgttcagagtttcagctgagaactttccggaacaaaatgttaagttgttgaaagagaagttgaatctctccatccaagggagcttctcaaggatagacatcggtatctctcccgtcaaattgttcctcgacacatcgatagccacaaggttcttgatactcaaaatcgggatatgtcctgcaagatggtttccagaaacatcgagtgtactcaaatcactcagctttgagatctctctaggtatgtgaccagaaagatttgtgtttgacaagttaagatactctaaaccagaaagcatctcaatcctcggaaacattcctctgttgaatctattccaagctagatttaagtgcttgagcttctttagtagtgtcagattcttgataactccactgagctcattctcagacaagtcaagataaaccaaactaaaccagttggagtctacctgagatgagatatgaccttgaaaccggtttttgctgagatcagccacttctaaagtctccttgaacacacctgtcactgaaccatcaaactgatttcctgaaatgttgagaaaactgatggatttcatatcagcaaaatctgtgtccctgccatgaatcttgtttcctgcaaggctcaaagtctcaagctttggaaatgcagagccaaaccc

SEQ ID NO: 1838 - DNA, 578 bp, Arabidopsis thaliana columbia
  unsure (1)..(578): unsure at all n locations
tcctctagtaacggccgccctaaagaatagtcataataaagttagttccagtacatactaataaatatttttataatcctttgcgttgtgttcgctctttaatacgctcggccttaacgcttgccatgttcaataaattctgttcaagagacaatattttgcgtaaaggcatcccaaaataaaccttcataaatcgccagatatctctttgcgtcaggccaatattcattgatgagaaatataaaccaatcaggtctttatcgcgccaggcgntnacgttttgcacgtatctgtgcccgatgcagatcgataactgaaatttttaattcatcttcccggccagtaaatggcaaatgaagcaaaaagtggcaaatgtaacagtcgcggtgatttatcctgcagtatgattttacgcaccatagttgctacacgtgcgatcacatacgcttaacacgtatatcaggcgggttgactgccaatcggcacaataatcttcaaggctaattgtgggagtgagatcttcggtaataataaatgatgcgcgagttaatggatttaacctttttcgcaaaccaatg

SEQ ID NO: 1839 - DNA, 509 bp, Arabidopsis thaliana columbia
  unsure (1)..(509): unsure at all n locations
nnnnnnnnnnnnnnnnnnnnnncgggggacatggctatctggtgtagttttatctagacttagaacctcggttggttctttcgaaggaggaggtaaaggaatatctgcagtatcgagctctgtgatctcttgctcttcgaccctgatctgggaagtcttgagagtcttgggtatggagcccgtccgcacttgtgtgacggttgtagacattgtgagagtatgggataggaaaataatatagaggtacagattactgaagaattcgcagcgaccacggcatgaactggtagatatgccagatcaaggtcgattagatagtatagggcacgggttctggctccaggctgacgtgggggatatgtagttcgtcaaatacaaaggccggcgggatctgacgaaatgagacgaaaacagatggaataagaccaaatcaagacaaaacgagacaaaataagacgaaatacagttggcagccgccgctgcctttcagcctcggagaaacagagtat

SEQ ID NO: 1840 - DNA, 703 bp, Arabidopsis thaliana
cacttctcatgaggagctggagcattacgttggatttgtgttagctggttaatcatcatcgaaggccgttcgggtggatccatgatagcagaatagttgtcatctgccatgtgagcaaaacagtcaactccatacacaaaaccatgcaaatcaatcatagcagtttccactccctcttccagcttaaacaggtgaagacggtggaaaaacccctcaagcacggtcgccgtacaagcatcaaacttcttcagctttttagaaggctttaacactctggaatacgcagcagtaaacccattgtaaaaatcggaacggctatcggaaggattcaagaactgaaacaatgggttcatatacactctcttccataaaccacaccaaaaatcaaacccatatcgcaccgaagactgcgctgtcagcttcataacaccaagctccttgagtgtaatcccctttgcagggactcttaatgttagtctttttagagtaggagacctaaaagaatcacctacactttatattcactagtaagctgagatcccagtggaagctgcaaaaccatatcaggctgtgtttgtgctactcggttcatgatcatcaccgaaaggcgttcaggtcgtggcatggcagcagaataatcttcatcagcaatgtgagaaaaacggtcaacaccactcacaaaagcatgttaatcgatcgcagc

SEQ ID NO: 1841 - DNA, 574 bp, Arabidopsis thaliana columbia
gccagtgtgctctaaaggactacctcggcggctttggtttccagggcgataaagtaaccgaagaaacgcgccgcttctccggtggggaaaaagcccgcctggtgctggcattaattgtctggcagcggccgaatctgctgctgctcgacgaaccgactaaccaccttgacctcgacatgcgtcaggcactcaccgaagcattaatcgagtttgaaggcgcgctggttgtcgtttcgcacgaccgtcatttgctgcgttccaccactgacgatctctacctggttcacgatcgtaaagtcgaaccgttcgacggcgatctggaagattatcaacagtggttgagcgacgtacaaaagcaggaaaaccagaccgacgaagcgccaaaagagaatgcgaacagcgcccaggcacgtaaagatcagaagcgtcgggaagctgagctgcgtgcgcaaacccagccactgcgtaaagagattgccgtctggaaaaagagatggagaagctgaacgcgcaactggccaggcggaagagaactcggcgacacgaactgtatgacagaccgtaaacggagttg

SEQ ID NO: 1842 - DNA, 580 bp, Arabidopsis thaliana columbia
tagtaacagtgcgccactaaagcgataagcttttcatcgcgggttacggtaataaatacttcgactgtggtgtcaacgctcaaatcattttcatgcaggaattgggcgatttccgccatttttttattttctgaacgttttacgcgggtgaaaatatcattgccgaacataataaatagtatcctgaaggtgcatgttgttatcgatttgcaacgaatgttgttcaatgttgcaaactgataaccttttattttcacttgggagaaagggggtgatcgaggtatatctttttctcctttcgctatacatcctaaggagtatttcggcgtgaaattttgatttatttcacatagagttagtggttttttatttatttaatgattttaagttttttaattaatgtaattacgaaatgactcgcaggtttaagtgatttaattgatttaatgaataaaatttgccacgatcataattaatatctatgtactttgatcaacattttaattacaccgtcaaagaggctcgggacaaccgcaagaaaacaatgttgcagcttaacgagaataacagtttgcatttt

SEQ ID NO: 1843 - DNA, 502 bp, Arabidopsis thaliana
atgatcccctacggtaccaaatccggtttccagatttctgctccggaagccaccggtaaacagatctccggtttccttggtaccagcggcaatgttctcaacaccatacttgttcgctattctcccatacctactggaggaactggcaccggaggaactggcaccggaactggcaccggaactggcactggaactggcactggcaccggaactggcactggaactggcactggaactggcaccggaggaactggcactggaactggcaccggtactggaggaactggcactggaactggcaccggaggaactggcactggaaccggcactgggactggcactggaaccggcactgggactggcactggaaccggcaccggaggaactggcactggaaccgcaccggaggaactggcactggaaccggcactgggaccggcactgggaccggcaccggaggaactggcactggaaccggaactggtaccggttcaggtgctca

SEQ ID NO: 1844 - DNA, 603 bp, Arabidopsis thaliana
atgaggaatgccaagcacatcgtctgcttacttttctcctctgaaaggtgtgtggtatctgaagctgcatctcaacttatgaatttggtgcataagacgctcgaggtggctcttttcagacttttgcaattcaatataagctttttccagacacggttgggataataaactcatttttatacaggatgtctgtgtttcttctgcaagggttgcttcagagttctacaacgctgctagagattctatccttctatatgaagctgttgttcctgtcaaggtcagtaaaaaaatagttttcaatgaagatttaacaactgaatcaatatagtgactgtcgtcacatggaaatttctcaccaatatgcacaaattcttattcttctttttccttactccgttgaaatgtgaagctagagaaacaactcgatggcctcaatgaagctgctgttcttctgcacaacgattgtctatatttgttcgaagagatacttggccttgcttttgaggtatgacaatgtgtcttaacaagataaccgctatttttaattcttttttcggttaagaattgtctcttaagatctttcattgcaggtgaagtatatta

SEQ ID NO: 1845 - DNA, 565 bp, Arabidopsis thaliana
tattcagtttcttactagtcgaattttctatctatataccacatgaaaaattgttttaaaaaaccctaaaatatgaaagtccacaaaactttattttttatgcttattctatgttttgctttattaattttaaaggaactatgtatagggtcccaaacgatggtcgtggcacttctcaagaccgttcctgatattcatggagaaaaggaacaaaacaagaaaaagatgtgtttagaataattacttgaacttgttgtgatgaatgcttttgtcggtagagttatgattctgtgtcaccacctctgcatccgttacaaacctatttcggtttcttgcggcagaaacaaacacattcacaattctggtcaaaggactccctgctgggcgcttgaatcgatacatcgggcatcccgcaacgaaaacgaagatcgcagaggctaaaaccgcggtagatatagtgaagctggagctccatcctatgttctcctcgatccaaaccataagtgttactgccaagaaacctccaaggcagacagagaagaaataccaattgaagaatcctgag

SEQ ID NO: 1846 - DNA, 548 bp, Arabidopsis thaliana
tcctgaagtaaaagaaaaagaaaaagaaaaaaaaaaaactaaggccttgggaatgtagataaatacaatggaaaatgcataatctacaaccatttcttcatggtatattgcatatttctttgagggtatattgagtccacagccataccctgaattgagtacgagattcagcctctagtttggagtagaaatcacgttcctccacagtgaaatccacttttctcaactcaatggacttcggaggtaaagagattatgggttcccatcaagaagtgaacctaaatgcgtttaccagttagaaaccataaaaaccctcagatgaacattcaaagaaaattagattcaataccagtagactgacctttagttcggcgaacgatcactgttttaaggatagcctgcagcttctgatatcctttcactgggttcctagttatagggttcttaatcgtgctacagaacaatacgtaggaagagtaaggatcatatttgaggaatcgaaagtagctgtaaaggtcatcgattgaattctggattggagtgcagac

SEQ ID NO: 1847 - DNA, 489 bp, Arabidopsis thaliana
gtgctctaaagcattttatggaacgcagttacctgaatgcactgggtgacgcgctgaaaatcccccaggatgttcgtgacggcattgaacgcgatctcgaacagcaaaaacgcactttggcggaataattccgctctctggatagcctgaagttgactatttcgggctatccagaatcgcacagccatttgaacaggctgattttctctgtctgcataacattcgatatccgcgccattacctgtcatcatctaagcaatgactcccctgtttcgcttgcatccccggtgagttttgccacccttataagatgtttcaaccagaaagaacaataacatgctaccaaaagcactgccgcattccccacgccatgacgcttcatggcgatacgcgcatcgataattactactggctgcgggacgatacgcgttctcagccagaagtcctggactacctgcaacaagaaaatagttacggtcatcgggtgat

SEQ ID NO: 1848 - DNA, 550 bp, Arabidopsis thaliana
tggaaaatctgttcccgcataattaccatcatcgaccgacgtagagggcttaacaacgtgcaaattctgtctcggagtcatgaaatccccaactgtgtaacctccattttttgcctgaaacacccaaaagagccaaaacaaatctcaaaccataagccaaaagggttattaggtaaataaaaggatttatctaaaaggagcaaagttgactcaccggaacagagttattattattaacgctggcaggagcagcgaagaaggcagagacggtgattgacggtgaaaaagtggaggagcgacgacgattagagagaggaagaagagagaaagatgaagaagaaatcggaaggaagctttgatgatagagtgatgtaagtagtggaagtcgagttatgggcatagaattggataaagagattgaacccatattcgcttatcctctgttactcacagattccaatgaaagattaaatcttttctttatgacatctgagagaagaaacaaaggtagaacattttgttgaaggagagagaagtgaagaagtagaag

SEQ ID NO: 1849 - DNA, 503 bp, Arabidopsis thaliana
gactctagaccagtgtgctctaaagccagaacggcaactgacttgaatgtgtgatgggtacagcttaaatggcccatgatcctatcataggattcctatgtaaagtcgacagctttcctagctgcatgtgagaagaaaaataagattttagctaggatttgtgacgatgctcgcggacagacagtgacttgagagagcctttgtttggccgaaagtgttcaacaacaaatccaatatatccttgaagtctagatcccacataattagagaagacaaagataagaagaagacaatggaagagagaaaagtgaagagaattatcatgttccctctaccgtttacaggacacttcaaccctatgatcgagcatactggacctattccactaccgcagcaacaccgccacgacactttaaaattatcagcgtacccgctggctgacactcatcggtactatcattacccagtttgcgctgggggcgggttatacctggagcctgttt

SEQ ID NO: 1850 - DNA, 982 bp, Arabidopsis thaliana columbia
tacattaacatcctctgtgtaaaccgagcattcaagtcttgtacatcattataaagaccatcaatcctgagattcgtcatcacttggctcttgagaatcttttctagcatgcattccatcccaatcgtagaagtgggtgaaaggtgggcttggtgagtataatagctgaaatgactagcagagaacatatcaggcctgttgtagtcatcaagttgaatggcacatccatctacaacagctgcagctctatatccgccttggtatcgagcgacaccctggtggtatcgatcgacaccctcgacaaaattaggtagcaggtttccttgctcatcgattttctgaccatactcattgtatgcctgaccagctctgtcccttaacactcttgcagcatcaggtattactatcaacatctttgtgttgcaattgaattcctaaagctcctgaaacacaagaaaaagaaaaagaagagaaaaactgaattagtattgaaagaaaagaagagtctagacttaaaccgacacctagtctaatggtgaaacaaagagaacttcggcaacggcgccaaatttgatatagctcaaattgccttaagcttactccctcagataagagatcgtcgttagcacttaagggtcgaattccactgaactctcgatgttcgcaaaatagacctatgatgttttcaaacaagctagaccagtagattatataagaaacaaagaaaagcaataaatatcaagatgtaaatgagatgggaaaagagttaggtttagggtattctcaggagatagatgattagtagatctagtgatagctaggttgttaacgaaccgttcttaaactcaaactctaattatggaataacaggtggcgttcccgaaactccctatgtctatagctaagaatgaccggagaagccgaaagattattaatctaaacatgcattctaaacgagttcgattgttcacattagtagata

SEQ ID NO: 1851 - DNA, 353 bp, Arabidopsis thaliana
cttcctctttcccctttaacattttaaaagccttattctccggcgatgattcaatgcagtcacggcggttgatagcggatggcgtgctctcgaattcttaggattagacgacgacaaagacgccgtcgaattcgatgtaatctctcataactctgttttataacagttatagattctcgaatctgatcttgatccttatggctaccagacatggaaaatggatgtgatcatcactgatgactgtaagcctgggatgactggatacgagcgtctgaaatcaattcatcgttcagagatatcacgggcattttaagtgcccacatgctgagagaaatgctcttaaaaactgtaga

SEQ ID NO: 1852 - DNA, 764 bp, Arabidopsis thaliana
gtcgatcgacaccctcgggagaagaatgacgatgcgattgatgtcgaacgaaacaacataggtgtcgatcaacaccaacaccagattcctgcagctattccttcagctgcgaaaccacgtcgtactcttggggatttcaactggcctgacctgttctttgctaatcgatcagcgatcgtacccacacccttccagaggaacgactatgagctgaagcctggctactttgctttagttggccagcatcctttccatggcttatctcatgagcaggcaatggaccatatagagcgctttgaggaccttgttctgagcatcaaggctaatggagtctcagaggactacctactgtgcaagctttttccttattcacttgttggggaagcagcttcttggctgaaataacttaaagcaggttccctcaagacttggagaagcatcaagatagcctttttgaacaatttttacgatgatgctaagtatgaggagttgagaaacaagttgtctaccatcacacagggtccaactgaagcttttaaggctgcttgggttcgtttcaaggagtaccaacgagactgcccacatcatgtaacatgatatgtcctggtttttactgatttctaacatagttttagaatggtttttagagtctttgtagcctttttcgtatgttttgagtcattttaggtacacttacacatctgggaactatggagcacaataaggaattttggaagcttttcagcaacgaagatcttgaacga

SEQ ID NO: 1853 - DNA, 459 bp, Arabidopsis thaliana
tagtaacgtccgccagtgtgctctaaaggccggggctgaacgtcggttatctctcgtataacgtgcagaaaaaaccactcgatgacgtgaaagttcgccaggctctgacctacgcggtgaacaaagacgcgatcatcaaagcggtttatcagggcgcgggcgtatcagcgaaaaacctgatcccgccaaccatgtggggctataacgacgacgttcaggactacacctacgatcctgaaaaagcgaaacgcttgctgaaagaagcgggtctggaaaaaggtttctccatcgacctgtgggcgatgccggtacaacgtccgtataacccgaacgctcgccgcatgcggagatgattcaggcagactgggcgaaagtcggcgtgcaggccaaaattgtcacctacgaatggggtgagtactcaagcgtgcgaaagatggcgagcaccagacggtaatgatg

SEQ ID NO: 1854 - DNA, 592 bp, Arabidopsis thaliana columbia
ccagacgatctgcctcagatctataaacggagatcagtttggacgtcttctgaagatgctgtttcttcatcgaattcccccgagcagacgactcccttcacggttcgggaagacaccaatgccgatatcgctcgggaattggatttacccgacgatcccgagccgcatctcgttcggaggtcttctgctcctatggtcgatgaagctgggacatccaattggcaagatgcgtccgagcccctcatgccgacggttaagatcgaggactttctttacttcggcccgaatgagacagaggatatcttgcgtcttaacgagcagaaggctttcgagaaagctgagaagaagaagaggaaaaagaagaaaaaggcggtaatgccaaatcctcccggttcatcaatgtgtaccgagcaatctctctcggatcttaaggctcgatttggtcttggtgctgtaaccttgcgtgttccgagccctgaagagcgagccgacagtcctcctgcaggtttctatactctgtacgagggattcttctacggctgtctcttatggttgctgatcccgagattggtcctggaatatgtgacatcat

SEQ ID NO: 1855 - DNA, 547 bp, Arabidopsis thaliana
cgtaatctaaaatctaatgttgagtttttgctgttttcttcaatctctttactttttattttttcctcttgttgatgctaaccaaatgaatgaaaccatgatccctctgttacagtttttttgtattgtcctaatgtgtgaaatcaaactaattcagtatagaccccaattttatcctcatttgcccgcctctgctgtttttctcattagaaaaagctgagatgtatattatgactccagagaatgcttcaatacaagaccaacaactacttgacagacattgagggatcaaactcaaactaaaacagtcctaacgctttctgcgtttattcagaccaattatcttgacaagccactccggtttgtatgaagcaataacttgtgctattgccaatccaagcaataatccagatccataccctattgccactgctctcccgttcaacacttctgcttcttcttcttcttcttcttcttcttcttctttgtcttcttgcttttggtgatcatcggaggtgcacagtgccgaacaactttccttgagagg

SEQ ID NO: 1856 - DNA, 602 bp, Arabidopsis thaliana columbia
gcttttcctccttgctaaaagcgtacgtgtcattgtaccattggtgtatttgtatgtcggtcaagattggaaaacaaaagtcaaagaccggaacgaacctaatcggtggcaaccaccaggcacggtgaaggctttaccgctaaatccttcacgacaagtgcagcgatgaccgagtccaccgtcgtcgagcttaactttggcacagtctgcgttctccgagcaagtggtgttactgcaacttcccttaagccaccaatcaagcttgagtcgacccaaattgaccgaaacttgcgattgagaaatagaagagaaccaatacttacatccacttccgttcacaacgtcgcctaaactcatcacatcggcagttgtcgttgttgctccgtcgagacagctaaccggagatttacatttgctgagatttaaccggttttcaacgaatttattgcggattaagcaattagaagacttgttctgtttcttgcatccttggacgagaattatgttctgtaatttcgacggagcaagattttcccggaaaagttgttcgattttacggatgttgcgtttgcaaccggcgggattcgacgtagatgttggag

SEQ ID NO: 1857 - DNA, 533 bp, Arabidopsis thaliana
atcattgaaaaggtagagcatgaataattattaatgaggaaccagaaagaacgaaaaaaatatcacggtgaccgtgactcacccttaaaccaacaaatccaacaaatactagattggactcaattgatgaataattggatgggttgagaagttgctgatgagcaggatggtcttcactgccatcataagtggcaaaatctgatggaacatctgagtatgcaaatccgagacatcttaatgcactcaaggacatatcatgtaggctttgtaaaataagatcccttgagtattggtcaagctctcgagtggaaccatcaagtagctgaatatgggtactcctttccaatacattttctacggcaccctgcataatttcaaaattggtctcttaggtgctgaaaaagaggggacagtggttttctcgactaataacatgcaagaaccaaagcagaagtcacttgatttcccaggttcgacctcaggaggcagcatatgatcaacgataaaaaaaaacagaccttgaccagtagcag

SEQ ID NO: 1858 - DNA, 1378 bp, Arabidopsis thaliana
aaacttaaaagcatttcctgtgaacaatcgcccctccctgttcgtcatactcagctttagtaatccacatctgcatatagacatcgcaactttacattacaacacaccaaatacagatatctatacgcacgttatatttataatacagttaataatattatcatatgtaccggtgcaaagctgcttagagaagccagaatggagcctccaacccaaacactatatttcctttcgggaggagccacaacttttatcttcatactaggcggtgcaagcgcattgatctctttgttcatcctatctgcaatccccgggaatatcgtcgtgccaccactcaacacaatgtttccatacaaatccttccttatatccacatcacacttcatgatcgaattgtaagtcgtctcatgaataccagaagtttccatgccaatcaaagacgtctggaaaagaacctcagggcacctgaatctctcagctcctatcgtgatcacttgaccatccggaagctcgtaggttctatcgattgccgagctcgttgtagccttctccatttcttgctcgtagtcaacagctatgtaacaaagcttctctttgatgtctcggactatctcacgctcggcggatgtggtgtatgtgtagccacgttccatcatgattttcgtcagatactcggttaggtcacggcctgctagatctagacgcaagatcgcatgcgggagtgcataaccttcgtagattggaactgtgtggctcacaccatctcctgaatccaacacaatacctaaccacgcagaaatttaacagatttaggaccattgttattaccaaaaaaaaaaatcacatttcaagattttcataaaaatcacatttatataaaaaaatatatatatttaaagattttgcatgtgaacgatattacatacctgtggtacgaccactggaatagagagagagaacggcctgaataccaatatacatactaggaaaagcaaatgactcaaacatgatctgagtcatcttttcacgattgacctttgggttaagaggagcttcagtgagaagaatagggtgttcttcaggttccaaacgcagctcattgtaaaaagtatggtgccaaatcttctccatgtcatcccaattgctaacaacaccgtgttcgattgggtatttaagtgaaagaatacctctcctggcttgagcttcgtctcccacaaaggtatccttctcatccattcctaccatcactcccctgtgtcgtggacgacccacaacgcttggaaacacagctcttggtgcatcgtctccagcgaatcccgccttcaaaatgttttaccaatcattaggatttaggtctacaatatacattgattggttg

SEQ ID NO: 1859 - DNA, 490 bp, Arabidopsis thaliana columbia
  unsure (1)..(490): unsure at all n locations
nnnnnnnnnnnnnnnnnnnnctaaagctccatttcgccgcgaacattctcggcggtgggcacttccagtacacctggcttctccacccgcagatagccgttcattatgttcggccctttcagttgcaggcgtccgccgtcttcgataccagggaccgacaacaggcgcgcatccattcctggtagaatacgccctaccgtaccggggtttcgccgccatcggtacgttgatagaaacgacaggcgcgcattcggtcacaccgtagccttcaaggatgcgcaggcgaaatttatcctgccaaagctgtttggtactttcttgtaatttttcgtgcgcctgccaccacatagcgtagacgatagaagtcatacgggttggcgaaacgcgcgtagtgaccgaggaaagtcgaggtgccgaacaacacgtgtgcaactgcggtcatacaccaactccggcacaatgcggtaatgcagcgggcttggataaagga

SEQ ID NO: 1860 - DNA, 579 bp, Arabidopsis thaliana columbia
ccagtgtgctctaaagggtcaatttcggccagttctgggcgattaatgcttcttccatctcccctttgacgcggttatagaaaaacggcgagtgggcattggcacccatcgcactgactaccaacatatgctgcgcgcccagtcgccgcccggttaatgcggtatccactaccagcgtgtaatcggcatgaataaacgcctctttgctccccgcttctcgccgcgtggtgccgagacaacaaaacacaatgtcgatgggatcggtgacctgcgccaacgcgtcactcagttgcggatcatggggattaaacaccccgggcatatcgcccaacggacgtcgcgtcggcgcagcaatggcgttaactttcggttcgttaatcaacatccgcagcaggtgaccgcccaccagccccgttgcgcctgtaatcagtacctgactcatcttcgctcctttacagaattgtctgccttgcgctccacggctcatgcaccaggcttaatagaccatgaggtaattacgcccgattgtgggaaattcgctcatccaatgcaacaacgcggaggaagcatgagtaagaa

SEQ ID NO: 1861 - DNA, 598 bp, Arabidopsis thaliana columbia
  unsure (1)..(598): unsure at all n locations
nnnnnnnnnnnnnnnnnnnnntaaaggggttttttgttatctgactacagaataactgggctttagngcctgtttttatgtcttgggggtgggcttgtccacattagagcaaaaattaacagagatgattactgcgccagttgaggccctgggttttgaactggttggcatcgaatttattcgcggtcgcacatccacactgcgcatctatattgatagtgaagatggcatcaatgttgatgattgtgctgatgtgagccaccaggtaagtgctgtgctggatgttgaagatcccatcaccgttgcttataacctggaagtctcctcaccgggtctcgatcgcccactgttcacggctgaacactacgcccgttttgtcggagaagaggtgactctggttctccgtatggcggtacaaaaccgtcgtaaatggcagggcgttatcaaagcggtagacggtgaaatgatcacagttaccgtcgaaggtaaagatgaagtgttccgctgagtaatatcagaaggcgacctggttcccacttttaatagtctggatgaggtgaaaacccgcgatgaacaaagaaattttggctgtagttga

SEQ ID NO: 1862 - DNA, 884 bp, Arabidopsis thaliana
tagtgttaaaaagttcaacttgatagtaagatgtggattcagttatctgcctgataaggttattagatttgctagcacaggaaatactaacactgtcatggattcaatcaagttcatagtttctttggatgtcatatatgaataataggttgcagattcccattcctagagttaagtgtcaaccttagattaagctgtatggatttcagttatctggctaggagcttatatctgttttacctcaagaaatacttgcaattttatgaatactctcgagtgttgtagactcgtagtttatttgtctggacgttgtatgttcttttggaagctgactgatcaattgtttttggtgttcatcactaatctggatagtcaaaaattgagcttattctttgctccgaagacacttttttttaaaaaaatcatatctggatctcaaaataagagaaaactttggcagatgaaacaatcagattcttactatcgtttcttatttattatttcagggacacctgcacacttacaggttctgtgacaatgtctggaccttcatattacaggacgcaatgttcaagagtgacgatcgtcaagagaatgtgagccgggtgaagatagtggcatgtgattccaagctgctcacacagtgagatgcaaattgtctgcagggaatttactttcctttgtactagattttgagttttttcactttgtaaactcagcacttgctatatatgttgagcacttgctatatgttgagctccatctgcagccatcaatttagcctatatgcaaattctcggcccaaggacataaggatacattctggtgctatgagaaagttcttgagcttcatcttgagttgtgtctattaagtcgagattgcc

SEQ ID NO: 1863 - DNA, 797 bp, Arabidopsis thaliana
caatctgcatctttctgaccatcccagggatcaaaccaggaggaaagagaggataaggaggcggcttctcaccagcaggtggttgggttggtggtggaacagaagcgttaagcgttatggaaccgggaaaggcaccaggaggcatcacattttgggataaattgttgggttgcgaccggattagtcagatgctctaaattcattgtgctagagacattactgtttggtggctgttgcagcattcctgtaagttcataaagataaaaagttgttggtatattgtcaagtctaaaccgaattcttcttatacataggtggagttatagtttctgtctttctcacggaagagcaggagtacctggacgttgtaaggcatgtgctgctataatgggagaatgagaaaaggtatttgcaggtggtccacttttcatctctttctcaagagaggagatggtgtcttgatcaaaaacctccttagaagcccaaaactgcaaaatcttctccaaacgtgactggttttcttccttgttttgtggaaagtggtaaatcctccccagcatggaacccaaaataggtctgaaagcaagagcttcattgtcaaactcgtgcaagtttgtccttcgttgtaaactgtatttaaggaagcaataaacatgagaaaatattagggcagaagaatctaatgttgcaacccaaaattttgaaagcacagactgagactcctaataatatagaatgaacgaaaaactagtctatgccgaagtcctctagaatgatgtaaagagcgatcagggatg

SEQ ID NO: 1864 - DNA, 557 bp, Arabidopsis thaliana columbia
taaaaccccttgaggaacaaagaagacgtttgggtgaaattaaaagcgcgacgacgaggacaatgccgagcaagcttaaaaaagcgattggtgcggttaaagatcagacaagcattagcctcgccaaagttgctaacggagccaccggaggcggcgattctcacgactctcgaagttgcgatcttgaaagctacgagccacgacgaggaagtcccaatcgacgatcgactcgtaacagaaatcctcggaatcatatcctccaagaaatctcacgccgcctcttgcgccgccgcgatcggtcgccgtatcgggcgtacacggaattggatcgtcgcgctcaaatccctagtcctcgtcctcaggattttccaagacggtgatccttatttccctcgcgaagtcctccacgccatgaaacgtggcgccaaaatcctcaatctctccagcttccgcgacgattcgaactcgtgcccttgggatttcactgctttcgtccgtacattcgcgctttacctcgacgaacgtctcgattgcttcctcacggaaaattacagaga

SEQ ID NO: 1865 - DNA, 630 bp, Arabidopsis thaliana columbia
cggagaaaaactttttaagatttcattagtgggtgattttccttaaaaaagagaagaaaaaaaagatacctggcaaaagtcgttcaagacaaaatctgggacataatcgagtctcttagaagaaaccatcccagagaatctcctaagatctgttgcagaagcaggaagcatcacctccttgatacggtggcacttagccctagcgataaacgcctcgttgtcactcctccgcaaattaacaccggagctcgcaagcaccaccttctccactttctccggaaacattttcgccatattatacgccacaaacccgccgtagctcgtcccaacgacactgaatctctcgacctcgagcttctccataagcttccccatgcacaacgcttgaaacatctccgaccggttctcaccggaggaagaggagccgccgaagaagactaggtcggggacgtagagacgaaagaagtgagagagtggcttgacctgatggctccattgccatacagcggaaggtccaaaaccatggaggaggaggagcgacggtttttgtgtattttctgatgatgaagacggtggtggtcccagaactgtatggtggtttcggagtcgatggatagggtttgtaggaga

SEQ ID NO: 1866 - DNA, 616 bp, Arabidopsis thaliana
  unsure (1)..(616): unsure at all n locations
ctnnnnnnnnnnnnnnnnnnnnnnnttaaagtaagccttcttcggaatcttttgtgtttgaaaagatgcctttctgattgtaaatgcgcatcagtttttgaccgaagctattgtgcacaactccatcgccaagaattgtggctccgtatagagttccatcgtcagttaaggcctgcgccgcattgcgtattacacagctttttgtagatatatttccaggcaggcagtgaagaaggtaagacatggaaatggaatcaaattgaccatgtaacgccgcgggataaggttcaaaaacatcatggctaattttatgtttaatttttgattcccagcccttgtagatgccgcgttcaggctagcttcgttcaaatccattaaagatatcagactactctcaggtacgtgagtaaggtaaaacccagttccaacaccaatatccagatggttgttacctaaatgtccagaaagtgtggaagaaggtgtcctttgtaggcaccccatgcagccgatttgatcacccataaccaccagtcataaagctttagggtaagtggtgtgtaattctagcccatcatctgtgttgtttantaatttcaccatgtatagttttattgtg

SEQ ID NO: 1867 - DNA, 491 bp, Arabidopsis thaliana
aaataacatcagtgccatcttgaatgagtatgtggatctaatagcatggttgaatcactaatgatacatttcctctgttgtccttcaccttctcgtctatgaaagcttgatttactatactctttacttattattactgcagcatgaaggagatgcctgggatcatcagccggatgccgcctctgcctgtctcaattaacaatgatcttgcaagcagtttagtgacaagtgccacacaggtaagcaatcttgcattttctctgaacgtggatattcctgaatatgtaagggattaaaaacctcaaatgcttcccttaccaaatttgcctctgtttcatgaaaaaatgtctaatcgcttcaaatcataggacttccataacccctaaaaatcggcttctagtattttagggaactatgatcttgtacaagaacattgctttaaatctggtgaatgatggaaacacaatgtttgatggtaaaatataattttt

SEQ ID NO: 1868 - DNA, 723 bp, Arabidopsis thaliana
tggaaagggtgcaggtaaaaaacacattatagtgggtcaacaaatttaagaaaatgttctcttgtggttcattttcagtgacatagttttcttgtttagtgacatcgttggagagaaatgggcagattctcctctgtctatgcttccaatctacaaagaactcatcgccgcaggtctcaggatatgggttttcaggtatatctacttctccttttgatcatcatcttgtacatcccggtttggtatcatgattgatatcttgttctgtaaatttggatgcagcggagacactgattcagtggttcccattactggaacacgatactccattagagccctcaagttacaaccactctccaaatggtacccttggaacgatgatggacaggtagaaaaaaacaactcaatactcagtttcctcagtctcatttctttcttctgtggaaactaatgcatgagtactgaaagaacaggttggtggatggagccaagtttacaaagggctgactctggtgacaatacatggagcaggacatgaggtacctcttttccgccctcgtcgagcttttcttctttttcagtcgtttctcgacaacaagccattgccaatgtaaattgtaagacactgtgataagaccagagttttttataataagaagtaagaatctctttttcacattctcagctatcagtttattcgcactaatgacacaaaaccttgag

SEQ ID NO: 1869 - DNA, 549 bp, Arabidopsis thaliana
gagtaacgtacaatcttcattctgtcaaattgttcctgatactctttttcagtagctgctcggagcttgaaatggattcctaatggtgttgacacaggtttagcctgatccatctgactagatctcaaaactttcttcacataaccttcctgtgacagagtcaacacacctgcagctctatctctagcaatctccatgcctaaaattttctgagcttcacctaaatccttcatctcaaactctttacccagtaactgttttaactccatgatacttgacttttctttagcagctatcaacatgtcatctacgtataggagtagatacacatatgacttatcactttgctgcttcaagtatacacagctgtcataagcgctcctagtgaaatcaatactctttataaactcatcaaatctcagattccactgtctaggagattgctttagaccatatagggatcttttcagtaaacataccttttcagggtatttcttatcttcaaaaccttcaggttgagccatcaatatctcttcatcaagaaatcca

SEQ ID NO: 1870 - DNA, 519 bp, Arabidopsis thaliana
  unsure (1)..(519): unsure at all n locations
nnnnnnnnnnnnnnnnnnnnnnnnnnnctaaagtgatgctgctgttcgttccctcgaccagtcggcggttcttccagttgcaataatgtgtataatcgtcgcccctgatgatgtgaaggtcaatgtatgcagtgcgcactttacgacgcgggtcgctgtcgttcctgtcagtggataatgcagccgattccagagcaactctccgctaaaaccgccgatcttaaaaatctgctcgccgactttccggttgaggaatggtgcgcgccggtgtcaggcccggaacaagggtttcgtaataaagccaaaatggtggtgagtggtagcgttgaaaaaccactgctcggtatgctgcatcgcgatggcacaccagaagacctttgtgactgcccgctttatcctgcctcatttgcgcccgtttttgcggcgctaaaaccgtttatcgccgagcggggttaacgcctacaacgtggcgcgtaacgtggcgaactgaaatacaatctgctgactgaaaccagagtg

SEQ ID NO: 1871 - DNA, 545 bp, Arabidopsis thaliana
aatataatacatgattttactacgattaattttttttaatcgcaatgttttgtttttgcctaattttattagtggaagaaattttaaccgcagcctgtaatttaggaaactaactattcacccccaattaaaaaaaaaaacaagaagacgacaaataacgagaaattaccaatttttcctcaacactttcattatttcctacaacgaacttctccctcctcctctcactttcaccatggattccgtctccggttacgccgccggagcaggtcagcctcgagtcggtgggaaaattgttcgaccacgacgcaccgctgttgtcaggacgccgtgtgagcgccccgttcagagatcccgagatcctcctcagcaaaaccctagttggatctccaggctcgtttacaaacccgccagcgtaattgcttccggcgccggaaaattcatttcttccggcgtcttctccgactcttcctcatcttcggaggaggacgaggattcatctcagggttggaccatttatttcagtttagataggattaatttga

SEQ ID NO: 1872 - DNA, 602 bp, Arabidopsis thaliana columbia
cattcaatttcagctagcttgtgaaaaaggcgaagaaatggatagagaacctgagcgagttttgctttgtcgacctcattatcaccgggaacggaagacggagaagtcggatatgaaaatgccaccgtggatggtgtgaaactaggtttagatcctccgatttggaaaccgtagacggacagagacggtggcgattgatatgaggagatggtggttttcttcttcggagctaagagaagtggattaaacaatggcagggagcgagtagagaggctttggtggttaaatgagtgctggaaacctggccgtagcgcgacggcggatacgcggaggaactcgccggcgcaagagtagtgattgcatattttttagtggagagtttattttaagagtaaagtagcgaattggtgttcttttaaggcttcgtctattcttcacagttgcaatgggctttttgcttttgctacctaacggcccattgagaatattttgttttcttcattctttgtttttttggccaacagaatatctttttctttagcataatttttacaatgttttacggagtttctaccataaaatagacaatgttatatataaag

SEQ ID NO: 1873 - DNA, 472 bp, Arabidopsis thaliana
catcgctcttgtatctctgtctctgtttgcttctgtccctatctttatctgactgatatcctacgggactagtctctacacttctcttcttgtctgattctttgtgctgatgatgtctactctcagttgaatcttcctcgtgtgaatatcttgagctacttctttcatgtcgatgcttcgatctttctctatgcgacttgtcagaaactgtatgaaccctatcatgttcatgaccctcctctttatcagctgatgacccttccctgctgtgttttcttgaactcctgtgggtttttctgtccttttcattgtccatctgttcttgtactcctgaatctgtccctcttctgggttttcgtttgtgacccgtccctctcctaccatagtcatctccatcagcagaatcatcatcagaatacctcccatggattctcttccttcccacccgatgtccaggagagtgttcagacca

SEQ ID NO: 1874 - DNA, 471 bp, Arabidopsis thaliana
cccctgttaaaaggaagagactttgagtaactaactaacctgaaggagacgccatggtgaattaggccaacgaattggatcagcgacttgaacggcggagacagtacccataaaccaactgattctagaagaatcctctgtttcaaacgccattttaaaacgcataccactacaccatcttatcctcattgctgatctaacatcagctgcttttacgcaaaactccggtgtactagcgcgtggataataaacaacctcaaacgcttgtccacacgctgcacgcgccaccgcttccgctactgcttctactctaaccctccctgtagccgcggcgtttccgtcgttgtttccgttgcgtttcatcatcattagcttcgatgttgttgttgttgactcgtcgtcacggaggaaaccggagaatccagggtaaggattgtcggatcctgcgttagatccgagaccgccgcgttt

SEQ ID NO: 1875 - DNA, 641 bp, Arabidopsis thaliana
tggttcctattaatgatttcttgcttgaggagaacatatacatgactgatagagctaaggaaaataactgcgaacttgttgtgttgcataatcaagcttcagtgtcgatcaacactcactttgctgaatgggatgataattgatgtggctcgatggtgtcgatcaacaccctcatgatcaaacaagaaattggttaccgactgagaactgcgccgctacagcggtcgagaaggacttcccaggatatgctgacatagtcaattacctagctacagatgtggaaccagataatttcacagattacaacaagaagagatttctgcgagagattagatgataccattgggatgaaccatacctttataagcattgttctgatggagtttataggagatgtattgctgcaacagaggtacatgatatactatcacattgtcacagctccaactatggtggtcattttgttactttcaaaacaatctctaaggtccttcaagcaggtttctggtggcctacaatgtttggggatgctcacaaattcatattaaagtttgattcttgtcaaagaaggggaaagttaagcaagcataataagatgcctcagaaatttatcgtcgaagttgaagtttttgattgttggg

SEQ ID NO: 1876 - DNA, 669 bp, Arabidopsis thaliana columbia
ataaatgttttttttttgtcaaacaacttttattcacttaaaacatcaaaagatgaaagttcatacaacttggaactatgaaaatataaagcaagaaaagatagaggctcatgagttttccaaggaaattgaaaaatctgttcaaaccatagcggattcgaccatgaagacgggcttcgcgaaatcctcgaccaacaagtggtcaaaagtggctcgtgcggataacacataggagttcttagaaacgttctccacataggaggttattagataaggaaggttgcagaagctttggtaaccacctatctttgagacggggtcaaaatgtcgttctccttcaaactcttaaaacttttcaaaatagccatgaatgtgctgaaacctcttaaggagaataccataagaaataatgcccggatgatccaccaatcgtatatgaaagataacatttgcttaagctctggattcaaaggcaacgaatataacaagtagcggatgtttcggtaatcaccgcttcgtaaagacgggatcataatgccgaattccttcaagttttaagtttcataagcattggttccattactcaaatcccttagttgtaactagaggaagggttctaaaagatttttatccccactagtaacaaatgtgcgttatgtccgaattgat

SEQ ID NO: 1877 - DNA, 753 bp, Arabidopsis thaliana
  unsure (1)..(753): unsure at all n locations
ttacaccatctccgaaaaccccggaagagataatcttcgaagatatcaccggatacaaaaatcccagaatcttcggaagataaagacaaagaggaattttccgagaatatcgcaagggatgatattctcggaccctataaaaaagcaccttagagaacaaacaaagggacgcacaaaagggctctcaacttgaggctatcaagaacgctctgactttgaaggcaaaaaacacctatttctcatattttatcacacttgtatgataaaatcattactttctcattaataaaatcaagaacaccgtccacggtaattgagaattctgttgttctttgagaatctcacaaagatccgttctttgaagaaacccttaaaacaaattctattgtgcgaatttcgactctcacaatttggcgctagaaggagggggtagagatttctctaacacccggaacacggaaccaatcacccaattcacaatggtcaacaatcaagtctccagtagcgtagttgatacagaggggacccaatccctccaatccagacagatgctcctgaagccgncctcccgcgaccctagcagaactgaggagtatgatggctcaacttcaacagaaggtaaacgatcaagaacaagcaaatcggtccttagcacagcaactcgaagcagcaacctctcaaggacaaatcaggactacccgtttcggcgcgaggcacattcacgatcgacgggcggcagcggatctcaatccc

SEQ ID NO: 1878 - DNA, 908 bp, Arabidopsis thaliana
tttgctaattacacgacggttacgctttatataaatacctttttgtaatatgatttatttagtttactatcgaccaaatcatctaatttcgaccaggtagtttctacgtaccatttgagcattttgatggtgcattgggccatttttgagtcaagcgtctgtaatataacgcctccgcatctgagactaacgcccacagtaacaatcttacgactgcccacagccaatcctaccttcgtcttagctgtcactgtcaccaacagcttcttactcttcagctctacctgtagcctctttgccgtcggatcatccacctgtcgtttcctcaccgtcgtcgggacaatcacagccgtccgattccctggcttctcaataaagcctttgactttcgttgactctaggttggtctcaaagtctttctctccgagaatcacagccacgtcagtatctccgtaataaaacgttagctttccgttagggtttctaaaatcgagcaccgacgttgtatccgccgacaaaaaagaccatccgtcgtcggattttccgtcggaaaagttgaagttgctgattttgaacgaggctaggcggacgacgggtagtttcgggctgtaccaaaggaagaaaacagcgacggcgatgaggatgaggaggagaatcacggcgaataagatacaaacgcagcagcagaaaacgcggcagaaactacaccgccttttcttatcggccggatggataggcctcggacggcgacgtggaagcgttgccgtcccagaaggcggagctgatggttgattctgttgatcacggaaaccaggtggtttttggagtgccggttgtaacggtttctcggccgccatttcttcatcgccggcgatggttggccgcttttgatccatgtttagcctaac

SEQ ID NO: 1879 - DNA, 625 bp, Arabidopsis thaliana
tgaaacggttaagggccgcaactcttcctgttaggcgctgcacttctcgcttgttctgaggtgatgtcattcccaacaatgcctcgatttgcttcggattcacctcgatgccgtggtgcgtgactagatacccgaggaactctccggatcttaccccgaagcggcacttagctggattgagtttgacgttgtagaggttaagctgctggaaacattcgcgcaaatgggatatgtgttcttcctctgccatggatttcactaacatgtcgtcgatgtaaacttccattgtcttcccgatttgtaatgcgaagattttgttgacgaatcgttgataagtcgccccagcgttttttgagtccgaatggcatcactcggtaacagaagatgcctagttttgtgtcgaatgcgtttttttcttaatcctcggggttcatcatgatatggttgtaaccagggaaagcgtccatgaatgacaacaacttgttttcagaagttgattctacgaggcgatcgatgtgcggtaatgggaaactgtcttttgggcaggctttgttatggtcggtgaaatctacgcagactttccatttgccgtttttcttttatactacgactgggttcgcgagcc

SEQ ID NO: 1880 - DNA, 524 bp, Arabidopsis thaliana columbia
cccttcaaagtgctctaaatgtgcttaaaaacttggaaagttccccaacatagaagaaacccttaaaactatatgtctgacctaaaaacgtgatgggccttcattagaaataagggaaagttctgggccgaatttggaaatcttcaaacatcaataagttgcgtcttcgaattgccgtcaagtaattgtgtcgctcgacaccagggatggtgttgtttgacacctacgctgtttttagtcgtcggattttctttagcagcataagttctctgttttcctctagaatgctccattatctccaaatgaatcccaaacatgtaaagacctgaaaagactagaaaagactctagaaataacaaatagactctaaaacatggttaaaatagggatatatcaactcccccagacttagcttttgcttgccctcaagcaaaatacaaaagccgaacccgtggaagaggtttgaaaacaaaagaactcccaacattctctagcctattgccttgatcattctaaccaaaccc

SEQ ID NO: 1881 - DNA, 475 bp, Arabidopsis thaliana
gtagtaacggtcgccagtgtgctctaaagttcctgcttatattataaagcctaagtattttatcttcttatattttaatttatatttcttaatatttaagtataggcctgctatttctgatttatttaaaattatttatatatatttctagtactagtcaaggttcttattagcataaataagtatattattaagatatatagagtagaatttatctaaatatttctagaaggtccagttaatatatttttagaaaatacttagtatattagctaacttaaaaagagtaactagctatttaaaaaatttatattttatatagaaagtaattatttattcctagtctttagctatatagattttatagaggataataaatatatttagcttagtaaactatctagcttgtctaatttagtttagtatcttataaattaggggtaatagatagtagttctttttaataataatattt

SEQ ID NO: 1882 - DNA, 634 bp, Arabidopsis thaliana columbia
agattcgtatttctcgtctttggacaatattatcgatttcggacaggattggttgtggtcgtagctttgaataattgatttggtgaatgtaatgtctctctcttaatggcagtaattatagatggtcagtttaatttaagggttattagttattacttattagtatagtaaaaattatttttgccgatggataaaaattggcttataggactaaagttacatgattttggcctttttcattgtttttcagcagggtttatgaattatgatttccctatgaagttggattgtactttatgacaattaataaagaaaggattttatataaggtttatttgtgagttaaagttgttaattcttatgattaaattgatagaaagacatttcaaatgtcacattagtatgattgacttatgaaaacgctttgtaaaagtgatgcaattattaggatgaacagattaaaaagtggaaaactcttccatctttcaaattttcaagcagtgtaaaaattaattccagtcaaaagaatataattctttcatttacaactttttgtctaagaaaagaacatatcgtcattatgggccatgagcccagataaaaactatcaagcccagcttcgagaagagactct

SEQ ID NO: 1883 - DNA, 725 bp, Arabidopsis thaliana
ccttatgcattttgcgtggcaatgtatcacggggtgtctagccacttgtcaaagacttgtctaccgacatattggcacagataaaggatgtcctcgttgcggacgggaagaggagactattaatcacatcctttttcattgtccgcattccagacagatttgggcattgtcacctattcccacttcagggcacctcttccctaggagctccctcttctataattttgattttctcttctggcggggcaaggaattcggaataggagaggatgttcttgaactctttccatggatactttggtatatatggaaaagtcgtaatcgatttttgttcgagaattttaaagaacctcctttggagactttggccttggtgatcaaagaggcaattgcctgaaaacaagcaaaccaaaaagaagtagccatcacagagtctatttcacttccggttctggcacatctccctccccctaggacttctgagtgtcagtttgatgcttcttggcatttggaggatactctgagtggacatggatggattttagttgatcaagatattactcttcatcttggcctcaaaagtacgaaaagaagtctatcaccgcttcatgcggaagtggactccttgctttgggctatgaagtgcatgatatcaattggcgagacctctggagcctttgcatctgattgctccgatttgatatctcttctcgataaccaagaag

SEQ ID NO: 1884 - DNA, 1095 bp, Arabidopsis thaliana
cgcttgctctaatagcagagagtctttcttctttcctattttatctactcgattatttttaatttgcggtttttttacttgtattgagatgtgtgggttttgattatagggaggtgggcacacagcagagagtaaaccagaggaagcctctatcatgtttcaaaggtggatcaatggccaacctctctaaaagaggggaggacctgcctttacgtataacggacaagaaaatatgattctagtaacacatccaaatatatatgagaacccttggccctataaatgaatagaatttaaactcataatttgtaagcaacatgtgtgttgcttttcaacaagcttggtgtacagttgcatttcaccttctttttttttcaacaagcttgttttctatttgtttgaagcaaaagttaatttacatgtataaataagttaatttaaagttatatatattattatcactaaaatgtttaaactaaaagatcatttgtggaagctcccttgggccaatggttgaccaaaggttcattaatgcttctacagcaagacgtctggggttcgagtcccaactactgcgatttattagtagatttgcaaattaatggaggcaagtgtgcaggagatctacaacgatgtacaattatggatctaataagaaaaaaaaaaactaaaagatcattcagtagtatacttgattggatcaaggttgcgagattttaatatttttatccatgaaaaaatgtgacaacgttggtgaagaagccaaaactaaaagataagagtttggtaggcgacttttttgggttttagtataaagatgcagtaattgttttccgtaaagacattgctaaccagaatctgaaacagggaatggcaaacaactacgtttcctctgttctgaagtcgctgcttctgcttcttcatcttgtcttcttgattctgcttctatcgtcaattttcttcctggtttccctttgcgctcgaaactgggtttgtttcaatctctttgtgtgattaatctgtgtcctgtgttggagatatctaaaagcataggatattgttctctgtgatgaaggatattgggctatgaggaga

SEQ ID NO: 1885 - DNA, 532 bp, Arabidopsis thaliana
taatgagttgaaaattttgactcaaatgagttaatgagtcaaatgagttgatgagtcaattggtttgatgagtaaaatgagttgggttgtaatggttaatggtttcaatggtttacccaattaacccatcaagttttgtaaaattcaattaaaccaactaaaatctctaaaccaatgtcaatttaagtttaaccaacacatctaaaccaatttaataaaattaatatttttccaaatttcttaaatatacaagcgatgaaattgagaaacagtaaactcgtaatttttccaccagaaaacataaacccgtgattttcccgccaaaaacgtaaacccgtgattttcccgccaaaaacgtaaacccgagattttcccgccaaaaacgtaaatccataaatttcccgccaaaaacttaaacccgtaattgtcccgccaaaaatgtaaacccgtgattttccgccaaaaacgtaaatccgtgagtttccgccaagaacgtaacccgagatttcccgccaaaacggtacccgtagtt

SEQ ID NO: 1886 - DNA, 894 bp, Arabidopsis thaliana
catcgaaacacttctcaatatctgggtcattcaggtttctcaacttcttctactccagaatttatcagcactgtaaatcacttgaatccatctgtttttctaacccatgacgtgcaatactcgactttcagcaagtatatgcatacttccgagggagtggcaaagctgcagagatgaagcgtgaagctacaaaatcgaccttgatgcgtgcactatgaagaaatcactcttcaccagaaaagtatcagtggctgcttgaggttaaaatcttgaatcatacacaaaatatttgacacaaccctttcctctgcaaagtctaggctgccaactctcttttgtttgaattactttgtaatggagacctcaaggaaactttgtgtggtttaaagttgtcaacaccatttcttcatgtatactagagcaaggtccttagagggatacgaatctttatagctttctagtgagcatcaatccagctctgtccaacagtctttgctacccctcgtctaaccattaacttacgaatattgagtgcatcaccatggcgacctatcgccttgtacatgttactgagaagcacataactcatgtggtactttggttccaactccatcattctctttgcaatccgctctgcaactctggaggcatctgcatttgcagcacaaggtccaagcagaactccccacagagacgcatcatttctacactctgctctctccaacagattctccgcttcttcaaacaaacctgcacgtcctagaaggtcaatcatgcaactgtaatgctcagtacctggtttaatcccgtaactcttagccatcaacacaaagtaattccgtccctcgtcaaccattcccgtatgaccacatgcagtaagaatcgcaataaaac

SEQ ID NO: 1887 - DNA, 622 bp, Arabidopsis thaliana
atcttggctcaggtaggctatcattggaaaaaactttgtaggcaatgggctttgacccgtttaattttgatgaaagaaactcaagcaatgatgatcttttcacagatcggagcagatgtcccagcagaaacctttgaggtttcgcctgttgacaaaatttgtgtccggatgggtgcaaaagatcatatcatggcaggacaaagcacgtttttaacagaactttcagaaactgcggtaatgttggtaagtaatgttcattctgtttgtcaaattgattacatgaagctttctaagataaatgtgaaacttgccacagtggttacccttttgagagttggtcacaggctttgttaaactatgcgaatgccaacaaacgcactgatagaatgttttatattaataatatgcagacatcagccacccgaaactcgctggtggtgctagatgagcttggacgaggaacagccacatcagatgggcaagccattgcgtatgttgaatcaattattgcgtatcatgttttttgggacttactgttattgttcactttatctaaaatatcttaactatttacagggaatccgtacttgagcacttcatagaaaaggtgcagtgtagagga

SEQ ID NO: 1888 - DNA, 827 bp, Arabidopsis thaliana
tgagacaagatttagaggttatcttctcacctattttttttttcttacctttttctttttggttttaaaggttatttcttgctagggagaaacttttttttttttttttgtattttgtgtgtgaaaatttggaacagtattgatttaaaccataaattccaatttacaaaattaaacccttctatgttaagataatatataaatagagtgggtgtgcgtatgtaaacgaaatgccttacgtgaaatgcaaactttggaaggaggtgagagtgaagggtgaggttacggagacgaaagagaagaggacggtgaagggccacatgaagtaggtgaggtaccatggggatctagaccacaagggacgagatgagagggacgggaagccaaggcgcatttggtagatggagtcgagtgtagtgaggtgagtgaggttgatgacgtcgggtgattcctcctctctctccaacgacttctcgtacaaggactcgctgcatttgtcggtcgtcccgtagatatggtcgtagattggaatgaacaaagagtagttggttctaaattgcgtgtgatggagcgagtggaaccttcaacatattttgatgccacgttatgttttatatatgtgagttcaaatcttaacaatgtaggtatatatagtgtagacgtacgagggggtgtagcagaggaacttgaggagagggaatgatgaaagagacgcttagggaaaaactcgaagttgtagtgcccatatagtcatgaagcaatgtaagtacgtatgcacgaagggacaatggagaggattacatagggcaccgttctatgggtatgcg

SEQ ID NO: 1889 - DNA, 697 bp, Arabidopsis thaliana
attcaatgtacttccttcttgccaatgtttttgtattgagctacacaaattccccgcgcattttcggaaacaaatcttccatctttgacactgaagaaatgagattctggaaaacaaattgttaaacaaaggtcaaaatcttcacactaaccattcaactctatcccttaaccgttacattttcaatctccggctgcccaatacggaagaggagctcgaataacaatagaatcacccgtaaccggatgatctaacgataaacactcagcgtgaagctcatgcccctcaaatgttcttccattccactcatacactccatgatacttaacatctcctctaataggaatcccaagatactgacaatgtaacctaatctgatgcgtcctcccacttcgcggaaacgcctaaccacaacaacaacatcatcatcatctccaccacaactcaattccctctccccctcagcaacaatcacatgattcacatcttccagttcacaagattcgtttttcacactgtttacagatacaacttcaaacgttgtctccatatctctaacaaaagatccaccaggtagaactctaccaacgtctaacgcagcgtaaacccgccaagctccgtgtttcgacgtccatgacctgaactaactgtgacctcctccaatttggagatgaacaatacaaagagcaatgtatga

SEQ ID NO: 1890 - DNA, 582 bp, Arabidopsis thaliana
ctcctatacaaataagctacaacaagaatccccaaaactatgaaagctattaaaccaagcagaacactgagcacaggagatgtagacttctttttagtgctagagtgaggaactttgggaagttttgagatgtcaatgttcggcagagacgccatgcttttgctgaaactccacccgagtatgtactggtaactcatgcttgatccggttgagccagataacccaacaaacattcttctaccttgcaaaatatcagttagattgatggatgttgatgacaaaagaggtcggcttggtttcttgtttctaagaggagccaatgaaacgttgagcgttgttccttcatagtccacccaaacctggataggatcaccactcaagagttttatgtcaatcttcttcccttctttgtctgaaaaataagaagcattggcagatgtaatagactctgcgctggtcacatcaatcccaacatgattatcgctgatgtctttcacatctgaagctagagaagtgtcaagctctacagccaacacacgtgtggaagtagaaccatgtctgttgaaaacccgaagtatcgag

SEQ ID NO: 1891 - DNA, 602 bp, Arabidopsis thaliana
ccatcacagaatgatcattaaaccgaaaatatatcagctgaaacagtctagtcacttcgggttgtagcgttacctgcggtagtgtgaatgggcgattttcccgtgagtagttcgagtagaacaacaccgaagctgtaaacatctgacaattgagaagacttccttgtgtcggttacttctggtgcacggtaaccagcttgcctcgatatcggtggagccaagggactcattacagcagttaatccaagatcagagacacagccattactctcggaattcaagaatatattcgaagatttgatgttcccatggacgagttttccattgttttctttgtggatacgagcaatccctttagctgcgccaatagctattttcattcttgtttcccagtctagaggaatcctgttttctcctctgttacctgaaaaccaaaacatttcaactctacaatgagcctaaagcaaatgggtttgattctgatagtagttatgatgcattagatcaaaaagtgaaacgtaccatgaagcaaagaagccacacttcctcggctgaaatagtcataaaccattagcttctcgtctttagagtaatagtatgct

SEQ ID NO: 1892 - DNA, 1185 bp, Arabidopsis thaliana
tgagtgagaaagacaagaaaacgtagaaatgatgaaacgctaaaaagtcatgttaagcgttgttgtactaacagacggatttctggtgcagtgtaacgctccggctgaagaagtgagtactttaacctgtttaagcgtttgcgactgtgaacctttgatctgggccgtaattgggccgtgcttttccaacacctttgtgtaggccaaaacaagctccgttctcgaagtaatcattcactgagtagaatttccattgcatttggtctccattgctacgtttcttccaagttatctacaacaagttcaaattcaaatgttagatgagataaaaaaaaagaaaatgcgttttgtgttttagcgttttccattactacttgatacggacctctttgcttccggattttggtgccacgaaatagtttgattcactctttacacgagggctcatgcttcctccaattgcatattgagtccatccttggtaatagttattggcaacatgagcatatccatgtctcactctgtatatttcacatatttcatccaaattagaaatcgaaatatcaataaacgaaaatcaattagtctaggcttctgtcaattttgtaccttggcattctctggttgcaattaggaccaaagtggttaaacacaacagttaccctcatatctttgtcttttacatagccatcatcatgtccaagaagcatgaccttgtcctggttcctaaaccaattgttcgacactgtgacgtcagtactccctagtgtgacatctagaagaccgtcttcgcaatcatagagagtgttgtggtcgatccatactttcttagccgtgactagcctgatagcgtcgccatccatgtgtccaagttggatgatctttgagtcaggtcccatcactgagcttggtggatgagctttacaatcatggatcttaagcccatgaatgatcacatcggtggctctatagactatgaggcaagcgggacccgagatgtgaacactagcacctcgaccatcgagtgccgtgaagctgctgattagaagcggtttatgaagcttgatcttcatgtttcttttgaatgtgatccattttttacctttgacgagtgttgcccgtatcttagggtccaggtttagggttcagaggatcacagacgggtcggttactttgtattgtgtg

SEQ ID NO: 1893 - DNA, 545 bp, Arabidopsis thaliana
aacggccgccagtgtgctctaaagagtggcgagggtggacggatgacaacaccataactggcagggtatgcttatttccgcattttccgatgagggataaagatgagcaaaccacctcttttctttattgttatcattggcttaattgtcgtcgccgcatcgtttcgttttatgcaacagcgacgggaaaaagctgataatgatatggctccgctccagcaaaagctggtggtggtgagcaacaagcgggaaaaaccgattaacgatcgccgttcgcgccacatggaagtgactccggcaggcaccagtatacgctatgaggcaagcttcaaaccgcaaagcggaggaatggagcagacgtttcgcctcgacgcccagcagtaccacgccctgacagtgggcgataaaggtacgctgagctataaaggaacgcgctttgtcagctttgtaggcgaacaataaggttattttttaactttaaatttcttctgccaggccagcagttcaaacacgccgaaaaggaaaatccgtaccttttcggcggt

SEQ ID NO: 1894 - DNA, 518 bp, Arabidopsis thaliana
cccgaaccaacttatatctgtggtgcaagactctatcaaacgacaacgatctgatacgtttgattagttttgctccagcgatagataataagtagttttgtaacggaatcacaatcaggtcggttaagccaagggcgacaaaaatgagagcccagaaaagagaatcattctttagtttatttgaaggctcaaagaatatcctgattgtgcgagacaaaagcaaaccttgaacagggaacacaataccgtgaatcactgcagccaatgaaccgagcaacaaaaccgaaatctccggtttgttaaggtgagcaagccttcttaatgatacttccttgcctttcttaaccgtttgagttttggtggaagatatattctcgtggaactcttccgtctggtccaagctaatcactcccggtaaaccagatggtgatgtgagagtgccggaatggattccattttggctatccgaactttcgatttccaaactcatttcacacttttctgggccttgtctattg

SEQ ID NO: 1895 - DNA, 511 bp, Arabidopsis thaliana columbia
aagttgcaattttacaaacaaaattattaaaggaagatgaatttctctttccttgtgcgcaaaatagcaacaagtctccgcgtttcctctctttctctctttcccttatttaaacacacttcgtcttctacctctaaacaatctcaccttctctctccctctctataacaaacattaatacacacaccaaaaaaaaacctgtttatgtctcaaagatctctgattcctcattcttcttctatagcttttggtctccattctcatctcttaatctccagtgagatcagctccaattctaactggtctctctaaataaaaaacagaaataaaaatccaacctttttcaattttcgttcaattttcccggaaaaaaaagcgatccttttgatttttcgatttctccaagtaacaattcaaaatgggtctaaagggttttgctgaaggaggaatagcttcgattgtagcgggttgttcgaccacccgcttgatctaatcaaggtccgaatgcaac

SEQ ID NO: 1896 - DNA, 528 bp, Arabidopsis thaliana
tgcttccatggttttacttcttttttggcatgggattaatagaaaaggtttaaatcctaggactgtaaacctaaaacgttttgaaccaaaaaaaaaaatattctgttcttgatcaactaatcattacttggaattttctgtctatgtagtttgagttggagcatccgggtgaatacttgataacctgtcgagggtagttatgatgtagtagatggaagtgagtctgaagttatacgcatgcttaggttcaagactaatttgcgaacctctcaactctttggacacgagacaacgccaagcttcatactcgagaaggaatgtcacaagatcgtcgggttccatggaaaaatcggtaagatgcttcatcaaattggggtcaatgttttaccgattacagattgagcatcttcgtatatatatgagtatatgacatccaatgaaacagtctcgagccagtactctactacgtataaaaaataaatgctttatggcttgtatccccatttaaatgtaataagacagcgtttg

SEQ ID NO: 1897 - DNA, 357 bp, Arabidopsis thaliana
gtcgaccaggacggcggaaccctcgaccaggacgatgaatgggcgatgaaaatctatcgggttcgaggaatggtcgatcatgaattgctatcacctttactgtacaagatgtgagtgaacgacctttgtcctctcgagaaacgcagtcacaagcatccccacatttatttgtaacatggtgcaagagaccctataagcataacggacacaataatcagttgtgctataatctaagagctctatctctgttcacgtttggcaaatgagtttattacaagataaggattgagctgagctagagagaaaacttgttaagattcttgattcatatgtcttacagagtaaagtgtacaacac

SEQ ID NO: 1898 - DNA, 460 bp, Arabidopsis thaliana
gttgacacgtttctgtcgaacagcacaataaaccagtttaatatcatagggaaacaagaagaaaagctgagatatatttctattgagattcaacacagctctgagcataccgtgcgttcataagcatggacatgaccagtaaatacaatatcaacaccgctcgcataaagcaaaggctccatttcagccatcatttcatcaccttcatgttgatgggcattgttactgttataccatggtacatggaagaggactattagccacggagttctttctcggtccaccttcgagagatcagcctacacatatcatagataacaccataattaaatccaataagtgtaacagaatctgctgatcttaaaagattatctcacggaaaaagattaattcaaccaagcactattttactaactacttagacctattgtggcaataaaggggagctcacataacagat

SEQ ID NO: 1899 - DNA, 722 bp, Arabidopsis thaliana
cccccgaagacaacaaaggctggtcttatggcttcggtgtctccacagccgcgatcctgatctcggtcccggttttcttggccggttctcgcgtttatcgcctcaaggttcctagtggaagtccaatcacgactctgttcaaagtgttaaccgctgctttatacgctaaatataagaaaagaagaacttcaagaattgttgtaacgtgtcacacaagaaatgattgtgatgacagcgtaaccaaacaaaactgtgacggagatgatggatttctcggatctttcctaggtgaagttgtgagagagcgtgaatcactaccacgtccactccgttgtacggaagagcaagtcaaagatgtgaagatagtcatcaagatcctacctattttcatgtctaccattatgcttaactgttgtctagctcagctctcgacgttttccgttcaacaagcttccacaatgaacacaaagctcgggtcctttactgtcccacccgcggcattaccagtttttccagtggtcttcatgatgatcttagctccgacctataaccacctcctcctccctctagcgagaaaatcaacaaaaaccgaaaccggcataacccaccttcaacgcatcggaacagggctagtcctttccatagtcgcaatggcggtggcagccttagtggaaacaaaacgcaagcacgtcgttgttagttgctgctcaaacaacaactca

SEQ ID NO: 1900 - DNA, 591 bp, Arabidopsis thaliana
ggagcttgagagttaaatctatccacttgacaggagcattggggccagggttctggggatttgagaaatcataggtcataagagagaacccatcaaccgaatctttcaagaattgaagatcttctggcccaaaatcgtacatttggagcttctctgaacgaggcggaccaacgacatacatgaactgcatatgttgctggttgtttcttggtgagctcgttgagtgaagagcgtctccaagttgttttacgaatttcagtgcctagaagatttataaaaaagcttgctgacatgatgcattatgtggaaaaaaaatcgcagcggcctggaagagattacagggcataccattttccgcaaatcagggtcatgcaaaacgccataagctgcccaccttgaccaagactctaacacgataccattgtattccatttccctagagttcaaggcacacatgatgacaaggtaagtgttaaaattcacaagctctaatgtaaagaaattcatccttttcagagcatgacatatacaggaattgtagagctttgggagaccttacttgcactctgtgacaataagactgatagcttt

SEQ ID NO: 1901 - DNA, 830 bp, Arabidopsis thaliana
ttttccctgagtagtgtcataggagcatgttcagatatggcaatgctaagacaaggtgaagttttccattgtcttgccataaggacgggattcgattgtgttatgtcagtatgtggagcgctagtagacatgtatgggaaaaacggtaaatacgaaactgcagaaacaatattctctcttgcttcaaatccagatttgaaatgttggaattcgatgctaggtgcttatagtcagcatggaatggtagaaaaagctctgagcttcttcgagcaaatactagaaaacggattcatgccagatgctgttacatacttgtctttattagcagcctgtagccacaggggatcaacgttgcaaggtaagttcctatggaaccaaatgaaggaacagggcatcaaagcagggtttaagcactactcttgcatggtgaatttagtatcaaaagctgggttagtagacgaggcactggaactgatagaacaatctcctcccgggaacaaccaagcagagctctggagaactctgctaagcgcatgtgttaacacaagaaacttgcagataggactatatgcagctgagcaaatactgaaacttgatccagaagacactgcaacacacattctactatcaaatttatatgcagtaaatgggagatgggaggatgttgcagagatgagaaggaagattagaggattagcttcatctaaagatccaggattgagctggattgaagtgacaacaacaatacacaagttttctctcaggagaccagtcgaaccagaagttgtaagtaagctcaagatgaattaatagattcagagaatatgttg

SEQ ID NO: 1902 - DNA, 628 bp, Arabidopsis thaliana
cgatgaagcctctcaagatcctgcataaagctcgttgcccagtaacccacatcatgagtactcacatagtgatagtgtttctcgtgccttaatcgcttttcagtctcacccatagtgagggctaagtttaccgcttctgcaacagcatctacatcccatgggttcaccctgatcgcaccactcaaagaaggcgagcagccgataaactcagagacaacaagcatgctcgtccgggctgagtcatggctaatccccatggccttatccattcctggggtcccttgcctgcaaatgatatatttatatggaactaagttcatgccgtctcttactgcattcaccaggcagcagtctgccatagcataataagcagtcttctcgtaacgaggaacaagacgatcaatcaagatcactggctgataaccagcagaaccatagcgctcattgatcctttttgcagttggaatatgtctccttctttgcttcttccacatccttacccgtggcccgtgctgggttcactatctgaatcaggacaagttttcctcgcatatgccaatatgtctcaaagagacgttccatggctataagtttgaggcttatgcctttaaagatgtccatgtcgtca

SEQ ID NO: 1903 - DNA, 651 bp, Arabidopsis thaliana
tgatatacatctccacgttatcacaggttaaacgccaaaaggacatggactgagtcataccgtgtaccaaaccaaaccgggctaagacctgatcagtcctttattcttattctgtatttattttattgtcctcttaatcagtccttgattctgagagtgtcaataaacctatccccttgagaaatgtcatttttgacaagaaaatcaagaaaatcgttaaagctgctctctttataccgaaccggattttcatcgttaaccaattcgcgcggtacactcatcttatcgtccatacccaagctatgcaagctcgcgagagagattctcgtcttctcttcattcaaagtgactttatgaacgatgctcttgtataatccattgcttagaacttccacatggtcaccaatatggacctaaataaagaaaaaagagcgaagatgcatggtgattacattttttgttttggatctaaacgtttcaattattcctgtttacgtctaaaccggtacagttgaaacgcaccttaagtacacctgtgacttgtgggacaccaacccaacggccagatccaccgtgagccattggatcgaagatcttgagaccgtccaagttctgtagaaggagggtgatgcactatagtctgaatgcggc

SEQ ID NO: 1904 - DNA, 517 bp, Arabidopsis thaliana
  unsure (1)..(517): unsure at all n locations
attacgactccttatccaacacccgatggagatttcaccctcctcgtctctgactggttctcaaatatgacccacaaggtacataccagtacaaagcctagatatacactcaagatcgtttcaaaagtcctatgtgaatgaataaaaagcaaatttgatngtttttaaaaaagtaaggatttggtttatatgttttcaaatgtttttctttaactattcttgtgatctctaggacttgcgaaaatcgctcgacgcaggctctgctcttcctcttcctgatgctcttctcatcaatggagtctctaaaggtttaatctttaccggtcaacaaggtaatgtcatcataacaaatctttaatattacatcgtgcatggtcttgttctagtctttgatatgtctttaatttcattgtctatcttcaggtaaaacatacaagttccgggtatccaatgtcggtatagctacatcgataaattttaggattcaaaatcacacaatgagcctcattgaagtaga

SEQ ID NO: 1905 - DNA, 469 bp, Arabidopsis thaliana
gtttccagccctgaccttatgcgtcaatttgcaacaatgtttcgtcaggcaagcaagaaaaatataccctctttgtctctatgatactattctcagattatgacgaaaatcgaaagcctggatcttagattactttgtttaatgcgtccttagtttaccaaatttatattgtttactcagtgtttgctgcatctaaaactttcatcttcttatacctcttagattgctcaacataaatgggcatggccgttcttggagcctgttgatgttaaaggacttggactacatgattattacaaggtaaagattcaaactgttgctaatatactgtgggttaaatattccatgtttacatggaattttgctgaaatgagcgattttgaaaaatgttcatagcttctgttcattacttaacaggttatagagaagcaaatggacttgggaacaattaaaaaaacaactggagagt

SEQ ID NO: 1906 - DNA, 361 bp, Arabidopsis thaliana
tgaatgaagttgttgaaggagaacatcgttattaccggtcaaaatcatatcatcgacgtatagtaacaagaacataacgtctctgccttttagataaacaaagagagatggatcagaaaaactgcagataaatccatacttcagaagatacgagctgaatttatcgaaccaagctctaggagcctgttttaagtcgtaaattgctttcttgagcttacatacataatccggtcgagaaggatcttcaaaaccagggggttgggtcataaacacagtttcttttagctcatcatgaaggaaagcatttttcacatcaagttgcttcaaagaccatttgttaattgtagcgacatgaagaatg

SEQ ID NO: 1907 - DNA, 551 bp, Arabidopsis thaliana
tgatatgattttgaccggtaataacgatgttctccttcaacaacttctgaatattctcagtaccgaatttcgaatgaaggacatgggagcattacattattttttggggattcaagctcattatcacaacgatggtctcttccttagtcaggaaaagtatacctctgatttattggttaatgcaggcatgtctgactgctcatccatgccgacacctcttcagcttgatctattacaaggtaacaacaaaccttttcctgaacccacttattttaggcgcttggcgggaaagctacaatatcttaccctcactagacccgacatccagtttgccgttaacttcgtttgtcaaaagatgcacgctcctacaatgtctgatttccatttactcaagaggatcttgcactatcttaaaggtacaatgacaatgggaattaacttatcttccaacacagattctgttcttcgttgttatagtgatagcgattgggctggctgcaaagacacaagacgatctaccggagtttctgcacattccttggctataacat

SEQ ID NO: 1908 - DNA, 550 bp, Arabidopsis thaliana
tgttatattcactgccaatatttgcaggtaatttcgctagattatagtttttatagataaacgtaattaccttcaagtgcattgtcacttgagcagtggttctttaccattacagcaatatcggttgcagaagctccagctagttcaaatttctccactgcaacctccaaacattcatcccatgtcggtaggccaagtttatactccacgatggaccgttcatacagtaaggaaccccacagaagattaatctgggaactcatattagctgtttgctctgcgctttcttcatcagacgcttcactaaagattccatccaagcctaactctgtagcagttccttatgtttatcgaaattggagattccatttagacggcgttcttccatctcttcccatatttgcatacccttttccatgctctcctcagctttgttatagagctttagaacatcctgagaagcatcgctttctatatctacctcgccactcaatgcatgataccagcaaagcttagcctgctcaaactgttgttggcctagtgctagaag

SEQ ID NO: 1909 - DNA, 606 bp, Arabidopsis thaliana
cggcttcggctcataatcggaacctacagaattaaggtgagatactttttgaatactgagtgatacaagcttccttagcggctccggctgggaatccaaattcatggagttgaagagggagattgtttctgtaatgagtgacatgagcttcgactgcggcttcggctgcgtattcaaatccaatgagctgaccatagagattatttgaatcatgtttgatatggcatctgagtctgtattgctgggagacagtaactgagaaatgagtgataagagcctcaactccgaatctgaatccatagagttgccgggattgatacgaaagattttgagaaagaatgttatagttaagtttttgtgcgctctaaagggttatgtttctaaaggctataattttcgtacatatatagtaaacagaaatcaaaataccaagtaaaaagtgtgaagaataggaacccatgctgtacgaatactaagttaacgatcaaattaatgattagatatatttaaacattagttttaaaaaattacaagtagcattcgatattctcactagaaacaaattatctcgcatatattttacttaaacaaacattgagtgatgac

SEQ ID NO: 1910 - DNA, 452 bp, Arabidopsis thaliana
gaaagaattgtttgtgcagaactcgctggttcattttaacgccgagtgtggagagcttgatagtgcacgtaaggtgtttgatgaaatgtctgaaagaaatgttgtttcttggacgagtatgatttgtggttacgcgaggcgggattttgctaaagacgctgttgatttgttttaacggatggtgagagatgaagaggtgactcctaattcggttacaatggtgtgtgtgatatcggcttgtgctaagctagaggatcttgagacgggcgagaaggtttatgcttttatccgtaattctggtattgaagttaatgatcttatggttagtgcactggttgaaatgtacatgaaatgcactgccattgatgtagcaaaacggctttttgatgaatatggtgctagtaatttgaatttgtgcgatgcaatggcatcgaattatgtacggcaagggt

SEQ ID NO: 1911 - DNA, 536 bp, Arabidopsis thaliana
accccaaatttagtatcaaagctttctcttgcattctgggatcaagatgacccatatgatatgggtggagatcactgctttctgcctggaggaaatggaaggctggttcaggctttggctgaaaatgtaccaatattatatgagaagaccgtccaaacaatcagatatggttcaaatggtgtcaaggtaactgctggaaatcaagtgtatgagggtgatatggtgctgtgtacagttccccttggtgtccttaagaacggatccatcaaatttgttcccgaattacctcagagaaagcttgattgtataaagagattaggttttgggttactgaataaagttgcaatgctctttccgtatgtattttggagcacagatctcgatacctttgggcatcttactgaggatccgaactatcgaggtgaattctttctgttctagtagctacgcaccggttgctggtggtgctctcttgatcgcgttggttgcgggagaagctgctcataagtttgagacaatgccacccactgacgcag

SEQ ID NO: 1912 - DNA, 1213 bp, Arabidopsis thaliana
acacacaaacaaaggtcataagataacgggcaaaaatgaccttgtggaaatccaaaattgcgtcttcaggtttgttcatcgattgtgttaggacttgctttcttgcggttatcatccgcgattctttggatctccttctcactcgctgctatgagtttcttgacgatgtcgaatgttgtaagcttaatactgaaacaatacaaaaagaggattccaaaatgttaatactgaaacaagaaaaatgaaaaaaatgaacttgttttatcaaaactataactacctgctgtttggcatgcttttgagtgcattggggacaaagccacggtacaagccaacaactccttcacgcgcaatgatacctgcacaacggtttaagggtttaataaggtcagtcaccggaaactggaagaataaaagcagataatgatgtttttgttcctacctgagaaagcgtctaataccgatttatatggagtacccttcaattgcatctgccttctaatggtatccaatggatagcaagtaccggtagcaatagcagcagctactactgctgttaacaaagatgattgtgtctgctgttgatacttctctggcagagattgctttaccctgtgcatatattgtattatcgaatatgtaaacaatctagttaaaaatattcaggggtaatgtttgaactgttagtagacttacagatcaaagacgcagaagttgatggcaatgtaaggagctatacttaaaagcgaaggacctagaccgttgtagaatgatgcaactccttcctcccgcagcatgttcaaggcaacctagatatgacatgtctgctttaaaacctgattaatttatggaagagaaagttggtgtataatgcgatgaatatacctgggacatggttcgataacctggttcaacagctaacctcaatctcagcacatctaaagggtatgtaatctgcattaagtagtaagagtcttaagttactttacgattagacaaactcactcaggcctataaacaacgttacttaccagagtagacgtcatgccagcacaagcaccagcaccgagccttccgaggactgacaattgaccgtctttccccctgaagagtttctaaacaacataaaaaaggcagaatgtacagaacaaagtgattactgattagacacggtttcaaaaactttcgaaacgaaaccagaatcagatataga

SEQ ID NO: 1913 - DNA, 747 bp, Arabidopsis thaliana
ctcatatgatctaaaagactacaaatcataacgagtaactacgttagctaaagtccataataatcaacagtgtggctcagattagattcctgctcatatactaaataacaagaaacatccctagcatattccaaagcgaacagaggggcaaaacggtcaatatctcaccttgtatacggtggcggacagaagatgatgaagtaatcggctccggtggcgcaagtgtaagtgctcgtcttatcgtcataggcgtacgtgtatgctcgtgggcacgcatgcttaaagaagagcgagtaaaccgaagctgacacgtgtccggcgtggcgtacgcatcgctgcagcaataccttgggtctccgaatgcctcgcacgcgctacggcaagcaacaccgttcccattcccacgcgtcaccagctttaggtctctgggacacgcgccgttcaagtccacgagacacccggtggctccgcatcctccaatgacgattttcttgggcaagattagcatcgggagattgtaaccgtcgacgaggctaacgtcgtaaaaatctagtcctcctgtgccgttgagagtaaactcggcgagagttgctggaggtttagctccggagcctgaacattcgacttttcccgagccgcaatctccggttaagcagacgaaagaaccggaactccgatcttgtgaacacaaggttcgtgcccagagacgaccggaccacgactctggtattgcgacggttttagatt

SEQ ID NO: 1914 - DNA, 751 bp, Arabidopsis thaliana
ccccgggtcttccccaggcagcactggaccagcatgagctgaggaggcttctatctgcaatgaaccagccccataaaccctgcctttcttttttggagcaacctgtaacaaactcaaaaccaaaaacacaacaaatcataacaggttcacattcactatgatataatgcaagccataattgccaaatactaaggaaaacaaaatcacgaacacaatgacataatcataatcgtttcatattcagtatatcataatgcaagccacaacaaacactgaaaaagacaatggcatgaactagctacccaagccatacgacaatgacaaagacaaggacatgaacaaacgatgacataacagtttcatattcactatgatttattgcaagccacaatagaaaatactaaggaagacaaaatcacaaacacaatgacataatcataaccgtttcatattcaatatatcataatgcaagccacaagagacatacactaaaaaagacaatgataagaactatctactcaagccatctgacaatgacaaagacaagatcatgaacagacaatgacataatccaagccagccaaaactatattgaagtgaaagacaaatgactgaacacaatgaaatgttgcaagccatccaaaacataatgcaagtaacccaaaacacaatgacaaaacaaaaattttacctgagcataaatcttgttcttagccttaatagatacccccagaagctgtgtctccgtagt

SEQ ID NO: 1915 - DNA, 1517 bp, Arabidopsis thaliana
tgaatatgaaacggttatgattatgtcattgtgtttgtgattttgtcttccttagtattttctattgtggcttgcaataaatcatagtgaatatgaaactgttatgtcattgtctgttcatgtccttgtctttgtcattgtcgcatggcttgggtagctagttcatgccattgtctttttcagtgtttgttgtggcttgcattatgatatactgaatatgaaacgattatgattatgtcattttgttcgtgattttgttttccttagtatttggcaattgtggcttgcattatatcatagtgaatgtgaacctgttatgatttgttgtgtttttggttttgagtttgttacaggttgctccaaaaaagaaaggcagggtttatggggctggttcattgcagatagaagcctcctcagctcatgctggtccagtgctgcctggggaagacccggttgttctctctcgaaagctggctgtcgctgaagctactattgcaacccaagctgagaagatcactagctttgacgtctacttcgattatcttgccgataaggatccagagttcgctgccctctttcgagccagaacctctacaaggactgagccgaccagctccaatccgataccggagagcccaataccgcagctgctccatctgctgggatcagagatgaggcagtcggagccacatgatcatcctctccatctcaagctttctaagattataacttgcattactttgggtcaagaaacatagacttttttggtttgtttaattatgtgttgaatacttggatctttatttcagtttgtaaaaacaattatgctttcaatttcaattcaagtttcattttcaatttcaattagttttcaaataatctaagtttaatatcaaatataaagatttaatctaaatctaatagctaaacaaaacagtaattacgctaattagtaaactcagtgtgatgcaaataattcgcaaattcgtcgcaaaagttactagggatttgctactaaagctaaaacacatcgcaagtccatcgcaaaaattgcgagggagatgcgacacctgtttaaattgctaccgttgttgtccctcgcaaattgcaactagtttgcgagagattttgttcgtcgcaaaatttgcgagggaattactactgttaaccatttgcgagacgcgttttgcgaggaactgctgttcctcgcaaatctctcgcgattaacgatttgcgagggattaccgacgaaatcttccgtcgcaagtcgcctgttttcttgtagtgtacaatgattaaaataaggagacaaataacttttctaaggtagatacttgattaatacgcaggaaatatgatcataataataacagtaataataaaatgatagtaatttattttcttattgataagaaacaagctatgaaaataattgatttatttttggattgccgagcctttaatggagaattcagacctccaaaatttgagcaaatatgccttatgaattaatatca

SEQ ID NO: 1916 - DNA, 674 bp, Arabidopsis thaliana
catgcgcataccaaagttgtgttctctacacttacgtaagtaaatatcaaaaactttcttctatgttttacagtttgcgtataaaaacttcagtgtaaggtagatgttacaatgtacatcaaacttacatcaataactgttgtttcacatcgtcgaagcaaaaatgattatatatctaatttcattactccctatcatcgtcgccaccctcatgctttatcaacgatggtggagatccaacataccgccgggaccaaaaccaaagtttctgcttggaaaccttcatcaaatgaaaccactttggacgcattctttctcggagtggtcagagacttatggtcctatcatatcggtgtggatagggtcacagctcactgtcgtggtctcgagctctgatctagccagacaagtgttgagagacaaagaccatcagttgtctaaccgacacaggatcgcaaggatgactcagaccggtactgatcttgtttggtccgattacagtccacattatgtgaaactgaggaaactctgtacactcgagctcatctctctgaaaagcatcgaaaatttcagggtcttgagagagatggaagccagatcgatggttgtgtcgattctgaaggacttaatgagcaattcaggggatgatcaggagcgagaaccggtgattgtga

SEQ ID NO: 1917 - DNA, 552 bp, Arabidopsis thaliana
tgggtagctcagttgaagcctgaacgttgcttccctcataccggatcacacccacggtgctcaactccttcttgaggaacctagtcgatgcaaccatgtagtaatccttagctgcttggttagcagtcacaagaactgaaaagcactggccaacatggacatggagagagtcatagtcgttctgaataacatgggatccttccatctccacgagcttcatcttgtggttctgaatcctgaagttaagtgtagacttgaacccaacattgcagagcctgtacttgtaagtctttccaggcttcattgtgaacaaaggctcgttctttcctccaacctttccagactttccattgatcaaaacaccgttaggcaatccaagggtgcgtccactgtcaaggaagttcttgagagcagtgtggccagctgtgtaccagtcaccgagaaggacagtgtagtcatcttcaggatcagcataaggaacgggaattaggagacggctgttgacacggagaccaccaaaaacaccagcaaagcgttggagagaagtggttg

SEQ ID NO: 1918 - DNA, 1224 bp, Arabidopsis thaliana
acacacccgtcttcccgacccaaacggaagaacccgaaagtcttgacctttaacgtccgtttcctccacaagaaacctctctggtctaaactcatctgggttactccagtttgcaggatctcgagcaatcgcctgcacgttgacataaaccgtggctcccttaggaactttgtacccacctacctgaactgattcgctggccttgtgtggaagcatcaatggtgttggagggtgaagccggagagcttctttgagtacgcattgcagaaacggcagttttgggatatctgcatcagacattaaccgtccggatccaaccacggaatcaagctcatcctgcaccttttctttcacggtcgggcatctgatcatctctgccattgcccattcaatagttatggcggttgtgtcagctcctgcagttaacatgttccagaccagtcccatcacagtctcctcggtcagctcatccttctctttcaactctaacagactctgaacaaaacacttttgatctcttcctccatatacttcatccattacagctcgtttaaaccaatttcttttccgagccatgtgcttcatgaacgccttgtcgctagtgaaccatgacgaaagacgtttaagccaaacggtgtaatcaagcatcttggttgcgccgggcaagcgagtctccctttctacaattgatctaaactctcttccatctttgggttcgaatgttttcccgataactaatcttgaaacaatgttcaaagcaacagaatctagatagttcctcaacaccactggtttctgatcatcgctcatgaagtcattgaaaatcgacttaaccatggaacttacttccatctctctcatcgacctgaaacactctatgcttttcaaagaaaagagctcgagtgtacagagttttctcattttcacataatgtgctccgtagtcagaccaaataagatcgctgccgttctgagtcatccttgcggttctgtgtcggttacagagttggtagtctttgtctctcaacacttgtttggctaagtcagagctcgagaccacaacagctagctgtgatcctaaccacaccgatatgatggggccataagtctgtgaccactcggagaaagactgcgtccataatggtttcagttgatgaaggtttccgaccagaaatcgcgttggtggtcccggcggtatgttggatccccgacgtcgtagattttg

SEQ ID NO: 1919 - DNA, 475 bp, Arabidopsis thaliana
tgctaaataaaataacatttcaatcatgttttcaccaataagtttaataattgaccgtttctaggcacataaatcatcacatgtatagtagtactgcataagaaataatcaataaaacatcacaactttaaagttggtttgattttcattaataatatgacacacttcaaaagagaaaaaatagcaatcaagttcagaggtaacacacagaattgcatcaagttttgatttagaataaacaaaaaggattcttaagtctttagagttttaaacagccgaatgaaacatcaacgaacatactctcgcgattctgatctcttagaccgcttgtactcacgttcatatctgaagtcatcttcctccattttatcgtagcgatgactgtaccggtctgtgtcccttgatcgtcttcatagtagccacgagtttcttctggctcgccacggtactctgcatctctctcacgggaccgacc

SEQ ID NO: 1920 - DNA, 903 bp, Arabidopsis thaliana
cgcgcctttgcgtttctagtaaggcaaaggttggctacaaccgcgagtttctgcactgacttgatcatgtactttccctcgagcctcgggtctactattagccggaacctccttgtgtcggataagtaaggtctcacccattctaaaagcttctgctctcctttaggcttgttccggtctagtggccttcttcctgtaatgagctcatagatgaaaactccgtatccccacacatcgcttttcgacgtgaggcgacccgtttggatatactctggagctgcgtatcccattgttcctactacctgtaagccccaaaaattacaactttcttgatcttgtaacgatttcttataaccagtcaagtgaaaatgtacaaaacttacatcagtagaaacatggctggatcctggtgaaggacctaagcgagccaaaccgaaatccgaaagcttcgctgtccaattctcgtctagtagaatgttggatgacttgaaatcacggaatattatctacaaaaagaaaacacattttagttaactgatgaagtgaagaaacagaggatttcatgttcatttttacctgaaagtccatttcttcatgaaggtatgttaaacctcgagctgcgtcttgtgctattctcaatctgaggtcccaagtaagtactgtcggtgaccgcggagataaatggaactcgacactttggtttggcatatattcataaaccaaaagcctttggattccacgttcatcgtcttctgcacaatgtcccagcaacttcaccaagtttgaatgctcgactacaccgagaaagttcacttcagtcacccattctttatgaccctgcaaaacccaaaacattgatgaaccaacactaacaaattctgtgaacaaaagatgaagaaacct

SEQ ID NO: 1921 - DNA, 529 bp, Arabidopsis thaliana
gagtactcactgttggtatttttcattgaaaaactaaaataattttaaagattaatatgaattttagcaacttgacataaatattttataaacaacattggtcaacttcaaaacatgaagaataagtagaaaatgaaggtaaaagttaccttgtttctcatgtaaaagtgagaaggtaccttagacatttttcatcaagtcatttctaaaggaaatccacctttcacatattcacttatgcatatactctaaaatttgactcaacctctttatttcaagatattcacataaaattttgtttttaaagatattcagttaaatatatatatatatatatatacatatgcattggtactatgtttatagcctctattaagatatcagacatgttcataaaatagcaggttgaagacagcggggtcccatgtcgagcgactaaagtgaagctaaaggcctttgacaccatttactaaactttgaaactttgactatggttatgactcgaatagttaaacacaaatagctggag

SEQ ID NO: 1922 - DNA, 480 bp, Arabidopsis thaliana
caacaatcatattatgcaatatgatacacgacctcatgatgatagtcaaatcggctatgtcccacagtcgagctggttcgcgaataattttaaatagagcctgcaacactccaaatgctcgttcaatgtccttctgacacacctgcaactaataattgttgggatttggatagtttaaaagtaattagaaaagttttgggtgttgaaaggttattgtttggatccatttagataaaagtatatttaaagctaaaacaaaagtttattggagactaaacttttttttttctaaagaaagattatttttgttttgtccaaatcaaatgaagatagtgtttatttatagagaatgaaaaattgtaaattttgatatgtttatttataaatattatgaaataattaaagttatgtaattaagaaaaagaatatagaaatcaaagcaaccaatcaaattttttgcgagactaagattttaaagag

SEQ ID NO: 1923 - DNA, 569 bp, Arabidopsis thaliana
agtaatcccaacttcgttagttaatatgaaagtcagaaagaaagaaactagagaactatactacttttcacggcaacaatttacaatttagcaaagagcgaaacacaagaaacgtaaaaagataagctcaggagactcaataagcagaaatcagtcaagaaacattaatcaaggtatgattatatacctgacttatcaatcatggttctgccgtcgtctctatctttgtagtattgtgcagccttctctctatccaattctctcatgcacatctcaatcgttggtagttttttgccggtggtagatgaagaagacaaagggacattcatgataaaccattgttgagtcgtaccaaagtcttctcttgaattcctccaagagaactatgatttagggacgagcctaacacatcttttctcgtcacaaggtcgctgatgcgggtatggctgcaaatcgggtcggaaaaaagaccacgggtatatttgatggatcttagcttattccaaccaccgcagcaacaatcccattgatgcactcgaagattttggtagcaggcaagtttttatgat

SEQ ID NO: 1924 - DNA, 401 bp, Arabidopsis thaliana
gcagaccacgatcacagtttagaacaaagaaacaactgtaaaacatttataaaattaccttaatcctcttgttgaaattcctaaggtttcgtttgctacgatatttctcgatcttttctttcttctcctcaggactatacttgtaggctttgctcattccttctattattgcattgctctcactccacaccgtactgctctctcttctgctactcctctacacacataccaaaacagtgtcgtcttatgttatgatagaattattattattttcaaataaaaccccaaattttagtatgtttagataatttatttgtgttttggtgttttcattttacactcttgcaaaaccataaaacaaaccaacaatataatgtttcgttttataaaatgtgaaaaat

SEQ ID NO: 1925 - DNA, 451 bp, Arabidopsis thaliana columbia
tgatattatataagaaagaataaagatagtagtataaagttttgttctctccatgttaagtaatatttgattgatgtgattatatataaagtatttatgactttttgcaactgttgcactgttgcaggctctgagtcatccatactttggtacgactgcctcggggaatatgaggcaccaacaacatgtaagtagcaaattttcgtatatatactgatatacacaaacaaatcatcatgctatcgttttatacccttaacttcttctttttcgataacctacacgaaactttttatacttatatattatctcttaagtcttaactatggtttatatgaatagttgcaaggagataggagttgcatatttcctgaggaccctggtcaggtacgtccattttttcttggtcactatacttttaatatataattagagtcactatactttttat

SEQ ID NO: 1926 - DNA, 434 bp, Arabidopsis thaliana
aactctttcgacgatttcgtcacatccaagatatcatcaaccacctgaaacaacaaaccaatacatctcgcaaactttcttaacctctcaatctcatcatcacttcctccaccaacaatagctcccaaaacagcagaagcttcaagcaacgccgccgttttatgcacatggataaactccaaatgctctaaaccgacgtcgtttaaatctaacccttcactactaatatccacgacttgacccgccactaacccttctgttcctatcgctttagccaattctccaacggctcgaaccactctcaccggagaaacaacatcagaactcgtcgccgaagctaaatgctcgaaagcgaaagagagaagcgcgtctccggctaaaacagtgacgtcttcaccaaacactttgtggttggtcggtttccacggcggaga

SEQ ID NO: 1927 - DNA, 554 bp, Arabidopsis thaliana
aaattttatagcttttctcaatgatcccatgtgggtttgagttctatcgttgctgtgttcatgatacagagtaaaagttttgttttttcctgtgaaaagctgtgaatttacgagtttggctcttaagtgttttaccagaatacaccttttgttttcaaattcaagatgatattgagtagtgattgtttgaaatttgaagtctttaatcttgtgtttgtgttttctgtagactgcgagtgccatttactcgggtacctatgtttcttctacggaagaggacgacaatgtgaagctaggaaacttctatgataacttcaaagttgatgtggttagtctcacaaagacagatatggaatttgatatgattggtattgatgcagcgtttgccaatgcattccgaaggatccttatagctgaggtctgtcaagttttcatacaacctctgatgaatcctcattgttgtaatctttggcttaaagtgcttctttctttattgcaggttcttcaatggctattgaaaaagtgttgatagcgtcaacacatcggttattata

SEQ ID NO: 1928 - DNA, 579 bp, Arabidopsis thaliana columbia
gatcgaagaagacacaaaaaagttcggagcaaactcccatcaaacaaatcacgcggattctcagaagacaataacatgaaggtatgtctcctgtgtactcaacaacaagtaataacttcgattctcttgtgaaagagagagacttctctttgtgatgttaaggagttctcttattgtactcagcaaaagatcctgataagaattgctatgactgatgacacaactcgagcaaaggcaatgaaaactgcggttcagtttaaaggtaacaatgatacaaacactagagaacttgatgattgtaattcttgttgaatctaaagatttatcgcattggtttataggcgtgaacgctgtggaaataaagggagatcacaggaaccagattgaggtgaccggtgttgaagtcgatatgattgctctaatcaacacactcaggaaaaaagttgcatttgcggacgttgttagcgtacgtaaagttgaaccacctaaggatggtgacaaaaagccagaagaagacgagaaacccgaagagaagaacccgaagagcagaacctgatgagtagaacctgagccatgttg

SEQ ID NO: 1929 - DNA, 414 bp, Arabidopsis thaliana
agaggatcccctggagattacattatcaccattctattttaatgtgttctatagaattctgactttattgatttgatatagtttttcatatttattattaatggatcggaaaaaacgttttcaaaatgtttcttatattttttttataattctttcgatcaaactatcaaaaacaaaaatagacttttgcgctaaataattgtagaatctaaggtttgagtttgtttttcagcttcttggccatcagaaagcgaagaagattcaagaactaactcggtggaaatatgcctagaaggcttaggggggagttcaagagcatccaaactgccctctatcatctcgacaactttgttcatcggtggacgatctgatgggcatggtcgaatacaccaaagactcaccaatatcatcttc

SEQ ID NO: 1930 - DNA, 578 bp, Arabidopsis thaliana
ggtgttcttttcatttggctgatcgttttctatgacacaaagataaacagcaacaaaactaagcgtgacacaaagagtttatatgcttaatgagatggatcacattccacagaatatttcttaccagataaatattcaaagagtctcggatctgcggcaattggaataagacccaacctgtgagcaagaacttcgtcttgaataaccgatgtgttgtttgctacatacactttttcaatagccattgaaggaagctgtaatcaaagaaacactattaaccaaagattctaataatcagagattcatcagaggtagtgagacagtgggcagacctcagctaagaggattcttcggaaagcattagcgattcctgcatggacaccgatcatatcgaataccatatctgtctctgtgagactaatcacatcaactttgaaatcctcagagaagttttctagtctcacactgttgtccctcccatagaggaataggccccgagaaagtgatagccgtcgtacaataaaacacaaaaagaaagggaagaacattaaagacttcaaatttcaaacaatcatcac

SEQ ID NO: 1931 - DNA, 1032 bp, Arabidopsis thaliana
tagaggaatagccaaatcaagttaacgtaccaattcacaaaataatatccaagaatattaagctacatcaaccaaagctgttctccacagatttatctcatcctctgttcatgttcttacaagtcttctcaaatatttttcccaaatctccggtctgtttcctaacatgagaatgatccaaaccttaaaaaaaacagaatgaccaccaatcgcttgatttcttctttgcatttaacaatctccagcaattcattcaagtaccagcatgaagaagcatagtttttggaaaagataacaaccgcgagaatgttacttagaaatctcgatgccctttctcctttctctattcattggttatacaatatatacacatatacaagaatgttctccaagtaatatcaattcacatatggcaagtgaataatacgtattcccttgtctatcactcccccacagtcttagcgtcgttttggatgatgctaaggctggatcgaaactctgtgaacaaaggagtgggaagcccttttgtaaagatgtctgcatattgatgagaacagtgaacatggaaaacacgaacggtacccatagctatgcgttctcgaacgaagtggaggtctatctctacatgtttggtgcgttggtgttggacaggattggtggagaggtagactgcgctgatgttatcgcaatacaccaaagtggccttggagagaggacaatgtaattcaagtaagagattgctgagccatgttatttcagcaactgcatttgtacgccacggtattcagcttcagcgcttgagcgagagactgtatgttgtcgctttgaagaccaagatatcaagttgttaccgtgaaaaatgcagtaaccggaagtggaacgccttgttgttgggcagcctgcccaatctgcatctgtgtatgcgattaacccggaagtatctgatggataaagctgcaaaccataattgagtgtaccttttagataacgaaggatatgtttgagggcattaaggtgaggttctcttgggtc

SEQ ID NO: 1932 - DNA, 557 bp, Arabidopsis thaliana
ttgctaaactatgcgagaagaaagagagtgtcatgtcattgatggatacaagaggtacaataggatacattgcaccagagatgatctctcgagtttatgggagtgtttctcacaagtcagatgtgtatagctacggaatgttggtcttcgaaatgataggtgcaaggaagaaagaacgatttggtcaaaactctgcgaacggaagttcaatgtactttccagaatggatatataaggatcttgagaaggcagacaatggggatcttgagcatatcgagattggaatcagcagcgaggaagaggagatagcaaagaagatgacattggtgggtttgtggtgtattcagtcttccccatcagatcgtccaccgatgaacaaagttgtagagatgatggaaggaagtttggatgctcttgaagttccacctagacctgttttgcagcaaattcatgtaggacctcttcttgaatcttcttggattactgaggaaagttcaagcatctccgaggattgaaaataggaatcttcaagtttgtgaaaaatattgtcttgaaag

SEQ ID NO: 1933 - DNA, 862 bp, Arabidopsis thaliana
tcgaaaaaaaacccagaaattaaaaatcagaaaagcttactcttaagttgttcttcttgttggtagaagcagatcgatcgacattagcgagacgatactcgtgcataatccaattcgttttaatccctttcggagcttttcctgcgtagaagacgagtgctttcttaatccctaacgtcttcggttttccgatcggtttatcagctccagtcgctttccaataaccggttccagctgcccggtttggtctcgacccgtttgggtatttccggtctctatgcgagaagaagtaccattctttctcaccgtacaacgccatttctggaaacaaaaattcgaattctcttcaaaatctcaaagtcaattcacaaaaccatatgtcaatcttgtcgtggactgaagttttacctggaagctcccatggattgaatttgtacaagtcaatctctgcgataaccggaacgttaatcggttctgacgcacatctccggcaaacatagaacttgacaagctcttcgtccgtcggatgaaatcggaatcccgccggcaaattcaactccgccttcatttttggaaaagtaccttgttgttttcttgtggataagattcgattttgagtttttataaaccttcgaatcggaggatctttgtggtttatctcaaagattgaaatcgaggagaagagagcaaagtccatggagcttttataaacgaaggggaggttcatgaaccacacgtgtgtagttttctttcggacacgtgtgataaaaaccaacctttttctttttcaacgttgaccgcgcagccagctgaggtttacacgtggcttggactaactgcacatcaataactcgggggagac

SEQ ID NO: 1934 - DNA, 2314 bp, Arabidopsis thaliana columbia
tatgttattgaaatcttacattatggattctacgtttcttctattcgtctgccaggtactgcttcagatgatgaccaagatgccttaaccactgatcctgatgaaattattgattctgaggaaagtgagggcataagcggagatgaggaagacacatttcgagattttctttcccgagctggattccatctcacgtttggggagaatccttcacaaccacaagttactctccgtgagaagcttctaatggatgcgggtgcaattgctgggtttcttactggcttgcgtgtatatcttgatgacccaactaaagtaaagcgtttacttcttccgactaaaatatcttgtaatgatagaagcaagctaataaagagtgatgaatcttcccctagcctaatgaatttgctgatgggtgttaaagttctacagcaagccattattgatttacttctagatattatggttgagtgttgccaaccttcagaggaaggctctcactctgaaccgtctttattatctccaaagacagatggttgcgtggctgcaacttcatcggagtcaacaagggaacgaggagcagcagaaccttcgcaacatcttgttgacgaaagatttaaatctgatacagatgctaccctcagtacctcagctgtaccaagctcagagatgaatgggatcgatttgcttgagaaagcccttgcaatagagcctatgtctcctcctaccacatctgctgggcaatcttctgatgcttcagtccaatcaaaggtggggctctcatactgcttaaatctatctaccagcgttttgttttgctccgttgtttttctgaccatctggttaaatttttggtctttagacaaaatggccggaacagtctgaggagctattgggactgattgtgaattcacttaaaacccttgatgcggctgttccacaaggttgtccagagcctagacgacgaccacactctgctcaaaagattgctcttgttttagacagagcacccaaacatttgcaaccagatttagttagtctggttcccaaattggttgagcattcagagcacccactggctgctttagcacttatagaacggcttcaaaagcctgaagctgaaccagcgttgcgtgaaccagtaagtaatctctctatagcgtttccttcccttgttgtactttgttttgtgtgttggaggcttagaattcatgagagagtgtaaggtcatatcatgaccagaagtttaaacattcccttcatctggcgtttttctgtggcacaggtatacaatgctcttagccagttagaatgcgacagtgaagtgtgggaggacattctatctcagtcttttgagcttttgagcgacttaaatgaggaatctcttgtggcggccattcatttcacatttaagactgcctcccagtgccaacacctacctgaagccgtaagcattcatgtctcaatttttattctttgtttagagttaatattttcgaaattacggctaacctaagattttccttatacaggtaaatgcagtccgtgaacggcttaaaagtctgggtgctgatgtgtctctttgtgtccttgactatttgagtaaaaccgtacacagttggcctggtattgccgaaatgatacttagggatatcaacactgacgacagtgtaggtgccaattttgcaacattaccctgcgggccttttctgattggtgaaaatgagactgcctccgaaatggcggatttgatggaagaacatatattctatgcaaataggcagttttttgatgtctacattctgctggaaatgttgtccatatcgtgcctagctgaagaggcatctcaaacatttgaaagagctgttgctcgtggagccattgttgctcaggctgttgccatggtccttgaaaaacaacgtgttcagagcccaaatctgaatgctacaagtggggatgcttctcttaagcatcaagatcctgtattggagggagaagccagtgagcaaccagccactggagggactgagttcaggataatccttaatcttgctgagacattaactcattctagagatcctcaagtgaggggatttgtgaaaatgctatacacaatattattcaagtggtttccggatcagccctttagggttcaaatactgaggagactcgtagacagattcaccagccctacgagtagcagccacgatttagacttagagttggagattctagctattctgatttttcaggagcaagaggttgcgagacctgttttagcatgctgaagaaggttgtggaacatgcaaatattgac

SEQ ID NO: 1935 - DNA, 1233 bp, Arabidopsis thaliana
cctaacaaattttgagattccctccaaaaccaaaaatttcacttttttctttttcctctttctttttcgatcttttcttacaactttctttcatctctcatctctcttctcccacatctctcatctctctcttcgactcgaattctctcacatctctcatctttctttcatctttctaccatggatagactgtgtgagagagacccctactacgatgatatgaaagtggcgaagagagccattgaccaaatggaaatggttgcgatgatggaagggattcctaagttttgtccatgtggtggtagcattgtcgagacgcgaaaggatgaaaagagatactatcaatgcgagaagtttaaggtatgttgatgtagagcacaagtttttcaagtttgtgtagatctagatctagatatatttggtatttcagagtatttcccgttttggtaatactgcctagaacaagtaatactgcacaagttcttctagtttttgtagctcgagatctatatttgataaatatttggtactttgtaggatgatagaactgattgtatgcacatccgtaaactttgggataaggctatggaagaagaggtgagtagcttaagggagagtgttgattacaatcggaagaaagttctaagtcatgagtatctcatagaagaaatgcaaaaagaattgaaagcccaccgtgcagagattgtgaacgtgagcaaagtggtattctgtaatcctatggctcccaagaagtaatgtgttatcctattgttccttaatcttattgttaatttgcttgtaagactttccctatgctttgtaagactttcagtatgctttgtaagactttcccttcgattgtaagacttctctttgattggtaatactatggttgttcagtttgatatttccagtatatctcttagtagtaatagcacgaggtatttcccgtatttcagttaacaatatcataaaacatcctaatacattaattgaatacaaacatagttttacgagtacttgcgaaatcctaaaacaaagtcaaagtacaagaaatcaaaatacaaatccggagaagttacacgaatagttttcacacgttactagactttgcacgggttgaacgggtcactcgtttgggcacaacaggagcagccgcattttccttaattgttgattcctcctcatctggtgggttctgagacatctacattgtttttctagttaaacctt

SEQ ID NO: 1936 - DNA, 649 bp, Arabidopsis thaliana
tcatccagagagacaccgcgaaatcaaatcggaattcaaccggagcttcaacgaggagttgaatctcattcctggttatgtcaactctgttcctactaaggttttgccgtcaggtctattcatgaaagagacctacgagccttgggtcgaactagcagagaggtttcctgaagctaagggtattttggttaattcatacacagctctcgagccaaacggttttaaatatttcgatcgttgtccggataactacccaaccatttacccaatcgggccgatattatgctccaacgaccgtccgaatttggactcatcggaacgagatcggatcataacttggctagatgaccaacccgagtcatcggtcgtgttcctctgtttcgggagcttgaagaatctcagcgctactcagatcaacgagatagctcaagccttagagatcgttgactgcaaattcatctggtcgtttcgaaccaacccgaaggagtacgcgagcccttacgaggctctaccacacgggttcatggaccgggtcatggatcaaggcattgtttgtggttgggctcctcaaagttgaaatcctagcccataaagctgtgggaggattcgtatctcattgtggttggactcgatattggagagtttgggt

SEQ ID NO: 1937 - DNA, 1562 bp, Arabidopsis thaliana
gtccaccgtgcagagattgtgaccgtgagcaaagtggtattccgtaatcctatggatccaaagaagtaatgtgttatgctattgttccttaatcttattgttaatttgcttgtaagactttccctatgctttgtaagactttccgtatgctttgtaagacttttccttcgattgtaagacttctctttgattggtaatactatggttgttcagtttgatatttccagtacatctcttagtagtagtagcatgttgtatttccagtatatctcttcgttgtagtagccttttgtatttccagtatatctcttagtcgtaatagcacgaggtatttccagtatttcagtaaaattcaatatcttagtagtagtagcacgaggtatttcccgtatttcagttaacaatatcataaaacatcctaatacattaattgaatccaaacatagttttacgagtacttgcgaaatcctaaaacaaagtcaaagtacaagaaatcaaaatacaaatccggagaagttacacgaatagttttcacacgttactagactttgcacgggttgaacgggtcactcgtttgggcacaacaggagcagtcgcattgtccttggttgttgattcctcatcatctggtgggttatgagacatctgcattgttaatttagttaaaccttggtaacgcgatattaccaattaaggaacagtatatccggtattacccagatttaccttggctttcatctcatccataaatgctttgaacgttgcttgtttttcctccatttccataaggataaaacatgtgacttacctcaagcggcacacagaatccgggaacaggccatggtgactgagtgttcgggacgacaccgttaaaatgatccaatgtgtgtgagatcgattttaacatgtactcaaatgaatatctcccccatggaaatgtcttacaaaacgtaagatcacttgcagcccagccctaacacagaaatcatcaattggactagccctttctccagtcttagtaggcacggcaatgatgcttgttagaaaatagaggaccgccatccgcaacctatcctttgatctagccggttccatctccattagcttggttttcacgtcttcacgtctaattaccccggttttgaagtacctgttggcgaagttcatattaccagcactctgataattagctgtataggccttgcagttgaaaccagagatcaaagcattctccctaataccatagcggatgggaactccattaacaacgaaccaaacctccatcttcttctcaatatatgccgttcgaagaaaaagcatccacatccccattaacttgtgggtatatccggaaggcaggtggtagatgtgcttgaaactcagatgctccataaaataattcttctcaaaatccgttagaggatgttccaagtcagcgaaggtcttcaacacctccgagatataacacctcgttgctaacttcatcttcttggtatactccgacgccgggaagtacataccaagtggctgcattgccatcgcttcctccatatcctgaaaga

SEQ ID NO: 1938 - DNA, 2123 bp, Arabidopsis thaliana
  unsure (1)..(2123): unsure at all n locations
cacattcaaagtacaagaaatcaaaataaggcccgggttataggattagtttttacattaaactagagcttggacggtttgaacgggtcactcgcttggtcacaacaggagcagcaggcttgtccttggatgttgcatcattctcctgtggtgggttcgcaggcatctataaaacagattaagtaattgtcactcctattacgtggtattacaaactatggtatagtatatccggtatctcccaatcttaccttagctttcatgtcattcataaaatcttcgaacgttgcatgttttttctacatatctgcaagagctacaaaagcttcattcaacttgtcattgatgctatcaagcttctccattaaatcaacaagcgtcaggtgtccgggcccaacaactgcgggaacttcctcttcagttggggctttagtacgggtctgcacatcctcgttgtacacctcttcaaatctaatttcacgcccttcaccaatacgcctcatccaactatcaactacaacatcatgcttatcaacatcatcctctactcctgttatttgagccaaaagaggtatttcttcaacttctgttttattatactctcaatgacctacggacataataaacaatgaatattagaaatacataaaatcctgatattaactgtaggaatactaggaatactaacctcagttgtatccaagacattgttaatttgctctagagtaaacccttttatctcggtccgtttgaaattcaccttgcacatccttgaacaaccggtatatgcaccctcctttttttctatgaattgttctctaagtgatggaattgcctccaatgctaaaaactacacaaaatcatatatgcaaatcttaatgttatcttcgattaaacacgaaattgtaacaatgataaaacatgtaacttacctcaagtggaatacagaacccgggaacaggctaatgtgactgaatgttcgggacactaccattaaaatgatccaatgtgtgtgagatcggttttaacatgaactcaaaggaatacctccgccaaggaaaagtcttactaaacgtcagatcacttgcagcccttaaacagaaattatcaactggactgcccttctccccggtcttagtaagcacgacaataatgcttgttaagaaataaaggacccccatccgcagcctatctttactaccattgttctaccagtactacatgaaatcacattaacagtattattctgtatatctcaataatctgcaagtattttccaatgttactagtcctttccacaattcacaattgtagtattacccacttccgacaatatttcttagatatcaacctagtatttcagttttgttactagtactttccacagttcacaattatattattacccaattcaagggattttacttggaatacttacaatatccatgagattcgccattgggatgtccttgtttacggtcctctcctccacgagcttttcccctatgacgttcgtgcctctctcatcctctagggatttattcactatgacttcatcgtctctctcatcctcctcgtccacaggattagcaaacgagaggtcatcgtttgcattcgtctcctctgaattggaatcagagcccacggttcggctactactcaatgattcttctttttcacatgcttctctttcattctcatccaccattcaagttagaacattcttttaaatttcttctgggaattttctctaaagcatcataaaacgtatcatcctcaagcatcacgtcttatgaggcatcgttggagccgtcgcgtctatcgctgtcgttggagccgtagtaaccgtcgtcgtcgaagtcgttcgagccggcggagatncttaacattaccgccggttgagtcggtgactgctcctcagccattaccttatctctctcattcttagctggcggtactctctttctttttcgtgccaatccactggtcttaggcggcatctctaatctgagatatcttaaaggttacaagaatgaaagaagaacaaaatcgattaattgattttaaattgggaatgatgtttgaggctaatttctttggtttctaaggagaaggggagagat

SEQ ID NO: 1939 - DNA, 2346 bp, Arabidopsis thaliana
ggggaatactttttggaaatacagagtaataatgtggcatactatttacaattgagtgatatatgaatgaatgtttgtttctttcaggatatggaggaagcgatggcaatgcagccacttggtatgtacttcccggcgtcggagtataccaagaagatgaagttagcaacgaggtgttatatctcggaggtgttgaagaccttcgctgacttggaacatcctctaacgaatgttgaaaataattattttatggagcatccgagtttcaagcacatctatcacctaccttccggatatacccacaagttaatgaggatgtggatgctttttcttcgaacgacatctattgagaagaagaaggaggtttggttcgttgttaatggagttcccatccgctatggtattagggagcatgctttgatctctggtttcaactgcaaggcctatccagctaattattagagtgctggtaatatgaacttcgccaacaggtacttcaaaaccggggtaattagacgtgaagacgtaaaaaccaagctaatggagatggaaccggctagatcaaaggataggttgcggatggcggtcctctattttctaacaagcagcattgtcgtgcctactaagactggagaaagggctagtccaattgatgatttctgtgttagggctgcaagtgatcttacgttttgtaagacatttccatgggggagatattcatttgagtacatgttaaaatcgatctcacacacattggatcattttaacggtgtcgtcccgaacactcagtcaccatggcctgttcccggattctgtgtgccgcttgaggtaagtcacatgtttatccttgttacattttcgtaattgaagctaacaattaaatttcatgtgttttgtgtagcttttagcatttgaggccattccatcacttagggaaagattcatagaagaaaaagatggtgcacatgccggttgtccaaggatgtgcaaggtgaatttcaagaggaccgagatgaaagggtttacccttgagcaaatcaaccatgtactcggaacaactgaggttagtatttcctattattccttgagcaaatatgattttatttctttctaatatttcattgtctattattttcataggtcattgagagtataattagagagaaggctgaagaagtacctcttttggctgaaatcacgggagtagaggatgatgttgataagcacgatgttgtagttgatagttggataaaccgtcttggtcaagggcgtgaaattagatttgaggaggtgtgcaacgaggatgtgcaggcacgaatggaagccccaaatgaagaggaagttcccacaactattggaccgggagacccgacgttagttgatgtaatggagaagctccattccatcaatgacaagctgaatgaagctttgttggcgcttatggaaatggaggaaaaacaagcaacgttcgaagcatttatcgatgagattaaagccaaggtaaatctggatatactgtaccatagttggtaatatcgcgtaataccaaggtttaactaaattaacaatgcagatgtctcagaacccaccagatgaggaagttgcaacaaccaaggacaagccgactgctcctgttgtgcccaaacgagtaacccgttcaacccgtgcaaactctaataacgtgtgaaaactattcgtgtaacttctccggatttatattttgatttcttgtactttgactttgttttcagatttcgcaagtactcgtaaaactatgtttggatttaattaatgtattaggatgttttatgatattgatttttactaaaatacgggaaatacctcgttctactactactaagatattgaattttactgaaatacgggaaatacctcgtgctactacgacgaagagatatactggatatacaacaggctactacgactaagagatatactggaaatacaagatgctactacaactaagagatatactggaaatatcaaacagaacaaccatagtattaccaatcaaagagaagtcttacaatcgaagggaaagtcttacaaaacatacggaaagtcttacaaagcataggaaaagtcttacaagcaaattaacaataagattaaggaacaataggataacacattacttctttggaaccaaaggattacggaataccactttgctcacgttcacaatctctgcacggtggactttcaactctttttgcatttcttctatgagatactcatgacttagaactttcttccgattgtaatcaacactctcccttaagctactcacctcttcttccatagctttatcccaaagtttacgga

SEQ ID NO: 1940 - DNA, 920 bp, Arabidopsis thaliana
ctttggactatcaacacaagcaaagcatcattagtagccgctgatagcaccccagtttcaaagaaatccagtacaaagcgtatcaccgacggtcccacagtctcctaacattgctgataaaaaacaggctgaaaaccatacgggcctgatgccttaaaacgtcccataccttttactgcaacgacgacttcctcagaagtaaaaggtttgagcaacgcagccttttccccgtccgttagtgttgcaaacccgcctattggcaacatgttccatactgcgctaacatcctccaaagagtatagcctcgtatagtagttcaacgccattgtttccaactccaccttatccgtcatccatctgttatcgccatctttcggcgattctattcgattcctttttctgcggataattgtggaagtgttgtatttttgtctcccaactcaatatacttttctcttgacttctgaaaccacagcgtctcctcttgttccagaaccaagtccaagtctttcaataatatctcttcttgagcaagcaactcatcggagtgcatcacatccaacaaatcctgtactgccttaatgtcagccaccaacttctcttttttgacatgaatgtctccaaagacctccctgttccatttctttaactttcgttgcagcccaagtaacgcctctgtcgtcgacaaagctgtatcccaagacgctgtcaacaactctttgaatcccccatgactcaaccaggttgcctcaaatctgaatgctcgtcatcgtggatctaacttctgatacggctccaactgaacatatagtggagcatgatccgaggacatgaaaggtaagtgagagaccacagcctcttgccacttttgcctagcatgggcacagccaaaactctatctagccgtttagccacatcgt

SEQ ID NO: 1941 - DNA, 723 bp, Arabidopsis thaliana
tggacaatggagtagagaagctaaagcttagcatatatgatataaaaggaaatttccagctgagttcaagagtgttttcgcaagccactcttgtaactttgaagttagcaaccaaccgtagtttgatttggataaatggagatgatgtagctgctgctcatcttccttgtttgaagaccttgtggcttgacgacgttttagttgctgatgttaaagtgttcgttagactcttatcaagatgtccaatactagaggagctcgtgatgatagatatgaagtggcataattgggaagcctgttttgtggttagcgcaagtctcagaagattgaaaattgtttggactgattatgttgaaatggatgagtatgatagatgccctcaaagtgtattgtttgacactccgaatgtcttgtatcttgagtacactgatcatattgctgggcaatatccactactgaaattttcttcccttattgaagccaagatcagacttgaaatgatagatgaaaaagaggaagaagatgagggacaagaagtgattgttggtgataatgccacagcctttatcacaggaataacaagtgttcggaaactctatttgtatgcgaacacaattcaggtaggagaatttcttgtctgataacacgtttgagatttggaagacaagacaacactaattgatttgcttgtgttgtgtttcagggtccttcacactacttcga

SEQ ID NO: 1942 - DNA, 617 bp, Arabidopsis thaliana
aaataaaccaaaagtataaggggcaatgtttgactgatacgcgcacacactttttcccaataaaatatcaacacaaagacttttctctcatgttctcatgtgttgtttataaaagcaaaaacatcgtttggaggttttacgctagactctgtctctgacccaacgaagacgttaataaacaaacaaacaaacgaagagagaagatgaaattgatttggtcaccggaaactgcatcaaaggcttacatcgacaccgttaaatcggtaagttcatctcctctgttttgactttggtaacgttttttcgaaagaagaaaaaaagatttcatactttctcacgaagtaaagcttctttcgatccttttcacattactcgaaaacccaattatctagatgtgataaatttttcgtatgctttgggattttgagacataaaccttagatctttgcacgtcttggccctttcttttaacaatttgtaacgtttttttaaaaaaaattgggcaacttttgcagtgtgaaaatcttggaacgccgggagcggcggacgtagtggcggcgatggcagcaggatggaacgccaatttgattgtggaacatggtcagaaggagaactat

SEQ ID NO: 1943 - DNA, 639 bp, Arabidopsis thaliana
tttggtgattaatttattgacttcttgtatgcagagactttggtgacctttcatcaaaagacttgcagaagatggttcacgctttgcctcagtacagtgagcaaattgacaagctttctctacatgttgaggtcaattctgcaagttgattagtgtgatgtgataatgtagatcctttgttcttcataaaataagtattgttgatgtcactgcagatcgctagaacaataaacagaactatcatggaacaaggtctaagagatctcgggcagctcgagcaggaccttgtttttggggatgctggaagaaaggacgttatcaaatttctgagcaccaaccatgtaagatgctctgctttttagtttcatacatcaggagattttatactgaaaatgagcaacatgtccagattataagccacgaaagcaagctgaggttaattatgattgttgctgcaatatatccgaagaagttcgaaggtgaaaagggacgtaagatgatggaggtaaattaaattattcaacttcaaaaaggtttgactaaggtgattaattatcatttcttaagcttttgtacttcatgattaaatctttcagctagcaaaattgtcgggcgatgatgtagtagctgtgacaatat

SEQ ID NO: 1944 - DNA, 1408 bp, Arabidopsis thaliana
cagcatacttaagcttcttctctagttcaggtccagagccaaagccaatgatatctacagatttgagtgatggtttcttcgactcagacttataccggctgtcttcaaacaaaccaagcactgtgcctgtaaaaataaacaacaattccacataacgatcagttccaaaatggtaatgaaacaaccattctcgagctttaatagacgaaaccacaacaacaacaaataaaacacctgaagctatagctgacgcagaacagagcttagattcattagaaacactctcagaggaggcgagaacaactgcaacactgctagcttgagaagctttagcagctgcagcaacagcctcaccgagactctgaaaagccgaaggagttgaagcagattttccaagaccaatcaaaccaactcgcttagacccaagacccggaagcctaagaactgtcgactgaccaggtttcccagaaaaatcttcctcagacgagacatcagctaaaagtccacccaagtgagcatcaagcttcttcagaatcgggttttcgaacttggagttcacatccttagccatgtctttctccgtcactccaacagcgagtatatcacctttccattccgtcacgtcgatctccttccccgaaaatgagatctgatacagcaaattcgactaatcagaatccaattaaccacaaaaattcaaactcgaaagctaatctctgacaagacttgaccataatcgaagtcagcaaatcagtggatcatcttaatcggaaacagtaaagcgacgaatctacaaagcattcactagtatcgagtttaaacacataacagcaaaatcgaataatgctgcaagcgatcaggaacaaaccttaggatgatcgacggagttagcctgagtgaggccgagagtagcgtgtgagattgtatgagccatggctctagaagaagagtagagaggcgtgacggcaaaagcgagtctaaggcgagaggggaactggaatcggacgaaacaagaggagagagacgacggagaagaggagaatgagcggaaatggaagcgagaagacgaagaagcgaaggacgttaccaaagtgacggccatttgagtaacgcactgagcttctcttatttataaggagaagaaaagccgcgtttgtgcttatctctctctctctcttgttgacgatgattcttcttttacttgactcattgtttgcttttatccaacccgtccccacccgacccgatcttaaccatggacttacgtactcgtgtagctttataattctctttggctccaaattgcttttgtttaagtgctttatacatatttatacaaccagatggttttgatactatttacaaacattcaaatatttcaaggcattcttcacgattttccgatgtg

SEQ ID NO: 1945 - DNA, 796 bp, Arabidopsis thaliana columbia
tgatgaagataaaattcatagtcaaaattcctatttcaagttgatggccttttattatattcttttttttttttttgacacaaaagaactccatatgttattagtttggttcgaaaaagttggtagcgaaaaccaaccactccggaacctcataacttacatgggagaagataagatcacgagaacgggcaccttttgcaagggtatcggttcggatattcaaagttctagaaaagtgtgagatcgaaaaacatctaaaaacgattacggataagattaaaaaactcaatttctgtttcaaagattggtcccggatcttcttcttcaataattttcaccaacttcgagcaatccgtgtcaaagtgtaccgagtcaagacctctatgtaacgcagagtccatagcccaagtgagagcctccagttcagcctgaaggggggatagagctcttgacttacctctagaaccgagtaagattcctgatggagtatcgatcacgaatccgagaccggatgtgttaccatctgctacccaagaagcatccacttgacaacggagttgtccgccttttattatattcatgtgatatctattcgagatatgaatttaattgttcaacaaaaatatttacttacaaaacattacttaaaattaagaatggtacatgcaaaaggaacgtaatagcaaaatttgtatcgcatgaagagttggttgcaaattagatcttgacaatatcgagtagaatttggtctacccaattgtgggctagacgatgtcttcagcgttttattcttatg

SEQ ID NO: 1946 - DNA, 1048 bp, Arabidopsis thaliana
ttcagagcagtttgaggtccaaccttgtgttcttgctgatctccagagccgggttctgaaagtcgaagcagctataatgcagaaggaagatgaaaacactgcattgcaggaggagttgcaacgatttgaggaaagatggttagagaacgaaacaagaatgaagtcaatggaggacacatggcaaaagcatatgtcgtcaatgcaggtaagtgacgtcacgcatgcttatgatttgttctgaccaaaaccttatataaaaagattatgatctacatgcccttgcagatgagtctcgcagctgcctgtaaggttttggctccagacaagactgcaagtcacggtactgactcagaagacacaatgtcctttggaacccccacgaaagagcttaagggcagcttgagtgacgttaataatctttctacagaatttgatcaacgaagcgtcataattcacgaagatccgaaaagtcttgtcgaggtgaaatcagactcgatctcaaacaggaagcagcacgcagaagaactcaggagactaaagtcaagatttgagaaatggaagaaagattacaaaacaagactaagagagacaaaggcaagagtccggttaaatggtgatgaaggtcgtcatcggaattggtggtgcaagaaaagttattgaaacttagatcttgttcacatgtaccgaatactaatattaggttttaggatgtttaacgatgtaaattccatattaatcaaactaactgagagctaaccggctggtaaggcagaagctaaataaaattgatctataaccacatgatttctacacacaatacagctctaatgaaaacataagataaagtttttgacctctagacgtttttgtctatgtaatttgagaaagcagtgttttcttgttattgaagacatccataacgacgaatcatgattgatattacagtgaaagaacttgaatactctttaactttaacactacatcaatcgaaaaggacttgattattttacaatactgtctaaattagctagagcatcggtctgggggg

SEQ ID NO: 1947 - DNA, 942 bp, Arabidopsis thaliana
tgtatgagatgcgatggagataatctataaatcatcttctttttgagtgcccattagcaatgcaagtttgggttttgtccaatatttccaccaatctgggtgtcttcccgagcacgtcaatcttcacaaattttgatttttttctttggagaacaaaggatttggaagcaacaaaggaggttctaaaatcctttccatggattctttggtatgtttggaaagttaggaatgataagacctttaataataaagatatttgtgtcacctgataccctacagcttgcaatttcggaagccactaactggagacttccgcaaatcattgaacaatcagcggaaaacgaggaagagagttcaactttgctctaagccatcctgaacaataacggacagctccgttgtcaagtggatgcttcttgggtagcagatggtaacacatccggtttcggatacgtgatcgacactccatcaaggagcttaattggcattagaggtaagacaagagctctctcccccttcaagctgaattggaagcccttacttgggctatggactcggcgatacatagaattctagatttggtttccttcaccacgaattgtactgagctggtgaaaattattgaagaggaaaatccggagccggtatttgagacggaaattgaattctttaatcttatttattatcgtttttgatgtttttcgatctcacatttttctataaatttgaatatccgagctggcattcttgtaaaaggtgtttgttctcataatcttatctttttccatgtaagttataagatttcagaatggttgagtttctctaccaactttttcgaatcaaactaataatatatagaattttttgctgtaaaaaaaaactgcataaatattggactttatgtcatagatgtagcagaaaataaaattaactgtaatgtgt

SEQ ID NO: 1948 - DNA, 299 bp, Arabidopsis thaliana
catggttttgtccaaaggcaacgtctttggagagaccaaagtcagcaacttttgcaactaaagcttcatcaagaagaatatttgtggatttgacgtcacgatggataatgccttgagctgctcctgtgtgtatatagtgcagtccacgagcagctccaatgcagatctccagtctttgtttccaagtcaaaggagaaagattcttcccataaagatgatgtctataaggaccattggacatgtattcgtatacaaggatcgtctctgcgttctcatcgcagtttccaatctgtgggtct

SEQ ID NO: 1949 - DNA, 670 bp, Arabidopsis thaliana columbia
cagtgttttcattgcagtcaccagccttgctagaccatctcgggggcacgcgctcatcaactttcccaccttccttctttttatagtttcttccttttgcccacacgctttcaagatgctcaggagcaagggtctcagttttcctttgtgacatcatgtctaacacgtcaccccaaccctctcctcctcgatgtccttgaggatctttactaccatcacctattttggatgttgaggggaaagagttccacgatcgggaagatcgagtgtccatagaaagcaatggatctttagagagctcttttacatgctgtttatctgtagcgcttttctttttagaatttttttgctgttcatttttcaactgcacaagctcaacacctgtgacagaggggtccatatatctagaaaaatgatcaggagaaacatttgagagatcttcagactgagaagcctcttctgcagcactagatctgatagtagtctttatccttgacattacagcagcttcaatcctctcatttatgaacctggaagacaaaatgagtaccgttgaggtgagaataagaggaacaaaatgtgatgtaaagaagcaatagtttaccgaggattggctaggtttaggactggtcggatcacacagcaagcaaaaagctccctcacggtatag

SEQ ID NO: 1950 - DNA, 539 bp, Arabidopsis thaliana
ctctagagcctgccgaaccaatctccattggcaatagctctatccaacttccttatgatcggattatcatcttgatgatttgaccaagtgtaatggaccccacgactaggaatatccaccaaatcactatctcttaaacagttctgaaactcctctaaacctctcatggggattgaagtttgaaggacagaatagtgatcagaagtagcagctatctggtcaaagtccccaaccaggatctaaggagtgaagcaaagaggagaggacggtgataaagtagagatgtcttcctaaagggttcgtctctaaatctcagtgttcctaccataaacaaacgctaccgcaaaagatgtagcaagacccgacagcttaacactacaaaccatcaattgatccgtcttcttaaagaccaaaaccgaaaccgaaggtcccacacgatccaaatccgacccaactcggaacaacaataattggtatctaatctccaactcggaagggttgaaccacaatagcaggggcattactctcagctacatgcg

SEQ ID NO: 1951 - DNA, 581 bp, Arabidopsis thaliana columbia
tcgatatcatgcaaaattcagttttgatctgaataattgatttagttggcctttttattgattttaatcggaacatatgaatcggttaataatgataaacagtagcatcatatcggagaacagcatcaccagtcttcatgtcaatcttatttgttgttactttgacaaaacctctcgccattctgaatttcccacggccaccaacaatcgcgatttctcgctctccgacctcttccgccaccggattcctcgagaagatactgatcgagcttccattaaacttccctgccgtgaaagccaaatcagcgtacatgacgatcgtgaatttgctcaagtctttgcacccggagacatacatcccttgaccattcccgatctctttcgagtgtttctccggccgacggtgagcggatcgtctatcacaaacaggcttccaaaacctaccggcgacgtgagccaccggttagatttgcatgtgcgattctaacggcggtaggattttggcactgagagtacatggagataaacctgcacgtgtacttcacgtcatcagtttagcggtttggtgttgcatagtagga

SEQ ID NO: 1952 - DNA, 778 bp, Arabidopsis thaliana
taaaaccttatattataaaatcccttccaaaaaacagaaccaacttagccaaacgtcacaaatccaaaactcaaaaccgaatcgtttttagcctccaagagagagagagagagagagatctgcatatagagaatgatagaaccgtcgatggagagagagaatggtgctttaacggcggcgacaacaacgacgacggcggtgacttctcctcctccgatggcttcttcaccgcgtcaagctttagttgagagattgaaagattatggacaagaagatattttctctctttgggatgaactttcaccagacgagaaagattttctcgttagagatattgaggttcgtgatttcgattttttttttccagattcttcgttaagatttggatctcagattcagtttaagcgtaattaactgataacactgttattttattttctgcttacagaatttggatcttccaagaatagatcggatcattagatgttcacttcactctcaaggttttttaattcgttacgctaatcaaattagttaacatgcattgtactataatctcggtttttctcggttaattaggtttaccggttgcggcgattgaacgtggtaccggagaattgggtttcgacagtagatggtagaacaatggaagatagagagaaatggtggaaaatgggattaaaaactatctatgaaggcaaattaggtgttgtgcttttatctggtggacaggtaaaattaattaataatgcaatttttcttaagctatataattaag

SEQ ID NO: 1953 - DNA, 932 bp, Arabidopsis thaliana
aatcttgacggctgtgatgctctatggctttaacaatttttcgaatctaattcttttgtttaattttcaactaatcattgctttttacgctaattattaaaataataatttaatttaagtaaaaaatagattgacaatgcggcatggttggtgtgttaagcaaaagccatggttatgacaagggttggtgaagaacctaattactttagattttttttttttttgggggcaaaattgctttagatttaggaaatacattttagtcaccaattcaccaactccggtattgacccagtcggtgacggcgtagctgacgaaacctttttttctctcaacatcccacgttgcatagcacgtgtctttattttgctcattttttcttgttatgtttgcaattagtgggccttcttatgaccttcttttgtaccgaatatttgcccatttgggctttatgaaacaattgggccgaaaaaaactcatgcagtttaatggaatcaagaactgaaccaaaactaaaccggagaaagcttactcatgtccttgtgactgtgtcgtggtgtgtcattacatcatcttgactcgcttgctactcgaggatgagtttcttagacctctactggttacagtgtatgaagccgaagctgaaggaagtgaaggggacttatcgatatatgcgtaacgctcatcaccattccaatacagaatgactcggttggtgcacgaatgagaccagctatcgcctgaaaacagcacaagttgaccatttaagtatcataacaaatgaatgatgatgatgataatagcaaactgagatggtagatttgagtttggctcacttaaagcaagcgctagttgaaacgagccttcactaaactttgtggtcacctggtttagtacacgacctgagattggatcataagagttgattagga

SEQ ID NO: 1954 - DNA, 1032 bp, Arabidopsis thaliana
tgctcatatatggacggtcattgttaggattttttacctgtaattgctggtagaccattaaaaacttctctgtagactatgttagtaacatacttgccttctttttttttggatgtgtctagaactgttagtccttttggggatgtgacgcgtgacaaagcaacgtatagttggccgtggctgaagactggttttggtagatacaatgccactctattcaaggtttgtccttggcttttatttatcgtcatagcgtacacatacgtactggaaactgacgccttcttagagtgaatggatgcttggaatcttgtggtgatagtataatccttgggattaacacttttttcctttcttttgttgtatctgaaagaatctcagctttaagtactttgtctcccaaatgagttacaataagccttgttccattgcataacccttctttttggttaagatttctaagtagcataattggtactccaacctttaagcatagtctatgcgctggtaatcctggaaactctaatgaatttagatattccatggggtatgacatctcaaatccttcttctgttagtgcttcatcctgatcgatactgtcagcgctgaaatattcttttgctaaaccaggcactttaagagagcaaataatcgttgatttcatcaacggtttcatttcgtggagttaaaacagctgtacctttaaggttctccaagtcttgaaatgtgttggtaaaatccggagaaactgattggcataacacctctagtgggttttctgtctctggtagcaggagatttttgtcaattatgatgttatcttcttcttgatcatcatctataccatgggtttttctgggtgcttctccatcccctatttgcaaaatccattctgcaaattttatttcctcaggttgcactctcatattttgtgaaagcaagtatttatgacacgactcccataaatatgaccgatttattgctgcgctaacagtttcttgtctggttctctgtggtacactggtaagattt

SEQ ID NO: 1955 - DNA, 762 bp, Arabidopsis thaliana
catcatcttctttaccaaaaaggtttcgagcatgtcaaagaccggcattgcgtatatttggtagcttccaatgacatggacaaccacgaatgcgttacgaatggcgataagccagcatgggtttctccaacgtcatgagaatattgtcgtccacactgtttccaaagatatagtagcaaacaaatgcaacgggaaagtagcatatggcaacaacgatgtatgcaactactactcctttccacattgcaatctttgatggtttctcaggtgttgaaggaatagtagcttgtatctccaacacaacgttgtgacctgcatacgcaaatgccacatctcctagtgcattcaagaagttgaatacatttcctgaggttgtagatgctctagacgagtagtctacatttggatgaactcctttcttcaccgaggttgcccaagcgattgtcgagtagctgcatatattacaatcacattaataaatctcaaatagaccattttttaaaaaaagaacaacaggctatattgattttgagttgtacttacctcaaagacataacggcagcagcaagggagacgatagatatggagttaaaattagggagatgagcaagaacaaagtgtatggaagcgaagatcatgatccaatatgtagttcttatatttttgcaatcggtgcaaagaaggtcatgaatttttttcaatgacttccctcccgtaaccatgtacacaatatccacacctacttcaacgattagttgttgt

SEQ ID NO: 1956 - DNA, 557 bp, Arabidopsis thaliana
ctcggatgagtttccttcgactgtaagttcatcgtggcaggaaaaaccgaagcccctcgagaattttgaactctgcaatgcaacaaacaaccattaagatttcttgttaatttgttacatcattgaatcatcaagaaaaggagagtaaacagttcattaaagcaaaaaaatccaaatatatggaatcctaagcctcatattaataaggagtggtcacaatcataaaagatgtagtaataatgaattggtgggtctactacttactcatagggcaaagaagtatttaaaagttgaaaaaggtatgaacattaaaaacttaagaatatgcagataagttatatcaaaaaggcaagagatgttaaacgttttcacctgttagccaaagaatctgtagattgattattggtatgatgttgtgttccaacagcagcggcaaggctattgttattatctgatccacgcatcgcaacagctgaagtccccgctgccgctttggacacagcagcagcggtagaagcggcacgagcagaagcagcggcggcacgattagtattgtg

SEQ ID NO: 1957 - DNA, 877 bp, Arabidopsis thaliana
tactaataagagacaaaacggctctggcaaaatctctgaccttggaaagataaaagatagttcagtcacataatcagcatgtgtacgtcgtttctttagtgcttaatattataaattaagaatacttaaaaccaaatctttatataatattgattgtcagataaacattaacccaacaaagtctctctccctctcctattcaactttttcagttactttactccgttcatcttttatttttcttttcgtcgattctcatcaatactacaaaaatatatacttctatatatcgtgcagaggttacatgcattgtacaattttgttgtcccgagaaacaagcggatcagagacaaaatcagagtcggtttcctgctttttgattcctctttattaatcagcaaagatcgattccacttctcctctctctctctctctctgttctttaatttagagagaaaaaataagcattcttccttctctgttttcgagcgggaaattctggagatggctatacaagcgcagttgaattacaacgctccgaatgcgaatcaaatcggttttggtgggtccgagttttctttgatcaacaacaatggcgttatcggaatcggtaacgatcagtcttatcttgtcaataatctccagttgcagaaagatttcaaccaacatgctctgtttcatcatcagcatcatcaacaacaacagtctccttctcaaagctttttagctgctcagatggagaaacagaagcaagagatcgatcagttcatcaaaatacaggttcgttatttcgtaatccaaaccaatttttcatcgaaagtttcggtttttaagacgtgggtactgataaagattcacccttttttgctttgttgat

SEQ ID NO: 1958 - DNA, 867 bp, Arabidopsis thaliana
tcaaagcaattctcagagtacctgtctccaggagacgaggctgaacaaatctcgaagcttgagaactcaatctccgtatcatcatcctcaccatctcaagctgaatcgttcttcttcttcaaactcactctgtgtgacaaaagaataccttaaacttatcgattaaaccggttcagtcaaagctatactggaattggtttagctgagttatacggtcgaaaccggttcaatgatatagcccacaagttgttcggtgaaatgcctcaggggcctgctgtttcatggagcctatgggttttcgtaatagtcagagtcggtcaaaactggagtaaattcgacactggttttagatgttcttcgtctggtaaaaatatgtttacaatatataagaaaaagggacaagactctgaattttcaatagtaataatagtatctgaaaattacatctttagattttcaccttataatagctttatcttcctcagtgacaacaagctctccatcaacaagctcacaatacaagaaaggcaaaccaagctgcttctccatcttcttcactataaacacttgtgattcctcgcacactgttaccaccgtccctttccttcccagcctccctgttctcccagctcgatgagcagtagtgaaccgcatcagttggaagctcaagattcaccaccagatcacattccgcaacatccagaccccgggcagagagctcgtttgtcacaagtaccttgatttccccgttcttgaacttctttagaactgttgatctccctagcttcccgagatctccgtgcatctcagctgaattcagaccacgagcttcgagtttgtagacacatctttgagctgccgtgagtg

SEQ ID NO: 1959 - DNA, 538 bp, Arabidopsis thaliana
gagattaccttgtagataacattgcagcaagagatggggcgataatccttcatttccttagccactttcttttttggaatgagagccagtatagtggtgttcactcctttaggtatgaaaccatacttgaagaatgagtgaaccgctgtaatgaaatcgggtttaatgactgaccatgtctctttcaaaaattccacagtatagccgtccggaccaggtgacttatctgatggcattgagaacaacacttccttaatctctacctcggtaacttcacgaatcagcactgctccatccggttctgaaacgtgatattgaaagatatctctcaactcctcgagtggtatacactggtattgggctggcctgtgtgcaagaaaatcatggaagaaactttcagcttccttcttgatctcctcatgagtatccgcagttgtgccatcagaacgagtgatctccttaattgaattccgctgtgcacgcacctttgctgccttgtaaaaagctttattgcttccatccccactttgagccagtg

SEQ ID NO: 1960 - DNA, 649 bp, Arabidopsis thaliana
  unsure (1)..(649): unsure at all n locations
ccataaacgctattggaataaacaagagagaacccatcacgaggtcgtagaccaagccaacgtcatcacccaagaccatatccctggttgttgaatcagaggcttacaagattgtgcaatctggaaggagaacagtaaaataatttaatatgaacacaatcctaaacatcctcaaggatttggaaaaccctagaagcagaatacataaaaatatctcagacactcaataaagacatgttttaaaacatttggcgaagtttgatagagcaggaagacttacaagtagtaatccccatccagttgggattaatgcaagcatgcagaggaagacgtcttggggtagtataagacgacaagtcatgagagtaatgaatattgccataaatgcgagaaacaaggaaaccttgatgatcctgaataaaagttggaactctgttcccagccgtcgccttgcataatccaaaacctgtgatagttgcattgaaaacaaaatccatcgcttagcacccatggatcacttaacatatttatatctagcattcaaggagactcggacaatttaatcagtctagtatctcatataganaaaactccgacatgactgttctcataccgcacagtgagtaaaggattagatcagtaccatgag

SEQ ID NO: 1961 - DNA, 693 bp, Arabidopsis thaliana
tccttcttcgtctcgatcacttcaacaggcttcgtctgttgttaaccactagattcttcttctgaaccgccctttgagcttctgggtttcttgcagcaagaggttgtctctttggaccaagagctggaaccttgttgtctccattgattggctttctttcgagttgggcattcgctaataactgggcacggaaacttcgagtaatgggtcgattaatcggaggttgagcctttcctccttgaactccgggaacagaaacaagatttccgatgtcaccgagggcacgccgactcttcacagcaccgtttttgttctgaatcttcaaaccatcaacgagaggagcacctgtttcacagaattcaaaagaaacccatcaagatctcatctttatttctaaagattcacaatttcaattctaaagattaacaaaatcgatcccgttacgagatacttcatattcaaatcggatctgtatcgtcgacgagtaatcataacaatacccaaatcggaccgatttagggcaaacgagttatattcaagttaaacgaatcaaaccaaacccggattttagatcggcgtaatccaaaaagcaaagatttcacacgcggatcgtacatatatcaaacacaacccagcaaaaaaatcaaatcgattcaaagaaatcaaaacaacgagattcaacgatacccagat

SEQ ID NO: 1962 - DNA, 674 bp, Arabidopsis thaliana
ctgggtttgtgagaattccagatgcaaagattgcatatccagctctaagagactcagcatcatacatctttgaagatgggacactctccaactttgtttgcagtatgattgcaacaataactccatatatagcaacagcttcgcaaaagatgacactgggacagtttaaaagaacaagaaatgcttcgtcattgtatactttttgcatctaatcttgagcctaaagctctgttaagtgttaacaaagtagaaaatgtagaatgcaaacacaactgtttcctacttaagcattcctaagtactagtgcctttacagccaaatgctctactcaatatggttaagaaatggtgtgtggtaatgacactgttgacactgatgttgcagagcatctaactccaagcctgtagctctgtaacaacaaatcaaattgcatacacagctactccctgttaagcattccttaaatctaccccgtagacccatgggatataatagcaatgactgtgttgagtgtttacttaagtgactccggcccaagaatgaaggagcggaataggaaggcaccacaaataacgtaaacacaaactttaaatctatatcccctaatttaacatttagctatctcgatggtagatatatgtttctgctgaaatacgtggaaagacaaaagacac

SEQ ID NO: 1963 - DNA, 853 bp, Arabidopsis thaliana columbia
tgcagcttccatgttcttaactgaaccctcctcatatatttgggaacgtctatttaactcttctagttttgcaagagccttagcccgctgatctctcgctctttcttcctcctctttctgcctctgttgagcacgctgcctggctaactctctcatcgtagaacgcttttaagggaacatggcaaacactcagtcaaaccaaaaaaggatgactacaaacaagagatacataaaagtataaataacaaccagaatcatatgaactagtttatacctggttatcctttgggtctgctgatattcccgacccaggcctcctgatggactcggtatccaaagagtcatcgacattaacctcgcgaaagctttctgtgtttgtagctaaagttgtatgggaggagcctgacataacagttgtcttctgccaagcatcattgccttcactgttcactattcgtttggtctgcggatctgctctgccttgagtctgttgagtaggtctcctgtaggtactaacatcaaaactttcccgacataaaggatggcataactggccgaaacacaattgaaaaatgataactgacctgaatatgctagttccacccatagctgcgggttcagcattcttgtttgtggcagaatcaccttgattatagtgtgatgagttcttactgtcacttgcatgaccagttcgatgatttctggctgaaactttatttgcagagttcccagaattgagtgtacgtggttggctttcctgctcatctctattaacaacagatgacgaattttgccaaccatcattagttctagtttttgcatttaagccctcgattttctgaatcaaactagg

SEQ ID NO: 1964 - DNA, 495 bp, Arabidopsis thaliana
ccttgcaggagtgatgtcgttttggaccagtggtctagtactccccctcaaacgcggtgtgggtggtaaatccacaccaagtttgaacctgagattacagaaagcttcataaggcaaagacttcgtgaagatgtcaacaatttgttgatgagcaggaatgtgtttcacgaccaaagatcccaaggcgactctttcacggacataatgatagtcgaattcaaagtgtttgctacgagcgtggaaggcaggattggcagtaaggtacacagaagataagttgtctccatagagctcgggtgtgacaggaagaggtatgccaagctctcgaagtaaatgacagatccaagtcatttcctgagctgtttctgagagtgatcgatattctgcttcagtcgagcttcgagaaacagtcggctgcttcttagacgaccaggagatgaggttagtgccaagaaatgtgcaatagcctcctgtggaacgacgagtatctttaca

SEQ ID NO: 1965 - DNA, 1083 bp, Arabidopsis thaliana
cccccgctagaagaaacttgagtgtctcttggacttacgacttaacatctgatcctctggagaattcaagcctatcttacatcattgatctctcaaaggtactgccatcagaagttacaattgggttttctgcgacatctggaggggtcaccgagggaaatagacttctgtcatgggagttcagttcaagcctggagctaatagatataaagaaaagtcagaatgacaagaaggggatgataattggtatttcagtttctgggttcgttttgctgaccttttttattacctcgctcatcgtcttcttgaaacggaagcagcagaagaagaaagcagaggagacagaaaacttaacatcgataaatgaagatctcgaaagaggagcaggaccaagaaagtttacttataaagatcttgcatcagctgcaaacaatttcgcagatgataggaagctaggggaaggagggtttggagcggtttatagagggtacttaaacagcttagatatgatggttgcgataaagaagtttgcgggtgggtctaagcagggaaaaagagagttcgtaaccgaagtaaagataatcagcagtttgagacatcgaaaccttgtgcaactcattggttggtgccatgagaaagatgagtttctaatgatatacgagttcatgccaaatggtagccttgacgcccatctatttggtaaaaagccgcatctcgcttggcatgtgagatgcaaaataactctcggtctcgcctctgcactgctttatcttcacgaggagtgggagcagtgtgttgtacacagagacatcaaggcgagtaatgtgatgctcgactccaatttcaatgccaagcttggtgatttcgggttggctagattgatggaccacgagctaggtcacagactacagggttagcaggaacatttggttacatggctcctgaatacataagcaccggaagggcgagcaaagaatctgatgtgtatagctttggagtggttacattagagattgttacaggaagaaaatctgtggatcgaagacaaggaagagtagagcctgtaacaaccttgtagagagg

SEQ ID NO: 1966 - DNA, 737 bp, Arabidopsis thaliana
tgcagtagagatacaatactcagatatgaagatataccagtatgttgaattatttgctactctttccttttcatatctttggacctgaaatattttttcagttgtcacataagtgaaagactgctatatgttttggggtaacgaattacggttttgaaagagtttacctcttcatagataaaacgaggagagatacacccaaaggcaagccaaggagagaatttcgtcgaataatcaggtcctaacattccgttcctcgtctctttgtatactttcaatagatcctgcatgaaaaaagagacaaacaacattatgtacacacacaagcaacgccaataagaaacacaagaatagctcattatcctcttacctttttccaaaagtactcaaatactctgcctactcctgcactttcaccaccaacgaatcgcattcctctggttacctgtatcaacaccatgaatacaaagacactaactcatgaagaatgttgttactttcttttttctctcgtttcatttaaaagagcttctcagagaaacacacctcttgaggctcaaccccaagtttctcaagagttggaacatctccccaatcatcaacagaaggtgttggccctagagatagtggaatgcgagtagagcttctgatactacacttagcttccaccgactgcaagcgaattttcaccagaaacatacattggtatcaaacaaaataaacataaatctagtttg

SEQ ID NO: 1967 - DNA, 598 bp, Arabidopsis thaliana
tattaacgtccgccagtgtgctctctttcatgagaatggcctctttctctctccgcaaaaatatgctgaagaccttctcactgttgcagctatggatgaatgctccccaatgcctactccactgccacttcaacttcataaggttcctcatcaagaagaactcttctctaatcccacttattttcgaagtcttgaaggaaaactgaaatatttgactttaacaagaccggatctttagttctctgtgaactttgtctgccaaaagatgcatcagcccacaggtttagattacaaccttctcaagagaattctccgttacgtcaagggcactctctcaatgggcattcacttctcgaagcactctgattttaagcttcgggcttacagtgaaaaggaatcagctgacagtgagtttcgtcttcgtgcttatagtgacagtgactagggtggttgcaaagagacacgtagttccacaggaggttattgcacgtttcttgggactaatctcatatcatggtcctctaagaaacaaccaactgtctctcgcagttcaacggaagcagaatatcgctccctttcagaaacagctcaagagatg

SEQ ID NO: 1968 - DNA, 1220 bp, Arabidopsis thaliana
gcttgagtttggttttagttgcagtgttaaagatctctctttattcatctatatcaaagggaatgatcttatacttttgcttctctatgttgatgacatggtgttgacaggaaacagctctgcaacattggctaaacttctagaggatttgaacattcacttccggatgaaagatctcgggcaaatgcactatttcctgggaatacaagctcatttccatgaaaatggtttgttcctctctcaacaaaagtatgctgaggatcttctcactattgcagcaatggaggactgctccccaatgcctactcctctgccacttcaactcaacaaggttcctcatcaagaagaacttttctctagtcctacttattttcgaagtcttgtagggaaactgcagtatttgaccttgataagaccggatcttcagttctctgtcaactatgtgtgtctaaagatgcatcaacctacagtttcagattacaaccttcttaaacggatccttcgatatgtcaagggactctagccatgggattcacttctccaaaaactctgactttcagcttcgtgcttacaatgaaaaggagcctgaaacggagtctgatttcaatcttcaagcttacactgacagtgattgggtggctgtaaagaaacttgtcgctctacaggaggctattgtacgttccttggcactaacctcatttcctggtcttctaagaagcagccgactgtctctcgcagctctactgaagcagagaacagatcactttcagaaactgctcaagaaatgacttggatttgtcatgttctccgagagttagggatacctcttaccgttacgcctgagctttatggtgacaacctttcttctgtctacttaacagcaaatcatgtgtttcatgtccgaagcaaacactttgaatttgattaccactatgttcgtgaaagagttgctttggggtctttggttgtcaaacacattcctgctcaccaacagatagttgatatgttcaccaagtcattgtcatttaaagctttatgtgatctcaggttcaaacttgacgtggatttgccacccacaccgcgtttgagggggagtatcagacaacctcttcaaaacgacagcattttgtcaacttcatcagttgggcctgcgacagaaacaaatgaattgggccacagaacacttaaggccaaaacagaaacatcgtcgtgcactgtgc

SEQ ID NO: 1969 - DNA, 676 bp, Arabidopsis thaliana columbia
tacggagcagaaagtactgaatcgttggatgatgatggtagtgatgatcgtggtggtaatgagatccgctagaggaggaaccaattgaggaaggtgaagaacacgcgccgccttgcaaacctgtttctccgtcgtctatatcaggtgatatggcgatgttgactgtgttggtattgcagtaatcggaggaaatggaaggtcgttcggaggtggtttctaaagaatctccgacacggcgacgcgtggtggtggtaggggctgtgattggtgcaacggccaaagggcttgcaccggccgccgacatctcgccgcctgagaaacaaaatcaatctctagaaaagcgccaaattgaaaaaaaggattgattttttttttttgagagagagagaaaaaaaaggttgtttttttttttgtttgtttgttggtgtttttggaattagagggttagtagtggttaggcatgttatggttttttttggggggggggttctgtattagtagccaccgtgagattcggcttaaggctgagaggcgtcgaagctttttttctaatctctctctgtttcgttttatgtctgtgtttgtgtaaattgttatatagtacagatttatgtctgtttgtgtttatggccttgtggggattttgctaattatatgctttttttggttgatttta

SEQ ID NO: 1970 - DNA, 739 bp, Arabidopsis thaliana columbia
tacatcccctataccccactttttctattagaatttagaattttcccgagaaaaagacaggaaaagaaaccgcgaatttccgttaaaaatccaatctttgacccaaaaaaatctcttcaataaagacataaagttaagaaaacagagcaaaatttagctactaaatgatttctgggttttgatcataaagctcaaaactttttcacatttcgtcacaagcactgattcaattgacgaacccaatttcacatttcgctgttcctcaattgtgcaccgaccagaataatctatatagctaaaaaaattgtttttttttctcatgaaaatgaattttgcaaaatgtaatgaagaaaaaactcacgggaagcttctcaatgacgacattctccgtcattgcacgttgagccattgaccaatcttcgtgtaacgcccgcataacaacaagctcgttcaaatctctccggtgcgcgtggtcaacgacgcgcccactcatgagagagactctaaggaagagagaaacgacgacgaagatcatgagaagacccaagatccgacgacccacgtttctccctgaacagagccaccatccttgacctacgacagccgttgatcaacaccgtcgaagagaaacggtaaccgtagtttacggagcacgaagtaccgaatcgttggatgatgatggtagtgatgatcgtggtggtaatgagatcgcgtagagaggaccaattgaggaaggtga

SEQ ID NO: 1971 - DNA, 917 bp, Arabidopsis thaliana
caatataatcatcattatcgtcatacctgcatattcataacaacatcatcatatcaacatatcatagtcgtcattatattgccatcatcatcatcatttcataattttcagtgaaaaacttaaatccgtaactttttcacaaaaatcgtgaatataatttttttcaccaaaattgcaaatcctcaaacaacatgaacatatattttctcgcccaaaagtatatgttatgttgatagtgatgatgataatgttatgatcttaaaagtatgatgataatggtagtgttaatgatgatgaagatgcattgtcattatttttatgttaattattactttaatgcgtcaatctatttaatcatttaacccatcaaattaaatggggttttgggttaatcaacttagttgttaaatgaatcgcgttaactcatgaactctaaacccattaggtaatcaaccatgcctcttttgccgagaactagatgagtcatgggatcacttattcttcgtgcgccgatacacgttcacaatttggagcgacattgtcgggaatttgctagacgctcaacccgacccggattgggaacaaacattacaatagttcaataaaaacagagactagcttagccacatccttctccgtttagcattccaagcaacaatttactttttgtggagggagtgaaactaccggcggcatggagctactcaacgtatggtgactcaattgattagtataattgacaaaaacggtttgacgatgcgtagtttcacttcgctatcgagactctctgaatttgagactacttttccaaaaatggtttcaagctaggggaatcacataatcttgttttagttcttactctttttcttaaatagtttccatgcttttgttcataaactctctttctttttatcaga

SEQ ID NO: 1972 - DNA, 1018 bp, Arabidopsis thaliana
tgaccttactgtcagactcgagaaagctgctacctacgatgaaatcaaaaaggctatcaagtaagcttttgagcaatgacagattaagtttacttatattccagtagtgatcaaattactcaccaagtgtttttaccaccaatacatagggaggaatccgaagcaaactcaagggaatccttggatacaccgaggatgatgttgtctcaactgacttcgttggcgacaacaggtcgagcatttttgacgccaaggctggaattgcattgagcgacaagtttgtgaaattggtgtcatggtacgacaacgaatggggttacagttcccgtgtggtcgacttgatcgtccacatgtcaaaggcctaagctaagaagcagatctcgaatgatagggagtggaaagtcatctgttcatcccctttctatggtctgaatttgtcgttttcgaataaaatttctttgaacttggaacttttttcctttatggttttcttaattctcattcatgtgaggtgatgggagtttgtagaccgatgttttactggaagccctttgtttttggcttttgatatattgagttaacgttatggttttcaattttgttccacttctctttttaactatatactaaatcaaatctgaacgaaaaatgaaactaaatgagctcccgttgatgatgacgtagcaaatctaaggaactagaggtgtacacttattaatctagcttcttctagttttcgaataaaagtttctaagtggaacctatattttatgtttgcgattctcatttatgcgagtttgtagactgatgtttgaatgaaaagtatttcatgttgccttttgttatcgattcttctcaaaacataagaaattcattaacagatgtgcggtttataaagacaacgaaatatgtgttcatctgtaaaggtactttgaacaaattattaaaccatgttacacgaattcacgtatagtggcacttcaattatttgtacacatccgcatcgaaaaaatgggga

SEQ ID NO: 1973 - DNA, 808 bp, Arabidopsis thaliana
taggggtcgtgtgtgatatttagttaggtgtcggtgttttctcgcttagtgtcctcttgtgttatgattgcttttagagatttatttactttttaggtttccattaggttaagctaaataaatttgttttttagtgtggttgtttattcttttttaagataaaccttctttttttacggtttttctttttccaattaatagattttaccttatctttgacttagtcttatttgtcttttagcttgagtttttgtttgtctcgctcttttcttactttaggttgttctatataagcgtctcttaaggttaagctagtatcacaaccttctcttgcttttcactttcactctcacttctggtgctatggcagacgagttgtgggatgagttacaacacttggagttgggaagggaggatcctgctctctttattccgcatgaagcctatgccctttgtggagtctaggaatcggcttagtctgatagctagacctcttaatcctcgctctcagaaccttcacgctgtgatctcggctttaccaagagcatggggtctgactaatagagtgcatggccgggtccttaatgacacgtttgtccagttcatctttcaatctgagattgatctcttgtcagtactacgaagggagccttggctgtataacaactggtttgtgacagctcagagatgggaggtaaatcttacgtttcacctgttaacatctattgaattatgggttcagatgcgtggcattcctcttttgtatgtgtgtgaggcaactgctttagagatagccatgagttaggag

SEQ ID NO: 1974 - DNA, 853 bp, Arabidopsis thaliana columbia
cttaagctgaaattggatggtatgaacaagatcagctttgtaaatcaaattctcgataagcttaaggactacaggatttacaaaatttaccatattgagcccttcattacaccttcctgcgctacatagacagcgagcaaggtcgtagtaaagagcagctgatccaacaataccacggctttccatatcctcaaccgtatgtacggcctcgtcgcttttaccttctttccatagagtattaacaagaactgattcacaggtacaaatggtttactcttcagtggggaattcaaatactaataatctaaaggaaaagaataaagagttcacaaaatacctctatatgctagagcattagggatagaagatttctgcatcttcctgaagaattcatgaactaaattgtacttctcacatgctaacattacctgcttagacacaaatacagactcactactcatcaatagcgttgaaatgaaataataattgttatgataagaagagatatttcacctccatgatgaggccataggttacaggagaaggtttttgccctcgttgcttcaactgttgcaatacccagaatgctccttcccattgctttcgttgaacacatgcgttgagcacctgtggttagatgtccagcattggcatcaggcgagtgactatacataagtatccgagaataagtgtaagctatatatattcataagaatgagataattataaactactgaccgcattgtaaacaacaacatctggttcaagccggggatcccattattcaagtgttgttggcttgaacttctttttaggtggagacctcattgtgtcaatcacatagaagagttcc

SEQ ID NO: 1975 - DNA, 593 bp, Arabidopsis thaliana
  unsure (1)..(593): unsure at all n locations
tatccattttttctcagccaggtgagagagagagacatcgaactatcgaagaccagagaagctaggaggatttgatctctccgattcggatatcttagctctggccgatagattctccggcgattcatcttctttatccgccgtaattttcgtatataggatcggtggtggcttttcaagatgccgtcgaacggagatctggaccgtcagatcgagcagctgatggagtgtaaaccgttatcggaggcggatgtgaggacgctttgcgatcaagcgagacgaatccttgtcgaggaatataatgttcagccggtgaagtgtcctgttaccgtttgcggcgatattcacggccagttttatgaccttattgagctctttcgtatcggtggcaagctcctgatactaactacctcttcatgggagactatgtaggtctgtctttcttcttctttcgattttatttttggggtttttactttttttctcattttagatctgtgtttttggatcatccaaaatggtgaattcttggaaaagtaccacctttttatttactagagtgagtacttgtgggtctgtntttttggaatggt

SEQ ID NO: 1976 - DNA, 559 bp, Arabidopsis thaliana
gtcactcatccataaacctctctctttcttctctctctctctcgtttggatctggccgttgattttctcccgacggcgataagtttgttgcatgaacgccggtgatggcttctgtttgcgtcaacaatgttactgtttctcaggattttcctacttacggatgtttcaatccacgagcttctttcagccgtgacgacggtggtcggagttctggatccgtcgcatcggagattccgaaggaggaaacagcagtcggagctggtgatttcgagtttaggttagaggaggatccagtcggaatgctcccagccgatgagcttttctccgacggtaaactcgtgacgaagcagcaacaacaacagacgacggagatcggcgggaaatgcaggaggatggaagtcgtggagattgagatctccgggggtggcgataattgctcgttttctccaaaggcgccacggtgttcaagtagatggagggacttgttaggactcaaacgattctctcagaatagcagcaaatccgcgtcgactgcgacgacgacgacgacgaatccgag

SEQ ID NO: 1977 - DNA, 1143 bp, Arabidopsis thaliana
actaataatagttcgtctgtaagagagtctacaaactgccttactgttgctcctagtggcaccttggatgttcctcatctcccagtaggaatcaacgtcttgagtaaacagctgaatggagattgtggtctaagttacaaaaatcagaggcggtggcttttgttcctgctacatgtacgaaaatgcaatgctgcagaagataactgcgaaagtaagtattgttttactgccaaaacgctattgaaacatatcaattgctgcaaggctcctgcttgcgcatatcaatattgtcatcaaacccgacaattgattcatcattacaagcactgcggcgatgaagcatgcccagtctgtgtttttgtcaaaaacttcaaggagaaacaaaaagaaaaatttaccttcctccaaagagctgagcctagctcagctagtttaaaccatggacccaaggaatcctttgagtctatgcgtacttctagtgaaagagactctgaagctccatttgttgttgatgatttgcaaccttctccaaagcgccagaaagtagagaaaccctcccaatttgcttatcctgacacacagggaaacccagcgacaatatctgctggtgtcagccaagctcatttttctatgggtttgcaagagaaagataggctaccaagtgatgtttgcaaacctgtcagatcaaatgtgccgatgaatgcagatagttctgattcttcaaggaggcttgttccagtttcccgtgagctggagaagcctgtttgcaaagatactcacatggggagacatggtgtaaaatctgcattagatggtgaaagtcttcgtttatcaaagcaagaaaaaccaaagcgtatgaatgaaataagcgcacccaaagaagagaatgcggaacaatctttgggcgttgtatctgcgtctaattgcggaaagtcaaagatcaaaggcgtctcactgattgagctgttcactccagagcaagtagaggagcatatccgcggtcttcgtcagtgggtaggccaggtaagctaacgaagttttagatgcaaatcttgtttaagatgaaagtttgggcttacctagaacgattttcagtttatcctggcagtttctttttactttatgtaggtctatttggtgttg

SEQ ID NO: 1978 - DNA, 1282 bp, Arabidopsis thaliana
tacagtttttctttatatattttggacgattatggtttgtattcacataaatttcaattataattttgctatatgattcatcttcctctatcattcctcttagtcaaatagagttggctaactaaaccttttattttaatcaaattactccgttttaacttgttttgggtgccaatcaaaaccaaattttatacactaattatttttactcgtttttttttacaaaaacattaagaatgatacaacataaaaaaatgttgtctccctttatccgcatttgttcctcaaagatgtagcactataaatagtctcatcaccctaagaccaaaaccccaacactcaaactcaactgctctcccataaccgaaaccgagagaaaatatagaaaaagatgattgagacggttaacacctgatcggctccggtggtcccagcggattcgggtcaagatccaccgccgatcatgtcacttgtaattctgatctccgttctctaactgccatcatcactggttagtcataaacttaaagttacttcttctttttcaacttaaccgagtcgcaaaatgagtttcctaactaatagtctctctgtttcttttctactaggcgcgacgtcggggataggagctgagacggcgcgtgttcttgctaagcgtggcgcaagacttgtgcttccggctagaagcgtcaaaaccgccgaggaaacaaaggctcgtatactgtcggagtttcctgatgcggagatcatcgttatgcatcttgatctcagctcacttacctctgttcgtcgattcgtggacgatttcgaatctctcaatctcccactcaacatcctcatgtaatttaaactctatcttcataatcatatagcgaaaatgtttttatctgattttttctaaccttttgtaaacttttttggtttgtgtttgtaacagaaacaatgctgggaaatatgcgcataagcatgccctctctgaggacggtgtggagatgaccttcgctactaattatctcggtaattaagttttcataaatccatcattgacttataatatatcattcattgatttatatgttctctaatagtaattcatggtgtgtttaggccattttctgctgactaaactgctgttaaagaagatgattgaaacggcggcacaaaccggcgtgcaaggccgtatcgtcaacgtcacgtccgtcgtccatagctggttttccggtgatatgttgcaatatctcgccgatatctcacgaaacaataggtaatttttaattagtat

SEQ ID NO: 1979 - DNA, 706 bp, Arabidopsis thaliana
gctgtggctgaatcgaccgtcgaatacgttgcttctgagaatctcaaaccattttcagatcctgaatcttctgtccaggtaattaaatttctcaattgattctgaatttatgtgtagtaatttgtttttgatgattattgattcaatctatcacagagattacttgaagaattagcatcaaaggattggattaaagtatgtgactcattgaacaacacaaggagatttgcaattcatcactcttctctgttgctaccaattctgtgagtattttttattttttgaccagaatctgaaatcttatggagtttcttggtgatgattttgtttttgtcaatttgtagagaaaagcttatagttgtgatggtgaaggcgatgaagaatcctagaagtgcattgtgcaagacttcgattatgacttgttctgatatcttcactgcttatggagaaaagttgctggaaggacctcatttgaaatctatggacgatctggtaaaattgatttttgttttttgttttttccggttagtttagctttttgattggctatggattgttgatttaataataaagtttgattttggtatcttgatggtgaaaataacagctgttgcagttgctgatgaaagcttcacaagacaagaagtttgtgtgtgaagaagcagagaaagcgctgaacacgatggttaactcggtggctcgcttg

SEQ ID NO: 1980 - DNA, 1085 bp, Arabidopsis thaliana
gaattaaaaccttgcttttgacaatgtggtaacaaaacttctcggccaaggtgtttacagttgggtatggccatttcgagtgagttcgccaccattctttgagtacagaagtcgtatctcctggcaactttcccgcccttctcttcctcattatctcttctcttatgtccacaatcttctctttgaaaccctacaggggaaaaaagaaaccgagcaacatgatttaacaatgtgttttgtatagtttgatgtaccattgcagcttgatcaagcaattacctgtttaagctcatgcttcagttctttcttcacacgttccatcaaagatctctctctctcggttggaacaagaggaccaaaccccatcaagcaatctgaaccgtccaaacttccatcaaacatgttcacctcgctctctacttgattatcatcttcatcatccgacattgtcttaccattactttcacttggagaaactcctacaaaccagaacaaagaaaaaccgataaaaccaagacacacataaagcaagaagacaataacaaaaaaaaaaaatgatttgggacgttaccagttagggattgcagtgattgttcaatctcccaacaagccgtaatggcttccattgcatggacacaaacgtggtgttggagttgttctttaaatgaacataacaagacaacataatgtgactgcatcaacataataatcaaaggtaagattccaatccataagacatacaaacagaacgttacaaaaaatagattatgctttctttctcttggacatgcaaagtccttttcagcaagaatcagacaaactattagtcatcaaagaagaagctttatgcaacaaatataacttatttgagtcagacaaagttcataattcgaattacaagctaaccaaaaaagtagaagcaaagatcatatcgattgcaagactcgagaagcgggaacaatgagccacacaaaaatgtgaatttgctatactcgagataatcaaagagaaataaatggctgaatcgttcacagttcaaaacattaaaattttgcaaaattagaaagtgaaacttaccatgaaat

SEQ ID NO: 1981 - DNA, 1354 bp, Arabidopsis thaliana
catcaagaacaactcggattgttgcgctttaataaccggactgaacgtctccgcgaatccacaccatactgctgattgaacccttagcaactaatcgcgctttatacttgtcaatgagtccattgggtagatacttgagtttaaaaacccatcgacatccaacaaggtgttgcgttggatttggagaactaaatcccaagtgtggttgcgttgttgtgcatcaaattcatcggacattgcaaaacgccatttcttatcctttagagcttgagtcacagtatttggttcggagagatgtggttgggtgagagcaacggtgagactggttttggtttttggttttgtgatgttgtttttggatcgtgttttcatttggtgattattttttggtggttgagatcgtgaattagaggtggcagcaatggtagtttgatttggtggcaaggcagtggtagttgatttatcaaccggtcgttgttctatcgaagaagatgggttggtttcagggtttggattgggcagtgggcctatgaatggtgagtttgggttggactgggcctcaggttcaggcccattttcatgtggagcagtgggctcagaattagaaacagagggagaaggagatagagttgaatcgcgtacctgagagtgatgtgacggcgtcggactaccggtttgacgaggagacaccggcgaatcgttctgttgctgcggaggagacggcgtttccggcgaactcgcgggtggtgattggaggcgaagaaccgaacacggaaacccggaatttgcaggagaagacgaggaggatgactcaggtggagtgacaagagaagactggctctgttcacggattgatgcagcaaaaggatatgttgattcatcaaacatgacatgcctagaggtataaagccggttgttgtcaacatcaagacaaagatacgccgtttgtgtgagagagtagccgagaaacacacatctcttagaccgttcttcaagtttgttacgtgtatagggtcttagccatggaaagcagagacaaccaaacacacgaagacgctgatagtttggtgacgagccaaacaatttttgaaatggagactgaagacagaggaccggtgtgggcattctgttgattaagtaaaccgctgtggcaaacgcataggtccagtattctcttggaactgaggcttgagtaagtagtgtaagtcccgtctcgacaatgtggcggtgtttacgttcggagaggccattgtgttcaggcgtatccggaggagacgttagatgagagattccattggacaccaagaaatctcgaagtcggatgaactcgtccgccattgtccgaatagagtgt

SEQ ID NO: 1982 - DNA, 594 bp, Arabidopsis thaliana
actcccttttatttagtttcgaattttgagattcttttttttttgtttaccacggaagaaataatttcattaaatttcaactttttgttataagactttgttacaaatcagtcataccaaaactaagatcagattatgcaaattgcatatctaaattaaaaattcaacctttaaacttaagtttagttggtcccatccgagttaaaatcgaatttacggctaaaatcttcagaaaaagcaattgaaacgagaatataaaggccttgcttaattattaggattaacagttataatacatcattaccaaaacacagagccatattcaaatcaagagccataatcagaagagtctttacgcataaacatgaaacccataagctaattggctttagccagagatatcaatagacttaacttgagccttcttcttagcctcttccactttaggcaccgtcacagtcagaactccgttctccatggaagccttgacttgatccatcttcacattctccggcagcttaaacttcctcgagaattgccgctcgacctctccacacgatgccacgtgtcctgcttctcctctttctccacgtg

SEQ ID NO: 1983 - DNA, 2569 bp, Arabidopsis thaliana
taaataatcaagttgaatttgtgcatagacaaaaatgagacatcaaattagttaatcgataatagtaggattcgccggggagaaggagaaaaaaaattagatgcatgggtctcaggttcgagtaataaccaaaataactacaacttcatttttgcatagacgtggagatgctttttggttagaaacctcgacaaccactaacgaagatgaggacaatgaaaacgttgtgtttggacttttatgcccctctaaaccctaaattcaataatttgggtcgtcactcgtcagcaagctggatctaatccaccactctctccaattgtcattcactccggttttgctatttccaaggagagaaagatgatagctgtgatcggattgcttctgggttttctagtatcagcattgttcttaatccaaggaaagcgaagaagaacaaacgacaatcaagagaagaagagatctagcagtgagcctgtagaagatgtggtaagaccaaaaagttacagcaagagtgaagtcgcagtacataacaaaaggaacgattgttggatcataatcaaagataaagtctatgatattacttcttatgttgaagaacatcctggtggtgacgctattcttgatcatgctggtgatgattctactgatggcttcttcggacctcaacacgccactcgtgttttcgacatgattgaagatttctacatcggggaacttcattagtaaaagcttaaagatttgagatttgattgaagatttgagatttcttcttaagtaagcttaaagatggcttttttaattctcttctcattgaagatttgagattgcattacctttttgtcttgctagtgtacacttcttcttccattgtattgccaaagtttcctcctttctcttaattttcatggtgaagctatgctctgtttcaagtgttctatgcttaactctgtctcaagtgttttaaatccatcaattttgagtttaatctattgaattgctttatgggaatcaataggatcataagaacataacttttttactgcgatgaagaatcataatattcgacaaaaaagcataacagagatctcgagttcgagttctatctctgatatagacctaaatcccaaagcataagcattgacatctggttaaccaaaacaaactaccaacgttcatatgatgaaggtctgcctccaggacggctaggacggtcataaggacctggtctgcttctgtagggtcttccctcatcgcgtatcggtcccatatctccatatctgtcacttgtatcccttgcgtatctgtccctgtcatagcttctctctctcccgcgatattcattctcaagatgatgttcaggcatcccatacctatcactcacaaaacggtctcctggtggtgcgtatctacattgttaatacatcaaaaggtcatgactttcctaaaagaacacatgttggaacatttatttagacctgaggacaagagctacaaacctctcaaatggatagtgatcacgaggctcatacttgtctccactgtcgaagcggtccctgtagctatatcgtcccccatctcggtcacggcgtccatccatgtagcggtcaaactcacgctcccgctcccgctccctctccagatcacgatctccatagcgatctcggtgtccatctatgtctccaatacgagagcgcatcgcaaggggaactctgaaccgttctcgatcgtcaccagttgatgggcaatctcgagcccaatgaccagggcgtctgcatttaaagcactcatcctcggttcccttccctcgagatgaatagcctccacctttctttaattggtctacatcttctccaccaactttgggctcagctttgttcacggagatgaccttattgcccaactcccttccatgcatgtgcttaattgcatcatcagctcctctgcgatcagtgaatgtaataaacccaaaaccacgtggacgcccagtatctctccccaccataatctacaagtacgcaaagaagaccaataatgttattaaaatgcatattgagccaggaacaagatatattactaagaaccagatgttacattagagttaagaactaagcagatgtattacattcctatctctcatatagcatgtcctagaactggcaaactcagaacatttacaagcaaacatgaagacggtagcaagattcacaaatttacttcatttcaagtccttagaatcacacaacacaaagtcaaactacagctgcatacttgtagaaatactaatccacaagaagtatcaccacaacaataatcctagcaaaacgatgttggagattagcctctagccaaccatacttttaacccttacaacagacctgttacctcaaatcagtttcccacaacaaatccacaggaatgcgttttccatgctaattccactaaaaaagaagactaatattctgatcaagacctaaaaaagaagactaatattctgatcaagaccatttttgaccagaaacttatcatcgttttggtatgactgatttgtaacaaagtcttcggggat

SEQ ID NO: 1984 - DNA, 1668 bp, Arabidopsis thaliana
gtacatagacgaaagtggtgccatgacagtagataaataaagacgcatcggagagtgagttgacgaagccgatgttgaataggtgttgcttcagctccatataccacgctcggggggcctgtttcagtccatatatagctttgcgaaggcgacaaacatgagtgggacgatctttgtcgatgaaacccgggggctgagccatatatacttcttcggtgagagttccttgtaagaaagcattgttgacatctagttgtttaatctcccaatctttcttaactgcgacatcaagaacaagccgaattgttgtagatttaatgactggactaaacgtttccgcatagtcgacaccatattgttgattgaaccccttggccactaagcgtgctttgtatttgtcaatggcaccatttgggagatacttgagtttgaagacccacttgcaaccgacaagaagctgagattcatggggaacgagatcccatgtatgatttcgttgttgggcgtcaaactcatcggacatggcaaaacgccactttttgtctttaagggcttgagtgacattggtcggctcggatggagaacgatttgggagagtagcagtgaggctaaattttgtgtttggctttttgatattgtttttagctcgggttttcatgttgtgttgattttgttgtggtgcagttggttggtgagaggcgtcggagacggtggttcgatttggagtggtagtggtggttgtgggtttgaccggtttagggtgaggcgcaggtgttggttcaatttcattggttgggtttcggtttgggtttgggagtggaccaataaaggcttcatgggttggattcgacagtgggcctataggtggtgactgggcctcaggttcaggcccattttcatttggagcagtgggctcagaatttaaagatgaagaagaagataataagggtgacgaagagcgtacctgtgggacttgaaagtccattgtggttgaccggtgaggagacagaggagccggtgaggttgtcggctgtgatgaatgtggtgagttcggcgtagtcaccggcggttgttgttggtgaaggaccgtacacggggaagacaaacaagatgggagaaccgacgatgatgagagtatgggcgtaactaacggcgaggagctctgttcaaaggttacggtggggagagaattttgggatgtgaggttggagaagggaaaggaggcttcatcaaacacgacatggcgagatgtgtaaagtcgcttatgttcaacatcgaaacagaggtaggctgtttgagttaaagagtaaccgaggaacacacaccgtctcgatcgttcttctaatttgttgtgagtgtaaggtctgagccatggaaagcacagacaaccgaatactcgtagacgctcataattcggcttggatccgaacagcttctgaaacggtgactccatggatagcaccggagtcggcattcggttaatgagataaacagctgcggcgaatgcgtatggccagtattctcgtggaaccgaagcttgagtgagtaaggtgagtcctgtttcaacgatgtgcctgtgcttgcgttcggataggccattgtgctcgggagtgtgtggtggagaggtgagatgagagataccattggaaacgagaaactctcgtagtg

SEQ ID NO: 1985 - DNA, 761 bp, Arabidopsis thaliana
ggactgcgggccgtttttggcgattttcacggaaggtgcagtgaagaaaggattgttaacggagaatgacatcaatttagcacttgctaatacattaacagtccaaatgagacttggtatgtttgatggtaaccttgggccgtacgctaatcttgggccaagagatgtttgtactccggcccataaacatttagctcttgaagcagcccatcaagggattgttcttctcaaaaactctgctcgctctcttccactctcccccagacgccaccgcaccgtcgccgtgattggtccaaactccgacgtcactgagactatgatcggcaactatgcagggaaagcatgcgcctatacgtcgccgttgcaagggatttcaagatacgcgaggacacttcaccaagctggctgtgcggcgtggcttgcaaagggaaccaaggatttggtgcagcggaggcagcggcgcgtgaagccgacgcgacggttcttgtgatgggattagatcagtcgatagaggcagagacacgagatcgaaccgggcttctcttaccgggttatcaacaagacctagtgacccgtgtagctcaagcttctagaggtccagtcattttggtccttatgagtggtggaccaatcgatgtaaccttcgctaagaatgatctcgtgttgctgccatcatttgggctgggtatccgggtcaagcgggtggagctgccatcgccaatatcatctttggtgctgctaatcccggtacgttgttggtt

SEQ ID NO: 1986 - DNA, 963 bp, Arabidopsis thaliana
tattctatgattatcatatgttcatataaaggactgttgtagaaaaccttcacagtgccacaaatatctcattggattgtttttgtttgtttgtcttgaaaactatcgataaacagctgtgacattcttctcatgccgtcgagattcgagccctgtggtttaaatcagctatacgcaatgagatacggaaccattccagttgttcatggcactggaggactcagagtgagtttctttaaatcttcaagaacccggataaatacaatcaaattgttttgaatagtttggtactaaaagggtaatgatttataactggatcatgattgttttcaggatacggttgagaatttcaacccttatgcagaaggtggagctggtactggtacagggtaataaacaaatctgtttttgagaaaggaaaaaaatcatcaaattcaaatgatttgtgttgttatgaatcgttcttttgtgggtttaatgtttcaggtgggtcttcactcccttgtcgaaagatagcatggtctcggtaagtttatctaactccccatttctcaagaggatttgtggtttatggtttttgtgggtatatgaccttgttgtgttacatacatctcaggccttgaggttggctgcagcaacgtacagagagtataaacagtcatgggaaggattgatgagaagaggaatgacccgaaactactcttgggaaaacgctgccgttcagtatgagcaagtttttcagtgggttttcatggaccctccctatgtcagctagaccaaacataaactgaaccaaaccgagttggaccggatcagaccagacctgaccaatcagatggagagtgtggaacctccttttccggctatcgaaaatctatggttttcaacgtttccacattaaaccgtgtatctatctatgtctagtatcttaaactcgtatggtgtttgttttggggaggtctc

SEQ ID NO: 1987 - DNA, 561 bp, Arabidopsis thaliana
tagtaacgtgccgccagtgtgctctaaagtcgccattatctctggcggctgggtggcagaaagtccgacctgggcaccgtactttgactttaccggcgtgcagttgacctggatgctggtgggttacggttttgtggcggcggtgctgccggatgtggttactgctggccccgcgtgactacctctctaccttcctgaaaatcgggactatcgtcggtctggcggtaggcattttgattatgcgcccgacgctgaccatgcctgcgctgaccaaatttgtcgatggcactggcccggtatggaccggtaacctgttcccgttcctgtttatcaccatcgcctgtgcgccggtgtctggcttccatgcgctgatctcttctgggaccacgccgaagatgctggcgaacgaagggcaggcgtgctttatcggctacggtgggatgttaatggaatccttcgtggcgattatggcgctggtttccgctgtatcatcgatccgggcgtgtattttccatgaacagcccgatggcggtgctggctccggcaaggacggcggatgtg

SEQ ID NO: 1988 - DNA, 565 bp, Arabidopsis thaliana
agttccatcactgtcaatttccaacttccacaaacaggacattgaatcctttgttatcttagttacctatcagttcgataaaaaactaaaaataggtgtcgacgtggaggaattcgagtgtaaaagacatgacacttccaccacataacaattttaaggaccaatttagcagaagacattttttccgtcactgacaccagcaaaaaatatctttacgaaatgccaagatgattataaaccataccaaaagggcatgcccgaggctggcatcaagagcaagaacaaggctgtcagaaagatgtttgacttcagcccatgaccagcggttctctgtaaatttctcgggaataatcaacagtgtatcatcaggaagaccacactccctcaacaaattgacactcttagcttcatcagccatttcgcttaatgactgttgaagtcgccgtgcttctccactctcttctaatgtattatctgacttcatatgagtcacttggacatccgacatgagttctgacagtgtaatcgtcagcaaagcctcagcctagcagtctgcataaagtat

SEQ ID NO: 1989 - DNA, 1415 bp, Arabidopsis thaliana
tttttaatcaattttctttctctactagttgataaaattatgaaaattattgtcttatacatattaccatgccagacaaaccctatacaagctttaaagtggattctttttgaaaactatgaactgaaatatccactagtcgcgctatttctgatgggccaattgatgaacatcgattgtcgataaacaatttaagacaacgactaaaatttgattagatcattgtgctaatattatattcaattttatgtatttctaattacctaatatgttcaattgtatatttgtataccgtaaggaaatataatatagtttcattatttgattagcttagatccaacactctagataattgaagaacaattaaaaacataaattactagatagcacaaatgctacacacctccgccctctaagactggtgaagcaaacgacgcaagacaagacaaaaatgaaacacacaaataacacaaacaaacaagtctctgcataaatatgagtaggctcttattgtctcattcatctttctaagagcatcgttcacgtgccaaaccgagccgtccattggggacgtcgatgaggacacggtggttctgctgctgcatgcttgcgatcacattgacgacagagtttacgttttccggcgctgcagccatggcgaggcacgacgtgcttccggcggtactgtgtaacatcaggttatcagccggcatcgtcatgttcactcccttgaacatgaatgttatcgtcggcaccttgacttgccctgagtagcacgtgtcgaaacccccgagtgacgtcaccacggctgtggttggcttcacgcgcttcctgaactcgttcctcactgcctcgtaaaccggtttagccagccgcgtgtacacagttcctacacagcaaatggtttagttaatataaccaaaccaatctaaaattatattataactgaaaataaccgaatcgaataaaatacactaaattattctattttgttacgtatatattttagtgtaaaacaatacgaaatacactaattaactaaagatttatgtttttagtctaaaccaatacgaaattaataccaattgaaacagaaaactaaaacctaaccggaaccaaaccggacaagagtaattaccggagtcgaagatggttccagcgccggttgaaggattaaaagcaatagctgccggcggtaaatcgacgactttccgaccaacgcggatcgcaacgaggttgacgtagtacagagaagaccttctagggtttctgagaagttgagtgtacttcacgcgctggggctgggaggtagggccgagtctgagagaaccagagaaggtcagagacctgaaacttggcaaacagtaagagaaagtggacttgtaaatagactgagcatgtgacatgagtgaaag

SEQ ID NO: 1990 - DNA, 529 bp, Arabidopsis thaliana
gagctgggaccgccatgattgctccggttccataactgtcacatataacaacgttctctgtttcacacaaattcatttcaaggcaatgtaaacagttagaccaaactaacctagctagaacataatcagctacccatatgggaatagcatctccattagctggatttttcgcataacatcccgtaaatacgcccgtcttgtccttctgaagttctgttctctcaagatcacttttcctcgaagcgaaatctttgtattcctcaacctgcaaccataagagagaactcatgaaaatctgaaaggcaagttgaataatcgaaagaagaaaaaactcttacttgctgtttctgttctgcggttacaaagtaagacaacaactgatgctctggtgccacaaccatgtaactgcgaatggaagcaaatatcatattaagacaatcaagatcaagatttcagatgttgaatatataattaatcctttaagcatacgttgctccaaaaagtgtatctggcctcgtggtgtacactg

SEQ ID NO: 1991 - DNA, 546 bp, Arabidopsis thaliana
gaaagcatggccttgaaccttctccactgatttcttgctctctctgtaaccagccactgttcaaaaataacttaaatcattctcaaggaataaaacaagcaggtgattgacagtaaagcaaagataaagtggaaatctcaaacctgatcagcttctgtgacagttccaggtataagaacacttttggatttaccccaacgtcgagctccctcaccaaccaacaacctggggaggcaaatcagaaagttcaacccaacgctagcgacaaaacaagattcaaatttgggttgatatcagaacaaagaagagtgattcgttacataggaggtatacggcctaagagagttgagccagtaatctgctctttcaccaacaaagcagcaattttgatagcatttctgacacctgatctacatacagttcatcgtacaaaatcttcagccattccacaagtataagaacaaggttaatatgagagcttttatgagtacctggaactgctccaacaccaccagacatccctgaatctccatccataagactagc

SEQ ID NO: 1992 - DNA, 1139 bp, Arabidopsis thaliana
ctctagtttttctttggagaggttttgttttcaatatagagttgtgtaataaagacgtctgaaagcttatgaagaagaatggcatgttttgctctgttctcattgctcatttcttttacatcacacactgtcagtctccatcttgacattactagaaaatgtttggataacgaaataagacttggaaagaattgggaaaagaaagagattcagtttctcatattaatctattattagtttattactagtatcacattaaatgtaagagtaagatatcagatcaacaaatcattagagctctttactgttgccatccgtattgctggtttctctgattctgccctcttcccgagctaccagagccaccatactgaccaccttgtgtgtagttaggaggtccaaccccgtacgggccaccactaggccctctaggaccagccacataaggagctccacgtccttgtggaggatatgatcactgctgtaacctcctcggctttgattataacccccgctctggttccgctagagggtagcggtttggaccaggtggaccacgcggctcccatagaagttgtggctgggccagcaggtacttgtggtggtgcgttgttagtgggatggtttggacctgcaggccaatgtggagcagcatgagactgtccaccatgttgtaatgggggtaagcgagagtgctgcagcggtggatgctgcagtttctgtctttttgctgcttcctcgttttggcgctgctgttgccgctttttctttgtctggaactcatgtgatgattcatatgtgggcagactgttgaaatgaaaccttaatttagtcagaaaaaattccccacgatcgcctgtctaataagctagatgatgatgcaccagatgagtttcatgaactttgtcagagaaaatcagaatatacaaatacctctttgggtcacatggcaacggatcagtccaaaagtactcggcatcaagagcatcctttgccgatattctctacacaggggaaagaaaaaaaggagacattaaatatctaaatggtgttaacaatgtcctgacttgaagaggtatgtttcaccaaaaaacagtaaaagacagtttttaagaaagataattcgctgggaataagaa

SEQ ID NO: 1993 - DNA, 780 bp, Arabidopsis thaliana
aatagtactatatatattctccagcattttattcatacgttataaatatttcttgctgattatatagctaacagtaattagagacggaaatgacatcaaagtcaactcccacataaagcttatccttcaccaaataagggtcatcaagttcccccaagaggcatgaaatccgcaaagccatggcggtcatcaggttctgcaccaagccaacccgaaactatacgtaccaggagaaaaagattagtactgtatttaaccatcatgcatcacaagactttccaaaacataataaacacatacttgttttctcaacatgattcctgctaacttgatccaatacacgcagcttgaacctcgcgtaagttttagtctttggtgcattattgacaaaccctagtgccgatagatacacagaaaatgatttgtctttttcacccatagaccctcttggatgaactttaattctcctgatcaaatatattgtgatgcatttttattagtattatatataagtcgtgttatgtttttgggaaaaaggaggaatataatatcaaccatttccgggttccaacgacaaattcattagactgatgaacgtttccagggttgaaggacgagaacatggtcatcatccaagtgactctgtgattaagaggcttctctattaagctaaaactttccgctgttccgggtttagcaggttcaatcccatggaacttgacaccaaacatacaacaatctccaataaggaaccatttttctaagatcacaagagatatg

SEQ ID NO: 1994 - DNA, 1326 bp, Arabidopsis thaliana
  unsure (1)..(1326): unsure at all n locations
tatgccacattacagctcagaatcagggttttctcctccttaggcggagcgaactgcctggtgagccgagatctttcccatgggtccaatggcactcgttgcggtggttgaggtgttgctggttttgattgcctaagctcgttctctctgtcaataaacctatccaaagtatcaagtatcgaccaaattagttcaccagaaagcttccaaatcattaacacttcttatttgatctaacatggagatatgaatgtaaaaccagaaagactgataaagaaaagaaactagttttactcgatataggccataggagcagcatcaccaactcgtatgcgagtacgtagcagtcttgtgtatccaccagctctatctctgtaacaaatantatatatccagataatgcaaagcgcttaggcaatggactgttaaaatgatgccaaaagaatttgaagactcacttgtatctatgtgccagttctgtgaaaatcttgtgaaggacatcatctcctctcacaaaaccagctgctcgccttgcagcagagagtgacccctataaatttcatcaccaagatgaagttatcatacataacgagctaacacctctatcagaccatatagtactgctgattagaaatgagaagaacttagtagggcttaaaagctggcacatatagtgtgatacaaaagatggaatgttatcaatcagtaatcgaataatatgaaactctttgagttcaacaacagtatcaaagacatgaaggaaacataaaaatacctctttgccgagttgaatcatattatcagcaagacgacgaacctctttagcctgcaaaatccattttttttctttagcatataaatttgcaatcaataaataccactacacacgtttcacagtgagtataaaatagctcaagaatcggaatttgctattaaggagtatcctttttccacaaaacagacattagaatctgatgaaattgagttagacgtaggaaaatggcagattctataaaccctaattaaaccctgacaatgggagaaagagaatcagtacaataccttagtgacagtggtctcaatacgctcgtgcttcaccaactgagaaaccatagtcctgagtgataccaacacttcaaaaatcaaacgatttctatctaaaaagaaagtgagacgtagcaaaaagaaaagctggagactaaacctaagcatggacatacggtgacccgccggccgaccaagcttcctgaacttcgtcatttctgcgtcggagaagtgatctctgaacagagagaagaaccctaaaggaggaggagagactgtaac

SEQ ID NO: 1995 - DNA, 1571 bp, Arabidopsis thaliana
ttctcctcgaaataatcacacattacccttcatttcttgccctagcagtcacaacaatagtgaccaaaatagtcataacaatagtgatcaaaatagttctcgtcctgctgatcatactcttaccgctcctcctccagtcagcagtccgattagccagccaaaatcagattctcctagcatccatgacgtgaaaatgctgacttcgatcgttattcctttgtttggattattagcgagtttgatcggcatgtgaagtataatactgcacataccacatataacacttagttacgttgtgtcattgtgtgtaatagtactctcttgttatagtttatatttactatatacatgtaaaagttttataacgatgaaccttattgtaacaatcagtttaattatgagtttagtttttaaatttcctttataatatttctttagagactttcctccaaaattatttgtctgacaaccctttcattgtactcggcctggttagatataaataataaacttatgcttacaagttttacatgatactatctattatggtatatattaataaaacaatattatatttaaaaataaatcacacaaattatacactaaaaaaatttgaactttataaaatgataacttatttttctaaaatgaaattataacttttgttaaaaacaagaaacaaaattatttaaaacgtctatcaaatgagtcgggtattcgggtcaagtatccagacaattgggtaaaaccgacccaagatctaaagtcttttgttttcctttcctttcgcagagaaaccctactaaaacctttggcaactttctctgcctccatttctatggattcgaatttcttgttcatcaagccaatttcgtcctcttaaatcctctttacaccaatttttaaaatccccttaaaatcggtaagaaccctagtctattctctcttcatttctcattccctttcgaggagacaaatggctcagaaaattgcgattggtgtgatctcagccctagctgcctccgcttctctcgcgccgtcgaaattcgctgctgcagatggacctttcactttctctggcttctccacttctccgtctgcttcgattcctcagcagcaaggttctactccgccggcgtcggaatctgggaaagaaccgtctgttgctggcgaagaatctgatgctcctcctcggattcggaacaataatccgagaacaacttcagctgggtttgatccggaagcgttggagcgaggagcaaaggccttgaaagggatcaacaactcagctcatgccaaaaaggtcttaagaactaacccaattctgttatttatagaagctatacatagatacttccgactagagattctcaagtagataagagttgtgtatggtgtagccaatggaagataagttcgagctattaagttttctctagtagtattctgggatggatgtcaatttttttttcctgtgtttatcagtcatgcttggcctcacgattgatgatttggtttctgataggtatttgaaagtattaagactcgagaagagacgaggcaggctgagt

SEQ ID NO: 1996 - DNA, 613 bp, Arabidopsis thaliana columbia
  unsure (1)..(613): unsure at all n locations
gggtacccctcatactgtttttatgttaaattagtaacaaaagttttcatactctctgcttatgccaacattggtggttacttatgattcctatataggtcagcagaagtatgtgtctcatgttccttggtcttccaatgtgtgaaagcggtatgcaaaaccaaaagacttggcggtggcttttgaaacaagatcagctttcattgctgccgcagcttctggtccttgttacctattaaatcaacgatcgtgaaactcacactggacagagatgtggataagatgataacttgtcatccccatagtttcgttggtatctctatatttctctgttgataaattaggattgttattttcagttgcatgttaaaacaatcgaagaagctttttacatggttttgatgaaatgacaatagatttcggttcggcgtacataggttttgaaattacaagtgatttctgtttggtttagatggttgtgaaatgaaaattaattttggttcggtttgtattagaatagtacggttttgagaaaaaaaaaacaaaagaaaaagtcactcgaggctgttttggaacaaagcgagtagatgtnaataggcatgattttgtgggt

SEQ ID NO: 1997 - DNA, 699 bp, Arabidopsis thaliana
tagttattttgaaatcattgattaatgtcaccaaaaaaaaaatagaatggattttgagatactaaaaatttcattttcattttgttctacaaacattgaaaactagattcagctgagcccctgaagaaatcaaagtgagttgaatatttttctaaaaatgtgaaaactggtaaaagtttgtcctcattttgctagaaaaaggattcactttaaagttaaaagaataagataaagcttcttttggaaatctcagcattgcactaccgttgcttgcaaatctagaatctggattttaagatacttccggtgctcttgttcatgtttgcaccaatgggattgttttggtgacacatggaggttttgaaatgggtcaaggatttgcatacaaaggttgctgcaacggcctttaacattccccttagttcggtttttgtgtcagaaacaagcacatacaaggtacatctaactcaaatacatgcactcagtggacttttggccaagacaagattattattgttctctcttatcatttttgtggtctcttcataggttccaaatgcctcacaaactgttattgctctcttgtctttttgatattgctacgaagcttgtaagagagttagacgttgtgtggattagtgtaatttgtatggacagactttttaaaaataaaaataaatgggtctaatagttaggatg

SEQ ID NO: 1998 - DNA, 831 bp, Arabidopsis thaliana
gtcctggccgtgttgacaagagacacggtgaggagacagaggtaagtgtttccggcgaaggaagtttcgttgacaccaagaattgaccaccgagtggtactctaccggagagatcgttgaaagagagatcgagagttgttaaactcgtcatgtttccgattccggtagggattgaaccggttaattgattaccggagatatttagagttcctaagtttttcacgttgttgatccctttagggatttctccgttgattcggttacggctgagatcgacggagattaaagttgagcagcgagagattgaatctggaataccgccggtgatgttgttcgcacttgtgttgatcctcgataaatgcttcaattcgaagatttctctcggaatgttgccgcgaaatcggttccgatctaagaatagagtctgtagattggggaaattaccaatcgcaggtggaatctcgccggaaaaccagttgttagagaggtaaatctgatcgagaacatcgccggacatcgttaccggaagttcaccggagaagaaattatcagtgagttcgataatcgtaactaacggtagattgaaaagccccgccggaacagtgccgttgagaagattcttaacgattctgattttggttaaggatttgcatttaccaagctcttctggaattggaccaaagaagaagttgttagagagaattaacatctctaatttctcacctctgcataagtccttggggataagtccggtgagatgattatcagagacatcaagctttattagattcccgttccgccaagattcgccggtaattgtaacgtgaaatg

SEQ ID NO: 1999 - DNA, 588 bp, Arabidopsis thaliana
ctagctgtttcgtcattcttcttctgaaagttgtgtgattttagaagtcacaaaaaaactattttgagatactatgaatatttcgttttgcattttgttgtgcagctatttattacacaggttgaagcttataactgaaaactggattcaaagagtaatgaaaaatcccagagatatttatgaaacacaaaacttgattttgatgttaaacaatgtcatcaaacgacaaaggttgattagcagcagcagatctagtcttctcaaattgcaactcatctttgagttccgacaatgtcaccttcagaattttgatgcgttcctccacttgtttgacacgagaaccatcatctactgcattcttcctcttcaaggaaacctcctcaagctttttctttaaccaatccagcttaaagcccgcttctgtcagctccctcaacgtgctgttagccttgcttaactcaatatcagaaaagctcagtggaggccttcgcaacgtctcgatgaggctgaggagaagactcatgtatgctgtcttcagacctttgccatttagtttgaaaccagttgcaatgtctgggtgtacatgaa

SEQ ID NO: 2000 - DNA, 1340 bp, Arabidopsis thaliana
acaaccttaacacaaccgttatcaccaccagtcatcaaatgccccatcaacttgtgcattgtaataacagatatcttgtcggcaggcaactgatcaaggtaatgtgcataagttgctttgctcttccctaatctatacaactcctggtctttagcaattgcatctcttaatggttcgaaccaacccagaaataaagacttcacataaggcagattaggcgcaacgttttgctcacacatatctgtcaaaagctccatgtactctgcagcagctctttcccattcttcagtctcgatcttaacttgtcttctccataaattctggaacttggtacgacccattccaaattggtcttgcttcttcatccgccacgaacgatgactttctctcttcttctctttcttcatctccttcaacaattcatctacctcaggctcttcctcaacatctgttgataagacctcctcttcggctacactcgtgtaccctctagccaaagtcccactaaggcacctctcgctcttggaaaactcctctcgcctcgtgatcccacttaaacaacgaaaaccctttccgtgacatggtgatcccaagaccggaaaccgaaagctcaaatttttcgagaaaatagactccggagaagacacaagaaggccacgagtttgggaactgacgtttaatctagcagctgacctcgaaattgcttgtttagcaatgtttctccacatggggaaggattgggaaactgggtttggagaagaaataaagggtttatgcaatggaatcaagtgatcgaataccttagtctgatttgccaagaacagtggggtttgagcactggacatcaatcgaacttaaaaattgagtaaaatcgataaaccagaacaataaccaactcgagattgaataaattcgatcgcatgagcaaagaaaaatggcaaattgggaagagtttcatagacggaagaaaataaaaacaaatggtgagtgaagcgtacacgacgaagccgccttaaaccctcgcttaaaaacccttgctttcttaagcctctgttttttttctctgggttgtctctgtttctcacatgtcagacaattaatacataaattaaaaatatctaccctaaattcgacccgtataggaggatcttacccgacccgggaagtatctgattaaggcctctaataacgggccaaagtctctttactatgcaaaaaggcttgacgaatttatggagccttgttattcttatatatatatacaaaatgaattttattatagtttcttctattatttttaccatttcatacaactttttagtggaacccaattaatcaac

SEQ ID NO: 2001 - DNA, 737 bp, Arabidopsis thaliana
cggataataaataaatcccagctaaaaagaatgtcaaaatctaattctgaaaatcaagatacaatctttcagaaagaagaagtcagtcaacaaagatggagacagatactatttcaagttgcaacatcttcaaaagcaagaaagtgagattctattgactacactgaaaatggacttcactagcttctgtaaacattacatcaacctctactctctctagtctaggctcctctaattgtccaacacaaaatgacaaattcgttttgtttttgttcagatagacaaaattgcatgtcaccaagatttttttccttttggtcaaattgtcaccaagttctgtttattaattaactcaacactctgttaattctttcaaggctttccacgtctttgaaatcaagagacccgtctccttcagcatcatagcttgcatgaacactataaaacacatacacgagcaccactaatcccgagaagaacccgaatctgatatacgaaggagcatccaatgatccaagcaagaaaatgttcaaaaatatcgaaacgcatggagtccacggcatcaacggtacaccccaaaactcagggatcctagcttgaggtacaacacaatggaatatctggacgatggctatagccgtgaccgtgctagctccaagtatgaaccatttaggtgggcccgacggtgcaagttgccagaccaaggtaaacaaaattgaggttatggagaataggca

SEQ ID NO: 2002 - DNA, 989 bp, Arabidopsis thaliana
catcttgctgatgaatcgatctctgttaacaggaagagctttcttctttccttttccggttttcggaacctaaaaaaaaacacagagaacccatgtaagaaacagcacttgtctactagtaaaccacaggcagaaaacagatacaaaagatgttaacctcagtccacatttctctgacattttcaagaaccatgttgcagtgcctgtcaaaagccctcactcggccaaggagtttcctgttgttacggcaattgattaaaacctgaacataaaaaagttgaccttgttaataacctttccattttaaccactcttcgttatacatttcaatatttcattgtctaacacctagcccatgaaggtcaaaaacatctatccatttaatcagttttcatatacaacatcattatctaacatcagaagctcaatacatctcctagagatctctatacctgagtgttattcttgacgctcatcataagaacagagagtggcccggtgttgaattcctcttcctcagtcttgccctgctaaggacagtatcaagcatgatgaattagaaacaacatttaaggagagaacacatccttaagagtatcatacaagcaggaaactaatggagtttataacagcaacaatcaaatgacattacaacaaagggcagaagtgatgaaaacatccaattctctactgcccattcaacgcagaacggaacaaaaattcagtgaaaatctttagtggcacagtcctactcaagtactagagacagctaagattgatgaaactggaaacagtagatgaattatggcaaacagcgaatcgagaaaagcagtagcgagagaaattagaaggaagcttacattggtatcctcttccattggcttgctgcgagaaaaaatatagaaaatcaagagaaacaccaccagtgttagacaagtctcaaattgagcccacaaaatgcagaagaaacttagaaccatcgagagata

SEQ ID NO: 2003 - DNA, 845 bp, Arabidopsis thaliana
  unsure (1)..(845): unsure at all n locations
gttaatctacatattactggttaaagaagctgaaggattcatatttttagatgagagatacactgtttattattgttttcaatatatgagaggaggaactcccatactatttttatttttttagccaatgagagagctccacttcataccccacttttaccaatcgtgccatttcacatccacaaaaatcattccttttaggatccacgcacctcattctcaaaaatccatcgcgtgtcttattttttgggttttcttctctaaaccaaagtaaaccgaaccgagatcaatttgaatttcaaaccaatgtaaacccataaaacccatctgtgaaaacaaaaagctcggccacaaaaatggagacgacacagaggtacaacttggaagagaaatcaattcgaaagagccaagagaatgtattttatcatcctaacggacataccgtatttcagccaaaatcaattcgaaaaaccgttaataaaccggctaaaaattgtaaccaaaaccagattcaaattgcaaactgaactaaaccggaaaacagagacttgtgaacctgagagcggtggtcgaggctgctgctgatatcaatctcggtgagccagattgggagctggagcgtacangntttatcgaggatggctctcatcagcgctacgtttggcgtcgtgaagtgaccctcgagaccgattccgtccatccttatgccgtcgtaccgttggagttcctcaccctggcgatgtattcgtcaaccgttgacttctcgtcgctgcaagtctcgcaccacgttgaaatcattgaagaacagagtcgccaacgagtcaatctcacgaaccgcggcgaag

SEQ ID NO: 2004 - DNA, 580 bp, Arabidopsis thaliana
ctaaagctgtggcgtggacgtgaaaattcgagcaattgctgaataactttgttaattgaatcgatttctttgagtactacggacagatattcctgatgtattgggtcactggtttgttggcgcaagatctgtacataaccacgaatagccgttaacggattacgtacttcatgcgcgacgccagccatcagctcacccagtgtggcgaggcgttctgcttgcgccatgcggcgctgggtttctttgcgggcagttaaatcagagaaaatcaccaaagcacctatcatttcaccgtgcgtgttatgaatacgactggtagtgacactgagttcaatggtgcggtcacgacctggaaaactgatctccagcgccacatgttcggtgccatgttccagcgtatccagtactggactgtagaactgagtattgtcgaacaacatggagtaaggctgccctaccagttcatggcgttgatagccagtgataacttctgctgctgggttcatggtggttacatacaccctggcggtcaatggcaatgacgccatcggcagcgttttcaataatcagatcgttaagt

SEQ ID NO: 2005 - DNA, 408 bp, Arabidopsis thaliana
ccacaaaatcattcttgtgtccatccccatctacatgatcttggacaaccctctccaagaattcatcaagatcattgcttatctttataagttgaccatccaaaccgcggatccagtcaatccatgcgagccacgatacataactcccgacactaaactcgcctagtagcctcgttagccttttcattaagtctttaaaatcggtcttaccgccgtatttccgtcccaaagcaactctacatattacattgtttgtaagattcaccaggatctcgcttaaatttatccgcaaagaactcgatattcggatcttctcaatcatcaggctgatctcttcttgtctaacgtctcgaaaggatcgtaccattttgttactaaagagatggaggacgcacacacttttcattt

SEQ ID NO: 2006 - DNA, 617 bp, Arabidopsis thaliana
acagactccaagaagaagtccgtacgatttgtaagggaaattcgagtgtatcagaagatgacatcaaagacatgaactacttaaaagctgtgatcaaagagactatgaggctacatcctccacttccattgatggttcctcacgaatcaacacaagatgtcagattaggagattaccacatacctgcgggtacacaggtaatgatcaatgcttgggcgatcgggagagaggctgcgacgtggggaccagacgcggagaagtttagaccggagagacatttaaattcgtctgtcgatttccgaggtcacaattttgagcttattccatttggagcagggagaaggatttgtccagcaatatcattcgctgtgatcttgattgaggtgactttggctaacttagtgcatcggtatgattggagattaccggaggaatatatagaagatcaaaccaatgtcgctgaatcaaccggtatggtgattcacgtttattcctctttacgccattgtatcatctactacttgatggatgcattatacataaatgcttactattatgttatgtctacaataacatgttactcatttgaaaatgttgctaccaaagagagtttgaga

SEQ ID NO: 2007 - DNA, 602 bp, Arabidopsis thaliana
ggacgactcgataccagaagaatacaagcatggaatcaatgatcaggataattctgctaagcttgataatcttcattaccatcctctttttcataaaacagaaaaaagggaagaaaagcaacacacctgcgtcaccaccgagacttccgttgataggaaaccttcatcaactcggtcgccaccctcaccgatcactatgctctctcagcaatcgttacggccctcttatgctccttcgttttggccttgtccccgttcttgtagtctcttccgcagatgtggctcgagatattttgaagacgtatgaccgcgtttttgcaagccggccacggtcaaaaatctttgagaaaatattttatgaggcccgtgatgtggccttagctccttatggagagtattggaggcaaatgaagagcgtgtgcgtcctccatctcctcaccaacaaaatggtcagatcctttcgaaacgtgagacaagaagagatcagtctgatgatggagaagatctagaaatcaagttctttgcaagtgaatctaagcgagctcttggggagtttaactacgatgtgatactagagttgcttgggacggaatatagtgatg

SEQ ID NO: 2008 - DNA, 573 bp, Arabidopsis thaliana
gaaaatcttgacgaaacttgaagaatacaagcatggaatccatgacaatgataattctgcaaagcttaataatctttattaccatcctctttttcaaaaaacagaaaagagggaagaaaagcaacacacctcggtcaccaccgagacttccattgatcggaaaccttcatcaactcggccaccaccctcaccgatcactatgctctctcagccacagatacggccctctcatgctcctccatttaggccgtgtcccagttcttgtagtctcttccgccgacgtggctagagatattttgaagacgcatgatcgcgtttttgctagccgtccacggtcaaaactcttcgagaagctattttatgacgggcgtgatgtggccttcgctccttatggagagtattggaggcaaataaagagtgtgtgcgtcctccggctcctcagcaacaaaatggtcacgtcctttcgaaatgtgagacaagaagagatcagtctgatgatggagaagatccagaaatcaagttctttgcaagtgaatgtaagcgagctcttggggagtttactaacgatgtgat

SEQ ID NO: 2009 - DNA, 885 bp, Arabidopsis thaliana
ctcaaatcttaagatctctttaccactgacatgcgtattgtacgcttctaacaaagcatatctatatgctgtaatgtctaaatcaagtagtcatggcgaagagtgggaacatgcgatgaaccgccataccagttgattcagcgacatcagtctgatattctgtagattcctccggtagtgtccaatcaaactgatgcactaagttagccaaaaccacctcatccaataccacagcaaatgatattgctgggcaaatccttctccctgctccaaacgggaccagctccgtatcctgacctcggtaatcaacatacgaattcaaatgtctctctggtctaaactcttccgcgtctggtccccatgtcgcagcctctctcccgattgcccaagcattgatcattacatgtgtaccggcaggtatgtgatagtctcttaatttgacatcatgtgttgattcgtgaggaaccatcaatggaagtggaggatgtagccttagtgtctctttaatcacagcttttaagtatttcatgtcttgaaggtcgtcttctgatacacccgatttgtctttacaaaccatacgaacttcttcttggagtctgtctagacactcatggtggcatagtagctctgtcattgcccattccaaaagagtgtatgttgtgtccatatcacccacaaaaacatcctgaaaaccaaaacaagaactatggttatatactaactcatcagtgaatttaaatttgttttcgtatcttccctttaccaagataattgcttttatgcttaaccggtcgatttcaaacccaacgctcttctctctctcaattgtgagcaagaaatcacaaaatcattcttgtgtccatcccatctacatgatcttggaca

SEQ ID NO: 2010 - DNA, 1243 bp, Arabidopsis thaliana
gttatgaaataggtccaagggatgtaggaaaaccgaacccttaaacaaactttctgtgtagtttactttatgctcaaacatgcacgcacacgaatgtatatgtactcggaaatatagacgtagccaaatatgcgttttcaaatttgacacatttaaacaactataaatatttatacagtcatatattatacactataaaacagataaatttgttgtacaaatatattttttcacaattttatagaatgagattaaatatgactaaaagtggaagtttctttagtaaagtgtttgaccaatggtttgattaataattagacaccaggtatgaagtgcaatttttagtgaatacggttttttacatattactatataatttttaatgcgtgtgaagttgtgaaccaatagattgttagacaaaatagatgaatcatacataagctgaaggcctaataccagcagattaaatatgatcaggtatgtgtgtaaaagggtgtgtatccatgacattgatagcatgaaaacataattaaaatcaccgtggaaaaagtcagacggaccctagttttaaaaactagcaagataaagtactcttcaacgacgtctcaacaataaattagggtttaaacttcacaaaaagtgttaaataagaatacatcaagtataataagaatgagcttcttaatgaatggtgtcacagtgacagcattaatttagcaaagacctttggttttcaagaattgaattagtctggattaattattttttaaaaaatatatttccaaaatccctataaatagagaagggaagcaccctcttaggtactactacaaagcaaaacaagcaaagaaacacaaagagaaagcaaagaaacactttgagaccaaaatgacttctactgtgattctgggatccccctccgccgaggtaaaagcttcgtactggttcccagatggagagacccaggaccccataacctcggccgaaaccattccctcagctctcttcactcaccttttctgcgccttcgccgatctcgacgctaactcccacaaagtttttgtctcccaagcgcacgaattcatattttccaccttcacggaaaccgtcaagattcgaaaccctcaggtgaagaccctcttgtccatcggcggaaaaaatgcaaacaattctgcgtttgcgtccatggcaagtaaccaccagtctcggaaaacgttcaccgtggtcttaattggccgggtcg

SEQ ID NO: 2011 - DNA, 763 bp, Arabidopsis thaliana
tcaaaatgtatatgaataaaagtcgatgtggctcatctattgagctcatgtctctcttattactactctctagtatggtgtgatgtaatgggtatgacccttctttcccttccctataaaactaaagaaacttgcaagataattgaaaagatggtttctttttattatcaatcgcatcaaaatgggattttgtatcaaatgcatacattatctcttgcttttataccctaaacccataccgggtgatgaacaatcttctgttgctcattccttttgatgatccatcaaattacgtattagaaaaagaaaaaaaagtatcagacgttgaaaccttctgctcggagacaaattttatgagcctcgatccatttagtgcaagccgattcaccatgctcgacaatgcactcatctctcagcttcttggtatcagggcaagcacaacatatcctcttctttggtttcgtctctgctgaggcagcagccttgcttggctctgaagtgggtggaggaatcaatccattttgtgctggctgatcagtcatcctgtagacaacgaaaaaaagaacacggtaaaaaaaatgaacatgataaagaacaaatggcataaacataagtcacatactcacatcgcctaaattctccttcaaatcctaacttatcattcatctgttaaagaagcgatcttaaagatcaaatatcaagtccttaaaccttgggatgtgctcataagcaaacacaaacaaagatcgaaataatatacttg

SEQ ID NO: 2012 - DNA, 988 bp, Arabidopsis thaliana
caacaaacaattgaacccatgattccataaacctgaaaaaaatgttataattaagtattcactgatgatattgcccttcttaatcatcgtgcttaatcttcttcaaggactgatcctgatgctcgaacggatcgatacaattctgctggattgtttgaaagtatgtctcggtgatagagagcagaaagtgttcaactacccgaagttttaccggttgcaagagtaactgaagatgaaaatcgggggacgagcactgcctcgttgcttacggatttcgaagctgctaactcttccaaaagcttccatgttgcttctcgtttggctacaacctcggtttcattcgcttcatcttcttggaacttggctaagcattcatcaaacagaatttggtctgtctctgccattacctttctcacattcaaagtcagactctgaactgcttggttcaatgcccccgtgtgttctctccatagccgggacacaatgggcattatcactttatggttttgagtaatcaggtttcttatgtgatcgttgttccatagaaatagagccctttcagccacctgacaaaagaagcaactttgaatataacctgcaaaattgcgagactatatgaacaacttatcgagagtcgcacctgaaaatgtgaactgttgaggcatctagcgatttgacgaaataaaggaaccatacatcgctgaaactcagctgcttgagttgcttccaaaacttcttccaactctccaagaaacataacttcctttgaactattagtcacaggccaatactttagaagtcctctaatgaccgtatcagcaagcttgaagtctttctctacaaactgaacaatgcaataagaaagctgttgatgataagcagatgcacatttaggtctgtggagtggaatcaatgcccggattaggaagagcttatgctcttcttttaacggtaaagcgaaaccgttgattatacttcctagtatctc

SEQ ID NO: 2013 - DNA, 1545 bp, Arabidopsis thaliana
catattcctgaattgtggcttcttctgttaagaatattgaagcgagtgctcgtcgccatttctgaaagaagggtctcttgctgttcatgttggtgtgagcatcagttcaagtttttgagatttctttggtgtttctgtttttacattgctggtttcttgatggttttaaaatagatgggaggcaaggatgggctgagtttgctccgtatgatgctattcacgtcggagcagcagcaccggagatcccagaggcgttgattgatcagttgaagcccggtgggagactggtgattccggttgggaacatattccaagatctgcaagtggtggataagaactcagatggttctgttagcatcaaggatgaaacttcagttcgttatgttcctttgactagccgtgaagcccagctgagaggggactgatgaatatgctcgttgtacagatgaatgaatcaagtaagctcagtcgcctttctaaattagcatagttagttaagaactcaaatcactgtgagtaaaactctcaaatgactaaacttgttttggtacaactaaacataataaaccatttatatataatgcctccatcaagtagtagatgatgcaatggcgtaaagagggaataaacggtgaatcaccataccggttgattcagcgacattggtttgattttctttagaatcctccggtaatttccaatcataccgatgcacaaagttagccaaagccacctcaatcaagaccactgcgaatgatattgctggacaaatccttctccctgctccaaatggaaccagctcaaaattgtgacctcggaaatcaacagacgaatctaaatgtctctccggtctaaacttctctgcgtctggcccccacgtcgcagcctctctcccgattgcccaagcattgatcattacctgtgtaccggctggtatgtggtaatctctaatataacatcttgtattgattcgtgaggagccaacaatggaagtggaggatgtagcctcgttgtctctttgattacagcttttaagtagctcatgttttgaatgtcttcttctgatacactcaaattacccttacaaatcgtacgaacttcttcctggagtgtgcgcagacactctgggtgacgtagaagctctgtcattgcccaatccataagtgcgtacgatgaatccgtaccagcaactaaaacatcctgaaaagcgatcagaaccaaaaaaacaagaactacggttatacactaaaacatcaatgaatatgaatatgagatcttcttatccctttaccaagacgatagcctttatgcataaccggtcgatttcaaatccgatgctcttctctctctgaattctgagcaacacatccacaaaatcagtcctttgtccgtcaccatctacatgatcttgaacaactttctccaagaattcatcaagatcattgcctgtcttatttagctgtccatccaaaccagagatccaatcaatccatccaagccatggtacataagtcccacactaaactcgcgcattagcatcatgag

SEQ ID NO: 2014 - DNA, 1027 bp, Arabidopsis thaliana
aatgtgaagtgtgtgtcgcctttgggcataggcggtggtttagctttgatgtggaagaagtctgtatcagttaatttcttttcgtttgatgcaagactcattgattgtaagataagtaataaagaagcttctttttgtttctcttgtgcctatggccattcgatcagaaagttaagacatattctatgggaaagaattgagagaatcacaatacatagacaagggccttggttaatgtgtggggacttcaatgaaatactcgatgccagtgaaaaaaggggtggtcgtgttcgtcaaaattggagttttgtggattttcgaaatatggttaacacatgcaaagtatcagatcttccattcacaggaaacaatatgacttgggttggcaaaaggaaaactcattatttggaatgctggcttgatagagcaatggccaatgatcaatggaaaacaagtgtccctgcttctgaggttgagtacttggagttaattgattcagaccatcgacctgctatcattaagatccgcaaaacaacagaacaaggtacacgctgctttcgttttgactccagattgtgtaacagacctgagtttgagtcgattgtcgaatatggttggaaccatatacccgcttctagatgctctgttgtagaacgaatccgaaactgcagatctcatatatcaagttggaagagaacaaacaacacaaattctgctaaacggatggcggagctgactgtgaccattgataacgcaagcactgacttctctgtttcaaatgatcatctccgtaatctcagaagggaactactactttcctatcgtgaagaagaaatgtattggaaactgaaaagccgaatacaatggcttaatgaaggagacattaacacccgttttttccatgcttctacaaagaaccgcatagctcgaaatcgtctactctcaatccaagattcagatggtagcgacatctatggtaatggaaacatcgcggctaaagctgagaaatattttggggaactgttta

SEQ ID NO: 2015 - DNA, 708 bp, Arabidopsis thaliana
gattctacttctttttttaaaaaagaagtttgataaatacgttggacatacttgtttttttttcgtcctgattggtaatttgttttgtggagtccaagcaatatcaacaacaacacagctatatggtggagaactcgcaaagttatggttgcacatttgaaatgagtaaacgtgtatgtttatcgtacacgtaacagaacaaagcatttctatgattctatatatataagatgcctaggtcaactggtcaagtagtatttgatgcaatggcgtagagtgggaacatgcggtggatcgcaatacccgttgattcagcgacctcggtctgatcttctgtagattcgactgataatctccaatcaaaccgatgcactaagttagccaaaacaacctcattcaacaccacagcgaatgatattgctggacaaatccttcttcctgatccgaatggaatcagttcaaaagcctgaccccggtaatcaacagacgaatctaaatgcctctctggtctaaactcctccacgtctggtccccacgtcgcagcctctctcccgattgcccatgcattgatcaatacctgtgtaccggctggtatgtggtgatccctaatctgacatcttgtgttgattcgtgaggaccacaatggaagtggaggatggagcctgagtgcctctttgattacagcttttaagtagctcatgttttgaa

SEQ ID NO: 2016 - DNA, 866 bp, Arabidopsis thaliana
aaccacaaatagaaactcttcacaagaacacgttttgatgtacttgaagaatccagacatgatgatcatgttctttctgttatgctcaataatctttgtagttaccatcataattttcagaatacagaagagagggaagtatagaaacatacttccgtcaccaccgggactaccgttgatcggaaaccttcatcaactcggccgccaccctcaccgatcactatgctctctcagccaccggtacggtcctcttatgcttcttcactttggccgtgtccccgttcttgtagtatcttcagctgaattggctagagacgttttgaagacgcatgaccgtgttttcgcaagccggccacggtcaaaaatcttcgagaaacttctttacgataagcatgatgtggcctcagctccttatggagagtactggaggcaaatgaaaagtgtgtgcgtcctccatctattcagcaacaaaatggtacgatcctttcgagaagtgagagaagaagagatcagtctgatgatggaaaagatcaggaaatcgatttctttgccggtaaatctaagcaagatcttggtgagtttaactaacgatgtgatatgtaaagttgctttgggacggaaatacggtggtgaaacggattttaaggagttaatggagagactaaataaactattggggacgtttagtgtggggagttattaccttggcttgcgtggattgattggatccgcggtttagactgtcaactagaaaagacggcaaacgatgttgataagttctttgagagagttgtgcaagatcatgtcgatggaaacagagatatgactgattttgtggatgtattctcgctattcaaagagataag

SEQ ID NO: 2017 - DNA, 599 bp, Arabidopsis thaliana columbia
catttttatatccatttttgagattttttgtttaaaatatgtttttttaccatttattgaaatatttacactctatggagattgtctttaaatttagttttttttttcttatcccattaatgaaattatttgaaaacaaaaataaaaatcttaaattaatcttgataaaaggaaaatatactgtttaaaatattttttaacataatgttttttaaatgtcctattctgttttgggttaaagcctatattaattgacatattcacaatttagtccatatactttcttttgttctacatataagaaaacaaacaaagagtttttgaagagaaaaaaaataattaaaaaaagtgattcaaatccggccaccgtcattgtcgccgtgacaagcaccaccgtctctgaagcttcaatctacttaatgatgcaaagcttccaccattagcagcagcagctgattttgttgttctcgtcagctttaccaactgacgcctccgcttctcttctacctttaacgtcttcttttcaaagagaggccgccctatctagtaattgcaaacacatttggtatgtcatgaagttgttgttatcagccagtcat

SEQ ID NO: 2018 - DNA, 569 bp, Arabidopsis thaliana
tgggctttaaacggcccattaagtaacgcgattagtttcttctccgttgtaaactgcgactttcaccggccacgagattaagtcgttgtcaatggatgatttggaagcttactattctcactataatttaccggcgatggttcctcctccgccgccgggagtttctccgattccaattacttcagctcattccgtctatttgcctacccatgtctcaattggagctcgcgatgaggttaggacgcttttcgtcgccggacttcctgaagatgtcaagcctcgggagatctacaatctctttcgtgagttcccaggatatgagacttcgcatctccggagctcagatggagctaaggtaatcattttctatctctccggatttgtgatttgggtaatgatgtttcccggcgaagagactgagaatcttactttatttgtttggtagcccttcgcatttgctgtgttctcggatctgcaatcagctgtagcggtgatgcatgctctcaatgtgagtacaaatttcttcaaacttgctcttgcaatgtgtcgccgatgtatctacttacaaa

SEQ ID NO: 2019 - DNA, 1089 bp, Arabidopsis thaliana
tttacatcatacatgttcgattgcttctgtgccattttgttatttgaaactctagaaatagctctatctggagtcttccttttacttgctccatattgttctgttgagagtaacaccatgtgataattaaaagattggttttttttaatgctaatgtctgatttaagcgccagatgtgtttgagtcgcagactcacttggttactagttgaagttatgctgacgttctctgttttatgtagatttggttgccatagcagagaggatgagcactgttaagcacaagattctggttttgtctggcaaaggtggagttggtaagagtactttctcagctcagctctcgtttgcccttgcgggcatggatcatcaagtaggtctgatggacattgatatatgcggtccaagcatcccaaaaatgttaggacttgaagggcaagagattcaccagagtaaccttggatggtctccggtttatgtggaagacaaccttggtgtcatgtccataggtttcatgctccctaactctgatgaagctgtgatctggagagggccacgcaagaatggtctcatcaagcagttcttaaaagacgtctactggggagagattgattaccttgttgttgatgccccaccaggaacctcagatgaacacatctccatcgtccagtaccttctacccacggggatcgacggtgccatcattgtcacgacaccgcaggaagtctccttgattgatgtcagaaaagaagtgagcttttgcaagaaagttggagtcccggtgctaggagtagtagagaacatgagtggtttatctcaaccgttgaaggatgtcaagttcatgaagctggcgacagagaccggctcctccattaacgtgactgaagacgtaatcgcttgcttaagaaaaaacgcaccagagcttctcgacatcgtggcttgtagcgaagtgtttgacagcagcggaggcggtgcagaaagaatgtgtcgggaaatgggagtaccgtttcttgggaaagttcctatggatccacaactttgcaaagcagctgaacaaggtaagtcatgctttgaggatacaagtgtttaa

SEQ ID NO: 2020 - DNA, 1236 bp, Arabidopsis thaliana
aatccaaatcagagctctctaatcagttttctgtaatcaaatttatttatattttaaagttaaaatataaaaaaatataaacgttataaaatctaaaatctaaaaaaaaaatgatgcttgttgtacagaataatgaatcaagtaagctcaccttgctttctaaaattggtttaattaggaactcgacactttaaaatctcaaacatatcttagcttacaacattttcaaatgaacaggtttattgtagacataacataataataagccttaatcaagtagtagatgatggaatgacgtaaagagggtgcatgcggcgaatcacactaccgattgattcagcaacatcggtctcatcgtctatagattgccaatcaaacccatgcactaagttagccaagactacctcattcagcaccacagcaaatgatattcctggacacatccttctccctgctccaaaaggaatcagctcaaaatcctgaccccggaaatcagaaggcgactctaaatgcctctccggtctaaactcattcgcatctggtccccacgtcgcagcctctctcccgacggcccaaagattgactataacctgcgtaccggcaggtatatggttatctcttaacctaacatcttgtgttgattgatgaggaaccatcaatggaactggtggatgtagcctgagtgcctctttgaccacagcttttaagtattccattccttgaatgtcatcttcagacacacttgattttcccttacaaatcgtacggacttcctcttgaagtttttttagacacgttgggtgtcgtagaagctctgtcatttcccattccacaagcgtggaggatgtgtctgtaccacccacaaaagcatcctgaaaagtgaaatcaagaccaaaacaattaatggttatatacttaaacaaataatggttatagacataaacaattaatgcatggttctacactaatagtctaaaacattggatttgaatttgatatatattttttcccttaccaagacgattgcttttatgcttaaccggtcaatatcgaacccgaaactcttgtctctctgagctgcgagcaatacatccacaaaatcagtcttgtcgccgtctccatcttcatgatcctgcacaattctctccaatagcttatgaaaatcattagcggtcttttccagtcgagcctccaaaccgctgacccaatcagtccacgcaagccacggtacatgac

SEQ ID NO: 2021 - DNA, 735 bp, Arabidopsis thaliana
tgtctaatatccatgtaccgttgttaggttcgaaatgtggctctgtttatgcaaatttataccattttgtgataaacagagataacctcaagtggccggttgaacttagaagaagctttccttggatcatttggaggatttggaaaaacaggaatcttttcttttttgaaggaaaaagatttactgttcttgaaactatattgaaagtgaggaaagatgtggaggattggtttgctgctcaggttgtagaaaaagaaaggagggctgaagtgggtcaaagtgatcagcaggttttttcccctaggaatgtgtctcctgttgttagatggctgcctcctcctactgattgggtgaagtgtaatgctggtctgtcttggtctagaagaaatagacttgcaggggttgcttgggtgttgaggaatgacagaggcaatgtcttgatgcacagtagaagagccttttccaatatttcctcctttttggaggctcaatttctaagcattgtttgggctgttgagagtatggttagtcatcatgtgaatagggtggtttttggtgtggaagctgcggtgcttgtcggggtgttaaacaggccgcaagcttggccttcttttaggtttcagtcttcggagatcttgttagctttaaatggcattgcagtttggaaagtggtgcttgaatcggagtcttcgaatagaggtgctaatctcattgcccaaagtgttactaaggagt

SEQ ID NO: 2022 - DNA, 931 bp, Arabidopsis thaliana columbia
ctttcatataaagcaaatgaattcataacataacagagatacagtaggaaaccaatacagagacaaactttacaaattacaaatagactaacgctagtgtctcatccaaaaccagaatttggtgaaaaaattataattatgaaacaagcacaagttcatcaagcgaggaaaaaggattataaaagggaacgatagtaaccgaggctagaaggagttccagttatctgaccttttcgtagggctttcatccgaagagactttaaagggacctgtggaaccaaacgggtctgcatcatcaaacgagtatccatggctaccactgaaatcctttgtactattcatagagtcgaatcttgatagcgagggaccaccaaagtctttgctactgttgatggaatcaaacctcgaaaatttctcagctccagtgacgtctctggaactgttaattgaatcgaacctagagaaggcagctccaccaaagtctttggagctgttgatgaatcaaaccgagacagtctctcgggctgcgaagaaaacccggcgcctgcttcactggtgttgaaggagtcgaacctggagaagctatcaaagttattatctctagctgatgcatcgctgaaccgaggtggagagttcccgaatcttgagagtggagtgctggggactgaatcatcaaatgcaaattggctctttctctgggcgccaaagcttcttgaacttggagaatctgctcttgctgtgtttccaccaaaatcgtcacctgatccaaagtaatctccatcctgccaatgttgatattgaaaatgctaagcttggttaagactctgaatagataactaaatgattcagcatacagaaggtaaatgtaacatcgcaaatctgaaaagcatgaacttaatacggattttcaaaatcttgtagaaattaaaag

SEQ ID NO: 2023 - DNA, 797 bp, Arabidopsis thaliana
tgatggttcgatcggaaaatggccgtgacttgcgagaagatcggagttaatgaagagggagagaatcgtggctgacgtagtccagaaagaagccaccggaatattcctttttgtgcctacacgtactgcccaaatgatgtaagtatcggcgatgattgcggtgggaggagagtttagacggtcaagtagctgttcgaacggctcttctaatctggtgaggacggcgtcgatgaaggcgatgaagtcgttggctcggacgagctcggagggaatgatgttggggagagtggcgaaatggatccggttaggtttcgggtcggacccgatgaacccgagccattcttcggtgacgacgaatgtgacggtgaggtttgggtctcgccggacgaggcttttgcagaggtttaacattgggttgatgtggcctcttcctggccaaggcatggccaccacgtgcgggactccgagtggctgaggtttgattggattcataggatgtggaacgtgtttctggttactgtgactttgtgggtgagagaagtgaggactgagaaagctgcagagtgcagaggatagcttttacaacaaacgtggtccaattgtttaggccattacccataatgttaatgattgtgtctacttctctttcaagctgtttttgctgattatcacatttgttgttttttataacagtttttagacactcaagtgaccggtgtgctttttaaagaaacaaaacctaatcccaagaaacagactgtttaagaaacaacacatggctaatttttttttttttt

SEQ ID NO: 2024 - DNA, 839 bp, Arabidopsis thaliana columbia
tgcctgatgtgtcgttcctctagcaaggctgagtacagcccatatcgaagctatatctttccatccatgtgcccaagttccagcacatgggattgacaagcagaacattgttttccagcctcccttgggtaactttgttctcatgcgataccaggcaggttgtggactcggaccaccagtgaaagggttctatcagctatcaatggtttcagaagacgagggtgcattcctcttcaaggtgcacctcatggaaggttacaaggctcctctgtcaatggaattttgcactattactatgccctttccacggagacggatagtggcatttgatgggactccgtcagctgggactgttttaaccacagaacactctgttgagtggaggattctgggcagcggacgtagtctttctgggaaaagccttgaggcaactttccctgggacaatcaagtttagtccattgcagagcagaagaaaaggggatggggatgatgaagagagtgaggatgagagcgctgagaatgtggtgaacgtggaggacttcttggtgcagaaaatgaacaaggatctcccagcagctgagttggaggaaccgttctgctggcaagcctatgactatgccaaggtatgtatgtctttggcttccttttgaaatcttttggacttggttgttgtcaaatctatcttctggtttcaggtctcgttcaagattgtaggggcatctgtatctcgaatgtcaatcgacacaaaatcagtaagctttcgcaacttgcaatgattagttacagtgttagcgatattatcgcttattatggctccttttgtttactaggcaatac

SEQ ID NO: 2025 - DNA, 697 bp, Arabidopsis thaliana
ggaattgccgacagatcctaaaccctaattttgcaaacaaaaatcagcaaagatatgaccttagtatcagtggctttgaagacgactccataggtaccttgcccaagaacctcttgcttgagatgcctatcagcaactttctttggctgctccggcattttcgggtttttcagaacccactcaataatcgcgcctctctctttcttcttaattcacgtcgctagaattcgattgctttccgatttttattctaaattgagtaaaatcgacgatgaggaagataccgggaaaatttagggtttcagctttgagagctccggctccggagaaaaagtagccgttggcgcgtttgcagacgcaatcggctaatcgagggaaacaacaaataaagagaaacgcccaattatttacttttctagttttttatacatttaatatccaaacattttcgatttataaaagaggaaaatattatttaatatctaaacttttaaacaatagctaaattaatcgtgaatttttgattttttgaaatgactgttttatacctcaacaaatttaacctataacctataaagcatattagcaatccacgtgtttttgctagagtttagctgatttcttaagagctatcgttgctgtttctcgtccatatccccttccttgatagtttcaagctctttgccagtaatccata

SEQ ID NO: 2026 - DNA, 1191 bp, Arabidopsis thaliana
ctatacctcatgtttctgaaatccttcaaagtaaactcaaacccaaccaaacacacacctattatacaccgagtgcatattagcatatggtcctcgccggttagatctcccacaagactataccaaaacagaagacatcgacctgcaggaaaaacacttataactcaatttgttcccattctttatattcactatgaagtatttaattttaccttctctgaaactttgctgctgctaccattgagaagctctggtgccatccatggtaaggttccgcgtacaccaccagataccaatgtatttcttttgattttcgacaaaccgaaatcaccaaccttgaggaagaacaaatgagtgaagagtatgaataaattttgttcaaagacatcatatgaatcagcttttaccttgcagattgggcgagaaggatctttgaggttcacaagtaaattgtcacatttcaaatcgaagtgaacaatgtttttggcgtgcaagtattccattccaaaggcagcatccatggcaatgattagtctcttacgacgatccaggtgtctgacaatattaaaatgtatagcaagtaacaatattaaaatgaaaagcaagtagtcttaaaccgttcatcagataggaaaatgcagaaacgttataagagagatttgtacctatctttcctgactagaacatgtctcagagaaccatcaaccatgtactctgttacagtagccaatgttgcaccaggtccatcttttacaacaccataaaatgcaaccacatttggatgatgaagctttgaaagaatttcagcttctccccagaattcaccagtctagcgaacaagaaaggtattcataagctttccatgatgagcaatcgacaagtgttatcactctctaatccttttaacatatgcacaaaggaaaattttccaaaagaaaatgcagaaacactcactaatctttcttgctcagatgatcggccagcaaagcaactcttctttatccttttgatggcaacatctgatcctctccatttaccatgatacactgtaccgaatgtgccagaaccaagctcctttagctcctcgagatcgtcattcataatgatctagaaacatttaagaatagaaagatcacaagaggagattagaagcagacatttattttatatgacaacaaagggctatactat

SEQ ID NO: 2027 - DNA, 819 bp, Arabidopsis thaliana
  unsure (1)..(819): unsure at all n locations
gccagtgtgcctaaaggtgtaaagaggtttcgcaataacatccgcagcagggttgcatcaccctgaacggtgatgtcggcggcgtctctggcaatagcagggtttgctgtcgctggtcgagcatggtactgagttcgtcatacgaggggagaatgacatcttccagcagttttacatgttgataattaccggaagaaaatgactgtccggcacgcgccatttgcagcagctggtagacgctctccatcatctgatcaagccgtgccactaacggtgctacatcaatgtgatgcgttttcgccagcagttccagatgcaaacgcacccccgccagtggcgttcgcagttcgtgcgcgacgtcagcggtaaacaacctttcgttatccagcgtgctggtcaggcgactgaccagatcgtttaacgccgaaaccaccgcttcgatttcgagggtggcgctgtgaatggcaatgggcgttaagttgtcggcggtgcgcgcttccagctctttttgcagctccgccagcgggcggntagatgcggcgtaccgcctgatagcagataaatagcgtcaggctgaccataaagacgccggggacaatcaggctggcgaccgcctcgcggatctcacgcatgatgtggcgatcgttgttgcgattgtcgcgtagccgtgctcaaacagctgaatctgctcggtactttcatgccatagccagaagacgctgatcagctcaaacaccaacaaaatggccccgatggtcaatatcagccgttgcgcacggatattggtcggcgcagaaaatgcatcagattcaattagtt

SEQ ID NO: 2028 - DNA, 688 bp, Arabidopsis thaliana
ccccgtaaagataaacagtatgaatggattattataactacatagaatagcaaacgtttcataaaacagtatatcttggacaactaatctgagttatacccaattctgcataaatggtatcaagaggaaagcctttcaaatggttcttcatgaacctcaccttgcacatcctaggacatccctgatctgctcctacaatgtcctcaataaatttttccctcaactgtgggattgcctcaaatgcaagaagctacagaataagaaaacaatttttaataaaaattagtattccaccgtatgaccagtattgcaaacaatcacctattaatataagttgtaactaataatcacctatgattcaccgtgtgtgagatggttccttacatgtaatcgaaagaatacctcccccactaaaaattcctactaaacgtgagatcactcacagccttgaggcaaaattcatccacttgaggtgtcctatccccggtcttgataggcgctatgataatgttgcttaagaaatacaagaccatcatcctcaacctttcttttgatctttcacccgccggtaccattcctatgagcttatctctcacgtcttcgcgtttcacaacagtattcttgaaatgcttcttcttgaaatccaaattccccgtatttttataccaagtgtatagttcttccaatt

SEQ ID NO: 2029 - DNA, 1016 bp, Arabidopsis thaliana
  unsure (1)..(1016): unsure at all n locations
tcttttctactaaaattcggattgttttgtgttaccaagcgaaccgatcaaccaaaactatagtgaagcgtcaataggtctaccaaagttgataccacacatcatttcatgttcttactccatatctctcaaagtaggtttgttggtttcaagggggatgcaatggatattgtataactttcaattaaaaccaaacaacacaaagaaagaaaaacaacaatgacatatgcaatgacgacaagtaaatcacataatgttcacgtgtcacatggatatctctagttgtttctaaatgtttaagtaggcagtgacatcatcagaaaactcttatcctcttcttatttttcatttcgcccaaaacaattatcctaacgttaacatacgaatctgatctaacttattttcatattatcttgcttccaaatgcactataaaatcagctataactcacatgtttttaatcaatgtcatcaacaaagacaataatggaaactatatacctaattctctctctcttcttcttcttcatcttcctatctctcaaactcttgttcggaccacggccgcgtaaactaaacctaccgccgagtccgagtcgaccatttccgatcatcggacacctccaccttctaaagctaccactccaccgtagatttctctctctctcagaatctttaaacaacgccaagattttctctctcagcctcggctctcgtctagtttttgttgtttcttctcacgccgtcgcggaagaatgtttcactaagaacgacgtcgtgttagctaaccggccggagtttctcgtcgggaaacatatagggtacaactctacgaccatggttggtgcggcttatggagatagttggaggaatcttcgacgtattggcaccattgagatcttctcgtctcttaggcttaatagcttcgtatctatccgtcaagatgagatccgacggctcataatttgtctagcganaaactctcaacatgtaagtacgtacgattttaacatattt

SEQ ID NO: 2030 - DNA, 1045 bp, Arabidopsis thaliana
tataattaattatgtaaattttatacctcatgtttatttttaatcagtttatttatatagacaaaaaaatgattcacaaatcacaatgatggatcttgttgttaaattatttaactacaaattatattaaagtaaattaggatagtccgatgtgcgagttttaaagttttataattaaattcttaaaatataccgataatcttttagttagagaagataaatatttatatattctttataacaaaaaaatatatttttatatttgttttgctttaacttatttgcagctctatattttaattttattgtaagattatattacaataaacactacaagaaaactgtcattttgcgagggaagaattactcgctaatccctcgcaaacagccatacgcgagggacttgcgaggaaatcaagttcctcgcaaatggtaaaaagttgcaattccctcgcaatttttgcgaggaactgttttcctcgcaaaacacacgcaacacagttctagtatttccctcgcaactgttgcgagggatttgcgattcttttctttctgcctagcaaatccatcacaaacaactgatttcctgatatattaaggcttgattagtggttaattagactctaattatctggttaattagttgttgattagagattatttttgattcttaaataaagacacaagaagaagaagaagaagctgaaattatcattatctaaaatgtatactacaatgccaatatttgaaaccatgttctaaaaagattacaaggaaaaaagagaaagacaatgttctcaaaatactgatgatggagaggatcctgttgcaaggttagctagggcagcagcagctagctgtctccgtcattggcttgctgttctggagctgtagctacaggtggttcatttgcgctaaccggtcttgtctgtgtcgaggaacctcgtcgaagaatggcagctaaagctggatctttctcagcaagatagtcaaagaggatatcaaagctgttgatcttctcagcctgattttgaatgcaagcttc

SEQ ID NO: 2031 - DNA, 1317 bp, Arabidopsis thaliana
gaggattcgagaggatccccccgactcggtaaccgactcgttttcgtgaactcgtcacactcgatcgccgaggaatgtttcaccaaaaacgacgtcgtactggcgaacagaccaaacttcatcctcgctaaacacgttgcgtacgattacacaaccatgatcgcagcttcctacggtgaccactggcgtaacctccgccgcatcggctccgtcgagatattctccaatcaccgtctcaatagctttttgtctattcgtaaagacgagatccgacgacttgtgtttcgtctttctcggaacttttcacaagtaagcgagctttaaaacttagttaattagctcttaatcacgaatttggatttaattaatactctgttttattctaactatactctgttttgtggactctctgttctgtcattgtaggagtttgtgaaagtggatatgaaatcaatgttatctgacttaacattcaacaacattttaagaatggtggccggaaaacgttactacggagacggtgttgaggatgatccggaggctaaacgtgtccggcagcttatagcggatgtggtggcttgtgctggtgctggaaacgctgttgattacttaccggttttgcggttggtttcagattacgagacacgggttaagaagttggcgggtaggctcgacgagttcttgcaaggattggttgatgagaaacgagaagctaaggagaaaggaaacactatgatcgatcacttgcttactctgcaagaatcccaaccggattacttcacggatcgtatcattaaaggaaacatgctcgtaagtaccctttttcgatcaattctttagatcactccttgtcatattttggtatgaaacatgctagtttagtgacgtgtatgtgtgcaattttcaggctttgatactagcagggaccgacacatcagcggttacgttagaatgggcattgtcgaacgtgttgaaccatccggatgtattgaacaaggcgagagatgaaatcgatagaaagataggtttagacaggcttatggatgaatcagatatctcaaacctgccttatctccaaaacattgtgtctgaaacgttgcgcctttatcctgcggctcccatgcttcttcctcacgttgcctcggaagattgtaaagttgcaggatacgatatgccgcgtggcacgatactattgaccaatgtgtgggctatacacagagatcctcagctatgggatgatccaatgagcttcaagccagagaggtttgagaaagaaggagaagctcagaagctaatgccgtttgggttaggaagaag

SEQ ID NO: 2032 - DNA, 1049 bp, Arabidopsis thaliana
  unsure (1)..(1049): unsure at all n locations
gggtacgcttacctcagtcgaagtctgaacgtagttgctcgtcaatggccgcctgtgattgctcctaggctatagacgagccgccttgttctgtatcagctccagcaggtgggtactcgacctcatcagctctctggcggccagcaccgctctgaggatactcgacctctctccttctgctgcggccagcaccgcggtcgcgtaaactacgagactgcagaagtcgtctgctcctgctgctagatcgagtgagtgttgtcctcctcttcctcccaaattcacgaggctcgaatgatgaatgcttcgcagggacatgcggaatctcctgctctctaggctcaggcctgcgctgacttggctcgggcgcgtcatatctcctcgaaggaatctcctgagggagctgtccctgcggaatagctgtagtggaagaggagcagctgatcttgtccttcagaaacttgatagccctgaggcacttggcgagcaacttatcatgtttcttgcaccacttctgcagcttgctgttgttcctgtgagcttcgctcaaactcttgctttccctcgctggaggtatatgttcactgaaatgatacatggtcgtatcaaactctgcctcatctatatcatctgtctcatcaacatcttctgttgtagctccttcggtgtgactaatctcctcagttggcggactgtcctcgaaataaagatcttcaagcgcaggcttgaagtcaatgtttttgccctcgagaatcctagtagcgtcaatgcaggagagaagaatgttggcgattctaatcgatggatgctcgaacctgtagcggtgaaagtcgccaaccatgtcaaactccaagaactcacatcggcgcaaatgatccaagtccatcattctcggtgttaacttggttctttgagcggtactccacaagctttcagaattggcgtcacaacgcacccacgcatagtgncctctcacctttttcttacgttcgtcaagccacttcttgtaccacacaggtggatcacagaggcatactggtggtgattgtgag

SEQ ID NO: 2033 - DNA, 892 bp, Arabidopsis thaliana columbia
  unsure (1)..(892): unsure at all n locations
aaagagtaaggtcgagtggcccacttgtctcccttcacttcattactcggtggacaaaccaattacccataccctcactgttgtttccaactcacttttctatcccttccaaaagaaaccaaagaccatcctcctccacccattgaaatcgccaaaccacctttgaaaccttctctctttcatcctttcattttcgcaaattctctatctctcataaagcttcaaaattaagtttcattccaaactctccctatcaatcctcaagaatctgttctcaccttcaccatacctcaccaaacttactcgatcattcccaagtccatcttcaaatattcaatcggtttttaagctcaaaactccatcaccaaaaaccaaatcctttccactttgatacctcttggagaattgttcctgattgtcctatagaagctcatcaccaaactccatggattcaagaagaaaggatttatctcgggctagaagatcctttgttgatagcgaagaagttcagtgatcgacatgggtagcatgactgagcgccaaattcgccaagctcgctgtgctcaaagatcaagcttgattcaatgggaaagttcaaatcgctcagccatgcaaagagaagaagtagctaggtgcaagaggattgttgaggctgcggaagaacaccaagaagaggcagtctttgaagaagcagtttctaaggaagaggttgagatcatcggggatgatacaccagcccctgttgggagaagaaaccggccaaaaaggaagagagagcccccccaagcgagtactatcaatacttgatggaattgaagtttgagggaactagataccgtnataaggaaacaatgcaagagattggtattcgtggggatgtggaatcttaata

SEQ ID NO: 2034 - DNA, 1123 bp, Arabidopsis thaliana
aaatgatgtccagcgtgctccctgtatcgactaaaatttgctcgacattgaaatctctgatagtcattgtaatgaccaagggatcattgtgcggccgatacagctcgttagtatcgctctcatgtaaagtgacttcgtcgtcaggtccgttaaatgaccgcgtccagttacagtttgaaccggccttcctctgataagctttgattgaatccgttgtgtcttgacaaaaagctgaatctcccaaaatcgtgaagattctccctcgagcagcttctggctcgtcatcatccacctcgcggttgcctcgcctctcttgggcccttcaaggttcgccgtgggggctgcctataacgcccccgaatcgctctatggccagacaagccaagggcaacccggaaatgccacattgatagctaacacggacaacccaacttaggttccaaatggctttagacctttagccagattatccacatgaacatccctcacgaacgcggtttaggcttttcaacccttgccatgaccgtgagttatgtcagtccggacaagactaatatcgcatgaaacacactctttatatgaaaataatcttttataatatataaatttctcagacaaccaagtatccaaaatgtttcaacaatggccccttgagcatacactctcaaatccaacaaaaatcataattattaagttttgcaaaaagcaacaaactctataccggctttcctacgtcctgagcatccctctaatggttcccactaaggtttcctacaaaacaaaatggagtcatacgtaatctaagattacttagtgagctcggtctatgcaactaagactccatttttattaactcttttaaatagggcccgatatgctgccttcaaacaccccacaccaaaaacacaaactcccgggatctctcgctttacaaccacaaaggcatgtaaccagagcatccctaccaaacgctacaccatcgtgtagacaactcggctagggtagctagcccgtctctccgagcccttcgcactaagtggcagtaaggtacaacgttaacaagatccccaatagcacgattcactacgaaggtcagacatccacgatcttgatacgcttttcg

SEQ ID NO: 2035 - DNA, 1402 bp, Arabidopsis thaliana
gggcgagttcttgtttggtcgagtatgtgaggaagagagatggtgaggtcgagtttttgaagagagaaggcgatgagatcgagtgaagagataaggagagatcgagtggtgtagagaagaagaggatagattcttgtcttctggtcagctgcatggggaacataggcgtaacagatgagtcccacatgtgtctccttgtgtcttctctgtattctctgttcactggaaaaaacccacgaaatcctgcaatcttctgtaaacttgctaaaactccctggaagactttgtcgcttctgtttgtcgagtaaaatgatgatttaaaaaaaaaaatttgggttttaaacatgactcatactccaccaatgtactcggtccctaggccgtctgtagagtaaaagttttgaatttttactctagctttacgttattcctctgttcctgagaaccacaaacacaactaaaataaatcaaaaataacaagaaagtaaaaattatttacaaggataatcatgggacttcctcccaagtgagtttgtttaaagtctctagcttgactcctcacacttatcaagaagaaaatgaatgatagagagggtctgcatagtcctctctaatatcatcatcatactcagcgtcctccctggagaggtctacagcagaatactcaattcccctctcttcaaaatatgcttctttctcttctggagggtaatctatctcttcagaccatcttgaagtgaacttctttctcgggataatgtcaatcccgcctttaggttgagcttccttctgcaactgattcagcttacttctaagttcctcaacagtgtgggctagcttctctatagtttcatcttgcttatcagacctctttttaagttctttcactctttcagtctcatttccttctcctcagatcgctttattatttccagaggttctgtgagaccccgtcccaggacgcggtcgttacaggttctttcatcttctgttgacccttgtagagttttattgatgccaaactgcaacttgatatgctttccaaagttgagacttattttcccttccctgacatctatcactgctcccactgaagctaagaagggtcttcccagtattaagggatccttatgctctacttccatatctagcaccacgaagtctgtaggcacttctactccattaatcatgactagtagatctttcagcatgccaaagggttttctggaagacctatccacaaggatcaaagtcaggtcgcaaggtttatactgaataaactctaaccttctcgccacagagagtggcattaagcttatagaggctccgagattgcacagacaatcgctgaaagctaatttcccaatggaacatggtagaatgaaagatccaggatcttcta

SEQ ID NO: 2036 - DNA, 1195 bp, Arabidopsis thaliana columbia
ctagaggattgatgattcatgataattctattcaaacatgtcttgttattcaatgatcatgtatgagtagtctgcttgttagggttcaggtttctaaatagggttatagatgatttagtaaatcgcccatctattaggatatctgtaagattttttatctttggttattctaagtgctagttctagagtacctaactagaacttgatgataaataataggtctgcccaaaaaggcatctattaccataactactatttgatgagccgagtttataggtgtgtaaacccgattagcatgcatgtttaggattagggatttgccaagcaaacgctgagaatctttagctttattcatagggagtaatgccaagttaatgctgggatattctataatagttgtttgagattaagaacggttcgataacatcctagcaactattagatctactaatcatctgttttctgagaataccctaagcctaacgttttaattatcttattttagaaccccataatctactatcgcttgttgctttctttaattatcttacctttgtctagcttgatctcgatacttatgtctattttgtgaacaaaagagctttgtcgaattcgacccttaaaaactaacgatctctttttttgagggagtaagcttaaggtcaatttgatccatatcatcttcgtataaaatgacgtactaaataatggttggtagtagtgaaagactatccaagaaatcattcaaaattccgcgatagtcattccattgaatgtaagttcactaattttacatagaggacatcttgaagacattcccgaaaatccaccatgtgaagattctgaagatcatgataccgatcttgagatgacggattcaaaaagttccaaagaagaataagaccattacagagaggattattctcttgggaatttatgttttactagattgataacccgtgttcgctcgggtgttggtaccggatcccgcaccgatagtccaggacaaaccaaagattgccatgtaagaagaaaagggacccacatgaagcacaacttggaatgagtcccgaagttgggtgaagaatgttgtgaggtgatcacgtcgcgagatagagacgaggccgatatgagagcagtttggtttagatatgttggggcgagtgttaaagcccatgaacgtcaaagtcaattc

SEQ ID NO: 2037 - DNA, 546 bp, Arabidopsis thaliana
gttacgtataaatggtgtggtccaacgtcttagtttcaagttctggtaactatttcttggtctctagctatataaagtttacataatacattgacaaaaacaaataaagggttaaatgacataaagtttccattccatgatagatttacaatagataattaaatatatacatgacagagtaacattatcctttaaaatgataaagaacactttttaattaatattatatctttgtttaatcgaattccctttataaaaaataaaatgggatatgtctaaagaaaagaatcaaggcaagttatcaggaccatcttcacgttgtttgattcgggtatcgggttcgggtcctgaacttgagctaccgggtaacccgccacatttatgacacctggtaaccaccaagatttgacggcaagaaggacaagaagagtgtgatccaagccacgtgtcgatacacgatacgtggaaaccatgtccacactgcggcaacaccctaagctcgtctccggcggcgaattccgttaaacagatagcacactccacgag

SEQ ID NO: 2038 - DNA, 1208 bp, Arabidopsis thaliana
tctccacgttagtaagtctcaaaaattgcggttaaagtttgttcgttgtgaattttaaataaagaaaaggtttggcaagaccgaatgaataacacgctatcttggcctgtttggggggacgggtgttatactcaagttaacggtcgagcatagtggtcgagtatgagttgacttttcctcgttcgatgccataacctctgtgtttggtctaaagaactatgttcttgctactgccatgtgtgagtccaatgacttatcatagcttaaggtctcactagggagatacctagcttcacccttcttggtcaaagcaatttgaaggtgatcttcttcaacaagctcttctagtagttcatcagctagtcgatccgtttgtgtataatcttcttttcgatgattgcactacactcatgacttaacacctccattccttgaccttctttgatcctctctgtaatcatatcctttatgtatttgtgggaatcttgtattagcgcataataatccactagaggcattgtggcttcaagatctttcatttgttaatctaagagaggctcttacttctttatcagttgcttattgaatcttccttgaaattgtagtgaaggcttgtagggtggaggaacaaagactttatccttggttttagcagcgacatgctttttaatataaggaggtattgcctgagtaggggatcgggtactacgatctagtgatataagtcaacttacccttaaaccacactctcaaataagagatcgtcgatagtactcaagagtcgaattccacaaaattcttttgttcacacaataagctaagtatcaagaataagcgagaagagtataagaaaaataaaaagaaagtaaagtaagagaatagtaagtgggttggttgttattcaagataatgaaacgtcaggtttagggtattcttaggaaaaaatgattagtagatctagatatagttaggttgttatcgaaccgttattaaactcaaactctaatattataataaccgatgatgttccgtgaaactcattatgcctagaagcaagattcccggtgatatgccgtgaaatcatgtacctaaacatgcatgctaaagagttcaataagttcaccttagtagataggccgatttgtattacgcatctataaaccaggtttatcagatagcgagtctgggtatagatatctatggtgggt

SEQ ID NO: 2039 - DNA, 590 bp, Arabidopsis thaliana
tgatatcaaactgaataatacggataaacatggtcactgcaacatacctgtaacgatacacagatgtggaggcttggtgcaagcaccaatgaactgcacaacatttttgtgtctaactttcctgaaaaccgaaagattttgaatgatactttacgtcagctgttatcgtttatctgcatataagattacaagggaacagacaagaaggcacacaaacctcataataaagacttcttgggcaaactctttctctagatctgagtctagacgctctggctttaggactttgatagcaacttcctggctacagtatgtacctttatacctgaaataaaacaagaggtaaacagaaggaaggagagagattaacatctgaacactttagtataaaacatgagtttgatagatacagccaacttacagatctccataagaaccagacgctattttatgcccaaattttaggtgtttaaggttgatttcccaaacatcagttccgtcattgggtattggaacatgcgttctggcacctgtttgcccattttccttttccggagagaaggattgctgcataggccagctttggctct

SEQ ID NO: 2040 - DNA, 1474 bp, Arabidopsis thaliana
taaacattgtttcatcttacaaaaaattcttattcaggtcccaattcatcaatggagaaggcaaattgttgaagctcagatttcgagcaagaggaaaccataacttattctgtttgccagactcaagaagactgaggtaatagattgaactatctgccaattgctttgcgtttttacttttaccaaatgatttctttgatatgtttaactcaaagatcatacatttaatgagaaaaaccaaactcccaaatccaagttacaaaacgtaaagaaagcaaaatcattcaaaaggaaagtaaaatataaagagaatagcaaataacaaaccaatcaatctttctaagtgaagtagactggacaccgtttatggttaaacttgggcaagatcaacccgtctcttccaaccacgatgttgcaattagcgtgcatcctatgatgcttactgatccacctatggagtttaaaccgaatagtcgaaactatatcgagcctgaaacccacggttccttgagcccgatcattactaaactcggtccagcggttactgtttaccgttaaggaagctcctgtaagcgtcccggtcacaattgttgtgttagtcggttgctggaaaaacgggtttagcaatgggatcaatccgacccgttgatctttgtagtaaatggaaccttccatggaatcaaagtaaacacccatatgttggttagggttaagtatggttacattgaaagcaattcttgcgttttcgactccggtaggctggtctagaccttgtaccacgaagtcttggatatggaaccgaggtctatgagggcgtaaactgagccaaagtatgaaagcaatgacgcctacaaagaacaaaaccaagagaaacattgcgcagatgaatttcgatatccgggttgagaggctttctctgacacggtgagcgtagtagctagcggaatggtgacgcttcatgggttgggctcggggtacgggactggtgcggatcgggatagttgttcggtctggtgtcattgtgctttgatgatttcctggcaaaaaaaactatggagattttgagcatgaaagttttggagtgtaggagttatgtatgaaagaagaaaagtaaatagttcttgaagtgtttggagaagaaaggaatcagattacgtaaagtgaacacgttgtattggtaacttttgtgttttttcttcatcgtatttttgattatttacaagagaatcgtataatacaacctattcaagctattatagattatttaaatatatatgaggttttaattctttattgtattccatttccaacggtgctcgcagtggacatgcaagatgcaactatgtctgggcaaataaattaaaccgaatgtatcgaactaaaatcgaaataaaaataaccgaatagaatcaaaaattggaaactaatcgaatggatactaaattctataaccgaaataaccgaaacagaatgg

SEQ ID NO: 2041 - DNA, 1035 bp, Arabidopsis thaliana columbia
cacatcagaaatcttcccatctggactcctgataacctgaacaaggtaattttcttccctgccttcaatcagctgaaacatccaagaagaatacagttgttgcgtacccatctgatagaatcaactgttgcagagtattgttagtaaacagtcattcattgagagggcttaacttgagagccatttatgacctttgtaatggaagtgtgatgggagatagcaggaaacgagaaatttcaacaggatcagtttgtatatatcacgaccaagccccagaatacagtatgactcagtccataagaaaagatctcaaataccttacaacaacaatgaaatttgaaacaaaacggaaaatactggtaagaaagaagaaggccaaaacctgcaacatacctttcacgaaacagtcttcatcggaatcaccaatccaagagtcaaatgatagtgctatgcacgcttctcattaaattttgacgaaaaaatccgaagctgttatcttgagctacagcgatataactcccttttgaactccattcaactgacaaacaaaacaaagtttacaagtaaattcctacagagtcgatcttacataattgccaaaaacatgcttttttgctgaagaagtagcaatagagatgaaacaaaccggcgtcaacagcatccataacatgtctagggggtgcattatcaattccatgaaagagcttcccagtattcgaaagaacaagataagaatgcttatcattccttctccaccgaaaatccttaacgaagcctgactcatcaggtgaataagaaaaagaaggttttgcatcctgcaacaaaggaacagattaagtaagtaaactatcaatcaacaaagcaatccagctagtctgctacttctgagacgtgtaccttcttaagaagtgaatccacagagaagaaatgaatatcagcagcaacggtgacagcgagaatcgagtcatccgctgagagagacaatatacgaacgtccccaacaggaacatcgacgaggctcaaatcctggataaa

SEQ ID NO: 2042 - DNA, 625 bp, Arabidopsis thaliana
agtttcaagtccaagatggggagggtaacctgttggaagaagtcagctacatcaacaacaaccaaggtggctacaaagggtataacaacttcaaaaccaacaaccccaacctctcctaccgcagcaccaacgttgctaatctcaggatcaggtgtatcctccacagcaacaacaagggcagaacaaaccttttgttccatacaaccaaggtttcgttcccaaacagcaatttcaggggaactaccaacaacaaccaccacctgggtttgcacctcagcaaaaccaaggtcctgctgctcctgatgctgaaatgaaacagatggtacaacagctgctacagggacaatcatctagctcaatggaaattgctaagaaattatctgaattgcaccataagctggattgcagctaccaaagtggaggcattgaataccaaagtcagatatttggaaggacaatcatcatctacctctacaccaaaagttacaggacttcctgggaagtcaatacagaatccaaaggagtatgcagctgctaacgccatcaccatatgccatgatcgagagctgccaactcgacctgtccctgatttcatcattggggacagtgatgttcaagaagggga

SEQ ID NO: 2043 - DNA, 726 bp, Arabidopsis thaliana
acttggtaagtacgaacgaaacaaacacatataaacgcattaataacttgaaagtaaatcaagcaatcacacaaaacaacatttgtataaacataatataacataacaaaagttaacaaccataagtggaaaagaggtggttttgactatcgtacacacccacttattcaagcctacagacatcatcaaaaagatatcacattgtaacgaaggttactattggctctcctgtagccgccgctatacatcaaaaaaggggttagtttcctaatatttactaaagttaggactcctaagggaatcacggtaaccctaaactacacctggaacaggtacatccaagaaaagatcatcattggtagcgggaatcggtggggatgatggactaattgcgtgagacgggggactatgggttggtgcaggaatctgagcataatctctcaacaacatacatgtagcagcatagtgtccgtactcacaacaatagagacagacaacggtcatggacatgtactctgtctagaaccgacaatcctgcgggtaacgtccatcttcgccatatataaagcagtatggtatatgtatacctgacgtggtgccgtcaccaactgacggaatagcgtcagcctcatgtcagccgcaaaatggagtatgggggacgtgccctccataacagtgcaaaagtgctatcgggagaatgaacgacagcctccgaaatgtatggag

SEQ ID NO: 2044 - DNA, 1434 bp, Arabidopsis thaliana columbia
cccacaccaaaaacacacctaaaaaatcatgcaaatgcacttataagtcctattctaatcatgttgtttgcttcattcatcatgtctgagtagtcttcttgttaggtttagggtttctcattagggttataaatgattagtagatcgcccacctgttaggatatctttagagttcttcatcttgattattcttaatgctagttctagattggccacctagaacttgatattaaatattaggtataaccaccataggtacctgttaccagaactatcatagatgggcctaagtatttaagaaacgaacatgtaggctcatagaagggctctggtttagatacttagtgaactaatcaaactttataataatgcatgtttagaattaggtattcatcggcacatcactggggatctttagctctaggcatagtgagtagcacgggacatcaccggttactttatattagtgatttgagtttaagaacggttcgataacaatcctaatcgtagctagatctgttagtcatctattactgagaatatcactaaatctaacgtttttattatttgattttacttccatataatctattgctattgcttacttttgtctctttttattttctttactattttacttaggttacttcgatagccattagtctactgtgtgatccgagaactttatgaatttgatccctaagtgcttcaactaacctctttatttgagagagtggtcttaggattaattttacctacaccaacaaaggaggttagacatatcacgatcttgatacacttatggtctctacctcctaccacaaggaccacataccaagacccaagattttaagatattatgaaacatatggttaatcaaacacatagaatcatcaatatctttactcaacataacctcccaaacataagcttttaagcataagaatctaaaagatcacatatgcggcctaaatctatcattcacactattaatcaatactcatgtaattcataaaaccaatcaatgaatgaaatagtataatcatacaaccaaaccatatccggaactcactccagtttccaacaaggtgtttgcgatgatacggaccgagctcctttgatgattacacttcttttcaactatttcttggcaggttttctcgattacatacgatcactcaataacatgacgacctttcggttctctctctttctccccctacaaaattctttaggccgatcgagcttatatagtggtaacaagggcgagtcagctagtatatgtttcattcgcccgtgatgacacatatgcggcagttataggatgatgacaggtggacggagtagctttggctccaagggattttttagagctccaacatgtaacagtaatgtcaccttaccagtagtaggtctgtacttttggacattatg

SEQ ID NO: 2045 - DNA, 741 bp, Arabidopsis thaliana
tattaatattatcaacaacttcaatcttattatactccataacttaattctctatgttccttaataatccattttctagagaacaaatggttaagaaaatgtatatttttttaatgttgtgtatgcatttttatcaggtattgatgatgaatcgtaaatttcaaaataaaataaaataaatactattggttaagaattatagaaaattgtaatttccaaaaaatatatttataatcaatttttaatatgttttttcttatgtgtcaaaaatctaaaaaaatagattaattaggaacatataactagggttctcaattatctaggagtctttatgctaattacagaatttagattaatattagtctgttattttactacttaaaactgatattttaattccatttactgacagtaaaaaaaacagaacagaaaaaaaacaatgaaagatggaaaaaaggagaagaagaggattaggctgttgactgctttcactccttttacagctctcttcttctctctttaataataaagttttcatttttatacctttctctctctctctctctctcttcttcttcttcttcttcttcgtcttcttctctgaatagtcacaatgcgagtcttcttcttccccaactcgtccatggcgattctctctgttttcctctccctccttctcctctctctccctcttccatcaactcaagatctcaacgccgacagaaccgctcttctctctct

SEQ ID NO: 2046 - DNA, 716 bp, Arabidopsis thaliana
ctactttaataaaaatactaacaatctctttccttttttttccaacaggttgctgctatcccagaagtttacttgccggccccgctgcttgctaaaattgttagctacgttgcagaatctggtgttgattctttgaaatcctttgttaaggctggtccgttatttaaagcggctgtctattccaaggaaacactaagttgtgtccgccttgacagatcttggtattttatgtggtggtcaatgcctcattccatctattatcatttctttacaaaatgtcttgacgccaacaatccacatgctttaactgctgtattatacaaaggaatagcatacgagaatttggttgctgaatgctatagatctagtttatggatggaaccttatggagaggacggaggatgggtacaaatagatggagcttactgggctcaaccccgagttcgagagagtattccacgttgctcccgttgcaaatctcgggcacacaaaagatctaattgtccaaaatattgaaagacaatgttttaatactgtgttatccatcattatctgtctatctacatgtttctatttttctaaaacttgtttttctgtttttaagcttctgctagtctgtctttttaatgttatattctcgtttgctattcaatcttcgtttatatatttgctaaggcttatccatcttattttgtggttggtgtttcatgattaca

SEQ ID NO: 2047 - DNA, 964 bp, Arabidopsis thaliana
gcttgaccggaatgtccaccttgcactatcaggtacaatatatacttactatattttattccaatatttttttaatctaatcatttaacttgcacatatattttaggaattggagcatttttccgagatctatgttcgagaactttacagacaagtcgcgttcaaattctcaaacagaacatagttttaatcatctctaacttggaaaagatctttccaccatcattttttgatgttatggaacacttacctatccatctcccatacgaagctgaattgggtggcccagtccaatataggtggatgtacccattcgagaggtttttcaaaaagttgaaaggaaaagcaaagaacaaaagatatgctgcaggttcaattgttgagtcatatatcaatgacgagattgcttatttttcagagcactactttgccgatcatattcaaacaaaatcaaggtaaatatatttaattatttaacgattagatattcttcgatattaattcacttacatggatcaggttaacaagattcaatgaaggtaaagttcctgtatatcatgtccctggagtacctaatatatttatgcacgtcggccgtccaagtggtgaaatgcatgtagattggctttcagagaaagactaccaaagcgcacatgcatatgttttaagaaattgtgactattttaaaccatttgagaggtatttttaatcactcgttgtttgtaaatttttactaagatcactttgataattttcctagtttgtaaatatagtatgttcgaagattatctttctgccaaatatccatgcttgcccaaaaaagaactctacgcgagaagagcggaagaatatcatttatgggttaaagaatatgtaagtctatatcaattttggttcattcgaaaggtgatcatttaatatatactaattgatattgtttatctattatgtaggtacatactgg

SEQ ID NO: 2048 - DNA, 678 bp, Arabidopsis thaliana
agcaaactggagaggacagtatgagcttgcaacctatcaaatgctagaatcatattgcaccaagctcaggacatgataaaagttctcactgacctatttgacggtaaaacactgaaaactctaatattctcaggaaggtgtttgctaatgcatttagcaagaacagtgccttgaggatcatccttccacgctgtctcagggatctccattttcagcgatattgacgttgccaaagaatgaacctataaaacaacttatcaataaacaacaatccaagacatacacaatgcatcagaagacaatcattacttatggaacagagcaagaaaaaaaaagcttactcctttatcagttcgactacttctagcccaaccaatcttatgaagatcaccatagttactatctctaatcccacctgccttgtatatagcaacttccaactcaccctcaatagctacaaattcaaggtgtacataaaaacatgatcttacagggatgtacaagcgaaagaagaaattgcaggaaccaacagaagaattggggtttagggtttatgctaagattcattgtagaaagtaaaaatccaaactttacgacttgaaacttacttttgatagaagggtcgtctctttgaatctgtaagcctgaaaatggagacaaagtcacaactttatacag

SEQ ID NO: 2049 - DNA, 611 bp, Arabidopsis thaliana columbia
cattcgcaaccaattggtaaactattgtcagcaccctcgatggatggtatttctgttgttaaccaagtaaacatatcaaattaaactgatttatatatccactgaaacaatttgtcttaataccgaaaagttgcttagagtcatactgggaaaagttgataatagtaatcagtgatggtcagcatcgcattccatgccacgagagaccctactccaaggaaacaacacacaagtcttgctacattcttgccctgttcatcatcaaaattatttcagaagttgcatatatcactatatataataattactatgtagtgtgtaatttatgaatgattgattaatatgaaactgtacactaacctcgatcctgctagggatatcctctggattagtcatcaggcgatcacaaatcccctaaatcttcaaaatctttaaaacaactgtaaatatataaaatttagttactagcaaagaaacttcgtctattattgaaacgactaacaattcaacctcttagggtttcttacatatgaataaactctaactttttgaatccgttctcacaattttcgagtatttcaccaaaaaaaaactcctgatatcatgagttg

SEQ ID NO: 2050 - DNA, 890 bp, Arabidopsis thaliana
aaacaaactcggtcatgccctaaaagattagagatgttctgcgtagatcgcaattgttcgtggcatttgactgcacatgtcatacccaattccaaatgtttcaaaatcacagggtatgattccatccatgtttgcaagatcgacactcgaaaggattatcgtaaacatgcaacttacaagcttttaggcgaggttatgaagaatagatatagttcttcgcaacggggtcctagagctgtagatttgcctcgattggtcttaaatgaccttaacgttcggatctcatattcttcagcatggagagctagagaggttgcagtaaactctataaggggtgatgatatggctagttacaggtttttacctacatatctgtatcttttacaattagcaaatcccggtacaatctgtcatctccactccactcctgaagataaaggtcgccagcgcttcaaatatgtattcgtttctctctcggcgtctataaaaggttggaaatatatgaggaaagtcgttgttgtagacggaacccagctagtcggtcgttacaaatgatgcctccttatagcatgtgcacaagacgggaacttccaaatttttccattagcttttggggttgttgacggcgagaccgatgcttcatggatttggttctttgagaaattatcagagattgttccagatactgacgatttgatgattgtctcggacaggcattcttccatatataaaggcgttagtgtggtgtaccgaaagccaatcatggagcatgtatagtacacctggagcgaaacatatcggtgtcttacgcaaggtacggtgtgtctggtttattctttagcgccgctaaagcgtatcgggttagagattttgagaaatactttgaagag

SEQ ID NO: 2051 - DNA, 543 bp, Arabidopsis thaliana
ttaagtataggagttgagcaatggttttgaccaagaagcagctgctgtagtaatggcacgacttatttcctccaaaatggagactcaggtactcgatgatgagagctagttagattttttaagctgaatatcggatagatgttatcatgttttagtgtttcttaggtttcttatttcttcttttacagcctgagtttaatccccaaaggtgggtcgataaagcgttgataaatctatgcacctggtttggagattaccagaaaggcaatccttcttcctttagcttatcttctcagttatcaattttcccgcagtttgtgtttcacttgcgccgatctcagtttgtccaggtacttatccacactgtccctatatgcacgatcgactgaaatctttttaacgcacaattttatccttttgggctcatttggctttgccttttgtaggtctttaacaacagcccagacgagacagcatattttcgaatgatattgtacagagagaacgtttctaattcagtcgtgatgattcaacttcactgat

SEQ ID NO: 2052 - DNA, 564 bp, Arabidopsis thaliana
gtgatgaatttgggtgaatttctctttacgcttctatcagaagctctagggttgaaccctaatcacctcaatgacatggattgttctaagggtttgatcatgctttgccattactacccaccatgtccagagcctgacctaactttaggcacaagtcagcacgccgacaatacttttcttaccgttcttcttccagatcagatcgaagggcttcaggttcttcgtgaagggtactggttcaacgttcctcatgttccaggagctctaatcatcaacatcggagatcttctacaggcaagtttgcacaaccaatacatttttttgctctgttttgcagaagtataaatcttcctcttggttcaaacatttttttgtttgtttgtattaatgcagcttataacaaacgacaagttcgtcagtttggagcacagagtattggcgaacagagcaacaagagctcgagtctctgtagcaggtttcttcacaccgccatgagaccaaaccctacaatgtacggcccattagagagctcgtgtctaaagaaaacctccaaagtacagagag

SEQ ID NO: 2053 - DNA, 786 bp, Arabidopsis thaliana
ggtatgactctattgctctaatttgatttcatgtgtagtctttgttcatatggtaatttgaatcactgagttgtttcagggatattatgatggaatattcaaagcaagtgatgaatttgggtaaatttctcttcgagcttttatcagaagctctagggttggaacctaatcacctcaatgacatggattgctctaagggtttgctcatgctctcccactactacccaccgtgtccagagcctgacctaactttaggcacaagtcagcactccgacaactcttttctcactgtccttcttcccgatcagatcgaagggcttcaggttcgtcgtgaagggcactggttcgatgttcctcatgtttccggcgctctcatcatcaacatcggagatcttttacaggcaagttcactgatgcatttttgctcagttttgcattgtataacttatcttccctattgttcatttttgggttttgtggttttgatgcagcttataacaaacgacaaattcatcagtttggagcacagagtattggcgaacagagcaacaagagctcgagtgtctgtcgcatgtttctttaccactggagtaagaccgaatcctagaatgtacggaccgattagagagcttgtgtctgaagaagatcctccaaagtacagagagaccacaattatagactacgctacttacttcaatgccaaaggacttgacgggacctctgctttcgccattttaagatatgatacatggtgagctactactgtctcacacatatgcgacatga

SEQ ID NO: 2054 - DNA, 910 bp, Arabidopsis thaliana
tcaacgatcatcaaacataattacatccaacttagtttaaatgcatataaaccagcttgtgcgtaatccaattgattaaccatatccgattacactttatttggaccaaaccttgatgacaatgttcaatacataaattccacatttggttcacacatctccaacatgttacatataatgtcatgtcgtatatctgtgagaaagtagtagctcggcatgattcatactttaaaatccagcaaagcagaggtcccgccaagtcctttgccattgaagtaagtagcgtaatctctgatggtggtctctctgtactttggaggattttcttcggacacaagctctttaatgggtccgtacactctaggatttggttttacgtgggtatggaagaaacatgcgacagagactcgagctcttgtggctctgttcgccaatactctatgcttcaaactgatgaacttgtcgtttgttataagctgcagccaacgcaattaaaaaaaaaaaaaaactttgaaccaagaggaagatttcataaacaaatctagcattgtaaataaacttgtgaaatctgagctagcaaacatgtattgattgcgcaaacttgcctgcagaagatctccgatgttgatgatgagagcgccgggaacatgaggaacatcgaaccagtatccctcacgacaaacctgaagcccttctatgttatctggtagaaggacggtaagaaaagagccgtcggagtgcttacttgtgccaaaagttaggtcaggctccggacacggtgggcagtagtggcaaagcatgcgcaaaccctttaagcactccatgtccttgaggtgattagggttcaccctagtgcttctgacaaaagctcaaacagaaattcacccacaatcatcacttgctttgagta

SEQ ID NO: 2055 - DNA, 747 bp, Arabidopsis thaliana
gaggtatttattgttacaaagtgatgccttttggtctcaaaatgtaggaccaacgtattaacgattggtgaacaagatattccacaagcatctcgggaaaacgatggaagtatacataaacgatatgttggtcaaatcattgaagaaggaagaccacattcagcatttagaagaatgttttgaaattctcaatcaataccaggtgaagctgaatccggcaaagtgtactttcggagttccttctgggaattccttggttacatcgtgactaagaggggaattgaagccaatccaaaccaaatcaatgcttatatatccctatttttacaggttttaactatgttttaggtataggttttagagtctatttgttatttctagagtcttttctagttctttttcaggtctttacatgttttggattcatttggagataatggagaattctaatggaaaacagagaattaatgctgcagaagaaatctgaagactaaaaaatcatgtaggtgtcgaacgacacacccctggtgtcgagcgacaccaatacccgacggcagtttgaagaaataacttattgaagttttgaagatttgcaaattcagccctgaactttcccttatttctaaagaaggcccatcacgttttaggtcacatatatatagattttaaggtcattgtttagacctaagttttgttttgattgagagagactgtctttgagagcagaatctacccatgtagagagga

SEQ ID NO: 2056 - DNA, 746 bp, Arabidopsis thaliana
atttacggctgccaaaaggcctgcacatactcaactgagatcccaataacttgacaacaactacccaatttttgtctcgtttaggtaaagaggacatgaccaggctttggatttgtgaacccgtcggtagaggaggtagatcaacggtcaagtcttctatttcggggtcagtaggcttgtaaaagatggtgggagaacatacatcgccgtggttgccacaaagctcgactcgcaacccatcacgagaaaacccgacagtcatcgcatcacagacctcctccttaagatccttgtccttaatcaagacttccttttcattaccgtaaacgtttgttgttacgcgaccatcggaggaagagtttgggttgtttaggatgtagtcaatcaacagaaacgggaaggctggtttagacgagaagggctgattcactttagtactcgtgtgagttgcagatgagaacagacgaacgtttgcgtgtctctgccatagttatgttcaagtattcagagacaacaagaacaaaattaaagttaaaaagaaaaagcaagagaagcttacgtacgaggaaatttttgcagacagagggtttgaatattcggttgattataagctttgacattgttgaaactcttaactatgttatgtctgtgtttcctcatatcttcttatgtccgacttattatagagattctagtatccttgctcaccaagaactcgctataaatgcatatttaattagagaata

SEQ ID NO: 2057 - DNA, 1462 bp, Arabidopsis thaliana
aattgtcttatcccatgcctgcaaaccaacaaaatcaatttttaggttaattttgtgataattaagggaggaaaagttgataatttaaaaatacgaggacagtctcaccaatggatagagacgttatacttgacgttgttaacgacctttaacgagaattgtgtcgtcttcattagcgtagattgtgggtcctgggaatttaccgttaacggtaacgatctgtttcgttgaacaaatccgcgtcacttgtttcgttaccacctgttatttttagataattacgtacgtacgttttactacttttatctaagaattttttagactcaaaaagaatgatacaaccttgatgaaatcatataatatattatgatgataacattgatcatgcggacttacgttgaaggtgtacttgcggattgcaccgtggacgcatgccgggaagcgagcaatgcgaaaagaaccaaaatccgaattggaaataccatttcccttgaagcttttgatgtgtctttaaaagtatactatgacttttcttcttttgatcttctactgatgatttctcaactttctctcttggttttgtgattcgaaaatgattcatgatcattgccttataaagatgcaaatgttgggttcttgtgcttcgtcagtttggtgaaactaaagcttcaaagcttagagggaaagtatatgtatctctttgtgggttggaacctaagtgtaggttggtatctttttatgtgttcttttactcttctcatcacaatgtcttgtttctatgtttcaaaagtttaatttctggatgtcccaaataagatttttagcccgattctatgtctttaaaatttggaaacacatctaaatatttatgtaaaaattacgtgtaaacatgttctaattaaaaacaatactttcttctagtaataatcaccatagtacgtagtttacaagaatgaatgacatctagtgataacgtgtaactattcatatttaaactttcggttaacaaaggtaaatgaatatctaaaagccttaatgtgaaaatgaaatggttgagaattacctttcaagaaatctgattggaggatagcatctaacagaaaatgattatatttgttgggaagcaataaccgaactaatttgttgttcacaattaaaagtgttcaacctatatttgagtgcgatggttttttttcttcttctctgtgggtagtggattaattgatctatataaatatatcattttcattcggagcagagtaatcttaatttatttttcatggaaattttatatatacttttttttttgggtctataaaggccaaatatgatcatataacaatacttaaggcccaaaaattcataccagacaattaaagactacttcagatttatccccacactatgtttgccacaatagacaagaatattggtcatatattactgataatatttgccaaaa

SEQ ID NO: 2058 - DNA, 1088 bp, Arabidopsis thaliana
tcaaattaataaagaatgaagatgttaaataaaaaaatattgcgtaatacatttgcatatatttttttctcgaaaagtggaagcacgactctgttgcgcaagcatactcttttggcattctcttttcttaatgataagaagataagaattcgcgtcgtcttttcttttctttttcaaaagaattcgtgtaatggtctagtcacaaatccataaacaagattaggtttctgattaaaaaaatcttgtaatttttagaaataaatatctgatctcttcccaataacaatttttgtcccattagtatgtttaactcagcgatcacttaatataactcagtcgtcacttaagctaactcaaccattacagaacatatctcagtcgtcacttaatataactcagccattatagaacataactcggtcgtcacataacatatttgccaaaaaaaaagagaacataactcagcctttacagaaaaaatcaaaacattaactcagccgtaacataaatattgataaaaaacagaacataacagagccgaaaccgtacctcaccaccattcgctttaatatcttcagcaatgacctattctatagttgcacgggtacggctaccaccccatctaagcaacggaatctcatccgtgttaacaacgttcccaaaacgctcggcgatggtgatgattgactcatacgcccaagcctgcaacacgaaaaccagaccactgacggtgtacgtcttgccaatatgcctcaacaactttatagaaacgacaagggcttcaaatgcttcccgaccccatggataagtcttcatggcttcgtcatcgaaaactcttttggcactctcaaatggtatcctagagttagtatgcaagccaaaaagtccaatggatagaagagtcaataagccaaaccatctacgcttttcatgaggccaagctctgcacattactaagccctgcctaagttcatctagattaggaccttcaccggttggcacacgcaattccctgaagaacactttgtagtcagcttcaggcccaaacttttctgtaggcagttgatctatatttaaacccatgatat

SEQ ID NO: 2059 - DNA, 888 bp, Arabidopsis thaliana
acaacaccactagatggggtagagagtgtcgattgcagagccaacgccgagtcttcttgtagctccgacaacgtcccaggaacttcctcttggaagttgttcccttgagacgacgggtggctgtttgctggagcgtctgaatctcgcgactgaggaggagtttgctgaggtggcgctgttggcggcggagtgtagtggacctcttcagatagaggcggaggagcttgatgttgtggttgagtcgttgagttctggaagagttgcagaggcggtggatagttgcggacgtggggtgcagacgttgaaggtccatgttgttgagccggctccgtcgcaggaacttgaaccgccagcgccggagtgaagttgtattggggaggaagatttgcaggtcttgatccgccggcgccggctctctgagtgacgttcggcgtcgtcttacgcttccgggagccacctcgaccggcgataggcatgatagtgagccaaatgaagagattgaagagaagaagaagaagaagacgaagcagatcgaagaggttgaaggtgagagatcgaagaagatcgatcgatcttagcagaagaagaagaagatcgatctagaaggagaaaggattgatcttagaaagagttctggggattagggttttcgagacgaagaagaagaagaagaggaggttggatcgaataggtttaaggtgagaaatcgaagaagatcgattgatcttagcagaagaacgatcgatcttagcagaagaagaagaagatcgatctagaaggagaaaggatcgatcttagaaagagaattggggattagggttttcgagacgaagaaaaagaagaagaagaagaaatggctaagtgtttggctcgaagagaaatgactcg

SEQ ID NO: 2060 - DNA, 1288 bp, Arabidopsis thaliana
tttattttgaagcaaatgtacaactgggacaagtccataaatgatagagttagagatgagtttgagaacaagttgaaggataggatgtctgatcaaatttgccggtggaagggaaagtggaaggagaaaggtgatgaggcaaagcctaaatggattgatcctcaagtgtgggctggacttgttcgtttttggcgtgatccggcatcagaaattaggagtatcaacagtagaaatgcccgatatcctgatcccgatgaccttggtatatctaagcaccgttctggccagacctctttcaaatcccgtgccagaaagcatgtaagttaactctgttttctttctcagacatatacttatgcatattgaactgacacttaacttttttcttttgttttagtctgaggagaccggtgatttaactccagattttctggtggttcttgagatgactcatcgcaaacctgatgggactttcagtgatggaaagtcagaggagatctacaaggaagtgtcatcaaggattgaagaggcagagtctctgctgcaattaggggataatatagagagctctgcttcaggtgggttattagtggctgtcaagaacaagatttatgctcaggtaattctgtatattttcagttcagagtgtctttagttagtacttagtctttgtgtggtgtgtgattatgtgatgatgttagcagcatacttgtgtgattatttcattagtacttagtctcgtggcagtccactcattatattgtgtggtttgtatcaggttgctctaaggaagaaaggaaggttgtatggggttggttctctacataatgaagcatcctcagccactgttggtccacaacctcataatgatctggttgttctattggagaagcttgctgctgctgaagcttgtcttcaacttcaggctgagaagatcaatagtttcgatgcctattttgaatacctcgcagagaaggatccagtgtttgcatgcatgtaccgaagaccatctgaaccagcaaatgcagacgccacaagacatgctgagggcaaccagaccggagatgatcagacctgcaccgatcagaccggaactgagactgagacaagaactggtaccataccagactcctctacttcacaagctttttaatttctctctgttttaagacttggtttatagttgctaatctcaacttttggtttaagacttgggtttgctaatctcaacttttgtaatctcaacacttatgtttttgaatcatttagcagttaatgtttttgaatg

SEQ ID NO: 2061 - DNA, 803 bp, Arabidopsis thaliana
taccagcaaccaccaccacctgggatttgcacctcagcaaaaccaaggtcctgctgctcctcacgctgatatgaaacaaatgctacaaatgctacaacagctacttcacgggcaagcctctgctccatggagatggcaaagaagatatctgagttacataacaagctggactgtagctacaatgatctcaatgtcaagatggaaacactgaataccaaagtccgttacttagagggacattgtgcatcttcttcagctccaaaacagacaagccaactactaggcaaagcagttcagaatccaaaagaatatgctcatgctatcaccttgcgtagtggaaaagcacttccaactagggaggaaccaaacacggtcactgaggacagtgaagatcaagatgggaaggatttaagtctcgagaaagatcaagctgacaaaccactcgaccagtcactcgagcaaccactcgagctgccactcgacagcgttacttgaccgaccactcgacctgtcatcccagcagcatcaccaactgctccaaagccagttgctgtcaaaaacaaagaaaaggtctttgtccctcctccctacaaaccgcagcttccatttcctggccgtcacaagaaagcgttggcagacaaatatagagctatgtttgccaagaacattaaggaggttgagttgcggatacctcttgttgacgctctagcgctaattccagactctcacaagtttctgaaagacttgattgtggagagaattcaagaagtgcaagagatggtggtattgagtcatgaatgcag

SEQ ID NO: 2062 - DNA, 1077 bp, Arabidopsis thaliana
acgacatgttggtgaaatccatggcagaggaagaacacgtatcccatttgcgcgaatgtttccagcagcttaacctctacaacgtcaaactcaatccagccaagtgccacttcggggtaagatccggagagttcctcgggtatctagtcactcaccgcggcatcgaggcgaatccgaagcaaatcgaggcattgttgggaatggcgtcacctcaaaacaagcgagaagtgcaacgtctaatggaagagttgcggcccttaaccgtttcatctctcgctcaaccgacaaatgcttggccttttacgatgtgcttcggggaaacaagaaattcgaataaacaacccgatacgaagaagcttttcaggaactcaagaagtatctggcaacaccacctatcctcgcaaaacccgtaatcggagaaccactatacttgtatgttaccgtatcagatattgtagtcagcggagtgttagtccgagaagacagaggtgaacagaaaccgattttatacgtctcacagacattcaccggcgcggaatctcgctacccgcaaatggagaaactcgctttagcagtcataatgtcggctcggaaactgcgaccctactttcaatcccattccatcatagtaatgggatccatgccgcttcgcgctatcttacatagtccaagccaatcaggacgcctagctaaatgggcaatcgagctcagcgaatatgacatcgagtatcggaacaaaacatgtgcaaaatcccaggtcctagccaattttatcgtcgaactgcccactaaggaggctcgggaaaatccactcgatacaacttggctattgcacgtagacggctcgtcatcaaagcaaggttcgggtgtaggcatccgcctcacttcgacaacgggagaagtcctcgagcaatcatttagatcaaacttcgaggctaccaacaatgtggccaaatacgaagcgctcgtagccgaacttaatcttgctcgggggctaaagatagaaaaaaatcagagcattttgcgactccgaactcgtcgcaaatcagttcaacgtagaatacacagctcgggacg

SEQ ID NO: 2063 - DNA, 1183 bp, Arabidopsis thaliana columbia
  unsure (1)..(1183): unsure at all n locations
caagattaagctagccgggtaatagtgaaaataaaagagaacaaagtaaaaagacagcgggatgattgtgttgtgaacgatttaataaagagctaggaacagggtattctctggaaactattggtcagtagatctaatgaaagctaggttgttatcgaaccattcttaaactcaaactcttattatggaataaccggtgggcgtaccgcgaaactccctatatctatagctaataataaccggagaagccgagaaactatcaacctaaatatgcattctcaacgagttcaattgttcatcttagtaaataggtcgattcttattacacacctataaaccagacccatcaaataatagatccaactatagatacctatggctggaatatctattatctggattcaagatctagttaattactctagatctagcattaagcataattaaagatgatgaattctatagataacctagcaaagggggcaatctactaaaccatatgaatccctaatgagaaaccctatccctaacaagcagactactcaggcatattggatgaagcaaacaacatatttgagtgtgaaagcataaacacatgaaatagagaagggggaagaagggatctcttcactatatatagatttgaatgaaactctgagaaaacaatcgatgaatagcttatgtctctcacaatagggtttgcaaagaacttgataaaagacttgataaaagaaacttaggtctaaaaacaatatatatataccctaaaaatgtcgagggactaataatgcaaacagggaagtcttctgaggcaaatttgatcttctgtaaacttggaagagtctagggtttttgctgggccgaaactggtgtcgatcgaaactggtgtcgatcgacactcctcgctgattcatgagtccaaaatcgttcttagcttcctttttccttagatcttgctccaaaatgtctccttatctccattgttgtcccgttgcatagaatacctgaaaagacactcaaaagactcgagaaataacataaagacttaagatcctatacctaaaacatagataaaattggtgaaaatcgggttatatcagaagtactctcactgatatggagaaganaattgctcatatggctgtcattcaaatatggttgtggttgaacgttatgtggagta

SEQ ID NO: 2064 - DNA, 739 bp, Arabidopsis thaliana
gagataaaattgtccagcgaccctgcgatcgagtagatgtcatgaggtggtgatcgagtggtttcttcagcttctcttctcttccgtatgctcagtgttggtgtcggatcccgcaccaaaagtccgaagtcgtctcagcctgtaataagcccaatcgctgacttaataatgattttacaaatatttttaaaaggggtttaaaacgttaataatgattttacaaggatttttaaaaggattagtacctgagcagtaggaaaagaatgagaaacaaaaggatttgaagtcgtctcaacctataattaacacaatcactgacttactaaatctatatataaaccatttttaaaattataacacaagaaagttattgaaaaacctactccactgtcacagaaatttgctctactctgtgagaatttgtgcataaaagttgcaagttgtctatcgtttctaatataaagaggatgagattgtattgttctagaagtggagacttgcttataactaagcttcaaagaattggttgaactatctattcgaaaattctctacaagaatatcaaccaatgcgtgataggtaatgtgctcatcaatgagcactaaagaagctcccatttcaatgtctaattcaaattcccaagtcatattgtttgtcaacttccacaaaccacaaacagaatactattctatcattataacctgataagataaataacaacctttaaagcacactggcg

SEQ ID NO: 2065 - DNA, 950 bp, Arabidopsis thaliana
cgcacgaacctcttggttaagcctctcaatatcattttcgaccatcttcaattccttttcccaattataaacatcttggtccctagccattgctacactgaatctcttctcttccgcttcgagatgagccgtgtgcacagattccaacaactccttggtggcaatcagctctatactcaaaccatccatcgttctctcaatctctttagcttccaaaacagcaatatcagctctctctgcagctaattctttttccctcaacatatctttatattcattactaaccatttcaatctcttctctaacagaccgtaactcagaagtagccgagacttgcctcgctttagctacctcgagctgtgttttaacagcaacacttgcctcattagctacacctttctccatctcctcaacacgcatctgcgccagctctgaatcctgtttcgcttgttgctcttccttttccgctttctccaattctagtttcagctcctcgatgagtccctttgtgttctctaactcctccaacgcatcgtatttcgcttcttcagctaactcagcttctctcttgtactcaggcattgcttcttgtatcttctcaagctcttcatctaccatcttccgtctctgaaacacacattttcgtcaaaaccaagatctcaaataaacacaaatcatgtgaagaaacaaaagcttaactacaacctctatagtctgaatcttatgagctttccaatctgtgatcccaccaaacttagaaactgcttctctaaccgattcgaaaggtgaagctgtatcgataacaccaatcggagacccgaaacaaggcgattcgacagatctcggagaaccaaaacgaggtgattcgacagatctcggatacacaaatgctcgaggagaagcaggaactctaagacgaggagaagcaggcaaaatcctagcatcttcga

SEQ ID NO: 2066 - DNA, 1014 bp, Arabidopsis thaliana
agccttatgcaccgctgtaactttcttcctgttgttcaggtaggcatactcaaaagcatactttgcaatacgctccgaacagaacttcgtgatcacctaagcatagaaataggatcagaacaatcacacataacatacaaagaccacttgcaaacgaagatgattccacaaatacagattgaatccaaaacgaggagcagaaatcggaattctcaccttcagactctcaacgacaccaggaacaacctcgtgctcaagccccgcgtactcaccttcagtgttctctctgatgacaacgatgtcaacattctcatggcgagtaggtaaaccaggcaaattaaaacagttgaccagagaagcaaagaggtcaagctctttcctaagctggacgttaagagaactaacaccaccaccaacaggagtcttaagcccacctttcaaacaaaccttattcttccttatcgactccatcacttccggcggcacacggctcatttctccgtgaacatcgtacttctcgaagaagatcggagcgtgcatcgcttccatcacctgttccacggcgttcgtcaccagaggaccgattccatctccggggatcagcgtcactgcgcgtggtgctccgtcaccgggtctgggcatgtaagtcacggatcgggtttgaatacctgatccattcgcgtttctagctagattcttgaggagagttagcgatctgcgagacatttttgtcttcaattttgggttgaatctgaaaagatttgatcgaaagagaagaagaagattcgccctttggcttttgggagctggaggcggacgaaaagcgtttattgttaaaatttagttatttacacaattcgccccaaaatcttcatctcattaagatatttccataaaacaatagataatcaccgattagaccactttgtttcagaatcgtcaattaagatatttatacaaatccccccaatcatttaacttcatcaacatttactcagtaattaatttagtttg

SEQ ID NO: 2067 - DNA, 972 bp, Arabidopsis thaliana
tcttgaacattgtcatagccgaggtgtattgcatcgtgacatcaagggctctaatctgctgcttgaccataacaacaatctcaaaattggagatttcggtcttgccaatttttaccaaggtcaccagaagcagcctctcactagccgcgttgtaactttgtggtatcgtccacctgaactattacttggttcaacagactatggtgttacagtagatctgtggagcacaggatgcatactagctgaactctttactgggaaacctatcatgcccggtagaaccgaggtagaacaactacacaagatcttcaaactctgtggatcaccttctgaagagtattggaaaatatcaaaattgccacatgccaccatctttaaacctcaacaaccttacaagcggtgtgtagctgaaacatttaagagtcttccatcttcagctttggccctagttgaggttcttttagctgtagaaccagatgctcgtggaaccacagcttctgcccttgaaagcgaggtaaaagctatgacattgtagattagaaatttgtgcctccactcgctttatttatcggaatgcaagtgtatacacttcttgtctcacacttttgttctttttctgtttctttagttctttactacatcgcctttggcaagtgacccatcaagtttaccaaagtaccaaccgagaaaggaaattgatgtgaaggctcaagaggaggaggcaaaacggtaagatccagatcgtatcatagtgttaacaataacaaaaagctcttatatgcttgaatgaacactgacacgtcccaatttcctctgatccaccagaaagaaagacactagcagtaaacagaatgattcaaaacaagtatctagagaatctaaagctgtgccggctccagactccaatgccgagtctctgacatcaatacaagtacgtctggttctagcataatacacatatagatatatatg

SEQ ID NO: 2068 - DNA, 913 bp, Arabidopsis thaliana
  unsure (1)..(913): unsure at all n locations
tcaatcctctagggaagacgaacacttctcctttcttcaccgtcttagcgaagagcttgttcgccgtcgttatgaatccaacgtcaagctcgccttccaaaacgaagatcacttcggtggcgcgtggatgcgtgtgcggcgggtttaaacctccgggagcgtagtcgatacgcgcgagtgagactccgagcgtgttaagccctgcgatcttctctacgtttgctcccgtgacggctgacccgactgtgttgttaacgacggcgggttttccgattccggcgaagaaaaaatctgaagcggtgatgtttgattcgggtttacatgtgaaaccattcacttttatccctacataatccaaaaacgacgacatttcattactttaacaaatcattcaaagtagacagtaaatttaatttgaagatatatgtgtacctgaagtgcgatccgcaacgcagagatcttgaagtgtgtcaggatcgtaagcaagaacaatcacatttagagataacaaagtaaagaagaagccaaaacatctcgagtccatggttttgacttttgatgatgtactgtagaagaacaagtaactagatttgaagctctaatttgaaactgtgtgatatgtttttgtttcgatttggatcgttataaatatttgaatctgtttgaggagaaattatgcatagcttaactaacttaaacgcaaagcaaagcttgggagttggaggaaagatgtgatgtcgttttcttacacatgtacatatttaatctaacttttaagttttggttttcgttagctagaattcttggtttaaccgaaatatattccagatcagagatctatagatcaataataaaaagtttcagtttcaaattcttggtaaggagttggaaagttaattanaaacttgagtga

SEQ ID NO: 2069 - DNA, 962 bp, Arabidopsis thaliana columbia
gagggacacggcaagattcagattggtcacaaatcgaagaatggagtctaaggagttgaatcattctcttgcatcggacacaacctttgccatcgactcttttcttgcatactgcaaagtgacgtataagaagttgaagtccgtaacaagtcgaaaacgcactgcatggaccgggttttgcttgacatgttgacttgttgtctaagttagacgatggtccgaccagtgtgcaaccttcggtgcatatgtgttctatacattccatggcttcactcagctgcaaatacagattctgttctcgtctgtgtctccttcttcttttcttcctctgcaagaaattgacccaaaagaaacctaattcaataaaacagagttttcttgaagaaccaaaaaaaaagaaaacaaaaaagtgtggtttgagttaattaccgattctgcatcgtcgatgaattggagaatgtcaagttcaagaaaaggatcgtgttcttgaagaaacttccatccttctgtctgttcaacggtcttgaacttgtagtgaatgaatcgcatacacttgagacagaggtcaggtgcgtcgcagagacgagccagctggagaatatcgacaacgttttcggcggttactctctcaccgacgcctttagtgcaccgttgctttaactgagtcaccatatacacgtgtgataaagccagtagatggattccgtatttttccatctcattctccgtgacactaaacaaaagatacatataggggtattctagtcattttgcatactaagggtaaaatttgccgttgatttattcaaatttgatgttggtactagtttcgtgttccttgtgttgtgttcacacgtttttgaatatgaaacaagtctaaacaatcgcaatctggttgtagtgattttaatgtatgattacaacgttggaaaagtctgagttggtaaagactttaagatgat

SEQ ID NO: 2070 - DNA, 1342 bp, Arabidopsis thaliana
gaggatcccctgataaccaagtattcaaggtgttaaacaatattgtacaataagttcctctgtataaaaagatgaaatagtattttttggtaacagaagctgcacaaatgtatgaggatggtgtgttagcgtatgtagacgttaagattttagctgatgttcatattagagcatttgaggatgttcaaccttgcgtcgatatttcaacttcaaccaaatcgtcaaactgaagaaaaagctcccaagcttgtggagagtttgtctcctttgatatacctatgccactgagggttcaatttttatttgaattattgctttgttggtttatgctattagaaatatactaaattaataaaagttccctttttgtttagcttttatatgtagaaatgatattgttttctaatcataattggaaaacaataattttgcttagatatgataattttagattcataccaccaaaattttattttttggcttaaatcacaagtcacaaccaataaaccaataacccaaaaagctatctcctgcatggtactttaaaatatagatgataaaatacttgacaaattgtacgaccaaatcgttgaatcatgatttattggtttagttgccgctcttatctgttaggtttttcttgatcccaatgatatcccctatgtccttgtcgatgatatattctttctcattcaccctccaattcccgcggccgatgccattgttgttgtctccgtgatctccctttgaatacttacacgaccaatcttcttctcggagatttgagttcttgtcgagaagtagtaccactcgtcttctttgaaaaaagaattgttggaatggtcaagcaaccatggctccttggcataaacatccttcatcactatgaagtttctggagtcttcacatcttagctcacgtttaagattaatcgttgatgacttcttagtacgttggatcaaagtgaatcctttcgtcttcttcgaagtattccatcaacatctttatgattttcaaaggattaagattttttgtgagttgagagattactaaaattaaaactaagataataaatttccgatgattaactataagaaaagaagtgagcacaattgtaaatttaattaacttgtgaatagcttgtacaaaaaaacctttctaaattaagaaaattttccggtctcgagtcgggtcagcgtaatatttaacctaaaattataaaaaaatgtttgaaaattaaatgttattatatgttcacatcagtatcataaattaataattgtattaatttatctatatatatataatacatatataatacatcctactatattatttggga

SEQ ID NO: 2071 - DNA, 649 bp, Arabidopsis thaliana
aagcctcgagatctcggagagaagctgctcacggcagctttctagcccgaatttgctctcgctctcaccggatgtgtacaaacctaagaacccggattcgaccttgacatcaggacgagggttatgaggatcaagcctagccggagtcaaagagctctttaggttagctaaccactcatggttggtgacagtgccacgaaacgtcaccaaaatatccctccttcccaaacgtttcaccgattcatcagaagaaaccgctacataaccgatccaacgtgcacggttaggctcgttcttgatagggttgaggttgatgtctggtgtggcgtagatatacttggtgacttggtagccatcagggtcatggattccggattctttaagcaagttcttttttccatacttgcaactcaagtaacgtttggagttagggtttagatcaaaccctttgtaagaagcggagagtaagttcccgtagcgagtgatctcttgttggagaatagggcttagaggttcaatgagatttcccagttattgccccttgtacgcgcaccaaacccgagacaacggtagagtcactgcaggtgctcgagaaggaggaatggcctgagaagaagaagaagaaggaagagagagtggagaagatgaa

SEQ ID NO: 2072 - DNA, 919 bp, Arabidopsis thaliana
gtgtatatcactttagtaacgacgctctaaatataatcgtacccaatcaagttgtcccagcgatacagtaaaatccgaccacttccgagtcataaaccgttctagctttgtattccgttatgaatttaactatctgatcatagttgatcgaaccgttagcagtcacggcaactcggtgggtgaccgcaacatcatcaccgtggtccttgtcgtcgtcgagagtccaggaccagccaacgtatggaaatccaaagactgctttcttctccggaagtccggccttaagccaatgtttcaaaccggtgtcgccgcatggacctaccaaccaagttaccaaattctattccagttaaacccttgaccaatcaaaagctactcactttttctacgtagggattatatttagttacgtttatacctttaatggaaggatcatacaacccggcaggtggaccgatttcagtggtcaaaccataaaactcataagcgataagattaacccaatctaagcttctgttgatcgcttggaccgggtaggaaaccgaattgtaatctgaggtgtagtaaaccgcagccgtcaaaagcaaaggccttattccggtacgttgagactcgacctcaactgcggatcgccattcttgaagtagtttcccgaagttgttcatctccacatcattgtttgggtactcccaagccagatcaagtccataaaatccgagagatctagcgatcgagatcgaagacgaaatgaacgattctcgagaggtgcggttacttgccatggacgcaaacgcgaatttgttgtctgtttttttcccgccgatcgacaagagggtcttcacgttatggtttttctacctgacgatttcagtgaaggtggagaattcgtattcgtgcctttgggggatgaagactctgt

SEQ ID NO: 2073 - DNA, 1404 bp, Arabidopsis thaliana
tttatgtttcgcacgtctctttttgtggttcggccaaaattatgagatttactaaaaccttgaggcataagagtttttcttacccttatttcaggattttttttctctcattatgagagagtttgtatgagctgagctatttggcattctatgtgggatgtatttactagtagatacttgaacatttcttctcaataactcaagttcacaaagaaaaacaaaaatcccaaagaggaaagtacatttattcgctcaattaagttcacgtactaaaatgcaacacagtgtatattataagactgtttatctctagaaccctttcatttaatatggagctctcattgtactgttgttgttagtttctaagaaaaggatataactcatacctaaagttacagctcgtacccaaaactctccctccttgtttaccgtcacaacactctggaaacttcctcaaaatcccttccaaacactcaaagcactttgtaaatattaagtctttcgtacactgcaccattgcagacaccttctgtgtcccaattctcttctcccctgctgcgacaacaccaattgtttaccatccaagttgtatctatcggaggctttatttgccagcttctccaggagagccgacgtctccttgatgaacaactcccgatcactcatgttttttgggttggacaaatagaaatcgttctcataatctatcttattgaaggaggcgactgaagatatctttaaaagacattggtcataccatattattgctcccttatttcttggacatctcctacgaagctgtcacatacatatacatatatatcaagaacaatattgcattgtttaatcagtatttttgaattagcctttaatgtctatcagttttgtctcaactcaatcatttatgtaaagtatcaggatcattggacacatatttaagatttgacagaaaaaaataaccgacgtgtgtgctcatcgtaatttttacatgtaactatatgactgctaatttataatattgaagtcacaattaccccagagacagcggtgctaatgcaaggggggcacttggaccagtaggagtcgccgcgacactggaacatgacaaagacgttattgggatcctcaccttcttcggtgtagcggaaaccgtcacgaaaatttccaatcgaggtgatggtactgaggactaagttgagatgtagccagtgtgcagtccagaagacgcctcaatggagaatgggtccattaggtgcgaagacactgtgtaatgcttgtggggtccggtttaagtcgggtcgacttttacccgaatatagacccgcttgtagcccaacattcaccaacgagattcactctaactctcaccggaaagtgttggagctacggctcatgaaagtggcg

SEQ ID NO: 2074 - DNA, 1115 bp, Arabidopsis thaliana
tcccaaaaatcaacatatgtcatttagagttctgagaagtcattagactcacacaaggcaacagttggctcaaagatttacaagggcttgatggggtctgacacaaaggttatgaaagctaatgaagtaagttcaacacatgctcgaccaactgattccaccaacaactcgaagaagcctccaacttgccctaaaagctcatgcttgaccaaacaactcattgcaagcactcagacgttagatgattggttagaactcaaggagagatctaaatggcaggacaaagccatacaagagctaacacatattgtgaaagagctgaaggatcaaatcaaggagctcaatggaaaagccaaccaagtaccactcaacatcaagaacgcccctgacgatggagccactattcttgtcagcaaagaaggatgtgaattcacatcggaatggtctagaggagaagactatcttgataaaaaaagaagcttactgtgaggacatggcctctgagtacccaattgcagacctgttaagaaaccctaatgagtatgatgatcactctactcaagaaagagaggagccacatttcctctctgcaacctaccctgagcctaacgagtatgagaagtcaagcttagagacttaaaacaagctcacttgggagaaatcccatgtctatctttgtacatatctttatttttccttgttgattttgatgcatttggttagtgtcttcaggagataagtataaagagacgagtgaaatggattctggctctgcgagtaaagcagtatactcgaccacagagaaatgaaaaatactcgaccatgttttagcttatccacgccaagagatcactcgaccgcggtgctggccgcagcagaagaagagaggtcgagtatcctcagagcggtgctggtcgccatagagctaatgaggttgagtacccacctgctggagctgatacagaacaaggtggtttgtctatggcctgggagcaatcacaggcagccattgacgagcaactacgttcattcttcgactgaggtaagcgcctcacttcaccattgtattatatcatctgttgtgatttgtttttatttcattttgtttctgtgag

SEQ ID NO: 2075 - DNA, 584 bp, Arabidopsis thaliana
gtaacggccggccagtgtgctctaaaggatgctaattgtgtgatatcgtaggtcacccgggaatccagacaacgtcgccataaaacgtgtcatcggactccccggggacagaatcacaacacgcgagccctgcgcaaagccctcgcagattgtccccttcaaccacgtctgggtggaaggcgacaaccccaagaagtcgctcgacagcaacacatacggaccggtcagtatatcattgatctcggggcgcgtgatggcggttgtttggccaaggttccggtggttaaattgggaggagtgggagagtggagatgtggacggcggacggtttggggaagggtacctggcagaggtgagggagagggttgagaaaggggctgtagagcttcagaagccgttcttgatctgattatgtagactacgagtatccatattatgtagtgttgagaagggcttttctatcccgtgaagagggtaattatactgtataattagtgagtattgtacgtgtttagcatttctgcagaccagatcctcatgatatcaaaatatgtacactttagatgaatgaaaagctaagacga

SEQ ID NO: 2076 - DNA, 676 bp, Arabidopsis thaliana columbia
ttaatttttctaatattatcataataatataatggtgttttataccttttatagtaatatgttatatttaatttgatcattttttatttaaatgcaaccgcactcgctggtttaccagtcataaaacttccccaaacgcacacattttcaaacgtgatatacctcgattgtcactgcttttaactataatttaggtatagttttagagtccttttgttatttctagagtcttctatagtccttttcaggtttttacaagtttggtacgtatttggagataatagagcattctggagcaaaacaaagattttatgctccaaaagaaatccggagaccacaaaccgcgtaggtgtcgatcgacaccaatatctgacggcagttcaaagacgcgtttaattgaagttatgaagatttccaaatttggccaagaactttcccttatttttaaagaataccgacacgttttcaaacatatatagattttaaggtcattgtttagacctaaggttgaagagactaatctccttttctcttttgtttttgggagccaaaaccctgtggagctccttctgagagaatctttctaaactatattctcttattgtttcttacattgatttctactttaaagatgttttgttttttatgatcatgtctgagtagttcttctgttggg

SEQ ID NO: 2077 - DNA, 1166 bp, Arabidopsis thaliana
gaatcgattggtcggaaaatgggaggagctaaacgactttggggatgtgtgaatttcatactcgccataggtttggccatgacggttcttgttactaaatcggctgagcatcaccgggaaatcgccggtcctttagccggaccgagcggtggtattaaagccggagtatttagtctatttacagttcttggtatcccattggccgtaagtacacttttgttttgtccttttgttttctttacaattttaggtttgtaaccgattcttttttcttgtgtaattattatgacagattacttacagtattccatttgcactagcgtccattttctcaaccaattccggtgccggccaaggtaattttcatttatttaaaatgttaagttacaaatctaatggtcagattctgataatgtaggacatattagcatttattgagttcaaacgtttgatttgaataattaattgaaaagattatgtttccaattttgtgtattattgtatctatctattcaaaagtaattctttcctttattgcataggagaaaaaagggagtaaatatttcctttgtaacttttttcaaagtcttttcttgttaatgtggattatctaccaagtttatctatagcatttaatagggtgagatttattaacttaattatattaattaagatttctatgtaatctgctcttatattttcattatccataggtttcatcattcatgcacctaatgtttgaaacgtagacagtttcttttgcaacataagtaaatatttaaatttaacgaaaacgtgtttctttttacaggactttcattaggcgttttaaatatagcgatttgtataccacaaatgatagtatcattctcaagtggaccattggacgctcaattcggcggtggaaactaccttcatttgtggtcggagcaattgccgcggcggttagtggagtcttagcgttaaccgttttaccttcaccgcctccggacgcaccagccatgtcaggggctatgggattcattagttaactagtttttacatatatatgaatttccatctaatacagtattgttgtcaaaagtgaacccccaaaaaatggataaagtgagaaaaataaaccttggtcgtctgtcttttactgttctttagtttttttttttttt

SEQ ID NO: 2078 - DNA, 782 bp, Arabidopsis thaliana
gtacacttcgaggtgcaagaaactgctcaataatcagaccaaagaggatcactaaggatagtgacttcaagaaggggggatccacataaaaacgaagttcaaattgatgaaccaactaaacttgatcagccttcagcttcactcgaccctctactcgatcgagcaaagctaacttttgaagaaagaaaagatgcggttgtagaaaagaataaagaaattccgtccgccaccctacaaaccgacggtgcctttccctggaagattcaagaaggaattaacaaagaaatacaaaagccctttttgataagcaactaaaggagattgaattaagaatgccattaatggatgccttcatgctcattccacactcacacaagtacctcaaagatctgattatggatagaatcaaggaagtgcaaggaattgtggtaataggctatgaatgcagttctatcatctagaaaggcataataccaaggaagttgggagatcttggatccttcaccctaccttgcttagtaggacctttatctttcagtaaatgtctatgtgattttgggtgcctcaatcagtcttatacccctatccgtagcaagaagactgggtttcagtaagtacaagtcatgcagcatccaactgatattagccgatagattagtcagaatcccccatggagtcctggaagacctacctgtcaaagtcggatcaatagaaatccccacacttttcataatactggagatggatgaggagccaaaggacccattaatcctaagaagacg

SEQ ID NO: 2079 - DNA, 1067 bp, Arabidopsis thaliana
ctatcgaatgtccatggtcctagagagcatggcagagtgaatgaaccgggatcatcaagcttatcttacgtgacttctctctggtaaggatcttgagtgatgactctactaatcatctcttaattctgatccttcctgagtttttctcttttgaaatgtttttcagagtggtgagtattcagcaaaggtgtgtgctctatagtccagatgaattgttggatggcaggtgcaacaatttgagttgaatccccccttcttgaatcatactgtcctcaatattgggaatctgatgacttggtggagactcatcttcttggtggatggtgatagcatttgcagtagcatagtccttaggattctgaactgctttcccatgaagttgctgaggatgcttcagagcagaggtggatgcaaactgactctccacatacttgactttggaattcagagcttcaaacttgacattcagatcgttgtatgaacaatcgatcttgttgtgtaattcagctatcttcttttcaaaaaccatagctccagtagcttgtccttggatgatctgttgaatgagttgcttaatttcaggatcttgagctactggggcttgttgtggttgttgagtgaaccctggtggtggattctgctgttggaagcctccattaaattgttgtttagggacataaccttggttgtactgaacaaaaggcttagactgattctgttgaggtggatacacttgatcttgggggttagcaacattagtgcttctgtaggagaggtttgggttgggcttgtagttgttttagcccttgttaaaccctccttggttctgaatgtagcacagctcttcagtttgatcattccccccttcttgcatttggaagtgctcttcatcagtgatgtagtgtatctgcttctgctgagccagcatcagcttgtctaaattctcattcagagccttgatatccttgctctgtatatcctcagttcctccagttcctctcattgagcgatcatagtcttcattgtagcacccatcagattgtgctagattttcgacaaattccaag

SEQ ID NO: 2080 - DNA, 1377 bp, Arabidopsis thaliana
attttgctataagtagcatgtaccctacattttcgagaacaagttttttttatctagttttattccgcagacactgtgttctagaccttttgtaatccggatttctctttatctattcagtatttagcattcagtatttgttcttgatttcgtttactgttgttcatcctgttatcgttttgctattacactgttgttatcgtgttttcatcctgttcaacgttttatgttctctacaatgatgtctgagtagtgaataggtttctgaggatgggttagagtagtgtagaattctcagtatgctaggtggttaagtattgattgatagatcccttctggattagttgttcttaatgcctattgctttctgatcaactggaatttgagcccagatatttctgcgcccaaaaggtgttcgatgaaatgtctgaaccattaattctagagattcgtggccctgtaccaaggtattggttgcaaggagcgttttggctttaacttgttgattcgtaatgcctgttaggttagctctcgtcaatggtgattgagtctgggactaggttaacttgagggtctctgttgcggtggcacttagatttggttaatgaacttgttgtttagggataatttattgagcatgtcagtcacctgtaaactgaggaaacgaaactactcaattaccccatcctcgagaattctttatccgattgattttattgtttactccactgctgtttactgtatcctgtcatctgctgcttagtttctacaattcttttttgttactcgaccttatactcgaccacccagttgtctggcaacagactgtgcagtcaattatctgtgtcatactgtctgtctgttactcgacctatcactagacctcacccagtgctctgcaaagagctgtgttggtcaagtgttttattgtttctgcttgaatttctggtttctgcatgttcacttagaactgctagaacacactaaaacctgttattgcttggcttgacttagtgacttctaatcacatcttgattgttagcatcacaccaatttggattgacaacctaaaatactacaacgacatgattggtgttttaggataattgatcttaaaaacctattatcaatttggcgccgttgcccattgggtgtttgtttgttacatttgagatttcagacttgcttagatagagttctttttcaatttttatttcagttactgactgtgtgtttttcttgttgtcttctcggttgaggtacacctctgctatattcaaactcgatcaacaggcaaccagaacctccttttcaacgataacatcagccgcctagctcgtgaactcagagaaaggagaaacacagtcaaccttatac

SEQ ID NO: 2081 - DNA, 648 bp, Arabidopsis thaliana
aagctttagaaagaaagaggaagttttacaaagaaaggtgtgagttttgaaaagaaaagagctcgtttgtaagaaagctcaaagctttgtcaaggaagttgacatctttacaaggtatggcttcgggaagtaaagatctagagaagtttgatgggtttggagattatatctcatggaaagtgaagttcctggaccatctaaaggatctagacttgttggaaggactgaaagaggaagtttgcttagagaaaggttctggaaattctggatctgacgaaggaagagttaaagatcttgaagaatgtaagatcttagaagagaagaagagaaaggctagagctttcatcatagtaagcgttggagatcatgtcttgagaaagatcatgaaggagagaacaactgcaggtatgatggaactcttagataagctgtatttgtctaaatctcagcctagtcatagtatgtcaaaccgcattcagtcgcaacgtttatatttaaaaaggaagctctttgagtttaagatgagcataaacggatctatgaaggagaacatagaagagtttcaagtatacagtacttgtagtgtcggctaaggactctctgtgggttcaatgggtgtaacacatctattcgaaggagcgttttggt

SEQ ID NO: 2082 - DNA, 1065 bp, Arabidopsis thaliana
  unsure (1)..(1065): unsure at all n locations
caggagctgatgcagcccctcaggtctatgcattgcaagcagaagctttgttgaagacacatagacatcaagaagctgatgatgctttgtctagatgtccggttttcgatattgatgctagtactaggtactacggaccggtcggttatgctggtttcttggtcgtccgtgctcaggttcacttagcgtctggcaggtttgttttgttctgttcttctttacaattcttggtttattacagtaaccggtattcaatttgataattccggtttcacatcccaaaacctggtatctcaaatttgatttaccgggttcatgttacattttttggttttcttgtttatataacatggtaaaaactagagttatactgaaatttcggtctgtattggttttattgtttgaaactcggtatagagttatgaactggtttttaatttgaaaattccggtttaatttgattttatcagattcgacgaggcggtggaggcgatccaacgcgccgggaagctggacgggaataaccgagaggtgattatgatttcacgacgggcacaagcggtgactgaagctcggtttaaaggaaacgagctgtttaaatctggacggttccaagaggcgtgcgccgcttatggtgagggattagatcacgatccacgaaactctgttttgctctgtaaccgcgcggcttgtcggtcaaaattgggtcaatttgataaatctatagaggattgcacggcggctctctccgtccggccgggatatggtaaggctcgcctcagaagagccgattgtaacgccaaggtaacaataaaaactagtggggtcgatataaaattttgagaaaatttgggacttgtttgtaattattaattaattgcggatcagatcgaaaagtgggaattagcggtgggtgactacgagatattgaaaaaggagtcgccggaggatgagcaagttatcagaggattatcagaggctcaacaacaactcatgaaacgtagtggacaagactcttgagaatttttccggtgaataaaaccagtaacnaccgtgaggatatat

SEQ ID NO: 2083 - DNA, 1277 bp, Arabidopsis thaliana columbia
accagcaaattttcaaactgtaaaatacgagtgaagtttgtgacatacctttcccattttgcttttgttcttgcatgaaatgtggagtttttgacctttgggaggctctcaaatgaccatgagaagctctcgtcccactctggattaggacctgtcgatatcacctgagaaaatcgaaagatacggttgatatctaaaggaattactagtcacagtgaattgacgaaagggtgataagtcttttcctaccttggtctgtctaggaggattgttgccgagtgttatcttgcagaacacactcgggttaccaacggattgcttcatgttgttaccacgtttgatagtgactaccagagtacctggcaaacactgcaagaggaattcagctttctcctggaaccgtggtggacctgattggattaggtactgaagtagggggatggcgtctgcagcagcaactgattgggccctggaaacttcggcaggacaggctgaccaagcttgtctgagaagaaacaatgcatccaaggcagcttcttgtgttgcttctgatcctgtcttgagggatgtaactagatgtggtatacttagtgttgcaggctctgtagctcttagacgcgggaagttgttaaacaaagagtttaaggcttttaggtattcatcattcacggttccagtggcccataagtctttctcaatggcagctgcaaattaaaaggaagcaacatctgagatataagatatataataagaatgagcagatcgtattgatacaaaaggtacagagattttctcaccagttattgctctgacggtttcgctagatgcgtactcttgaacggtgtgattagagaagagtagttttacgaacattgcagcctgaacagacgtttcaggatcactggaactgatcagatccaagacgacctgcacaccacctgcctcggcaactgctcttttgttagatcggctatacatgacgagattttgcagagcacatatagcaactactttcatttcttctgtgggttgttcttcaaggacattgactaaagcacggcaagcagaagctgcatcggtgcttctagcaagagcttcattctggaaaagatcaccaagggccaaagttgctagtaacgcgcctgctgagcttgagtttgtggatcaagaggtctgagcaatgcaagattcagtcttggtgctttgaatcctaatctcacgttgttgacagtactcgagcagtctgctggtgtgtgtcaactgatgagacttaaaag

SEQ ID NO: 2084 - DNA, 1369 bp, Arabidopsis thaliana
tgcgttgcataataaaatccccagtcagacgtcagctaaccgagcaacataatgggcccttttaatatctcagcccattagtttcaatcaaaaacccaataaagtagtttcttaacagtcttttaagaagaagaatataaccgataaatcgaattttcctggaaaaagttactcgaatttcgaacatcctgtgtgttgtgagctgatcgaagagtatagaggatcgatgaatgtttccagaaaccgtttatatagatagagtggagtgatgtagtatgtgacgaaaagcttcgaaatgtgttcgtcattgcttagaaagatcgacacaaaattattttttatctataaaaaaaggtagccaagtaaaattcgattacgactctggtttttttttgtataaaacgaagatgtgaagagtgaagaccgagagagatttatagcagaggaaagtgaaatcatgaaagggattctagggtttgaatacgggatagttcaggcgccattaggaccagatatctccggaccagagcttgtagccgccgtcgctaatgcaggagggattggtcttctcagatgtcctgattgggtaaattgcaactttttcgttttctttgatttttgtttatagatatattgaattatgtgaatcaatgaatcaggagtgtcctgattacttgagagagcttataagaaagacaaagacattgacagagaaaccatttgggatcggtgttgttcttgcgtttcctcatgatttgaacattaagacaatcttagaagagaaagtggctgtcttgcagctttattggggtgattgttcacaggagcttgtggatgatgctcactttgccggtgtcaaagttattcctcaggtaactaattttgtatgtttaccaaaaggaaggaacttgtcttatatttattgcttagttaacttttgaaaggtggggaatgtcgaagaagctagaaaggctgttgctgtaggagtagacgccattattgtccaagggcgtgaagcaggtgggcatgttattggcaaggatggtctcttttcattgttgccaagagtggtggatttagttggggaacgcgatattcccgttattgctgctggaggaattgtggatggacgcggttatgttgcagctttgtcacttggggctcaaggggtctgtctaggcacaaggtgtgtgctcttcttttgttccacatgttctcaagtttgatattagctttttgttgggctgagttttttagaatcttcgttttcttagatttgtggcgactcatgaaagctatgcacacccaatatacaaaaggaagttgattgaatatgaaaaaaccgaatacacggatgtatttggaagac

SEQ ID NO: 2085 - DNA, 776 bp, Arabidopsis thaliana
cattccatccttagtcttctaagtaaaatactacaagcagagtcatgtataagaaagaggaacaaagaattaccaaatctagcgtaatcagacaagccaaaatctataaccttgagtactgcatcctcatttttgcttgtaaagagaaaattctggatacaacagtatggcatttgttcaagacagaagcaacaactacttatgatattcacattggtagaagaacaatgtgtgtacctccggtttcagatcacggtgcacaacaccttgaagatggaaaaaagcagttgcagataaaatctgtacaagaatacgcttagcttctgcttccggatatcgaccacctctacagtaagatatagacatcacagaatcatcctccatatatatgcaacacaaagttacctctttaacctaagtatgccaaaattcaaggtggaaaacagaaaaaggactagttttgattttacctcgccaaaatactgtccaatagctctccaccttcacataacctggaatcatattggagtcaatatcttaaggtcatctcaattcctaaactttctcctaccactggtactattagaactatacttttttttttcctataacagaggcaatggtccaaatctaaacacaaggagattatgaataaaacaacttttgatatataagaagcatgaaagagacatacttactccataacaacaaagacattatccgaatcctctgacacatcatagaacttaaccatgtgactatcccagacaaagctt

SEQ ID NO: 2086 - DNA, 804 bp, Arabidopsis thaliana
aggttcgagacattgcatcgattaaaatcgccaacattcttctcccctgcattgacgctactaggattctcgagggcaggaacattgacttcaggcctgcgcttgaagaactttatttcgagggtagtccgccaactgaggagatcagtcataccgaaggagctacagcagaagatattgatgagacggatgatatagatgaggcggagtttgacacgagcatgtatcatttcagtgagcaaatacctcctgcgagggaaagcaggagtttgagcgaagctaacagaaacaacagcaagctgcagaagtggtgcatgaaacaggacaagttactcgccaagtgcctcagggctatcaagtttatgaagaacaagctcagctgctcctcttccactatagttattccgcagggacatctccctcaggacatgccttcaaggagatatgacgcgcccgagccaagtcggcgcaggcctgagcctagagagcaggtgattccgcatgtccctacgaggcattcatcattcgagcctcgtaaatctgggaggaagaggaggaccacactctctcgatctagcagtaggagcggacgacttctgcagtctcgtagtttacgcgaccgcggtgctggccgcagcagaaggagagaggtcgagtttcctcagagcggtgttggccgccacagagctgatgaggtcgagtaccacctggtggagctgatacagaacaaggcagttcgtctatggcctgggagcaatcgcaggcagccattgacgagcaactacgttcattcttcgactgagg

SEQ ID NO: 2087 - DNA, 1119 bp, Arabidopsis thaliana
cgatgcccttcacaaagctctccacttcgccaaagccgcagagctcaccgtgctggccttacgattcaaagaatctaaaatgcaaaacgctccccttgcaattcagaaacccttcaaaaaggaaaaccaaacgcaggggcaacataccttattcgcaatagacgaggcagctgaggacgagagtcagaacttgacctcggaaaatattgcaagtaccacaagaaaagaggacattccaccgaggagtgtcgcgccgttaaaaagttaattgcagctgcgggaaagactaaaaaaggttcaaaccccaaagttgaaacccctcctcccgacaaacaggaggaggagcaaactcccaagcaaaagaaacgggaacgaacaccggagggaagtgactctcccccacctgctaggagagaacgcatagacgtagtctttgcagaactcgatctaggtggtgagacaggaaggtcagtcaccacacctccccccgccccgcataagaaaaacatgaggtttccattacgcctctcaaaattctgctgaagcgcaaccgaggaataagcctcgaggtaacctcacacgaactcaacgtcgatccgacctaccgacctataaagcagaaacgtcgcaagctaggtcccgagagggctaaagctgtgcacgatgaggtcgatcaattgctcaagatcggatcgataagagaagtaaaataccctgactggctcgctaacccggtcgtcgttaaaaagaaaaacgggaagtggagagtatgtatcgactttacggacctgaataaggcatgtcctaaagacagtttcccactcccacatatcgaccgactggttgaagccactgcgggacacgaactattgtccttcatggatgcattctccgggtacaaccaaatacttatgcacccagatgaccaagaaaaacagcttttataactgaccgaggcacctacttttataaagtaatgccctttggtttaaaaaacggtggagctacttaccaaagattggtgaatagaatgtccgccgaccagctaggtaaaacgatggaggtctatattgacgatatgctggtcaagtcagctcgcgaaaaagaccacgtcccgca

SEQ ID NO: 2088 - DNA, 1480 bp, Arabidopsis thaliana columbia
tgactacaattcatatttgactccagaacactaaccaagatttttcttgcttctcaaagctttgatggtgtagccgaagtctgtatgagtctttggcttcgtatcttttaaacaaggaaacactacttaggcttttaagattcggttgcggttctagttttatattcaatcagacccatgccatcaaatcatatttgactccaaaacactaaccaagcttcttcttgcttctcaaagcattgatggtgtagccaaagtccgtatgaatctttggctttgtatctactaacaaggaaacactacctacgcatttaagatcaggttgcggttatgcttcttatactcatataagtagtttttttaggcctacttatatgctgaagtgtggtgtgttcagtttaattccccttaaccactaacatgtcgatgcagctataggggtgtcaatccagtccactgttattgctagcaatcaagacgtgtaaagaagcaactaagtcaagccagattataatgatgatgggtttctagtaacaatcctaggtcaggattcaaacaagtaaaaatgagaacttaagagccctactcgatcattgggtcgagtagaatcaacaagtgagaactaaaatgcaatcaacaaaggatacaaatagggatacaaataacaggtaaatgaaagtgcaatcaacaggggatacaaataaatctaatagaagttctaaggatggattcattgataagggcaactctagggttcatcagatggctaataggtgaaaggtagatacccttgacgatagattcaaaaaccgggtctatccactgtcgtgacagagacccccataactctaccacttcctaatctgaactgtcgttgatgaaacatagcagagcagggtttaagaaataatctaccaaagccaataagcagacaagccaatgtcttggtcgagtctacaaatctctggaattcgtagatcagacatccatctgaacgtctttggatgttggacgtctatgatcgaatctccacattagccagcgaaaaccgcataggggccaagcgaatccagaagggttctaacctaatcttaaccacctaactaacctagagattaccctaatataatccgtcctcaagaaccctaatcactactcaagcaacattctcaagaacacaaacccaaaaattacttaaatcataccaaaatgtagatctaaacaaactaaacaactttacttaaacaactacatgcgaaaacgaaatagattaagagtaattaagttttgaagattcataaacacaaagagaaattaaaggataaaagctggatcccttggacaaaccccaaagtaatttatttatactaaaatattaaagacccttagatttactagaggataagagacttgaggcggtttgggcgaatgctcgatcttggggatcgagtaatgagggtgctgcaatgatcgagtagat

SEQ ID NO: 2089 - DNA, 1005 bp, Arabidopsis thaliana
catctaattggtgagagttccaagccgagtggctatgagcggtcgtgttgccaacccaacatgagacagccgtcactctcctccacccaataaccctcaccgccgttgaacagagccaaaagcatactcgcttgcttaaacgcattcgaaccaatatgtgcagccgcaaacccagcagacccgaaccggttcctccactgactcaacgtttcatgacgctcaactcggtcaggtccatcacaagccacaacgttgcagatctgtttacccaagtaaacctccgacatgaccttgtcttgaccactcggtacaccttccaacgagtcaaacaacgtcgagtaataatgcaacgactcagtaaaccgatctaagaaaatcggactattatggttcgattcctgctcaaccacagtgaaaatctccggtttaatctgattcaccacaccaagaaccttatcgatcgcaccaggtcgtcccaagagcttgtgaagctcgaaaacagagttaaccgcaacagattcaatctcacttggtctaagctcaagcatcgaagcatcaagatcagctaaagtgttagccacaaatcctctgtactcaaactcaacgtgaatcgcctcagctaaatgagccagcttacacccaacttcatgaagataatcgaaattatccggtgccggtggaccaattccggttaaccggaaaacaggaggaccaccaggtcgaagcgcaagagcctgcataagcgccggccattgaagaccttgactcatagagaaatcaatgacatgaactcttttcttcccttgaaaagcttcgagaatcgcttgattcgccgtgaagtgagcgaacttgagataaggacaagtctcgtagaagtgcatctgaagagtatcggagagagagtggtcgattggactctgcgacggagagagacggtaaatccgccgcgcgagagcttcggcgaagtaagtagcgacttttctcatcgctccgatttgagaaacg

SEQ ID NO: 2090 - DNA, 1454 bp, Arabidopsis thaliana columbia
taactcaattagggtttcgcggcttcttctgcgagggaattacaacgaccatcgcaaattcctcgccaaattaggttactcaactagggtttgcggcttcttctacgagggaattgcaacgaccctcacaaattcctcgcaaaagtagggttactcaattaggattttgcgacttcttctgcgagggatttgcgaggcgttgtcgtaaatccttcgcaaattgcgaccaatttgcaaggaatactcgattagggttttcggccccttcggcgagtgaattgtgaggcatagtcgtaagtccctcgcaaattgctatggatgcatctgtaaccatatcatgaaatctattttccttattatgcccataaccaaattgatcaggtacatgctgaccataattcgcatcattattaaaattactaggttgctcgacaccataatttgttttactagttcatgcgctatatctacaatcctcttcatgacgtaaccagacatagtagtttggcataaatcctctattataaagatgcttcttgactacattaaattccaaatatttctcattgagacacttacgagatggacagaatattgaaactgcacagtccgtcacaatactctctcgtcacctcaccagtcgcttgatctctatgattgtacatccaacttcgtaatgtgtaaatctcatgctctccaccccaagacattattatttttgtaagaagttttttttttgaaaagatttttttgtttgtaagtaaatgttgtgatttgagttatgatttcttagacgttacgttggctatttatagatgtccaaaaaaatattgcgagggaattgccaggccgcttgcgagggatttgcaaggaactaagcttttttgctagaaatttgcgagggaatcccacctaccaaccagttcggtaagataatttaaaacgtgttcacctaacacgcgaagactcgcaaatccgtcgcaaaaattgctgcagaatacatacgcgtcgcaaaggcgtcgcaatgtgcaagggatttctgttacccgcaactccctcgtaaatttgcgatgtttttgcgacgttcttaattattaggtaaacgtgattactgttctgtttagcttaattgtcttcttaattgtttgcttaacttaatttaatcttaatttttggtattagcactgaattagaaacttagttgatagcctaaactcatattattaacactgaaactttggtgttcaaataaaattatgaagcaaacaaaataattatacaaaagagtgttgcaagttttagggtttagatgagagaaataaaaacagagtgttgcaagttttttagaaagcaagagatggagaggatccaatgttgtttgcctcagtctcaactgcctcctcagctctaactgtttcagcttcaacagcaacaggtggtgcgatcccaacagc

SEQ ID NO: 2091 - DNA, 976 bp, Arabidopsis thaliana
cactccggtgcggtgcctcaatttcctcagacgcagccgccagagcctcaacgtcagccccccactaccgcaactatctgccgctgcatcaactattccagagctccaccactccgtgtgtagatccgcgccgccgcgatctgaagaggtgcagtttaatccactgccagaagctcctctaaaccaagatcaaccggagtctccaattcccaactctcaggcacacaaccatccatcttctcaaggcaacaactttcaagagggagctcctcaattgttgtcggagctacaagaagactcggggagggctctcaatgacatacttatggttctcggaagggaaatgtggaccactatattgtctcctattcccaagccgaagactgaatggtatgtgctcttcctcaaccctattagattttttagattgtctattagcttgtgttaggttgcagcaatgattagcttgtgttaggttgtgtcttgattagcttgtgttaggttgtgtcttgatttgcttgtgttagattgtggtggattgctcttgtgtccgctttgttaatttgttgtgaacatagattgtgtcttgatctgcttgtattagattgtttcattggattgtgtcttgattagcttctgtaatactctgtcttgatgagcttgtgttagattgtggtggcttgctatcttgtgtgaacatagtggtcatgtcttgatgagcttgtgttctgttgtggtggcttactctcttgtgttctgttgtggcggtttgttctgttgtggtggcttgctatcttgtgttctgttgtggtggcttgctatcttgtgttctgttgtggtggcttactctcttgtgttctgttgtggcggtttgttctgttgtggtggcttgcttacttgtgttctgtcgtggtcgcttgctatatcttctgtgaacatagtggtcatgtctagcatacttgtgtactgtcgtggt

SEQ ID NO: 2092 - DNA, 763 bp, Arabidopsis thaliana columbia
agatgatcgaggctcacgaacaggcttcttcaacgccggttcggatcaaagtggacgctaagttttttgtcgtccgcctcgaagtcattcttgacgcgcttgcaggggttgttgtcctcttcttcgtcgtcctcctcgctttcggatgggaccacctcgaccggagcatttacgggattaggaacttgaccgcgaacgcgaggtacatccgaagcatagtcgggatcttggcaacgcagtcaaagttcctccactcccattgaaagggttcactttccatggccctcaccttcctttccactcgaacgatgcgggactcgagcgtttgcttttttaggcctagacgctgcctctcgtcgcagagaggtgatgtttatcgacaacctagtatagaaaccgcttaatatgaaaaataataagaagaagaagattagtaaaggaaggaaactaaaatcccgaccttaacaattctaattcgtaaatcctaactttggcgataatctagtaaatctaggttattgaaagccgactttagattggtataagtataggcctaagaatgccataagatatatactcacccttttagaaaatagacgtttctcttcctgtttattttgagagatggcaccacaaataaccttcaccgctcttgctgaattgaagtctttcaagacagatcctagctgatacagatgtaagcatacaatcctcttgcaatacactaggaaaacaatagaaatgatcctagctgatacagatg

SEQ ID NO: 2093 - DNA, 841 bp, Arabidopsis thaliana columbia
gaggatgaggatctcctgttatcatttctgctttgttattcacctacctgttattgccatttctgcatttagtttcatttcatttctgttattgcataataggactgttaataccaaccaactctctgcttggcttgacttagagcctgttaatcatatctcatatgtttgcatcacaccggacttgattgacaacctaaaatactacaacgacatgatagtgttttaagattaattgagtaaaatcctactatcaacttctaacactgaaccgacgatgaaggaggctgtaccggaacctcttcaataaatgtcccccgaattcgctgcttattttttattttcttttgaactcgttatgagctccggcccatttaatttgtggaaaatttgctactctccttgatctcgaaatattcattttggagatatgctttaaatgcagggcttactggaaggcgtgagtctttctgcgaatcactccagtcttaaatggaattgcgatctcctagggttacaaaatccctataaattgtggttccaagttttccttactttctatctaccccttcttttccttttttgcagcattggagtttaaccttcgatgctcggagttcatgccagacttttctagggtcggaatgatggatgaagatatcccaaatgtgccaggaagtgggccttcaccacctcgcagcttcttcaggtcccaaatccgaggtccatgtgcactgatcaagggacttttggacagagaccaagaaatcgcgatggcattcatcaaagctcttacggttcagcatcagaagcgttcgttggaaaagaggaagctccgaaa

SEQ ID NO: 2094 - DNA, 583 bp, Arabidopsis thaliana
tcggtgagtcttcgtcctcatagtcgtgagatctatttgatcgcggatagtttggtttttatgattacataatctctagttttgtggtctagtggaaagttgatgacttcactggaacaaccttcctggcttcctgctacttatgaatggacatatttgtacagagtgctcttagctcttatatcaatttggaacaaagcgcggtaaataacaaagctcttcgtttggttgatctttttccagtgctttccaccatttctcctcacaataaactgttggcaagttcatctgggtcctcctctcctgaaacggcagtttcttaactctggggcaatttgtgatgactaatgtttcaactttttggaatgaaaatcgagatgggaggatgctgtttagttctggcagatccctagttctcaaggtcttcaggcttgggaacaatgttggatcttcgacggatggactctcgtgttcgcttatcaattcctctatctctctgcagtcgaacagttcaatcacctctagctttgggagtttctgaacccatgagacattcttcagcttgttgcagtgtgaaatgtta

SEQ ID NO: 2095 - DNA, 574 bp, Arabidopsis thaliana
  unsure (1)..(574): unsure at all n locations
tcgactctagannnannagantctaactcatgagaaaatactccattctattctgaagtggaattttggatgatatatgactcttagtgtccaacaccatgttccctcactggtcaaggttctaatgaagatcgtgttcatgcatttggtgtcaactatcaaagtttagttctattaactatataagcccatggagagtaggtaatcattttttgcttctggacagacttatgaacatgtctgtattgaggaatgtatcactgatggacagctcttgccccaagactcagtagaaactctatgttatgtttctaattgacactgagggtgccttttaaagccttgccccaagattgatcattaaaattggtttgataactttaacaggttcgagtaattcagttactcttgtgagaagtgggactagtgacaggaaatcagatgctgtcaatttggagatatgtggtggttgtagcagctccatcaataccaccacttcttggtctctgcttgtatggtcaagctcacagtccagtgaatctgttcattattctttgttgttgagacagagaaa

SEQ ID NO: 2096 - DNA, 871 bp, Arabidopsis thaliana
ccgatttaaacattgttgatgcacgtaatccagacagttgcgagcttcaacagcaagactacataaaaaatttaagcgtgtcttcagtgtcgagaaaacagtctatgtccacatggctagaagagcaatgttatacttgtccagaggagataaatggagaagatattggagaaaaatcaaatatttatgcccttggtgttcttctgtttgaggtatggacgaatacccagttttattgttgtggatagatttttagtttgctttaataccaagaaggatgtaacatttccttgcatttgaacactatgtactgtcatatcctgcttatgtgggctttgggtagtttatattctttcattttcatgaaatttcttactctagtctgaactttgaatcccagagctagtattttccagtctgcagtatataacttgtcagtatttttgtttacttgtttgatactttcatgtgaagacgcctactgacatctagcttgaccaattgttgtttcagttgctatgccattgcgagtcaggcgagatgcatgctgcaatgatggcagatttacgccatcggattctcccaccaacatttctctcgaaatacccgaagtaagctggattttgtctttggcttctacatcctgaaccctcctcccgaccatcagctaggtatttagctgagtgctactcttttatgattcatgtgggcgagtatctactaggagtctaggagtggtacaaaggagaatctgtagaccttccattagcttaaatagtcgtacttaagattcgcttgccggatatcttcaactttatttaatgtttcccgcttaattgtgaagaaaaaaaatggcatgctactgtgtgaa

SEQ ID NO: 2097 - DNA, 855 bp, Arabidopsis thaliana
gtatacttaaccagataaacaaatgcatttgtaatttttgtccatatctgatcttgtatctgcaattttttttgtcatcagcttaagaactttgaagaaacaagacgatcgttaaaagaggcgcctctagaagaaaaccggaaacgagagctatcaagtgcactccatgtttatttcaaagactggctttacggtaagaaaactttctctgaatcgatccctactttactttattgatatgcatcattcattaggttttgacttagtctatgtttttgttgcgacagcatctggaaatataaggcaactctactgcctacaaggtgactaataagaataatagaccaagcggaaagtgtcttgttcatgtagagctccttcgatcatatttggcatattgctagtgaagaaaccccaccccaagaccaaaagaaaaaagaaaaaagagaaatcagcctgattcagtgatttgtagtttggaaccaatacttcacaacgtaacttatctgcacagaaatactctcttaaagctttcgtttagattattgttttcttgatttctgcttttctttccttgacatttcaatccatcgtttttgttcccttctctattgaaaatctcatcttcaaatagagcatgatgacttgaattgttataagtaataacttgtaagcaaaactgttttgatagatagtcttgtcttggtcaaatagatttaagtggacgcaagagttaggctactaccatggtaggtgcaaatttctgaagaagttttagagctccaaaatttctcatatttgcagaatctcatattcgtagaaacatccagacaatgcaacgtaacatgaacatct

SEQ ID NO: 2098 - DNA, 636 bp, Arabidopsis thaliana columbia
cctaactcgagccattctctggggtgagattcgaagttatgaagttcccttgagatcttggtaatcttttgctccatctgaggaatctttttccgtagtgacctcctctcgattgaaagtttctgctgacaaaatgcgagcttctttatgaaccccatcgcgatttattggtctctttctggaagatctttgattagcgtgcacggagtccaaatttcagagcgaaagtatccgcgaggaagagggggtcgttggtccggaacttttggaacttcttcccgtatcattccgtctgcggagtgatctggcacagtctccgtactgtaaaggtcgatctccatatctgccaaagaaaaagatgaagagaaaagcaaaatcaaatgtcaatttataggatcatcgtagttctaaaaatcatatcagagagtgatttgcggagaaatcgatatctgtcagctattcctgcatttaagcttgttcccgtgaatatatcatatcagagctgagttttcataaatacaaatagcctgaagcccataatgagtccaaccaaaaaaaaataaaaaaaatgggacttttagttcggggacatttttggaaaaggctcaggaacaaactcggggatcctctatcctc

SEQ ID NO: 2099 - DNA, 622 bp, Arabidopsis thaliana columbia
tgagctaatcggtgtaatgttgtgtaatgagtaccccaacgagtattaccaggtctctgtaatgaaagctcttgattcaatccctttcctgtcttaatttcaccttgattgattccttcctctatctcttttagatattcttctcgaatcctatcttttcccttacaagaagctccaaccacatttagcaaggcagaaatcatatcaaagaaatctccaacttcaaattgttttttagcaactgccacgaccactaactgaagctgatgagcaaaacaatggatgtaataagcagaactattctctcttaaaatcagagatctcaaccaattgaattcacctttcatattgtttgctccatcatagccttgtcctcttaactgtttcatactcaatccacgtttagcaaacaatgaatcaatagcacatttcagagatgcagaagatgtttctttaacatggataagaccaatgaatctttctttcaccgtcccatgtttatcaacaaaacgaaaaaccactgccatttgttctttatcagaaacatctgcagatttatccctgataataggtttttaacaattaacctaaaacactatcatgtcgttgtagtattgaaggt

SEQ ID NO: 2100 - DNA, 124 bp, Arabidopsis thaliana
ttttcgggtgaacgcaaggtacttggagtgtgtttggaaaattgggattcaagtggagggtgatctagaaagaggagcggtcgagagagctgtgaagaggttaacggttttcgaagaaggagag

SEQ ID NO: 2101 - DNA, 1026 bp, Arabidopsis thaliana
ttctatacactacatttccgaagtgagtaacaatgtctggagaagatgctaccaacgcttcactagccgaaactctcaagaccatgcagcaaactatggcgaatatggcgcagaagttttcgaatgtggaaaaaaccgtcgaaacacttcaaacaacccaggtatcactcagtcaaaatgttagtactattcaatctcgcgttcgttctttgaatgcaggcaattcctctggagttcgaagaactatcttcggttccccaaattcccttccgcgaaatgcagcaagtgatcaaacgacctcggatggtacaaacgcggacatccaaccggaagatagagaaacgcatcccgaagacaacaaccagttcgttaatcaacacgagcaagaaaacttcaaccagttcgaaaccatgagagaagtaagccgcaaactgaaagatatgagattgaaattccaccaagctacaagctaggaacctgatatcaaccgggtcatcgaagaaactaggcgaacacctttcaccccgcaaattgctagcttgagaatcagagattctcgaaaacttaactttgaaccgtacaacggtttggaagatccgaaaggatatctcgcaacttttctaattgttgctgggcgagttgatctgaacgaagctgatgaagatgcaggatactacaagcttttctttggacaagccctgatgtggttcactcagttggaaccaggatcgatcagcaacttcaacgagctatcaacagtacttttgaaacaatacttaattcttatggataaaagcatttcggataccgacctctggaatttatctcaagggccgaacgaaacacttcgggctttcatcaccaagtttaagaacgtactctcgaagctcccaaggatctcacaacagtcggctctatcggctttgcgaaaaaagattatggcatgattcgagattcaaagaagatttgacactacacaaacctgatactattcaagatgcgttattccgagcgaacaattggatg

SEQ ID NO: 2102 - DNA, 829 bp, Arabidopsis thaliana columbia
aattcatatttaagcctgatttagtgactcctctagtgactaccgagtagattatattcataccgacgactcttctggtgacaactctttagttatatcatagctcggaaactgactcagtctcgtgatttgttgctgcttagcataattctatcgattaaaaaggattatccatggagcaagtactcaattgctccaaagggcttgcgataatgagcacacataacataaccatttgatctttgcatctatttggatattcatcctgcattgatcaaaaaagatgaataaaatgtggtggttatgagtgtttcgagtcttccagatgtctaagacttcgacaaggatcagactcaagctttgttgagagaaaaccaagtttgggctacttatgatgattatggaatgccacagtggtatgcactggtccataagtttgtctctcaagaaccgttcaagatgtgcatttgttggcttaatggcaagaaaaatggatatgtgggttcaatgaagaagtggattgatttagggtattacaagacgagtggatgcttctcaattaggaaacatagcaacaatgattctctcaactcattctcacatagtgccttgtgaacaatatgtgagaaaggattgatgcacatataagcgacaaaaggcaatattttggctctttatgcaaattggtcacatgatattttaactccccaagaagttgtggacaagtatgaagtgcctcaagatttcaatgaaaaagaatattttacctacggtgtctctcctttgattcactacacatacggtggcgcagactccggggattagagca

SEQ ID NO: 2103 - DNA, 519 bp, Arabidopsis thaliana
caagtatttctatactctgcctccaagtaatggacgagctcatccaatgcattgtatgaagagcctccacttcttacagaggcattgagcttctcttttaaaacaagggctctctccctcattcctacaccttcatcatccacaatcaacctcttcacagctctctctacacatcctctctccacttctccttgaagcagaacccctactctccaaacactttctatatacatcgcgtttaacttctgctcaccgttaaacggtctgcaaatcattggaactccttccacaatactctcgagtgttgagttccatccacagtggctccagaaacctcccactgcaggatgcacaagtacttcattctgtggcgcccatttcacaatgcatcctctttccgagacaatcttactgacttccactggcattgactctgtaccgggtcggattaccatagaaaaggttggttgctattatacaatcccaagccatctccaatacttccttggttccatgtga

SEQ ID NO: 2104 - DNA, 843 bp, Arabidopsis thaliana
gatcttgtcttcatcccggtttatcgtctttccaccgctttgttccgaatccatccattattcaccatcaagtacatcattttgaattcaaaaccaacaaagtgagtacttggagcatacatccacgtccaggaatgtatcatcttatctccatgattcaaggcaataagtttcatggaataccaatggaggacccattggatcatcttgataactttgatagactctgtagtctaaccaagattaatggagttagtgaggacatcttcaagctcaggttattccctttctcttttggagataaagctcatctttgggaaaagactttgcctgttgaatctatagatacttgggatgattgcaagaaggctttcctagctaagttctcctctaacttaagaacagctagactgcgcactgagatgcgggcatataatctgtcgaagtcggaatcattcgctgaggcatgcagacatcttaacggatgtcccactcagtgacataatccacagaatctcgaaggcctccctacacaataatacagtaccgacacatctaccgtatatcaagatgctctaggacacagattactactctaatacaaggcaaatatgaagatactatgtgtatgtgtgtatatatatatatatatatatatgataaataacaacaagaatctatatattcaggacaatgcaattttaaagcttagatctatataatacatcaaccatatgtgccccattgccttcccactctctcttgacccgcctctatctcaacatcctcccttggcgaatgtgtttgttccgtagttggatacaggactgcaggcgtgggagg

SEQ ID NO: 2105 - DNA, 893 bp, Arabidopsis thaliana
aaacaagtatattgcataagtaaagagataaagagtagagacacaagatgacaggtaacaccaaatacggaccctgactcacttggccccccctcgcatcacaggtcacagaagcaaaagcagcgcagccagagtaagatagacaataaaactgaagcaaaaactcaatgtcgactagatgtcccaggacaaaaccctcagacacctatttaccacaccccgaaatgcaatgatagtagacgggccaataacctaatcgcccggcccatagagtgataatgggccgagatgggcttcgtgatccgatggagctccaggccgcttccaaacacttcgtcttctcctcttctcttccttgtgctcagcttgtctggttgagtgcggatttgagtagactatgaagatgtgatcgagtgtccggtcgagtgatggtgttagtggtgagtgattatacccgaccagggggtcgagtaacttggtagagtgaacggccgagtgtggtcaggtggtgtggcgaagtgatactcgaccagggggtcgagtggcgtcatcgagtggcctgcgatgaggatactcgaccagggggtcgagtaggtgggaagaatggctccaaagtcactcgaccagggggtcgagtatggtgctggatgcacacgacctggtggtcgagtatgtcttctggttctggctcgtttcttccaatttgctcgcaaacagctccaaatcacctgaaaacaactcagaactgcaatatgtatgcaaagctatcctaatcatgcaaagtatgcaagaatgatgagaaatgatataaaacagtgatgaatgatgagaaatgatataaaacagtgatgaatgatacgaaactggactcaaaacgatgatgaatggacact

SEQ ID NO: 2106 - DNA, 723 bp, Arabidopsis thaliana
tttagatcgtgctctcataaagcgcgagaaatttgtgtttgtgaatccttttgctaaaactgtatttcggtgttgacaggggatttcttcaaacatattcaagaactgggaagcttgtgcctctacactatgaaagcctctacactatgaaatgcaaagagtcttcgggaggagttagtggtaagcctcgagattctagtcttattaaaattttcctttggcatgatgctccaaacgggtctataaattataaaatcgaacattgtaaactttgtagggtcaataaaaatcaatgttcttttatgatacatgaagttcattatgttcttttaagaactgctacatgaggttaacgatctcctccaatgcgttgtatgaggagcctccatttcttacagaggctttgagattctcttttaaaacaagggctctctctctcatgtctgcaccttcttcatccactatcaacctcttcacagctctctcgacccctcccctctctaccttaccttgcacctgaaaccctattctccaaatactctctaaacacagtgcgtttaacttttgctcgccatgaaagggcctgcatatcattggaactccttccacaatgctttcaagcgttgagttccatccacagtggctccagaatcctccactgcaggatgtcaagtacttctatctgtggtgccattcacaatatacctctttcggagacatctt

SEQ ID NO: 2107 - DNA, 621 bp, Arabidopsis thaliana
gaagaggacaggagctgcattgaatggctgaacaagcagaaaccaaagtcagtgatatacataagcataggaacacttggtcaaatggaaaccaaggaagttttggagatgtcttgggggttgtgtaatagcaaccaaccatttctatgggttatccgagcgggttctatccttggcactaacggaatagagtcattgccagaggatgtcaataaaatggtctctgaaagaggatacattgtgaaacgagcaccgcagatagaagtacttggacatcctgcagtgggaggcttctggagccactgtggatggaactcaatactcgagagcattggagaaggagttccaatgatttgcaagccctttcatggcgagcaaaagttgaatgcaatgtatatagaaagtgtttggagaatagggtttcaggtggaaggtaaagtggatagaggagaggttgagagagctgtgaagaggttgatcgtggatgacgaaggtgcggggatgcgagagagagcccttgttctgaaagagaagatcaaagcctctgtcagtagtggaggcgcttcatacaacgcattggaagatattgtcaattacttgaagacaaagcaaagatgttga

SEQ ID NO: 2108 - DNA, 959 bp, Arabidopsis thaliana columbia
agttagtaagtgctaacatggtttcaaaataccagatcaaatcatttagttcaaatttgattctagcccattagtccgtatcactcggcgggtgtgcaacagtaatagttctttattcggttgagttagttcaagcattcaaacgagattttgccaaagaatgaaatacctaaggtcaagtactaggtggcgttccggacatacaagcattaagatcaaactcaactaaaagaatagtgtaaacgataaaaaaaaacatagaaaccgcctacctagacttttgatctattagtccccatgaattcccctttgaaaccccctcaaacccaactagagatctactcgctcatggcaaaggagctaatcaaaagttgggttgagtaaaccataactaaaagttgaataaaacttaaaagggtttagagattacttctttgaatgtagaatacaagtctgaaattatgactaatccacgacgaaagttgaataagtactcgcttagtagtcgtcaaatctgaaattacgactaatccacgactaatgacagtagttgttataccatagtcgctaagtccagttgtcgtcaattagtcgtcgatttacgactactttacgacaaccgaccatacaatataaattagtcgttgagtagtcgtattatattggcgactatttggcgacaatttcacgattaataacactgtacaaagcgtgtgaaacatatagtcgtcctatagtcgttaaattcttccgacaatgttacgactaatttccaattaaatatagtgaaccctgggtatctttcaggtaatcgcaaaattgtcgtaaaatatttcacgacaatatgccgactattaaacgattacatgtacactctcaggatatgatatactttgtcatataatagtcgtataactgaatacgtctattatacgtctgtttgacgattaggttatgac

SEQ ID NO: 2109 - DNA, 1037 bp, Arabidopsis thaliana
aaaagggagatgcaaggtacttggagtgtgtgtggaaagtaggaattcaagtggagggtgagctagagagaggcgcaatcgagagagctgtgaagaggttaatggtggatgaagaaggagaagagatgaagagaagagctctaagtttaaaagagaaactcaaagcctctgttttagctcaaggttcttcacataaatcactagatgacttcatcaagactctgtgaaatcatgaattatcaagtagcagtgaaagcagaaacagcggtagtgaaggtagaactgctagcgagagtggaagccgagctagttactaggtcagctatgtatatatgtatatgtattttctagtgaacgaaatagggaatgtggaatcagtgtcttagctttaggagttcagcaatttgcctttagggcatgtaaataaatcttgtgttgttctgttcttttgaaggtcacaccatttctgtcaaactaggtacttcttgaaatcctgtttcgtgtgcgtaatgttatagaagcagaaaataatgcacattttttctcaatcataactaagatagatatcgccgggctgatacaaatggcacattttgagcgtacttttggttttggattcttatctctaacacaatctgcgaaaaacttgaactacaatcagttctcctgaaaaacagcgatcgtcttataaaccgcgacgggcgtctttgtgattggcacggacgtgattgcggagatccttggataggcaggtataattgcagccacgcattgggcaagaacattgtacgaaaggacactgcttctcatggctagagagctttgtgtatgagatattctttttacacccgtagttggcgtttggacatgacactctagcggcttcaatgactttctccatggctctgcaacgaaattcgtacctaaccggtttttgacaggatgggcaaatgttcttaatttttttccagcacggagtacaagctaggtgaccattaatacactgtagaaatttaagaaccagtgttattatcaca

SEQ ID NO: 2110 - DNA, 716 bp, Arabidopsis thaliana
taaactgaaagctctcttcctcatctcctctccttcttcgtcaaccattaacctcttcacagctctctcgaccactcctctgtctagctcaccctccacttgaatcccaattttccatacacactccaagtatctagcgttcaccttttgatcacccgaaaatggcctgcagatcattggaactcctgggccgatgctttctagtgtcgagttccatccacaatggctccaaaaccctcctactgcaggatgagaaagtacttccttctgtggagcccatttcacaatggaacctcggtccaaaaccatcttactaaactcttcaggcatggactctatccactcggaaccaggtattgaccctggtcggatcacccataagaagtgttggttgctagcagccaatcctgacgcgacttccattatctcgttgatttccattaaagctatgcttcccatgcttatgtatatcaccgagtttaccttttgtttgttcaaccattcgatgcagctcttgttctcttcaagcagacttgtaggagctgaggccaccatgtgaagagggcctataggatacactggaatttgtagctgttgttgttgcagaaaagacagagatgagctctctagacagctcgcagtgttgattatcaccgaggaagctgtccgtttgtcaactgtattcctatacacctccattatgctctctaatgatg

SEQ ID NO: 2111 - DNA, 1857 bp, Arabidopsis thaliana
tcatacactttaattattttaattttatgttttagttaattactatatacttttattgttagttacatcacctttttcgtatgtagtatgaatggataccattctaacatgtaagtgataaaaagaagaagaagagaagacggtgaaagtgtgaattaggaggagctgctgatggcctcacgcagagagatttttagcttttctggtccccctccaattccctcttttgactggtaaatatgcagtttcattttatatcttcccttccaaaataatattgattatggattcttttttgccctttttttttttttaaacaaagagtagatgattacattgatcacgaattattactcaaatatcgcaaattcgatttagataccattatttttttaacagaacaaaaatctgagagacaaaaataattaattgactgtacaaatatattgataccacttcatccgatggttttttattggttcttttttcttttgacttcgacatacttttgcatgtgtctttcaacattaaattcaagtaatatttcttaatgatgacacaaacaaaataatatacatatctactcgatgattctgtggtgtatatactgtaattggtttgtttttcaataggaacaatttgtaccaccgagcgtcattggtatcatgtttagtgcaaggagtgtacacaatggaacgagataggcaacaaaaccggtgtggttctgactcaaaagctagaccttggtgggcgttttacaggttcactttataccaacaacttagggacgcattagatggctccatatacggggccgttttccagaacgacatcaattaccagaatactcccaactcgatagtacctccacgttacattattgcgttacgtggaacgatcttaagcccacaaactatggcttgtgatgttcagcttaacattcgtatcgccttcgagaacctctaccgcgggggtagatttgtgcaggccattcaagcaatgcaatattttgtggccacatatggaaacacagctatctggatcgctggacactctctaggagctggccttgcactactcgcggggaagatcatggccatgtatggatgccctgtcgaggcttacatcttcaatccacctatctccttgattcctctagagcagctagtggagagtgaggatcttaaatgtgcggtccgactcgctagggatatcctcaaagccggcatagcaagagtcctagaccttaatgaggtatcaaatcttcataatacttatggtacttcacaaataatactatctcccaaataatatggggggattgacacaaatggcactaaaaaactttattattccaaaaatgatactttgttttgaaacttccaaaaatatcatataaagtttttaatcatttatatattaattaaataataaagttttttattactatttgtatcaattccctaaataaaaatgagagcaaccactaatctaatattaaattgaatcaaaaaaaaattaaatattggaaatatataccctaaattggaaataaaaaaaacccaaatataataatacaaactaattttaaaatgaaaaatctcttttaaatggtgaaaatatataccctaaattggaaataagaaacccaaatataataccatcaactaatattaaaataaatcaaaatttcttttaaatagttgaaatatataccctaaattggaaatacagaatccaaatataatattttaaatttctaatttattttggttgaatagattttatataaaattgtggtattattattgttcataaaacttgttttactgttactttaaggaatttttcaaataa

SEQ ID NO: 2112 - DNA, 1544 bp, Arabidopsis thaliana
attgctcacaatcttcagtttataagtcccgctcagacgccaggaaacgagagcaataacattttaaggaccagttagcctttggaagaatctttgaaattccaaagcttgtagtttgtgtgattcacattgaagaacttccttgctacagagaatatatatattatacggaagattagaaacataaaggtgaaaacttttttaaaaattaacacagaagcacttactattgatccattatcttaaaagaaagcttcagcccacggtagtcttcggtcaagttgccaacctcaagtagcgcaacaatcacatctggtgtatgtaataaaagatataagtattacgtgtacgtacaaattccaagaatgaatagatagtcaaatatactaaccaactaacactccggtggtaactgtcttctcgatgatgtagtcaaaaggagtaaaatcgtaatacagtattgcagccaatcccgaaactttggtaacaatggtctgatccataaaacagatccggtagtcatgggacgttgcgtgtatcccctcgttgtggagacgaaccgagaaagtattgataactatccactcattttctcggatacggtcagagtaaaatgaagcaaggcaacgattaatggtagcctctatgcgggaacgcaatccctacaacaaatcatcatgattagtgacatgtaaggtatgtgaaactaaaaacgttataaacactggcgaaatagtactcgattatctgccaagatgagacccaggtagaactcatttattcccacgcatttttgaaacaccctgaccacaaaagcgcgtatactccatccggtgatcatgggacaaagttcggaaatggcatgatatccatcatccatgatgtcaacaacaaaaaccagaataaccgactttctgtcttatttgtgtgatgggtgtggacttttgtttgaatgaattaagggtgttattaccaggttcttaaatagattttaaaaagacgcgatgattggtcccaaatcgatgtaacggtttagtaaaaaatgtaaccgtcaactctgaataattagatgtactaagtgtacgtacaaatgaaaacgtttatcaaacatacgtacagacaataacgggattgacaaaaaattgaaggataatcaaatacgaggtccacaaacgtacgtacagaaggtaacgtacagacaaaataatatgtaatattacaacatagactgatcaaaagatttccaaaaacgtatgtagaacatcttcaaaccatgttgacacgtcggggatggagcagaggttggtgtactgtcaaccaaaacaccagcgggttctacatgaggtacatgtgtacccgtcgacgtacacgatgccaatagaccagtgaatttccctggaggttccacggtttgttgagtgtcattcacgacgccatcctcgacatgaccatttccatattgttccacaatcatgtcaccccatttattgtaatcgtaatcttcgccactaccttcactaccgtctactatagggtcgagggta

SEQ ID NO: 2113 - DNA, 801 bp, Arabidopsis thaliana
ggtttagtctcaacactaatccaaatgatcgatgttatcttttcagatcctgaaacacaagacaaagtatttccagggttgcatcctctgaggtacaaggatctaccaacttcagtatttgggccaatagagagtacgctcaaggtttacagtgagactgtgaacactcgaacagcttccgctgttatcatcaactcagcaagctgtttagagagctcatctttggcaaggttgcaacaacaactgcaagttccggtgtatcctataggcccacttcatattacagcttcagcgccttctagtttactagaagaagacaggagttgcgttgagtggttgaacaagcaaaaatcaaattcagttatttacataagcttgggaagcttggctctaatggacaccaaagacatgttggagatggcttggggattaagtaatagcaaccaacctttcttatgggtggtcagaccgggctctattccggggtcagaatggacagagtccttaccagaggaattcaataggttggtttcagaaagaggttacattgtgaaatgggctccgcagatggaagttctcagacatcctgcagtaggagggttttggagtcactgtggatggaactcaacagtagagagcatcggggaaggagttccgatgatatgtaggcctttcaccggggatcagaaagtcaatgcgaggtacttagagagagtttggagaattggggttcaattggagggagatctggataaagaaactgtggagagagctgtagagtggttgcttgtggatgagaag

SEQ ID NO: 2114 - DNA, 827 bp, Arabidopsis thaliana
gcttgacgggcaagcaaagactaagtttgggggagttgataagtgtgtattttgcatattttgagcatccatttgtcatcattttagcatcatatcatcactgttttttaccatttcacatcatttgtcatcactttgcatgtttaggatagttttgcatcatgttgcatatttgtgttattttcaggtgatttggagctgtcgacgagctaactggaagaagcggacctgatcatgacaaaccactcgacccagaggtcgagtaggagcttcaagatctcaagagaccactcgacccccaagtcgagtagaagacaccgccactctaccacaacactcgacccccaggtcgagtgtcttcatctccatctcttgaccaccactcgatcacatcactcgacccccaggtcaagtgacttcatctccatcttctgaccaccactcgatcacgtcactcgactcccaggtcgagtgacttcatcccattgccagaccttcactcgacctcatcactccacctggatgttgagtatcatcatcaccaccactcgactgcatactcgatgacgagcttcagagccttcttcattccgcactcaaccagacactcgagcacaaggaagaaaagaagactccagctattcactcgacctctcactcgaccacatgggtcgagtacagttcttaacccgtcccaatacttcgtcgttttgagtattagggtttcgggatatttggctataagtagcatgtacttcacattttcgacaagaagttttttttatctagttttatttccgcagaccttgtgttctgaagaagatgag

SEQ ID NO: 2115 - DNA, 1131 bp, Arabidopsis thaliana
  unsure (1)..(1131): unsure at all n locations
cttcatatatcttttgaaagcaataactttcaacgaaggaagaagctaacattttcgaaagagtaaacgcatattttggtcaatatagaatttttgtgatgatctatacataattgggaatgttaaatacgaattagaacaatgacgttccttgaatttgaaaagcttggatctttcctctggttccaataacttttttatttgcgcatagaaaatcatctactttgaaaaatatgcatcattaactctttaaaaaaaccatttaacaaaaaaatcattgcattctaattcttcactctgtcttcaagtgcttgacaagctcatctaatgcattgcatgaggagcctccacctctaatagaggctttgagcttctcttttaaaacaagggttctctccctcatgcttgcaccttctttatccacaatcaacctcttcacagctctctcgacggctcctctttccagttcaccgtcctacctgaatccctattctccatacactctctagatatattgcatttaacatctgctcgccttgataaggcctgcaaatcattggaactccttccacaatgctctcgagtgttgagttccatccacagtggctccaaaagcctcccactgagggatgtcctagtacttctatttgtggtgcccatttcacaatgtatcctttctctaaaaccatcttactgacttcctctggcaatgactctatcccctcggagcctgagacagatccaggtcggatgacccataagaaaggttggttgctattcaacattccccaagccatctctaacatctccttggtttccatgagaaccatgcttcctaaacttatgtatatgacagaccttggtttctgcttgttcagccattcaacgcagctcctatcctcttgcagcacagtaaatcctgtcgatgaatctgtaatgtgaagagggcctaatggatacaccggaatttggagttcttgttgcagccttgtgagagacgagctctctagacaggtcacggtgttgatgataacagcagaggctgttcttttgttgactacatctctacagagctccaaaaaaggttctagtcnccaaatgttgcagttggtaagctttgtacttaatgga

SEQ ID NO: 2116 - DNA, 794 bp, Arabidopsis thaliana
tcagcatttgggccattagagagtatactcaaggtttacagtgagactgtcaacattcgaacagcttcggcagttatcatcaactcaacaagctgtctagagagctcatctttggcatggttacaaaaacaactgcaagttccagtgtatcctataggcccacttcacattgcagcttcagcgccttctagtttacttgaagaggacaggagttgccttgagtggttgaacaagcaaaaaataggctcagtgatttacataagtttgggaagcttggctctaatggaaactaaagacatgttggagatggcttggggtttacgtaatagcaaccaacctttcttatgggtgatccgaccgggttctattcccggctcggaatggacagagtctttaccggaggaattcagtaggttggtttcagaaagaggttacattgtgaaatgggcaccacagatagaagttctcagacatcctgcagtgggagggttttggagtcactgcggatggaactcgaccctagagagcatcggggaaggagttccgatgatctgtaggccttttacgggagatcagaaagtcaatgcgaggtacttagagagagtttggagaattggggttcaattggaaggagagctggataaaggaacagtggagagagctgtagagagattgattatggatgaagaaggagcagaaatgaggaagagagttatcaacttgaaagagaagcttcaagcctctgtcaagagtagaggttcctcattcagctcattagacaactttgtcaattc

SEQ ID NO: 2117 - DNA, 557 bp, Arabidopsis thaliana
tggctatatttataaagaaagagatacctgtaactgttccagtgttttcgaaagagaggtaaatatccacaatatgagaaatgcatcgaggaaggcgtcaggaaggacaagaaaaagttttgatcttccggacatatcgtcaatgatgccaacgtgctcagcaatatcaaggatctcagaagctatgaagtaagtaactccaacaaggaggactttagaagtgagaccaccaagagtagatttgacaaccccaaatcccatggaaacacagagaatgagaatgcgggaaacagtctttctcaaggcaccaatggtaacaacccatgtagtaagggctaaaggcctcatccccgtgtgattaaaattagcataatccaagtaccaaaagagcatctcaagcaatcctagaagaatgacggcagtaatgcaatgttgaagtggcaatatatccatccggaacctcaaatactggaagaaccagacggcactgagcaacaaataagcgagagacatatagacatagaaattcacgagtggagccatcctccaggaagata

SEQ ID NO: 2118 - DNA, 475 bp, Arabidopsis thaliana columbia
tagtgggatggaggtggagtaaccattggatctattgggttggaccgttcattggtggtgcactcgccgcactgatctatgagtacatgatcatccccagcgtgaacgaacctcctcaccacagtacccaccaaccattggctccggaagattactagaccggagcagtcttcatgtagagggttctctctttgtataaatagtctctgtgtttgcttgtgttgtttgtctctttacttgttttgttttcctgccatttcctatgtataattgagtccacaccaaaatctgttttcttgtattgtatatcttacagaataataaagattttcaatgatcggataaatatggggacatctatggctttctctcacatctctgtacatatgtaacaatgcctaacttcctctgtttctataaatcagtttttgcatctgaaacctgcaaaagcttcttccttctcatgttaagaagg

SEQ ID NO: 2119 - DNA, 519 bp, Arabidopsis thaliana columbia
actctggagcagtgtgctctaaaggccatcgttatagtgatagccggtatagagcatctggcgacattcgttttcatcgctcggggtcataatgaccatttccggtatgcagcgcatgtaagagagatcaaaagcaccctgatgggtttgaccgtcagcaccaacaatgcccgcgcggtcgatggcgatcaggaccggaagcttttgaatcgccacgtcatgcagcacctgatcataggcgcgttgcaggaaagtggagtagatcgcgacaatgggtttgtacccaccaatcgccagacccgcagcaaaggtcaccgcgtgttgctcggcaattgccacgtcgaagtagcgatccgggaatttacgtgaaaactcgaccatgccggaaccttcacgcatcgccggagtaatcgccatcagcttgttgtctttcgctgccgtttcgcacaaccagtcgccaaagatttttgaatagctcggcaaaccgccgctacttttcggcaaacaaccgctggaggg

SEQ ID NO: 2120 - DNA, 658 bp, Arabidopsis thaliana columbia
  unsure (1)..(658): unsure at all n locations
tgcagaaggacaaaacacaggcaatttcatcacggtatgtctttaattctttcgctgaatcgagtcctgtgtgctggttatcggatagcaaaaacatctgtatctttacttttcttagattagttgtctgaaaatgaaagaagatcaaatagactgatgggttttgctttgtgctaacaacgcaataatcgtctaaaacttatggtacagttactaaaacatcttgtttggttgttgttcgcaggaccgaccatcgaccaaggttcactcagctccaggaggtggctcgtctcttgattacctctttggtggtggtagcaactagctactgaggccaacttggtcactctatcttctttatcccacgtcacacttctatcattttgtgaaactcttgttccctagcaaaaaataaaatctgtataatctctaaatttctacgcatatgtgcttcaattgttgtatgtctttcgaacgataacagtctctgatatcgttagttttttttaccgatttattcaccaatcgaatcctatcagattatgcaagaaacagtaatgtctttagaggtcatagacaaaacagagaattanattaatatccagcttgcaaaatattttagttgggccatccgtaattttaaaaatatttgcacatt

SEQ ID NO: 2121 - DNA, 357 bp, Arabidopsis thaliana columbia
ccctagctttcagaccaaatacgaggaagcaatcttttttgtgataaaatcgtatagcgaagacgacatacacaagagcatcaagtacaatgtctggtctagtactctcaatgggaacaagaagttagacagtgcatatcaagaatctcagaagaaggctgcagacaaaagtggaaagtgcacggccctcctgtcctcctcggtacgctatccggattctccgctatatccctctccagttttgcgaagtcttgatggtctctgatcgattttattggattcaggtgaatgcaagtgggcaattctgcagtgtagctgaaatgattggacgagttgattataagaaaagcatggagt

SEQ ID NO: 2122 - DNA, 1021 bp, Arabidopsis thaliana
tctgcattcatttcattgtttagctttgtgataatatatcccaaaactttgaatagattgagagttactgagttagtacctgcaaaagggtgaagacaaggataatgaggagagcaccaaagaggaatggtccaaggaaggagaaatcatgtcctctcttcactgcccagaaggtgtagatcgttagaccaaagaccatcacagctgtgagaattgcagcctccagaacaatcctccctgttttcacaatacttggaaattagattctaaccaaatggtgtaactctagttataggaaacagagttaataagttgcttgacaaaaaagcatgaaagcatctcatgccatgttcctctttttcatgattcaccatgttaaagccaacaagatactaaatttcaacttttatggttaagaaaacagtactatctaatcaatatcacaccaacactagtgttggttgattatttcaagcagagaacaatccaaggcaaaatatgacaaatggtttgtcttttaacaacaccacaagccaaccaagtgtgatatatctctgtatccataccttgggagagagagcagcaaatccccacagagaaggaaatggagagagtgaagatggacaggacaatgcagtttatcggatgcttcttctcaaaagccaacagaggccacaacactacaacacacatcaaatccagatcactcagtgaaacactctacaaactaagtggatatatcaaatcgttaacaacacagtagaatttaaacgatgaatcaacggaacattatagtttcacaacatcaacgaagctagagtagctaaagtgaacactatatcgatcaagtcgcaagcttttttagtgaaccgcacaaataaagcaactcaaaaccctaagcgacgatgatggacctagaaatgaatggataaacaaaagtatgtgaaaggagacgtaacggaggagaggaaggaggaggatgacgaaagagacggcaaggcacgggtgagtctcggtgatg

SEQ ID NO: 2123 - DNA, 792 bp, Arabidopsis thaliana
gggtacctggatgataaaagaagttaaaaataagtttgcaaagatattatatctgaatttctaaagtcgggatccacacctgtctgcccctttacaaagtaaaagtagtttgccatcttgatcctgcactattactgacatcctcttctttgagctactgaattcaagaacgttcaggacactatacaacctgcaaagggaccactttcactaaagcaagaaaggcacagaagcttatgatggtctacaatatataagaaacgagggacctacctttcaactctttccccagtcaccaggtctagctctctgacggatattgttgtttgagttcgagtgaaaaattcaaacccaagctcccttgctgcaataacaaatgctgcctcatccggtgattcagcctcgtaggagatctttcctgtatcttcatccacttcaggtatgactgtatgacatactgccagtaattgaaagaatttctgaatgacatcagcatgcgtttccgtgacccagtttccatccattatcctttcatctctaaagttgaatcctttcacagccggttctgcagcaacagcatcctcggtactatttccattgctctgattcaccaaagcagaaccttttctcttatccatagccatctccacctctgtaacaccacgtccataggtgtcccagcaatagaacacttaatgaactccatggagttacaagtcaatgttcctgtcttatctgaaagtatcgtacccacttgcccaagttcttcattcagattggaagtacgtgcat

SEQ ID NO: 2124 - DNA, 717 bp, Arabidopsis thaliana
taattcgcggaaaattgtttcagtaacctgtgatcgtgtcggttggggtagaagagatcgaagtgggagcaaaatcatgatgaatcggctattcgggaaacccaagcaggaggctaatgctctccaaactttagacaagcttaacgaggtatcatctacttatctacttctctctctcaatttacgttcgatctgaaagaaatatcgatctctctgtgtactgatctctgtactgtttgtttaatcttaaacttaaatcaccataagacatcacttcaaatccgattctcgtttatatttaatactcaaaaacgattgaattggggatttctgagtacaatttatatgatcgtttgcttttaaaccatattcaaattttgttgatttgttcattgcagacgcttgagatgctagagaaaaaggagaaagtactcttgaagaaagctggtgcagaggttgagaaggcaaaagaatactcccgggctaagaacaaacgaggtatgacctcttatttattatgactcatgtgtgttgctaatcactggagtacttaaaagctgtattgggtttttgcagcggctatacagtgtttgaaaaggaagaggttatatgagggacaagtcgaacagcttgggaatttcgagctccgtattcatgatcaagtgagtttgtttaagattgttactataactatatacagtaatagatgatttatgg

SEQ ID NO: 2125 - DNA, 559 bp, Arabidopsis thaliana columbia
gctaagctaatatgctgaatcatatggtgtcgtgtttgtctctgaaacaccagaggaagttgccttccagccagtgaaagttcttaagatatctttcatccattgtgaatctcgtggtgttgacctcttctccttcaaagctgatgcaaaaatgctcaaatataggagtgagaagactgccaactctcttagatttcttccctttacgtgtaaagggcttggtcttgagtgagaccaagtgatgagcaaacacagcgccaaagttgacatcgtggtcaacctcctcaactccaaagctgtcatgaaagaaatcatgaacagcatcgtttctttgttattgtttttaagcatgttgtgtgagtagtgattaggatttctgaggatgggatagagtagttgtggaacccctagtcgaatatgttggttaagtgtagatatcttgaatcccttctcgattagttgtgtttactgcttattcgtttctgatcaactggaatccgatcccaaacgttccagcgcccagaaggcgtttaatgaaacgttggatctactaattcca

SEQ ID NO: 2126 - DNA, 863 bp, Arabidopsis thaliana
caacaatcaaagatcttggtcgtacacgtatggaagtaaatgtcaaggtacataacttttctcaaggattacaggatacaaaaaaattggcttgatctttgctctcttacaatcccttcccgtgttttgtctgttcaggtcaaaagtgtgtttggtgctaaaatgtttgcccttggggtcgtggttaaaattccagtgccaaaacaaacagccaagaccaatttccaagtgacaactggtcgcgctaaatacaatccatcaatcgattgcttggtttggaagtgagtttatataatttcccctcatattcatctctataattcttttgttggtgttttatcaatcattcggcatctttctctcttttactctttaggataagaaaattcccagggcaaacagagtccacgctaagtgcagaaattgagttgatctcaacaatgggagagaagaaatcttggacaaggccaccgatccaaatggaatttcaggtcagtctttgtctcttttaggcactgttaaatagaaccagatttgcttaaagcaattattaaccgtctcagctttgttcttttctaggtgccaatgttcacagcatctggtctgcgagttcgttttctcaaggtacgcattgttatctatgcttttgaaagtaccatccttccaaaaaatgcaatgctaagtagcagaatctctaagccattgtgtcattaaatccgttcaaatcttttatgtgatttgcgttttggttaatctgtctctggtctttcaaaaattgattgctatactacttttttggacctgactatccggaacgattggcaggtttgggagaagagcggttcaacacggtcgagtgggtc

SEQ ID NO: 2127 - DNA, 863 bp, Arabidopsis thaliana
ctacaagaatatgaaatgtagattcacttggtacacgtccttgattcaaaacatcatcaaatacctctcgacatttcgtaaatttccgttctttccccaagtattcagctagcttcgtcgttaacccgaaatcaaaccggtaccaattctgttgtgtcatccatctatacacctaaaagatcaaaactttcaatacaaattcaacacaaatccattgataaagcttctaaagattgatgaaggttttaccctgaatccagtttcgttctcacgaattcgcatacaatgaacagagatgtaagtagcgtcctcttgacgaacccatttcttctgagcattcaagagtctcacaagcgtcacggccttatgcgttggaacctctttacacagccaagctagcttcgagcgtcgccattcctcaggcaactcttccaattctctaacttcaaactccgtctctattctacgagtcgcgacgtttcttatgtcgttcctagcagactctacatcaccgaaaccgttggcttcgctgattccttcttccgattctgtaatgcctgtaaggtgttcgacgaaagtcccgcttcgttgggctgtggaattagccgtgaaaagtggtggagttcgtgtagacgagtgagagaagaattgggttttgtttccatgaactgtgtggatagagagacggcggagagagcgacgtgagtagctgctgcggtggcggataagggagaaggaaagggaacggaagagagttgagctggaattgatgatgttggggttagaggaaagagaggaaatgttgaaggttgtgacggagacggtggaggaggaggaagaggccgaggagaatgatgaagaga

SEQ ID NO: 2128 - DNA, 634 bp, Arabidopsis thaliana
atctttattattaaacgtgtagcgattcagaatattggccgcttcttgtgttgaccgccttgcaaataagcgttcgccaggttgagctgcaacaccggattggtgcgtaaatcgcgggcatttttcagacgattgatcgcctcattggctttgttttgcccaagatcgatatcagtagccagatcgagataccatgcgttgccaggttctgccgccagtaacggttgcagcgttttacgcgcctcgtcgtatttattggcttccatcgcctgtaaagcacgaccatattgtgctgctcgttgctgacgaacgtttcctttcgcccattcatccagcaaatcactggtgagctggttacgtccggaattatacatccccagtgtgcgcgcttcgccagatagaaatcttccgacgactgcaccatcatcgagcgcatctgattagcacggttgcgggcatctgccagacgactttccggcaacgggtgagtcaataaaatttccggcgggcgcgaggagtaacgcgcctgatcgagtaatttttcgaggaaggttggcatcgctgcggatcgaatcccgagcgttgcagcacctgaataccaatgctttagagcacactggcggcacgttactag

SEQ ID NO: 2129 - DNA, 962 bp, Arabidopsis thaliana columbia
ccccgggatcccgcgaataacaacctaggaactaacgaggagatatttgcagagcggacctgatatctcggaactgacctgtcgaatatccaggagaatctccgcagatcccggacggagctaccacgtgcgtagacctatataagggagcaaggacgacttggaagacacattcaatccagctttatattcacacacatacttttacacttgtaatctcctttcacattgtaaaagctttgtcataatcaatacaaaaagtccattcgttcttagcaatataactctcaaggtttctgtgaagatctagccctcctttctcataatctcaattacaaatctctagtgtggatttcagaacccccagtagtgattagggttcttgaggatggattaaattagggtaatttttaggttagtcaggtgattaagattaggttagatcccttctggattcgttggcccctacgcggttttcgctggctaatgtggaaattcgaccatagacgtccagcgtccaaaagacgttcaaatggatgcctgatctatgaattccagaaatttgtaggctatagaccaagagattggctagtatgtttattggctttggtagtttgttgcttaaaccatgttttgctatgtttcatcaacgagagttgagattaggaagtggtagagttatgggggtctctgtcacgagagtgggagtggattgactcggttcttgaatctatcgtctagggtatctacctttgacctgttagccacctgatgaaccctaaagttgcccttatcaatgaatccatccttaggacttctattcttcttagatttatttgtattcacccattgattgcacttttatttacctgttatttgtgtcacctgttgattgcatttttaattcttaattttgttgcctgttggttctacatcgaccaatgatcgagtagggcttttaa

SEQ ID NO: 2130 - DNA, 1110 bp, Arabidopsis thaliana
acaaaacaagtaatcatagtaaatatctgagagttatcagaagaatagataaccaccgacttaaatgtcacaatactactcaacaaactaaccagttgaatgagacctccgaaattgaagcaagtgcaactccaccaacaattggtacaatagcactgagtacctatggagtaggtttctaaaaaaggttaataaacaaattatgcttacacaaatcaaacaaaagcgatgactaatatagactatccttaacatgccgttagaaacaagaatcaaatagcaacttagtccagacaggaacatttggagacatgtttagatcgcttgaagaagcggcggttataggatggtggcggagagagagtcgccgttgttgtaggagagggatcgacggagagagggaaaatacggcggactttgcatcgtttagatctgaaatcaaaagttgttggtgagagtggagaacgaggaagaaggcgtttttagaataaagatccggagtcgagaaactgtaatttaggatttttttattagatttagattttttatagaattatgaaaataaactttgatggtaactgtaaagtcgccgtgtacgtaaaccaaatttggtttagggaatacggatttggtttgatttatagataaaaaacagttttagggtataatggtaactttgattggacaaagtgtcttgtttttttaaagtgttgtatcacgtaaattgttttgaaaaagtgcctcagagggtaactatctcttattttttctttttctttcttgtgtctatttttgtgttgcgttagagagtattttgagtttctttgcatgtatgtgatttttttttttgtaccgtttctaaattttgttgtctttgggtgtgttttgagtttgggtgaattgtcttcgtgtgtcttgtgttcgtgaagttatgtgttgaattttattttttgtgttggtgttctgagtttattgcatgtgatatgatttctattttgtatcgtgtttgagttttgtgtgtttatgtttgaattttgttttctctgggtgtgttttgagtttgagttgattgtgtttcagtgtctttgtgttcgtgaagttatgtgtttc

SEQ ID NO: 2131 - DNA, 563 bp, Arabidopsis thaliana
tcactctttgctaaagtgtttaaaggaagatattttcggaaatctaatcctctggataaattaaaatcatattctccatcttatggttggagaagtataatttcagctagatctctggttaaaaaaggactaattaatagggtcggttctggggcatccatctcagtctgggaggatccatggattccagctcaattcccgagaccagcaataagtaatggttcagtaattgatccatctttaaaagtcaacaatctcatagacagtcggtcaaatttttggaatattgatttcttaaacgagatctttgttccggaagatgtccttctgataagtgcaatgcacttgggttcgtcaacaaaagaggattctttaggttggcattttaccaaatcaggaaaatatacagttaaatctggttatcatacgacgcgactagatcattttgatgttaagttagcctttattggcccagatatcaaaactctaaaagcacatatttggaaagtgcaatgcccgcctaagttacgacacgtgttatggcaagttttatcaggttgtgt

SEQ ID NO: 2132 - DNA, 1059 bp, Arabidopsis thaliana
aggatttttcacattgatcaatttatcaggtatgaacaaggagtcaactccaacgaacactaaccgttttgatgaggtaaaaggaagagaagtgagattagctctagcctttgtggattatattgggattggatgtccttaattatgttggtttgctttctggattttccattagtcggactgaatcgaatctatagtacttaagaaaatccaggaaataaactcgagagaaaggtcataatttcagacaaaagtttgactcaataaaataactatctaataaagacgacaataatcaaaaacttcaacttcgagaataaatttatgaggcatctcattacgcttgctgatcttccccttctctaacaagaatcgcatttcaataatgaatttgtgagcatcccgaaacattgtaggccaccagaaacctgcttgaaggaacttagagactgtcttgaaagtagcaaattgaccaccgtagctggagctgtgacaatacgatagtatatcatgtacctctgttgtagtaatacacctcctataaactccatcagaacaatgcttatataggtaagtttcatcccaatagtatcgcctaatctctcgcagaaatctcttcttgttgtaatctgtgaacttatcaggttccacatctgcagctaggtaattaacaatatcagcataccatgggtaatctttctcgaccgctctgacggcgcaattctcagttggtgacccatttctcatcgattcagaagagtgtcgatcgacaggtgcagtggtgtcgatcgacaccatcacacaacttcgactatctacttcctctgaaatgtgagtgtcgatcgacataatgggagtgtcgatcgacattgaagctcgattctgcaaacttgatatagtttgcagtcatcttcttagttgtatcagtcatgtatatgttctcttcaggcaagaaatcgtttatagagacatcatcatcgatcctaatgcgtgaaaaatgatcagctacaccattctcaactcctttctgatttctaacctctatgtcaaatttttgaa

SEQ ID NO: 2133 - DNA, 989 bp, Arabidopsis thaliana
caagtatataaaggatatactcactagcttgatacatgacacttttttaagggaatagctttcatatactaaaaccttaccaaagtcctaagagaaattgtttggtgagaagggtctatcgcaacaaaagcaccaaaggttgatttatcattttcatcatttaacgatgatctgtgaataccaccattaaaacaaaaatctctttagcattttatttaaatacgagaagataatctaaacgtatcttttacttgatttagtagagaggagatatatatacctgctttggtcactgcacatcaacaccacgtatttagtcttcttgttagtatcgtcatttgacttgaaaattctgaagtaaacggacgtgtactcttccatgtcattggatgccaaaaccatcaaaccaaatggtcctaaacccgacataaccgataaatctccctgactacatatcttttgtggatcggtccaactcggttcaatcacatccgccttttccaattccttcaccttgaacgatacctcaacatctgcctgctcaataccaaaaacaaaataagcaagaaacacactttgctaaaagaaaaactaagtagttttaggtcaattcccaatactagattcggattcaccattgatatggccaagtttaaggaataaggtttgagtcatacctgcgcacagtgacaccatgaacttggagagtagatcctgctttgagaactttcttttgccagttgacttgttgcccacgcaatgtctcaatctcttcaatcggccactgtagcaattcctttcctgattcatcgagccatattttcctcggaaatgacttaccaaatcaagataacaaaaacaggttaatttaagtcctcggtcgggagtggtcataaaaaaacaaaaaaaaaactgaaaccaaagttatttcacagtaagcgaattataatgtagggcaaattcaaatgtacctgaagaccagaccaacc

SEQ ID NO: 2134 - DNA, 1405 bp, Arabidopsis thaliana columbia
cagaataactaaacccagatccagctaagtccaaaatcggtatcatacaaaccgagatttccgtaaattcagtaataccgagttcgagccattccctgggatgagatctaagggtgtgaaggtcccttgagatcttggtaatcctacgccccatctagtgaaccttcctccaaagtttcgttctctcaaaggaaagtgatatatccctattttcactaattttatctatgttttagggttaggattttgagtctttatgttatttctctagtctttttagtgtctttccaggtatactatgcaatgggacaccaatggagataaggagacattttggagcaagagctaaaggaaaggaagcgaagaacgaatttggattcaggaattagcgaggagtgttgaccgacacactctgggtgtcgatcgacacactctgggtgtcgatcgacaccaattctcggcccagcaaattccaagacgctttcaagtttacagaagaggaaatttgccccagaagacttccctatttgaatcattagtccctggacattttatagggtttatatacattgtttagaccgaggttttcgttatcaagtcttttatcaagtttcattctcgtacttatcaagctttttgaaaaccctgttacagagagacataagctattcatcgagtgttttcagagattgattcagattttaatacagtgaagagatcccttctttcctttaatctatttgctgtgtgatattagtcaaattaccctaatgactactctctcaaataaagaggttgttatagcacttagggatcgaattccacaaagttctcggatcacacaatagattaacagttttgaataaagctaaacataaaatattataaaagtaaaagacaagaaagcaattaaaattggttgtagattcagatgattaagacgtcaggtttagggaaattctcaggagatatcagaatagtagatttagcagtaaattgggattattatcgaaccattctagaacacaaatcactaatataaagtaaccggtggtgttccgcgaaactcactatgcttaatagtattgatctcaactctcttgtaagtccctagaactaagaaagcattataatcatgtttgataagtttatttaagtaatggacgctaacacgcatctaaatactaggctcatctaagatagttccagtattagatacctatggtggggcatacctaataacctaaaatcaagttctagctacttactctaaaactagcattaagaacaatccaagatgaagaattctaaatatattatcctaacagggttttctatctacaaattcatccaaatccctaatgagaatccctatacccaacaagagaactactcaagcatgggg

SEQ ID NO: 2135 - DNA, 674 bp, Arabidopsis thaliana
aatccaataaaattgtaatatatatgcttaacctctagagattgaacatcaaagtcgttgtagtatagtggtaagtattcccgcctgtcacgcgggtgacccgggttcgatccccggcaacggcgtagtttttaatttaactctttttcgacatttatgcaaaaacgtaaacattattaatgtttcaggctcaatattttttatacacgaacaatttcttgtgactgtgatctaaatttctaatcttaatacattatacttttttccatcataaacactttcctctcgttttctttacagattacacaacgaaatacatcatctatgagcagcaggagaagaagcttccttttgtttgtttctccgatgaatcagcagtgttaacggtctgacgagaaacgtctccgtctctgacagacatcagagagcaagttccgggagattccggtgataaaactatgttttctgatgagaagactcgtcgattcggtggaggaatgatctgtggtgccgaaacagtggtgaggtaacggaggagcatttgaattatctctgtgaaatttggccgttcgttaggatcttctttccagcatgaagttacaatcatctctaagtctcctggtaaatcctctgcacttggcctcaagttctatcataaaaacaaacacaaatta

SEQ ID NO: 2136 - DNA, 671 bp, Arabidopsis thaliana
cttcaaactcaagataatcgcttctgctttttcggacatctcaaaccagtctccatttgccatggccctttcaagtctgcattgacaatatgagagtgtctcactcctctccaagacaggaagttccccgaatgcttgagatcaaaaagaccacactcagacctgaaagatctgaaatcaatgaaagacccttcagctcgaggaggtcccccagatttctctgtatagtgaaaataggtttttaatctattaatcctaaagcactatcatgtcgttgtagtactgaaggttgttaatccaaatgggtgtgatgctaacaatcaagatgtgatcagaagtcactaagtcaagccaagcaataacaggttttggtgtgttctagcagttctaagtgaacatgcagaaaacagaaattcaagcagaaacaataaaacactcgaccaacacagctctttgcagagcactgggtgaggtcgagtaacagacagaaagtataacagggatattcgactgcacagtctggcaacagtaaagaattgcagaaactaagcaacagatgacaagatgcagtaaacaacagtagagtaaacaaagaattcaatcagataaagaattcccgaggatgggataattgagtagtttcgtttcctcagtttacaggtgattgacat

SEQ ID NO: 2137 - DNA, 958 bp, Arabidopsis thaliana columbia
gaggctagaggatcgacttttacataggagaagagaatagaatatatagagaagtagaggagccttagagaagaggaagagtcatcctagagaaatgaacacacaaaaacgaaatttgggtttctcctttgctaatgggctttaaaacaacaatgagccatgataagagtgtgtgggcttgctcattaaaaacctctcttggaaaatccattgggacaaaaccaagaggacagaaaaagagtgcaagttacacacctccattgttgttgcttaaacggcttgaatcgcaaccaacgtggttggacaagcttcttgtttaaggctgccctcaatcttttgtagaagtgtggtgatagcttgatttagtagctttgtctttgatcttgttattggaccttcaagaacatgcaatgcttcatcctctttagctccaagctctccatcctcaggctgcgttctttctccaaactcctcgggttcaacctgctccttacctccatgatccaagcttcccattatcacatcatcctctcccacttgaaaaggatttgacctcaaatctgtttcatctacaataaaaggaacaagatcagtaagattaaaactattactcacattatacgtaccttgcaaatccatagagtaggcattatcgttgatcctcttgagaactttaaaaggtccgtccatccttggcataagtttagactttctctcctcaggaaaacgctcttttcggagatgaatccaaaccaagtctccttcgttgaagataagctcctttctatgtttattggcatgcttagcatattgtttggtcttctcttcaatgttctttcgcgcctgctcatgaatctgctgcactaactttgctttctcccttctatccatgctaactcttacactcaaaggtaaaggcatcaaatccaaaggagtaatgggattgaaccctataaac

SEQ ID NO: 2138 - DNA, 587 bp, Arabidopsis thaliana
ctgatcaagcaaggtttgagtgacagttaacggtcgcatagtgcgtgaactagcaaccactatcaagtcaggcgacaaggtcgaagttgaaggtcaacctatctacaacgaagaaaaggtctattatctgcttaacaaaccacgcggtgtcatttccagtgtaacagatgacaagggtcgcaagacggttgtcgacctcttgcccaatgtcaaagagcgcatttaccctgtgggtcgtttggactgggatacatcaggagtcttgattttgaccaatgatgagctatcatctttatcgatgaaattgatgctgttggacgtcaacgtggagtcggtctcggcggaggtaatgacgaacgtgaacaaaccttgaaccaacttttgattgagatggatggttttgagggaaatgaagggattatcgtcatcgctgcgacaaaccgttcagatgtacttgatcctgcccttttgcgtccaggacgttttgatagaaaagtattggttggccgcctgatgttaaaggtcgtgaagcaatcttgaaagtcacgctaagacaagcctttacagaagatgtgatttgaaatagt

SEQ ID NO: 2139 - DNA, 1422 bp, Arabidopsis thaliana
ccattcaattggttgatcttctcagctctttgacctcctgttaaatggcaacgtttgatgtctgatttgaaccggcatgacaagcaacgtttcatcctctattcatctttggatttctatgacctgttctcactttatgttcctgtcttagatcagcacaatttacaaacacatcatagttcacatacaccaatggaagttcgcagactaataaatctcttgaaatccaaaggtttggtaaatagatcacctagttgatgttcaatactcacatgatcaataactattagtttcgcctcaacaagttcacgaataaaatgatgcctaatatcaatgtgttttgtgcgagagtgttgatgttattttgggaatggattggttggatcattacagagtacatcttgactgcccccgtgggagagtttcttttgagcggcgagaagggaggttgggttatcagggagtgagacctacctcagggagtctagtcatctcaatagtgcaggtagacaagatgatcgagaagggctatgaggcttacctgctgacaatatttatgcaggtagcagtgagcaacattcgggttgtttaggagttcgaggatgtatttcagtcggcgccaaatttgatatagctccaattggcttaagcttactccctcaaataagagatcgtcgttagcacttaagggtcgaattccacaaagctgtcgatgttcacgcaataaacttatgaagattttagttaagctatacaaactataataatttaaaaatcatcaaagcaagtaaataagttgtagattcaagtgattaaagcgtcgggtctaaggaattgtcttgggagatagataaattgtagatctagctaatattaggactattatcgcaccgctcttgaactcaaactatgattttagagtaaccggtgatgctccacgaaactctctttacttagagcttaagatatccgaagaagccgagaaatcctatactaaagcatgcatttttatcaagtttgattagttcaccgagtatctaaaccagagcccttctatgagcctacctgttctttcttaaatacctagactcatgtatgatagttcaaataacaagtacttatggtgggcatacctattatctaatatcaagttctaggtgatcaatctaagaataatcaagatgaagaactctaagaataattctaaggggttttcgatctactaatccatctaaatccctattaagacaccttaaacccaacaaggtgattactgagacatgataacagaaacacaaatcataatctgaatagattgcattgatgaattaagaataagagtaaaaggagttcaaaatcatctctctgcatggattggattcttctctccaaaataaaactaagctgaggtcttacaaatga

SEQ ID NO: 2140 - DNA, 561 bp, Arabidopsis thaliana
ggaaccatccagctcccaaccatcgcacgtggagtgaggcaactcacgagcttcctcgtagtcgacacgaaagctcctttcaacgcaatactgagaagaccatggctacacgccatgaaagccatcccatcaacctaccaccaatgcattaaattcccctcggacaagggaatagcagtcgtatacggcagccaacgcagctcccgaaaatgctatatgggcagctatgagcttatcaaaaaagctgaccccgtagtactaatgatagaagacaaactcgcggaaatgaaaacagtcagatcctctgatccttctcaacgcggacctcgaaagtcattgataacacaggtctgcacagacgaatcagatccctaacgatgcgttgggataggtcaagacctcgacccagcgataagagaggatctcataacctttctcaaagaaaacaaagacagctttgcctggtcaagtgcgaacctccgaggaataagcctcgaggtaactcacacgaactcaacgtcgatcagacctaccgacgtgtaaagcagaaacgtcgcaagc

SEQ ID NO: 2141 - DNA, 397 bp, Arabidopsis thaliana columbia
  unsure (1)..(397): unsure at all n locations
nnnnnnnnnnnnnnnnnnnnnnctaaaggatgcggctgaaatgccagtagcagaattgcccaaccggattatccggatgctggcgggcgattttttccagtgcgccaatttgcttttccatcgtaaaacgcgttggcaggcgatggtacagaatgtcatcagccagcacgcgcagcgagcggcgacggtttgcgcattccagcggataacttcttccgcatggctacgctcgaccagcttttgcacctcttccggctgatgcaaactgaccgaaatatgttcctgtaaatccagcgcctcctggaaaatacgcagcatccgcttgtagtcagtattattttgcgcggaaagcatatgcatttgctgaatagcactgggtaattagatcgaccgcttt

SEQ ID NO: 2142 - DNA, 577 bp, Arabidopsis thaliana columbia
ggtattgaaatgtattggttttatatatagtggatccatctccttgccatttttcatggtatttatagagagctcattattgtagtttcatttatagtttcgctaccactttgatttagatttttcttgtttacttattctatgcagaattagtgaattgtgattgtggttatgtcttctagagcggaaaaaaatactcggatctttactgagctctctcttcatgttgtttctgcagaccattgcaactgtatgcatgttccttgctggaaaggttgaggaaactccacggcccttgaaagatgttatttttgtctcctatgagattatatacaagaaggatcctggtgcttcccagaaaatcaagcacaaggtattccatcttactactgaatcttcctaatttctcacctctgttttactagttatagatgaacgtatcattttttccccatatcgtttgtgtgatttgacattgaggttttagtattagctacagactttgcttcgttgttttgtagaaccatggtcctttggtcctgatttattgtctgttggtcagcatatcaaatgtatt

SEQ ID NO: 2143 - DNA, 591 bp, Arabidopsis thaliana columbia
cttttaatctctatttctttattttcttttcttacttagtaaaaaatttggagccaacaaaatttttactttcccggttatctctattataacgttttgaatgtcatatatgctatcataaagccaaaaactaagcgccactacgaaatatgtttgcggttaatctaccatagcgtttgttttttcgaaaacgctatataatttttttcataacacaattataccagaatcattgaaaacgctatattgtattactattaataccttcatttcctgtagtggaaaatgcggaatgatatcattttcaataataaacgatggtctattcgggacattataaacaaagctctcattgacaagcaacaatggaatgagagtctacggtggagtgacgctaacaaatagcgagattcaattcaaagagaccctaataccacaacacctattacaaccaaaagaggtcgtaatactagtattcatcaagcaaaaacttattgttgttttgtggatgcttcatgggtctcttctactgccactgtaggcataggctggatcatgtcactccaaatggcaatttgtactttggggaat

SEQ ID NO: 2144 - DNA, 144 bp, Arabidopsis thaliana columbia
tctttaatccatcgtgagttgatttttgtacatggtgtaaggaagaggtccagtttcagtcttcagcagatggctagccagttatcccagcactatttattgaatagggagtccttttcctactgtttgttcttgtcaattttg

SEQ ID NO: 2145 - DNA, 627 bp, Arabidopsis thaliana
ttttattttgaaaaagtgtgacaaatacagatcaatcgtttgtccgaatgtgtataacaaaaaagaaataagagttatagtaaacaatcgaaatgaaatctaaagaatattttagaaatatggtaagaataagataaaatagcttggagatggctataacgtttatcaacccctacaagtaattaaaaaaagaaggaagaaggaaaaattgtcaatggcaaaaaaattccgttacacacaaaagagcacgtagtggtgtagtatttccaaaggccgccgaccaaaaaagacatggagcaaaacaatgctctgtttccaccctgttatttaggtcataacagcgtacatcaatatcatcgtgactccaattattccatagctcatgactcccttagatgccgcgtttggagacagcgaaggcggcaatggagctggcggaggcgtcaatgtctctgaatccggcgtgccattggtcggcggagatgcagatggaggcagagagctaggggggagcgatggagaaggaggcgaaggaggggaggggggcgaagaaggggtagacggagtggagggcggggaagaaggagtcgaaggagtggagggaggcgaagaaggagtcgaaggagg

SEQ ID NO: 2146 - DNA, 445 bp, Arabidopsis thaliana
tgtttgtgttttgacaatagtgtgagtagggagttttgaatacttttagcttgtttgtttggttactactacaggggtgatgtggttgagatagagacttggtgtcagagtgaaggaaggattgggacaaggcgtgattggattcttaaggattctgtcactggtgaagtcactggccgtgctacagttgtggagatatatagcaaagttttggactttctgcattggttagggacatggatataggagttggttacatgttttgtgttgcggtaacttggatttatgggcctgttctgatttgttgtgtggcaattttgttatggtttcagcaagtgggtgatgatgaaccaagacacgagacggcttcagaaagtttctgatgatgttcgggacgagtacttggtcttctgtcctcaagaaccgaggtaaaggacactttggt

SEQ ID NO: 2147 - DNA, 559 bp, Arabidopsis thaliana columbia
cgttttaatttcatggtttagatcattgtacgtagaaccaacttgtatttagtttggtcatgttcattgttgcagcaaataaacgaattgatggcagaagtagataaaaaccaaagtggagccatagatttcgacgaatttgtgcatatgatgacaaccaaattcggagaacgagactccatagacgaattgtctaaggcgtttaagatcattgaccacgacaataatgtgaataaatctaaacctgtcattatttcattctttttaatattatctttttttgtttggattgatttcattgtgtttgactggacaacttttggaatgttttaggggaagatttcacctcgtgatataaagatgattgctaaagaattgggagaaaatttcacagataatgatatagaagaaatgatcgaagaagcagaccgtgacagtaagcaaaaacacataataattttgcgttttatctataatcggccctcaagttcatgtttttgccttaactacgcagaagatggagaagttacttggaggagttcatgaagatgatgaagag

SEQ ID NO: 2148 - DNA, 505 bp, Arabidopsis thaliana
ttttcgagttcctgagccaaaaagatcaaacaatgtctaaagaagctgagatgtcgatcgcggtgtcggttatgttcccatggttttagatgctctcctactgtatgtgtgaactatactcgcgtactatcttcgtcgtaaaatcgatggtgaagagcactctgttgctgtgatggctgaggtcgagatttacaagttcgagccgtgggacttgccaggttttacttcggttttctttctctttatgtttactttggttcactaatttgaatgtttgtgcctataaaacagaggaatcgaaactgaaatcggagaacgagtggttttacttctgcgcgagggggaggaagtaccgcacgggtcacaaagccggcgagccacacagctaggatattggaaagcgaccggtaaagagcggagtgttaaatccgggaatcaagttgttggaaccaagagaacgcttgtatttcatatcggtcgggctcctcgtggcgagagaacggag

SEQ ID NO: 2149 - DNA, 561 bp, Arabidopsis thaliana
  unsure (1)..(561): unsure at all n locations
tccataagtggtcaattgaatacgattatattgtatttatgtatgatatttttggaattagccgaatggtataatttaatacttcaccgccatactaatcctttaatcacgggatgtttaaagaagaatgtcaccgtgaacgacatctcaaccgaacgaataaaccatttcacagttatgtttatactatggttatctttttcgcttaaggtactagtattccaaaaaaaatatatatatatatatatataccagaggttaattttgatttatctaatatcattcgttttttgttttccatttaattttttttttttaacatctttactcttatattagatagtataaagataatacaaagtgttaaccaaccaagatggtggtgtagtataaaagtgaaacagagggtctattgcggtgacatgagatgctaaagcatcagctgcagaattcctttcacgattgttttccatttagtttagattgagattgcagaaacaaaaccatttcccagtcactcanaacttttatagttaaagaactaaactttaaacttggttt

SEQ ID NO: 2150 - DNA, 891 bp, Arabidopsis thaliana columbia
ctctccgccgactatagatacgatacggaggaaattaggttttcaacaacggaagtagagaagaatttgtagcgggaaagagtaggcgaaatatgcggagagaccgccattgttggacttggtttttcaaattgatagctctcactggttggtttttcctcacaggtgctttctttagtgattagcgaaggaaccaaatatgatcttcatacgacgccgtttcagaatttgttatttccacttacaccccttgttaaatataattcccatttcaaccgcctttatttttctttacccagttacccccctcgttaaatttaagaaccaacataacaaaagcaagaatcaggcacggaacttctggctaataataacattgcaagtcaataagcgacacaaacagaaccaaattggtatgaccttgatcgtatgaagctgagttatgtcgtcatcatgaatgttctatacattctctagaaaaggttaaaacaaaacccattttcctatttttattcacaaggcctgaagctttgattcaacctcattatgaatcttttggagacagctgaggttgagcttcatctgatgataacattccgggaggaaggtacgaccaggccaagactccactcccgagtgtgatggttgcagctattgatccccaaatccacctctgcctcctctttctcttttgcccgtctcgccttgccacctctgatatcaaagagagttgaagcattgagataaagaaaaatgagataagacattcttgtaaatttaaattgagtttcttctacctatggcctcttggttgcgctgggacatttcctggttcacagtctcgtaataatgaagacggtcagacaaccgggtgatttcaaagttcttagc

SEQ ID NO: 2151 - DNA, 584 bp, Arabidopsis thaliana
gccatgaaaattaagaagcacaattctactacttgcatattgagatttttgttttaccatattttgaagcttctgggaaaatcttctgcaaataagtcagaggatcctcaaactcctcctttgttggtctgtagacaggacattctggaagcctctcggtccattttagatcatctgtctcaagcttctccactttttccttcatcaagccacctctcacagtagatgcaccatgcactttagatactgtatcactagaagttacccgtaatctcattccacatgacgctgaagttggtctcaaagcatcaccaccacttctagccattgtgctgaagcctactgtttcattgacagagtctgatctcattttttgaagctttttacgtttcagaaattctaacccatccttagcctctttagacaagcagatcctcctttccgcctgacaaaaccaagtgtcagcaaacattcctctagatacatatcaaaagttcatactacaaataccatatacaggagtcatagatacacaataggtcaaccattcacacttaacccactatagctccaaaatattataa

SEQ ID NO: 2152 - DNA, 1488 bp, Arabidopsis thaliana
  unsure (1)..(1488): unsure at all n locations
atacacaaatgtggattttttcaggaaagttgttcaatgtgcttattacaatattaatcatttgatgatacatactcacagttacactaacagttcaatatcctgatggagcttatcactaaaagagaaaatctatactacagtattaggaactcgaaacaatatcgtcatcctaaaagagacaaaatagcctgactaaacatttatattttcgttaggacaattctcaaaaaaagatactatatattagactaaaaaaaggaatgaaacagtgacatacagctacactaaagacaaaaaaggagataaaataatatctccgtagacacataatagtataataccgtgttacgtcgatcaaaatgtgatataagaaatcaaattaatactaaaagcgatatgtttcgggacagattggtccggacccgccacctttccctttctatatacacacacgcaatacccaccaagaacacacacaaacacttaattagcaatataaaaagcacattcacaaactctttccaacacaccaacacaaaaaaaaaaccaagaacaaaaaacaattaaacaatatggcatttcttctgagttttttgatactagcgtttcttataaccatcatcttctttttatcttcatcttcaactaaaaaagtccaagaaaacaccacatatggaccaccatcgtatccactcattggctccatactctctttcaacaaaaaccgtcatcgtcttcttcaatggtacaccgagcttctccgtctctctccgtctcaaaccatcttagttcctctcctcggcaaccgtcgcaccatcatcacaacaaacccattaaacgtcgagtacattctcaaaacaaacttctttaacttccctaaaggtaaaccttttactgatcttcttggtgatcttctcggtggaggcatattcaatgtcgacggtcactcatggagctcgcagcgcaaactcgctagccacgagttctccactcgctcgcttaggagttttgcttttgaggttcttaaagacgaagtggagaaccgtctagtcccggttttatccacggcggctgatgttggtacgaccgtggatttgcaagatgttttgaaacgttttgcttttgatgttgtttgtaaagtctcgttgggttgggatccggattgtttggatctaacccgacccgttaatccacttgtggaggcttttgacaccgctgctgagattagtgctcgccgtgccacggagcctatttacgctgtttggaaaacgaagcgtgtgttgaacgtgggaagcgagaggaagcttagggaagcgatcaggaccgtgcacgtgttggtctctgagattgtcagagctaagaagaagagtcttgagatcggaaccggagcagaagcaaagcaagatcttttgtcgaggtttctagccgccggcacaacggcgaacagntgagggacatggttattagttttatcatggcgggaag

SEQ ID NO: 2153 - DNA, 856 bp, Arabidopsis thaliana
tttgtttccttagtaacatcactaattatagcaacaaaaatcttgtttgtcaaagtcgtgtactatgcgttaaataaattgccattttcatgctccaagatacaatatttacgcacctaaatcaccatgtaaagataccaaaaaacgtgtttataaactctaaacgataaactgatcatcctcacatcaaaaacatgacggcattgagaagaacaatctccatcattttcgttttctatctctcatgttagcttctcactcagtcactctatatactacatatctcttacattttgattaatcgatctataagacctaataaaatatggtatgtgtttgcaattaataggtacgttgttcgtgaatatctttggagttcaagccagaaatttatgcaagacagatgaagattgtgtgttgcgatgtcaagatccaggtgcgaactgtattcttggaatatgccattgttcgcgccaacaagttgagactgagctgaccaaggtgataagatgcaagactgatcgtgattgtcctgattctcatcaatgccctaaagattattattatgcttgccttaataatggagaatgtacttgtatctctgtttgagaaaccttaaaccactctaacaaataaaagagaaaccttaaaccatgattgttcagattctcatcaatgccctctattcaatatactaaacctttaaatagaactaaagctcaccctatatacaatattcaaagaaaataatagggtgggttaaaccgccagctggatgcttgaagattaacacggatggtgcgtcacgtgggaatccggggctggcaaccgctggaggagtgctacaggataatga

SEQ ID NO: 2154 - DNA, 753 bp, Arabidopsis thaliana
agaataggtcggggaaaaccacatttgcggttcattcattctgtcaacagatggtatttagcatttgttttttgttgttggtttttttttgttttgttttgttttttgagacggagtctcactctgttgcccaggctggagtgcaggggcatgatctcggctcaccacagcctccacctcccagattcaagcgattctcctgcctcagcctcctgagtagctgggactacagatgtgcgccaccatgcctggctaatttttgtatttttagtagagatggggtttcactatgttggccatgctggtctcgaactcctgacctcaggtgatccacccgcctcagcctcccaaagtgctgggattacaggcgtgagccatccgccctggctcgcaactttttaattttaaaaatattcttggcggtcatgagaactatttatggtatctgctaattgagaaaatgtgtaagggcatgctattatatggattaacaatattgttaaataactttgcaggtttaataatcaaatcagtaattgtatacatttgacagaaatttgtaccagatgagagaaattaggcaatgcttgtagggatcccagcgtcttctcagcattcctgcacgcctcagtccaagcatctcatcgtgccacacgaacatttctgtaggcctgttttctcactaagattatttagatctattttctgcctctagagagcatttgatttggcaaaactcatacgtctagagtc

SEQ ID NO: 2155 - DNA, 588 bp, Arabidopsis thaliana
tccaccaccacctccatatgtttacaagtcgccaccacctcctccttacgtttatagttctcctccacctccaccatatgtttacaagtctccaccacctcctccttacgtttatagttctccaccacctcctccatatgtttacaagtcgccaccacctcctccttatgtttacagttctccaccgcctcctccatatgtttacaagtctccccctcctcctccatacgtctacagctctccaccaccacctccatatgtttacaagtcgccaccacctcctccttacgtttatagttctcctccacctccaccatatgtttacaagtctccaccaccacctccttacgtctatagctctccaccaccacctccatatgtttacaagtcgccaccacctcctccttatgtttacagctctccaccgcctcctccatatgtttacaagtctccccctcctcctccatacgtctacagctctccaccgcctcctccatatgtttacaagtctccccctcctcctccatacgtttacaactccccaccgcctcctccatatgtttacaagtcgccaccacctcctcttac

SEQ ID NO: 2156 - DNA, 596 bp, Arabidopsis thaliana
ccctgcattggagtttatatgtttacttagatggataacaaacgaaacaatttccaataacgaaaatgagaacatatgattaaatcaaaattggacattagatgtcattgtaaattaacgatcacaatctttactggtttacattcccgttcaacttaatctaatataacaaaaacaaaaacaaaaaacacctagatgttagtatccaacaaaaacaaaaacccatagaaattattattcatgagatccaccttaagcgagacaccttttgcacctttgcccaactttcttgcacctagggcacgtacgcctcaccattcttcctggctggaaaggaagatgcataatgcacattttctcgttattcatgtcaatgaacatgcgtttgtcgtgagtacattccatcggcacctcatctgatagtatcctgttgtcgactcatacgccagtcctttgttcttctctacaaactttgcatacggattatttgcggcaagacacttttggaagaaactgtagtacttagaatgaggcattgacaccacataaaatgattgccatgtcaatgcgaacaaaggctagggtttcctcgacat

SEQ ID NO: 2157 - DNA, 941 bp, Arabidopsis thaliana
atatgcaatgataaatagaagacaaactaaagaaaacaggcttaaacaataagtcctgtacgaagcccactaggcccaatcgtgatcctatcacatatctgcctttgacgttccttcttatatggaccaaacaagctccatggtgtgcttgattgaacacaaggctcacaactttgaatattgattgattccgatctgagacaaacgtcaagtcagggccatcttttattatttctgaaagcttgttcataaaccatgaccatgattcgtttgtctcgctgtccactacagcaaaagctatagggagaatctgaaagtttgcatcctgacaactagcggtaagaagacagccaaggaacttaccaaacaagtgtgtcccatctactacaacaaccctccgcagaaattttaacccttttacactagccccaaatgctaggaaaacatatttaaaacgctcatcaccaacgtcatcaatctctgttttcaaatgataaattgtgccaggattggctagttgtaagacgtgaagatataccggcaacaaggagaaagagctctcatccgtgccctgagcagtctcaacagcaagttcttttgctctccaacatttccagtacgttgtccgcacattgtgctccctcaacagagactcgagtaagtctctcgctcttggcccacaaaacgccttcgcatatttagcccttaagagtgcagctacaaccttcgaagtggcatgttttccaaagcggctcctagtctcaaccttacacatatgatccagctttgcctttctcacctcatattcttcactgtcccccacttggtgtgctctgactctccaatcacaacattttttatcgtaacattcagcaaccaggtaatgtttctcatacctagtaaatctgaagcggaaaacacggtttatggcataaatagac

SEQ ID NO: 2158 - DNA, 629 bp, Arabidopsis thaliana columbia
tgaagatgtgcgtatgtgcttctagtagagagctttggatatttcataggttgtctcctaaatgtcccaagcttccttcgctgatgtgcacccctacacacgagtgaattgactcattggcagggatttgaatatgattgacaaggctggcgacgtgtccgtagtcgtagtgtactcctcaatattcatgcagatcctaaacttcataacccacaaacctgaacccatacccgaaccaaacgcgaacaagtacccgaacatgcccgaaatataagtgtatagttaaatatattagtaatatttatatttgtaataacctaagtgtctaaaatatttgaatgtaaagttttttcgaatcttttaactacttttggctctaaaaagcactcgggtttgtagattttttgggtaatatccaatagtttacatagactcgaatacaaaaattcgatatttggatactttgggtatactcgattccaaacccgaaatacctaatcgaacccgacccaaagctgaagttttaaaatatctgaacagattctagattctaaatccaaaaaaacttaacccaaaaaatcaaacccaagcccgatctgaatatccgaacgcctagacctataaatacg

SEQ ID NO: 2159 - DNA, 636 bp, Arabidopsis thaliana
ggtgatcttctcagcctggtttgcaataagggcttcagcaacagccagcttttgggagagcacaaccggatcatcttgaggaagcaccggaccggcataagctgaagacgcctcttgctgcaatgaactggccccataaatcctgcctttcttcttaggagcaacctgtcagaaactcacaaccaaaccgagcaaacataatcaaagcaaattcgaaacacatagacataatgcaaaacttatagcttcagacataatcatattaggcagaaaatacaatgatattattcaaaccaaaaacacaactgaatcaggccaaaaacacaatgacattatgcaaacttctttcacaacataatcatatcagtttacacacattgacattttgcaaactaaaaacacaacataatcaattcagtgtaaaacacaatgacacaatggaagccacaacagagaaatacaaagcaacaccaaaaactgcaattatcccatcaaagacataatgcaagccacaacagacaaatccaaagcaacaaaaaaatgttgcaactatattaagtcgatgcatatgtccgcactatattgagtttaaagagataagatacatgtgcatagacttgtctttgctgacagata

SEQ ID NO: 2160 - DNA, 982 bp, Arabidopsis thaliana
cagggtcgagtggtttgacatgatcaggtccgcttttttcaattagctcgtcaacaactccaaatcacctgaaatcaacacaaatgtgcaacatgcatgcaaacctatcctaaatatataaagtgatgacaaatgatgagaaatggtataaaacaatgatgatatggtgctatagtgatgacaaatggatgctcaaaacatgcaaaatacacacttatcagaagagaccaaaactcgctctagtgggtcttctaatttcatctctgaactgcatattaagatcgccaacattcagccctatcctcccttctcgaacatctatgattgctccagctgtgtgcaagaaggatctcccaaggattaatggatccttaggttccttctcataaggcaagactacaaagtctgtaggaatcatgctctttctaatcatcacaggagcatcaataagaattccatctttaattaaggtagaacgaactgccaacacaagagtgataaaggtatgctcaagattggaatacccaagacgcatagcaactgaacgatgcatcagattcacactagaaccgagatcacataaagctcttgggaggaaatcaagattgatggtgacacttagtacagaggttccaggatcaggcagcttttttgggattcgttcctgaatgatgtcgatgccctgctctgaaatcatcgtaacactgcattctttcgtcaaattcttagtgaccattgtcttaacataccttctgattgtgggagatagatgaatagcttcaactagaggcatctcaataatcagattatcaatcatagccttgcatctgacatcatctaaggcttgtcttgactttttaggactcttggagaaggaaattcgttgatttgctgacttggtttcagctggaatttgacactgtctgaacgagctcggtgtcgatcgacaggagctgggtgtcgatcgacacatcgggaatag

SEQ ID NO: 2161 - DNA, 564 bp, Arabidopsis thaliana
tttctgaaatttttcaattttcttggttttatctatgcctcagatgaatgcagactcaagattatatacaatgaaacacacacttcctgagtcctcccccaaacttaaatcacacagtccactgtgtgatcaaatttggaaaagagtactcaggacaaaacacatcatagaaacaaaataaaaacaggagatggtatattacaatggtggagtgaggtgcttacctcagtggaagaaggagcaaatttggtcgtcaatagctgcctgtgattgctcccaggccatcgaagaatctccctgttgtgtctcagcttccgcctgggggtattcaacctctgctccttcgtcacggccagcaccgctctgatgatactcgacctctcttcttctgctgcggccagcaccgcggatcgagtgatttactgacatggagaagttttgattgcataactcgctatactcgatcacatcgtcattcggtccctgtagggtgtggtcgagtgatttcctggggtggggaaacagaacaatgtcgagtgtccttgataactccgtggtcgagtg

SEQ ID NO: 2162 - DNA, 729 bp, Arabidopsis thaliana
gagaaacaagatgatagatgaaatcaaatgcgaaatctgaataacttggaaaatctcgaattacaggttcagaagcaaaagcgcgcagccagagtaaaacagaaaataaaactgaagcaaaaactcaatgtcgactagatgtaccaggacaaaaccctcggacacctatttatacaaaacaaaataaaatgatagtagacgggctagtaacctaatcgctcggcccatagagtgataatggaccgagatgggctttttgatctgatggagctccaggccgtttccatacacttcttcttctccacttctcttccttgttctcagcttgtctggttaagtgcggatttgagtcaactctgaagatgtggtctagtgcttgatcgagtgatggtgatgattggtgaaggatatactcggtcaaggggtcgagtaacgtggtagagtgaatggccgagtggtggtcaggtggcgtggcatagtgatagtcgaccagagggtcagtgcgagtcatcgagtggcttagatgctgttactcgagcagggggtcgagtagatgggaagaatggctccaatgtattagaaacggcagacgcgcctaaaatcgcctacgatccgattcagcgtcgcggtttcgtgaacattgctcagatcagaacactaaatttatgtcgaaatccttagaataaatcgagaaacaaaaagagatgagaagaacaaaatgaatttcaa

SEQ ID NO: 2163 - DNA, 876 bp, Arabidopsis thaliana
ctaaagactcaatcaataatacatatctgtttcaatctacgttattatctctttgtaaaaattgccatttattaatcattgaaaactgcttttagaacttgatacaacgggactagtcacaacaggactattctcaacgggatcatcctcagaggaactatcatcaaagtcatcatccataaataaaatatcatcgaatggtgccacgcccgtgatgagttttattttattattacgatcagtcaatactccacttaaaccgttttcgctcacaggttttaatgatttttcattactcttgttgtaagcaggcgcattaaaaatacacggagtatcaacatcaaacaatgacgttccccagttcacatattgaatatcatagttactgaagttctgtccagaaaagaagcaccccttaaaatccaatccacgtaaattatataaaccaccctcttctttttggagagtaatgttaattttggctatctcccggacatcatcgccatttttgtatttgaataccgtttcaagatgttctccagacagcttgacttcaggaaataatttgaaatcaaagcctatattattatgtgtcaacgtagatgaacaaaaaatggaaaaagcttgcagtgctgaattatagctatcgattttatcttgaggctgagctcttggtaaaaacttatagcaacactcataaaaattaaacagaagctctgaagaccttgtatttttatcaaataatacccccttgaactcattcacaaacgcatcttttttttcttgaatatctatggggtgttctttgactctgacaaagatgaaatctcatctattttgtgttcatatgaattacgtgattccatacagacattt

SEQ ID NO: 2164 - DNA, 703 bp, Arabidopsis thaliana
caaatatgaaagaagtatctaaagagagcatgtgttacctcagcaaatcgaagcaagtgaagccccagtgctcgttcatctgcatgatccaatgctaattttcctgtctgcaatgaataagatgttgaaacataagaattactctttattgtactgcgtatggtaggaactaataacagacttcgtaggtgttcgacgatccatatcttatgaaaatgtgaaagatagcacaaccaagaaactaaaaaggacaaaaaggcccagggtgtatacaaaatgaatcttgagactccaaaaaattaaatgctcactatagacactggcattaacttaaaagtttaaacacttctgaaaattgtttaagctttcaatttcaaactaaatagtttataacgtcgcatttccttgatagagacaatgggaaagtttcaggggcagccaagaggaacaaagaataaaattcagcgattcatgttcatgcagctaaagtacctttttcagctcatctatgtctttgccagactttctgatgattgaacagatccgagcatgggcgtaaagaaggtaaacggctgtatttcctgctcatgacatatgatcaataaggttgtgtaggtgactgcaaaatgcaaatttgtaaactaggtggcaaatttcagtaccttgtcattaagcatttgatcaaaggctgaagtataattgg

SEQ ID NO: 2165 - DNA, 990 bp, Arabidopsis thaliana
gagcgccataacctcctattcaacgataacatcgaccgtattgttcgacaactaagagaatagacaacaacagaaacaatggctgaccttgtagatgagcaaatacaacctaacaacattggtgctggtgactttccacacaatcacaaccagcgtcatggcattgttccacctctagtacaaaacaataactttgagatcaagagcagcctcattgcaatggttcaagggaacaagtttcatggcttgccaatggaggattcgcttgatcatctagacgagtttggaaggctctatagccttactaaaattaatggagtcagtgaagatggtttcaagcttcgcttgtttcccttctgatgcggacatcaaccttatttcacaaactgctgaactacaagttgtaccacatcttgtactacatcctgtaccagaagtcccggagggtatcatgacacgttcaaaagctaaacaactgaagaaaaggttcaacttagctgtgcaagatattttgagctccctagagctaggagtaaactggtccttagcaccccataccagatatgatctaatagccgaagaagagcttgctgaagcattcacccaaatgagtcttgaacgaactactcccccaggtatgaaatatcgtttgacaggttcaaggacctctagaaaccaagagaaaactttggagcttcaagagacggacgattcaagtgtcatctctgaaagtgatcgagagagtaagatcaagaacaagatatcaaggacatggaaaagctcaaagacattgatcaaaatactcaagaggaactccacaaagacccctacttcaaggaacaagccaacaaacaagcacaagacttgattccagaagtacctcaagaagtactacaagaaatgactcaggcgacatctattaggcctaaaacgcatctaggtaaggtttattcagtttatattatctttgcaggtccacacagcccagac

SEQ ID NO: 2166 - DNA, 1311 bp, Arabidopsis thaliana
atcgtggatctttgagtacatcatcacctgtgacgggtctcatctgggaaaatcgatacttggcttggctatgctctcaacgggaattgttcatctcaagtcggggttcgtgttcgagaccagagcggctaaggcatccgcagtagagttatcattccagggaattcttaccagatcgaacttatcgaactctttagacaggtcttgtaccaacgaaagataggctcgtattctttcgtctttggcttcaaattccccaaagaactgactgactacgagctgagaatcgctgaaagttttcatatgtctggccccgatacctttagcaaggcgaagtccagtgagaagtgcttcgtactctgcttcgttgttggatggtttgaattgaagtctaagcgattgttcaaggatttccccagtcggagattggagcagaatcccgagaccggaaccttgtaacgatgaggagccatctgcgtaaagtatccagttctcgtcatgggccttgttaatcacatctggagatagctcggtcatgaaatccgccaggacttgtgatatgagacttggctggaaacgatactccacatcatactcgcttaattcgatcgcccattttgcaatttgtccggattggtttagactgtggagtaccgtccaaagtggatgatcggtgaaaaccactatggagtgcgactggaagtaagctcggagttttcgagcggccgttattaccgccaatgctagcttttccaaagtcggatatctggtcttgacgtcattcagggccttacttgtgtcgaagataggtttctcatttccacgatcgtctcgtaccagtaccccactcaacgccgaacttgacaccgagacagagagatataggatttctccaacttcaggtttggcgaagatcgccccactcatgaggtaggatttgagttcttggaaagcggttttgcatttattgtccaaatgaaaatccgtgtttccacgcagaagtttatagaaaggaaggcacctgtccgttgatcgggcgatgaaacgattcaaagttgcgatgcgacctatcaacctttggacctctttttgttctgaggggacggtagtccgattattgcgtcaatttgcttaggattggcttcgattcctcgttcggtgactatgtatcccaagaatttgccaaacgttgctccgaacgttcatttagtaggattttgcttcatctggtacttgtcaaagatatcgaaacacgcggtgaggtgcttgatatgatcttctgccagtaaagattttaccagcatatcgtcg

SEQ ID NO: 2167 - DNA, 1067 bp, Arabidopsis thaliana
gaacaaagagacagacgagggacccactgctgatgccatgtctcccacgcacactacaaaaagataacggaatccatctctttctcctctccatcactcaacctatccttatctcttcactcgatcccatcgcgttatcccttcataaactcgagctcaccatctctcttcctcacgcaatcgaccaaacacgaactcatctcttccacacgcactcgagctcaccatttgctgcaacactcgattcctcaaccttcactcggtctcttcacaactgaatacttatcaccttcaagcccatcatctctccattcgcgacatcactcgaccaccgccgcagctcacttcttcaccaaagccaccaccttcttctcttcttccacgagctcaacttcactcgattcctcatcactttctcctctgtccaagcctcaccacacaaccgcctcttctctctctcaaacgaagaagcctcatcactcgacctcaaggagtcatcgacacatcactcgacctcttcaccttttctcacatcatctcatggttgttcgccgctacataaattcttcaaatactcgaccaccaattcggctgctcgttgcctcacgctcatcaccacttagccaaggaatcagcgactctctcagctttcacgatcactagcttgtcctccaccaactctcgatcgcttgccacaaaggaatcaccaccgcaactcatttctcactatactcgaccgcagatcctacatagcctcatcgttttcaccgctcaagctccgtcacttcactcgaccttccaatatcactcgatcaacaatccacaaaccgaaaaaaaaaattcagaaccggtttaggtatactcgaccgatttactctgttggtttgtgtttttggtttagttgggactaacgtattaacgtttatctttgagtttcatttgttttcaggtttcattatgagtaactacaatggagaatcctcaatggatcctgattataatgtaaacgaagctgagtcttggtcactagaccggagagagagcaacatgtttacgagagcttcaag

SEQ ID NO: 2168 - DNA, 594 bp, Arabidopsis thaliana columbia
tcctatatagttaacattatataatatcgatcataagtttcaaattactgctacaaaaacatgaacagactcaaacataacaagcaaatgaatcaattgttaaatggtctaacctctccgtccttcttggtggaagaagcactcttcttcttgcgcccaagctcaacaccatagtgcgagaggtaccactgcttgaacggagcagcatcaacctgaacaatagcactcttgacaagtgtcttagtacgtacaagctcattgttggaggcattgtagaccacatcaaggactctggtcttgcgggtagttgcttcacttccccacgagtagttaccagtatcgagcctcaacgcacgccacttaacatttccaccacgaactcttattcttctgaccgtcttgttgcttgagagcttggtgttggctggctgccttcccatctcataccttcacaaacccaaacataaaactcacaaatcagaacaacaaaatgaatccaagctagtaacatatcatgaatccgtgacacccagaaatgtgacaattactatgttttacaattatacgatagcatatgaagaacacatactatga

SEQ ID NO: 2169 - DNA, 1549 bp, Arabidopsis thaliana
agaagacataatctactcaaccacatgctattatgcataccagtatcttacactagatctacatacccagtctccagaaaaattagaccttgaccattataaggtactatgtgtatcgaaagttcatacaggtctttatatgtttggatatcaagcatggatccatatagctggtcaccaatcacaaacaaagatagagtatacacaaactaactttaacaggtaataacttaaagagtaacactaaatcttaatggcatatctccagacacagaagaacttgaccatcaaactgaacaacctaagctaggtacactcaagatctaaactccagataccagattgaacattactatttactccagcacagaggcaagatcgactaccatctatctatacctctacctactgattctaagtgactaatatagtgataacaaatcgatatttaaagcaagaatcatcaccattgatctagaaggaggtggatcaagagtgatcgaccgcgccgacatcttggcgatttcaccaatagcagcttctctaaccccaggcacatcactagtgagttcttcataagcagcaacaaaagcctcttgccaaaatctaggcaatttgatccgacgactattagtatacacatcccacatatgcttcaccactttctctctctcctccatttcctaaaaaataccacaaattccaaaacctcaaaaaccagactacaatcaaattacacaccaaatcaaccgaaatagaaacagagagagtaaacaaccagaacgtcgagattatcgtagttcggaatccctagatcttccgataaccggttcagattcccggtagataaccggagagtgacggtgccagtaaacatcgaccaaaaagccaaaagcaaaatcgcagcaaacgcccagaacttatatcgacctcttccaaacaagaccgagtcagagctttccttcttcgaattcgccatagctgttcccgtcgccgtaccagtcgtcgtcgtcgtcggcaatgcatcgtcctccttcatcttgatctcaaatactaattacaactcaataatcttgcttagtgagtgatgctaacaccaaatctgagctctcgtgaatcgatttcagtagattcagttcaattgggaaagtgtcggctcgattttgttaaatctgagagagaactttaaaaaaaaaaatcagttcactctcttcacagttcacactactggggcattattagctagtaattgggcgatgtattagccggtgatcttaaattgttaatggaaaaaatactaaagcgtgcgtgcaatcttgaccgttgatttataatttgataaaagccacacaaaagtacaactaaacgacgtcgtgtaatgagtgagaaaccccagacgctggtcgtttcatttaatggataacattatattcatcatgctgagctggcaccgttttcgccggcgtactgttatcaccggtctctttgaaaaagcgcttcgatttcttcaagtgatttccgttcgtctccggcaagaggaagaagaaga

SEQ ID NO: 2170 - DNA, 1284 bp, Arabidopsis thaliana columbia
cgatcatattccatcttaatcgtcattagttgtcaactaatgttaacataaatacatacatatatgtatatagcttacctaattttatcataatagtctctattagctgttcacgttaatgaattcatacgcattcgtcactaaattaaccttttataaaaacaaacaaataaacataatagtgtggttggaatctaattccataatctgatgtctgctctaaattgctcttttttccgttaataccaagctatgaaccaaacgagcttgattaatttgcgtctagtacttaaacatcatccgaattattattttgttttagctaagatgtatacgagcattaatgctatatatattgtatttgggtgtagtatacattaatatttcaaatttcaaaatagtcaaatatatatacccaaaatagccaagttctgttaatctattggcatcaacttttttcttcaagctccaaaacatcgttttccactaattgcccatttatttattcaagactttataacactaggtgtaaattatacttttccgaaatacatgggttatacaattcacatttcattttaaaattctaacacataatgatatatttacacatctaagtagccaccagtaagcaatcgatgtcaaaccactaaaccataacagacgaatctacaaaaaatttgaactaatattagtaaacccccaaagttaaacatagaactgtatttatttgctgttcaccattgaagaaaactgccacttataacttcatattctcatatttttacgcaacgtaactttgacggaccaattaagctccaaaattcaatatttcaaagctattaacacatctttttttttttagaacatgagttataaatagttgaacctatagtttaaatttaaactttatagagaatttgaatagttgtgtgtcttgtgacataaaaaaacataaagaaaagttaagtacaaggaaaaataaacattatttattcctctctatctctctctctctctccacctttccatttatattaaccctaatattgtgtcattctcaaaaaaaaaaaagttttataaaggttctcaactcaagttctcttctctaaaaaacccaaacaatggcctctgcagacaaactcataaacacagatgtccctgaaaaggacgtttttgccttccacttcctccaatccctctcaaatctcagaaaacaaaacccttttgatactccggaccaaaaaaactaccgcgtgaggaagatctagaaggctgcgtacg

SEQ ID NO: 2171 - DNA, 579 bp, Arabidopsis thaliana columbia
ttcaattatgcatcaaaaggaagaacggcaaacctttcagctgatcaacaaggcctttcagaatcttctgctcacttttcagcttcttcaattctgctgcatctttctccagacccactttcgcctgttcgatttcctgtctccttattacaagcccttgattatatgtttcaattttcttcttcagattttctcgagcagcttttccagcttcccagcatgtattttggcatgatacgtgaccatcatactcatcacttccatcacaacaatctgctcccataggtaaacaagccataagtacgaataagctaacacttcaacaacttcttcctctgccatgcatttgaaaacacaaatgcttgcaaagaagaggttcaacaaaatttaaaatgtaaataactacagaatttgagtaacataccacaaataccatcattaactctggaagaaaacaaaatcaccggagagtggccggcgttccggcaatagaattttccagttggacaagctgaggtacctggagtttttccacataaagcaaacaaagcaaaaagatgatcatccatacacatatac

SEQ ID NO: 2172 - DNA, 499 bp, Arabidopsis thaliana columbia
gtccttgacaaagaactgacgaatggcaatccaaatcctcccattgcaattcctcacaaagactctccgattcttatctaactggaatgtaaacaaaacataacatcataaacaaatatcacaacttgatccaaaccctaaaactcatacgaactgctacagacaaaaaagagatgaatagtagagagactaacattgcagatgaagatgtcctcaatctcgtccgctggctttgccactttcttaggcggcgcgtgggtctcagattcgtcgcggtcgtctgatgctctgacatcctcgtctttcctttttccgttctcagacattttcttaacctctaaaaaaaacactcttctactgcaaaaattgactcttgagattctcaagttaaataaaaagcacctctctccttttctcgcgtaatatatctactgcgttcaccgaattacaactgtgatatcagattcggaacgcctattttcaagcgcacagtttgaga

SEQ ID NO: 2173 - DNA, 591 bp, Arabidopsis thaliana columbia
aagagctttccaagatgaacttgagtcgtaatcttgatggagattcggatccataatactttcaatatcaccatttgcaagcatagacttggcccattctactatgtaagacttatcacgcgattgttcaatcacaggttgaccagtgatactttcaagtaacacaattccaaagctataaacatcactcttctctgttaaccaattctttagataatatctgcaagaaaagtaattgaaatattttggtttttgtttactaaacatacaaggaaacatatcctgaatactataatgtgatgtgaactagaacttactcgggatcaagatatccaagagttccagcaacatttgttgatacatgagcttgacttcccactagaaaagatcttgaaagtccgaaatcggcaagtttggcttcaaaccgtagacctaacagtatattggtactttttacatctctatgtaccattggcggctgacatccaatatgcaagtactcaattcctagtacatagaaaaatcttcatatgttaatcataaaaatgaagtctcgagaaagaagaataaatcaccttgagaaaaagtaca

SEQ ID NO: 2174 - DNA, 609 bp, Arabidopsis thaliana
ctgctatcttctcctcttcctattgttcgaaccgaccaatattctaagtctaaattacacgttatttgcttgcaagaagaaatatcatagatttatatatatgtatgtagaaactcatgtttagaaatcaattacaaacatgtacattgtattaatgattcaacattgacattattgaatccttctggtctctctacagatctttcttggcttcatagtaaataattcagaacttagatgtctagttcaacgggccgaggagctgcttcccttctcaacaactctaataaattttgtcgattggttctgtacatcacttctagtgttggtttctttctcattcccactatcattgctacctttgttgtgctcagttctttctctctcggcttcacggtacttgtgaagatgcctacccacggcgtcacgatagttatcgaggccgagagtgctgagagcccaccagatgtcgtctccattcaccgtcttccgattctccctgtggcacttctctgatgcttcgcatgtaacaaagcttatgaactctgttgcacattcttgaactgtttgttttgcttcttttgagatctttgcatttgatggtaggat

SEQ ID NO: 2175 - DNA, 548 bp, Arabidopsis thaliana
tccaaatgggtgtgatgctaacaatcaagatgttctctaagaatgagaaatctatgcttgagtatctaaactgtgttaagcaaatctgtgaccagctagactctattggttgtcctgttccagaaaacgaaaagatttttggggtcttgaatggtttaggtcaggaatatatgcttgtgtctacaatgattaaaggttctatggatacctatcccatgtcctttgaggatgttgttttcaagctgattaattttgatgataagcagcaaaagtatgcagaggttcctaatgtttctcctcacttggcttatgctactgaatcaaactactcaaagtggtcaatctggtggaaatcgaggtcgcaacaactacaccactaaagggagaggtttcctcaacaaatctcaagtggctctccctctgactcaggaacaagacctacctgtcagatctgcaacaagtatggtcattctgcttataagtgttggaagcgttttgatcatgcttttcagagtgaagacttcagtaaagcgtttgctgcaatgcgt

SEQ ID NO: 2176 - DNA, 698 bp, Arabidopsis thaliana
tgattacaagaaacttaaccctgatcctctatatgatgtcaagctcaagtctctagcaaacaagaagaagtggcgtcaatgtgtccagtgtagcaacttggttgaactttttgaaggttgcaaccacataacttgcaggtatatatatatatcgcatccaattaagcctacttcaaatcgtatgaatacttgtatttcacaatgtttttgtgtgtgcattgtgtagatgtggatttgagttttgctacgtatgtgggaaagaatggaaccaacgaggatgcctttctcctggttgcgatgatgatgatgatgatgatgatgatgatgacgatgatgatgacgatgatgatgatgatgacgatgatgatgacgacgatgaggatgatgaagacgacggctatattgacagcgatgatgatgatgttgacggagatgacaatgatgatggctcagaattagatgggattaactttgaagattttgcggttcacctacccaaagatgtcaatgagcagaaagatgagagcaactgaagtgctaggagaggtattaatgtgaaagtcatgaaatgttttctatgtcagtttttcttttgaaatttagataataagataagtcatgtaatgctaaagacctcttaaggaatttgtaagcctatgcgattgttgtatcgaattcaccaagaaatatgtttttgt

SEQ ID NO: 2177 - DNA, 745 bp, Arabidopsis thaliana columbia
catctcgaatgattaattctttctcggtcaaacccccaagaaatttataaaattttacatattaatatctaataagcaaaatgattgatagtggatggatgaaattcatgatgatgatatcccgagtcgaatcacagtcaataccctagtttagtcgcatgcccagctatctttattagagtttagatcataattattctcagccctttcatatttagtctatataaatagacaaaaccagattgtatataagtaggggtgttaaaatgggtcaaaattcatgggtcaactcaactaatgaaccctaatgagttgaaaattttgactcaaatgagttgatgggtcaaatgagttgatgagtcaattggtttgatgagtaaaataagttgggttgtaatggttaatggtttcaatggtttacccaattaacccatcaaattttgtaaaattgaattaaaccaactaaaatctctaaatcaataccaatttaactttaaccaacacatataaaccaatttaataaaattaatatttttctaaatttcttaaatatacaagcgatgaaattgagaaaaagtaaactcgtaatttttccaccaaaaaacataaacccgtgattttcccgccaaaaacgtaaacccgtgattttcccgccaaaaacgtaaacctaagattttcccaccaaaaacataaatccataattttcccgccaaaaacgtaaacccgtaattttcccgtccaaaaa

SEQ ID NO: 2178 - DNA, 932 bp, Arabidopsis thaliana columbia
aggggtctgacaccattagagaactcaaggccaagcatgaggagaaagaaggcattccagtagaacagcagaggctaatctttcaaggcagggtactcgaggatagtaaagccatatctgactataacatcaagcatgagtcgacccttcacataacgttacatcaatgtggttgctaaaatgtaacttgttttcatttcctgttttttttgtttgttttttttatcgtttctaaagacttggtgttcgatttccaatcaataaaattgcatgtttaatttattcaatgacgttacaaggataatgatttatgaaactcaacaactatttcttttagccctgcgaattaaacccgacccggtttgtccacatctgaggtttgggaaaatctgttcgggttcggttatttgatgaaaccgatcggaaagattatataattgagatcggttatttcctcgattcggttaccttaaaatcttaacctaaattactaatgagccgtaattctatcaagggtatggctcccacacatcgtgtatattatgactaactaaaatttatttaacgactcttattacgggcaatacaccataaaatgctgtgaagctccgtagctatccgattcaccattggagggaaagtatcacgagtaactttttgttatcgtcgtaccgaaaaggagaaatttgaaaaggcgtggacaaccaatttaacctcctaaattccttaaatattgattttacagagagtttactaacaagtaacaactgaagaaaaacaaaaattgcaaaaagtaaatatccgaagaaaaaaaacacgccaaaaggcagcatttgcttcttcacaataataataaataaacggtcaacattacgaataaataataacatgggaaattgtaaacaaattaaataactcactctccaaagatg

SEQ ID NO: 2179 - DNA, 761 bp, Arabidopsis thaliana
cttgtggtttagaggctcttccctctcaaacttgggtgagccatccgtgtttaaatgcctcaaatgtagctttgggattttttagataccctttcattatgctacttcctttaatgaggatttctcccattgtctttccatcgcgcggacgactcttttgcgtttccttgtttttcacgtcaacgtcagctaggcctaagatgcttatcccttgcctggcttttaattccatctgttgattctctggtaatctgtttcaattgagtaataagaccttttaaattttggtaaacgataacgcaaagggaaacttataccgtatacatgagaataaatagtacaaatgattattacctattccactcatcttgccactcacaaaacaaaattggaccagtggcctcggtctgcccataggcatgcatcacttgaaaccccaaccgttgaactttcttgacaagagcagcgggaggcggtgaacctccggtaagcacatggaccggtccagatctaggtgacaggtcaagtgaatttcctttcagaagaatgttgaaaaccgtaggaacacaacacatatgtgtcacgttatgcatttctatgtttttatagatctccggggcagtcacgtgcctcatacacacactggtacccccacgcgccgcggttccccatgtaaacgtccatccattgcaatgaaacataggcagagtcaaaggtagacagggcaggtcgccattcccaaccaataatcgcgcttaatg

SEQ ID NO: 2180 - DNA, 503 bp, Arabidopsis thaliana
gatattattgccaggtccgttgcgtcaggaataataactttgagttgcgtaaaaaaaccaacgccaagattcatcattttcagtgtcaactacaccgaaagctaacgaaaaaatctgaaaattaccatcatgagctagggctgtcaagagcgtccctttgtaactaccatggagaaacgtaccgtcgacaacaacaactctgcgcatgtaatgaaacccagcgatactggcaccaaatgcaatgaacatatagttgaatcttctactctcatcaatttgaagacgcgcgactgtacccggatttgcccgtcttatcatgtataggtaagaaggcagttcttcaaaactactatcatgggtccccagagtgagctcccttgcaaacctcagcgtcttgtatgactttgaataactcatctgttaacacagacatattaatcgataagtcaaccataatatatttacaacgcagtcaaactataccacaactcagccacaaagtg

SEQ ID NO: 2181 - DNA, 921 bp, Arabidopsis thaliana
ggttttgaagcacttgataagtagcctatcttgtttcttgcaccacctctgcaacttactgttgtttctgtgagcttcactcaagctcttgctctcccgcgctggaggtacgtgctcactgaaatgatacatgctcgtatcatactcctcctccctatccttatccgtctcagcaatatcatcctctgtagctttcgtcgtagggacattgtcatcagtcggtggagtagaggtaatcacgcgcaggtctgaagtcaatgttctcaccctgaagtatggttgtggcctcgatgcagggaagcaaaatgttggctgttcgggtcagggagtgctcgaatttgtagcgatagcaaccatgtcgtattccagaaactcacaacgacgcaagtgatctaaatccatcatcctcggatcaaaccctggagatgtgagaggtacaccacatgcaatcagaatcggtgtcacaacgccacccacacaaagggctcctcgcaccttcttcttcccgttggtgtgcgcccacttcctgtatccacacatatggatcaacagaagcatgaccggtggtgtatcattaaggtcgccctttaggaccttcttcccctttgttctccggagaatacccttgagtgcagaatcaatcatctccatgtctgtgttagacacggtgcctgtagattccctggggtacagaacattcgctactgagcgctgatagtagcggatcacagggcttggaatctggttgctcttagaccttgcagagttgagcgccaaatcgttcccaatggttaaccacaaatccttcaactcttccctttcgaacttgggtttagttccctttccactgggaaaaccaaataatcctccaagctcttgatagatagctggtaacgctgctcgttaactgaaaaagtcaag

SEQ ID NO: 2182 - DNA, 525 bp, Arabidopsis thaliana
gatcgatctgcgtaacgtcgtggatatggaaacatttcgcaattacgaagctcaaacaaatacgaacatggctcaaatgcattcacgaatgcgtctagcagtgagcgatgctcccgacatagatcgagtgatcgaagaaatcaggggcaccttgttcacggataggatcgcccattatcgcatctaagacgtcgggagactccgtttcccggagtacgacggaacgagcgacccaatggctcatctcagatccttccgtttcgctataacacgagcattcctgacggacgaagaaaacgaaccaagtcattgtcatttctttcagaaaacctcgtaggtcacgccctcgaatggtttgctagtctcaaaggaaacctaacttcagaacgaatccatgcgatcttacatcgaaaaattcaaaacaatcaaatcaaagtttgcgaacctaaacgacgaggtagccatagccgcccttcgcaacggcttgtggtttcctctagattctgtgaggaactcctagtaggc

SEQ ID NO: 2183 - DNA, 637 bp, Arabidopsis thaliana
gagaagaataaaacactagttgctgaaaaccctcttgtgcttcctctgcttgcaaagtatatgaagcaggggacagttctgactcgaatacactctgcagcgactgtgaattcactttcatacactgattctaacaagattatcatcggtaactcggaagtactcaaggctctcatacatgtaatcgaagagggtgattcattagccaccagtgaagccttttccgcgctttctaacctctgtccagtaaaggagatcagtgaaaaggcggtttcagagggtttgattcgtgcggcaatcaaaaagatcaaagcaggaagcaatgtatctatgttgttatctctcttggcatttgtttctacacagaaccaccaaactaccgaagaaatggataatctagggcttatctatgatctgttcagtatcttgaggaactcaaatagcttggtgaatgatgagaacgctgtagtcatcgtctacaacatttgtaaaagttacaaagccttgcagaatgtggtcctaagagaggagaaacgggatgtggcctagaagaggagaataacacgggacatttacgaggcttgagaccaagaagcaggtcgtgcacgagcctagcaaaaaggattttagagtggat

SEQ ID NO: 2184 - DNA, 1388 bp, Arabidopsis thaliana
caacacaatcaatcttctattttcttattttgttttcttactatttcactcacaccctgctagcttaatctcgacatttaactcactgtttgaacaaaagaactccgtgaaatcgatcctaaaatactgcaattgatctcttatttgagagagtagttctaggtagtttgaatcatatcaaccgacaaattaaaagaagccataatagaacttttgaacaaaaataaagcatcgtttgcgtggtcagcagcggatatgcgtggcatagatccaagcataatctgccacgagctaaacgtggatcagagattcaagcctgtaaaaccaaaaagaagaaaactcggagtggaacgagcaaaggcggtaaatgacgaagtagataaacttttaaagatagggtctataagggaggtgccatacccagattgggtagcaaactctattgtggtcaagaagaagaatggaaaagacagagtgtgcatcgacttcacagacctcaataaagcctgcccgaaggatagtttcccgcttctgcatatagagtcttgtggaatctaccgctgggaacgagttactaacttttaggatgccttctcgggttataatcaaataatgatgaatcccgaagatcaggagtaaacatcgtttatcacggatagaggtatttaatgttataaagtaatgctttttggtttaaaaaatgcaggagctacttaccaacgattggtcaacaaaatgttccacgaacatcttgggaagactatggaagtttacaaagatgatatgttggtcaagttgttaaagaaaaaggaccacattaagcatttagaagaatgttttgaaattctcaatcaataccaaatgaagctgaacccgacaaaatgcacgttcggagttccatcctgggaattccttggttatattgtgacaaaaaggggaattgaagccaatacgaaccaaatcaatgtttttctcaacatgccgtctccaaaaaatttcaaagaagtgcaacggttaacgggtcggattgcagctctaaaccgttttatttcaatatcaacagataaatctatacccttttatcaaattctaaaaggaaacaaaggattcctttgggatgagaaatgtgaagaggcatttggacagcttaaggcatacctaacaactctacccgtactgtccaagcgcgaagtggatgaaaagctctatttgtacgtttcagtgttgaaccttgcagttagtggagtcttgatacgggaggatcgcggagaacagaagccgatttactacgtaagtaagtccatgacaaatccagaaactagatatacaatgatggaaaaactcgcacttgcggttgtaacttctgcccgaaagttgcgtccatattt

SEQ ID NO: 2185 - DNA, 747 bp, Arabidopsis thaliana columbia
ctaatccaaaatcaaatatgtatctcacattgatcatttgataagaaaataacctaccgacaacattatgtagacgagaacaacatgaaaggaactcttgtgcaagaaatgcttacattatatacacttgatagtgagttcaaaatgttgcatgtttgtattttggatgcaacgagtatagcaacggttcggattttactagaacgggcatattagggctagggttggaaagtactccattctggggagtttggctcgaagttctctttttgccttggtcggatgagagaatctagaacctctcacaatttaatccttggtaatgatgtcattttcttgtgtgatggtgtggtacacatatggacgataactgatataggatcaaattaacctagactactctctcaaataagaggccagttgtaatacttaaggatcgatttccacgaaacttttttgttcacacagaaggttatagtatcgagactaaactaaatcaataagtaaaaataaataaagagaaagcaaataagcaagcaacaaattgtatgtgtataaattcagatgattaagacgtcaagcttagggatattctcaagaaatagatgactagtagatctagctatgattaggattgttatcgaaccgttctagaactcaaatcactaatgtaaagtaacagatactagtccgcattgattaaactatgcctaataactaaggatcctaacgctagtctgcaaatac

SEQ ID NO: 2186 - DNA, 574 bp, Arabidopsis thaliana columbia
ctcaggcgatctccaagcaggaagacatctccgccacaccgaaatatcgcgaagcaatgatgcaagaagatcaccgtgtcacgaaatccgaaactcctcctcctctccgggttataatcggaatccacacgacgtatcaagaaactctgacgctccgtcgcaaccatctcttgtcgccggagacagagctaacatcgatcaatcttcacttgtagatgcaaatataatcgtagatagaggtttatgtatgttgtagataggctagacttaattagaatagagagcaagacatgttttgatatccaaagtaagtctctttcttctcccttaaaggcaaatataattcattttcatttatatgctatatatagagagagacagaaagaaatccatcagggaaatatatatatatatatatactagataaggccgcctattgaggcgggtgtacccgaaattttcaaatactcgaacagatctaaacttcaaaacccaaaaaactcgaacctgaacccgaatacgtatccaaacatatttcaaatataaatatatattagttatatttatacttagg

SEQ ID NO: 2187 - DNA, 1129 bp, Arabidopsis thaliana columbia
caaacctcttccacgggttcggcttttgtgttttgcttgagggcaagcaaaagctaagtctggggagttgatataaccctatttttactgcttttatctatgatttaggtataggttttagagtctatttgttatttctagagtattttctcgtccttttcaggtctttacatgtttgagattcatttggagataatggagcattctggaggaaaaaagagaatttatgctgatgaaaaaatctggaaactaaaaagcgcgtaggtgtcgaacgacacacccctggtgtcgagcgacaccaatacctgacggtaattgaaagacgcaacttattgaagttctgaagatttctaaattcggcctagaacattctcgtatgtttaatgaaggcccagcacgtttttaagacatatatatatatatatatctagttttcaggtcaatgtttagacccaaagctttgggaggctattccctttttctattctgtttttgcgagcaaaaccctgtggagactccctttagagaagattcttctaactattttctgttgttatattcttataagatttctattctaatcatgttgttagctacaatttccatgcttgagtagtttttctgttatgtttagggtttctcattagggatttagatgatttaatagattcccccttactaggttatttgtaggattcttcatcttgattgttcttaaagctagttctagagtagctaactagaacttgatattagataataggtatgcccaccataggtacttgctatttgattcatcatagatgagcctaagcatttaagaaagaacaggtaggttcatagaagggctctagttttgatactaggtgaactaatgaaacttgataataatacatgctttagtatagggtttctcggcttctctggttatcttaactctaagtatagagagttttgcggaacaccaccggttactctaaaatcatagtttgagttcgagaacggtgcgataacaacctagctatttctagatctactatcatctatcacctgagaataccctaaacctgactctattcccatcttatttacatcttgacctttattgcttttctttatttcttattat

SEQ ID NO: 2188 - DNA, 779 bp, Arabidopsis thaliana
aaaaactcacggaccaaaacaaagactgcagattaaaacaaagactgcagaccaaaaccaaaactattttaaaacgactttaggtgagctaacacttaacattaccaacagaccaaacaaagattgcagaccaaatcgactttatgtgagccaacacaaaacaaagacaaggagaccaaaacttttgactgtagaccaaatcgactttaggtgagccaacacttaacaaatacaagcagaccaaacacagactgcagaccaaatcgatgaatgtgtgagccaacataaaacaaagaagttcagaccaaagaaagactgtagaccaaatcattgcactagagccaacactaaagccaaataaaaatttgtctagagccaacacaaaacaaagagtgcagaccaatacaaagactccagaccatacttagcttaatcaccattcataatcttcatctgtttctagaaggagagaaagatagagcttaccagagagtctcgacttctggaataggctcctgagacagaaccgaaagttgttgtcggccaggcagggcaagtaagcgatccaacagctcttggtagtcgacattagggttttgttcttctttgtcgacttcctctccatcttcttccccgacttcctccctatctgtttccccatcgtcctcctcatcttcctcttcatgattttgaagttttggtatgaactgtgtctccggtggatcctgagcaagctgttcttgaagatgaggaatctgatgttgacgagcaggaggtgt

SEQ ID NO: 2189 - DNA, 892 bp, Arabidopsis thaliana
tgttggttctactcgacccaatgatcgagtaggctcttaagttctcatttttacttgttttaatcctgacctaggattgttactagaaacccaccatcattataatcttgcttgacttagttgtttctgtgcacatcttgattgctagcaatacactggactggattgacaccctctttaactgcatcgacatgtttgtgttttaggggaattgaactgaacacgcattcaacacataagcagacctgaaaaacctgcttatcactctctacactgcaagtggagctttaccaaggtatgacctctgatgaattggattgcgaaggattgggattcttgagattctctgtgtatggtcatgagtacaggttatcaatcaagcacttggaaggattgcttggtttccagtggaacgtgaactaagcccaagtatgacagagaagagttgaaagacttgtggatcactattggcagctctgtaccgctgaattcttccaggtcaaagagcaatcagatacgcagccctatcatcaggtacttccagcgtgctatagccaatgtactctactcccgagagatcacagggactgttactaattctgatatggagatgatcgcaatggctctcaagggaactcttcgccaaactaagaatggcatgtctctgcaaggtgaaatcaatgacacacctttctctgtacttcttctgatccatctgtgtggatacaagagctgggccgtcagcaataaccacaagagagcacgaggcgttctgtgcataggcggtgttctgacaccgattttgatcgcttgtggagtctcaatcacttttaatggactcgagccgcgagcaatggatatcgagcacctacgtcaatgtgaattcctggag

SEQ ID NO: 2190 - DNA, 600 bp, Arabidopsis thaliana
ctgattatatgagtaaaacaataaggagagcatttggatgttggaaatgttcattttctacgtggtatttttttcctagatcatttagctccacaaattcagccaaaaaataaaatatatatctctatattaaacgaagaattgaaggttatatatagttcgtatttaaatataatgttttgcagctaaggatactcatgaaaggatacctgcaagaagccgaatggtcaaatagagggcacctgccaagccatgaagaatacatagaggtcggggtagcttcgaccgcaggtgaagtgctgctagcaatgaccttcatccctatgggagatgctgcaggagtcggagtttatgaatggctgaggtcaagaccaaaactgacccatgctctctttgtgaaatctcgtctcagagatgatattgctacctataaggtaacagaagtcctatatatatatatatatatatatatatatatatatatatatgtatattttaaatgcaaattataaaaataaaatgctaataaatcttatcgtatagtatttcacgtcataaactactttttagttatttgattgataattttgacatgatcga

SEQ ID NO: 2191 - DNA, 1180 bp, Arabidopsis thaliana
  unsure (1)..(1180): unsure at all n locations
tcagaaatcctaatcactacttagacaacatgcttaaagacaataacatagaaacgaaagatgaacaagcaaatgaaagcaaaatctgaataacttagaagaaaaatcgaaatacaaagttgtaggaatgaaaagcggctgctgaataatagtgcaaaattcgtgtctaaaaagtgcatgtctcagggcgaaacccttagagacttatttatactaagataagatagcgagcttcgagcccacttacggcccatggacagtgtgatcaagagtgtcggctcaaagtgggcttcctgatgggcttcgaatgggcttcgaatgggccttctcttctcttctctttccgatgctcaggttgtctggttgagtgcggattgatcaaagggtcgagctggtggtcgagtaggttggttgacagaatggtccgggctgcttcttgccctctgtgatcgagtaagtgtgtcagctgtcaggatggactggttcttctcctctgcgatcgagtataactggtggactggcaaagtggactgcctggtcgcctctgcgatagagtagaattgcagaatggactgcctcctctcctctgcggtcgagtatatctggcagaatggactgcctggtctcgtctatgatcgagtagaagtgtctagatggactgctgagctgactgcttccctctctgctactggtgatcgagtatgtttggtggaagtgtgactttctgttttgttttccctctttctgagcaccaatagctccaaaacacctgaaacaactccagaatgcagaatgtatgcaagactagtcctagactcgacttaagatgcaaaatgtacaaaaatgatggtgaatgctgataagtgtgtattttgcatgttttgagcatccatttgtcatcactttagcatcatatcatcactgttttatacaatttctcatcatttgtcatcactttacaatttttggatagatttgcatgcatgttgcatatttgcgttgatttcaggtgatttggagctgttgacaagctatctggaagaagcgggcctgatcatatcaaacgacttgaccccgaggtcgattaggagcttcaagatctcaacagatcactcgacccccntggtcgagtagaggacatcactacttcaccacatcactcgaccacgaggtcgagtgt

SEQ ID NO: 2192 - DNA, 510 bp, Arabidopsis thaliana columbia
  unsure (1)..(510): unsure at all n locations
ggcttgtccctaataggagatagtacggtggtccacatttccctgccaggtaccataagtatgtcattgagagcccaggccaagtcttcttggagcttcgacaacattggaggagctccctcttggaagttgttgccttgagaagatggataactgtgagccttagtgtttggatttggagacattggagggactaggtgaagaggctcttgtggtggtggattatagtgcacctcttcagatcgcggtggtggatctacacgcttagtggtggagctctggaacagttccttgacggctacttgaggcggttgcgtcgcaggaacttgaaccgctggtgctatagtgaagtcgtactgctgaagtagcgaacgaggtcttccaccaggcgttgatcctcggctctctgggtaaagtaggggttgtcttagcttttgggatctctatgaatcggcgtaagcatcgagatcgagagatggatcgaagatcangagaggaagagagatggac

SEQ ID NO: 2193 - DNA, 583 bp, Arabidopsis thaliana columbia
gattctttccttcatatgaagaaaggtttgacacgtggcttgttgttggagtggttaatatttcagttaaataaggtgggactttgtggttttctgatgatgatgtcatgtcctttatccataatatagtataaaactaaagtaatcctccatctgggctcaatttaacattgggctgttaatctttttgaagcccaataatagtgaggccacaagtttttaatacatcgttagttgagtcatcgtttaggtttagttgtagccggattgtacttctctgtttactactggattttgtcttactgtctttctggtttgatctcttgccatgcttgtgtgagttcggtgtgacccggttagattggtgatcgctccttgtctcgactcaaaagatctgatcgagatctcgagatctgcttaatttaaaggtttctaccgagacgtttcaaagtcgtcttttcgacatcatcgtttccgggagaagtgtgaggatctaggcatttttgtcttgattccatctcgctggattagaagcacaagagcgtttgagttgtgaggtaattaattatacgctataggagga

SEQ ID NO: 2194 - DNA, 582 bp, Arabidopsis thaliana columbia
cccttgttggagcaatggcaaagcaagaaaagaggggagaaagagaagaagcaaaaggggtaaaccgaatggagcaaagtacgcggttggtttagcattggggatgagtcttgttggtgctggtttgcttcttggatggactgttggatggatgcagatgctatcgttctagtttaaagagaagaaaagagacaaaacttcatcttttttctcattgaacagcttgatgatgttgaaatgagttaaaagattggcttcgaatcagcttttggatttcgttaaggagagaatgtaaattgttgtaagaattttgttaatattgtgtttactagtttgatcttttccttcaaaaatcatatgaaattatcttctttaatgtgtaagtaagtatctttcatgttcatgtaatatctgcatatattaactactgtacagtgtatatgatctttctttcatgttcctagagcttcgatttcttgaaaatttaaaatacttagtaattttttacctctggaacagaatgagaaagagaaagatatacagtatatatattttctaattacggcaaaggtgattataatg

SEQ ID NO: 2195 - DNA, 571 bp, Arabidopsis thaliana
caacctccgcctccctttcaagtagctggattacaggtgcacaccaccacatctggctaatttttagcagagacaggatttcaccacgttggccaggctggtcttgaattcctggcctcaagtgatctgcttgcctcaacctcccaaagtgctgggattacaggcatgggccactgcacctggcctaaatttagcttttatgtgtttgatggagttgtctcaaaaacagaaggatgaacctttctagcacagagttggagatgaaaggcgtaaagcttgagatagaagttggagtgggctatgcagatctgtacatcctgtacaaaaatgtaatagttaacacttaacccgctttgtgatattagtgaaggaggaggggagagtgaaaggagcttaaaactgtccaggaaaatccttccattaagtgacaaaacagggatgagtaaagggagtagtggggataaggaaagggaagtggctgaagagactatcagattcagtgacgagaacatgacaaatcgattctggaacccaatcttagacaagagccagggagaccagtgagtatgtg

SEQ ID NO: 2196 - DNA, 481 bp, Arabidopsis thaliana
tatcaaatttgttataactttcagttatcctccaaagtccaaatattcaaagtgaattattcatgggttggatttaacaaaaataataatttcgaggttgaaatgacaatagatatttttaaaacaaaggaccaaagtcgaaataacaaaactcatcggccgcattaggtttggtcctaaatccctaaaaccctaaaaaaacacaatccctcttagaaacagagagcttctcttctttctccattattcatcactttcttccccgaagatgcgtcctttagacgagaccgagacaaccgtcgtcttcgagaagctcttcaaattcgtcggcaacaacctcaagaagatcgtcgagaacccatcagacgaaggacccgaatctacacccggcagctactgcttccgcctccagaaaaacagagtctactacgtcagcgaacgcctcgtgaagcgagccacaaacatctccaggaaaaaccta

SEQ ID NO: 2197 - DNA, 516 bp, Arabidopsis thaliana columbia
ataactccatggttttgaacagaatgtttgcactggcctgtgcttgctgtagcaattcttgcttctgttgtgggaagccaagcgatcatcagtgggactttctcaatcataaaccagagccagtctctcggatgcttccctcgagtcaaagtcattcacacgtccgataagatgcatggtcagatttacataccggagattaactggatgctcatgattctctgcatcgctgttactatcgggtttagagatgtcaaacacctgggaaatgcatcaggtatgagattcttttatcaactcaagaattttggattcttcgactttgagattatattcctttgtggttggttgcaggtttggctgtaatggcggttatgctagtgacaacatgtcttacctcattagtcattgttctttgctggcacaagcctccaattctagcgctacgtgtccttctctttttcggttcaatagaacttctctacttctcggcctcactcaccaaatttcgtgaag

SEQ ID NO: 2198 - DNA, 571 bp, Arabidopsis thaliana columbia
  unsure (1)..(571): unsure at all n locations
tcagttaaaagccctaattcggactatttgatatatgtatttaggttttgaatcaacatgcagcgtataaaaacatcatcaagagctactgattcagctgcaagacatggagagaggcatgaggcggttgttagctcactcgaaggattgggttaggtttgaattcgacaaatttgggtgcatgtctgactcacttagggcatattgtgagaaccatgatggtgtagctgcaccttggaatccgagtcacccaaaaccatcggcactaatgctgaagttgttccagacgaagagaagtagatataaagatggtgatataatatcattagttttcatatctgtggtgtctttattgatttcatttgatatgtttttggtggaacttgtttgcggatcatatttctacttctgtttagtttactagttttgtttgcggaactcgttttatatgatttcgttgaatagtttgtgttgtttccctgaagtttctttctcttggttataatttacgaaatattgaatgacttataacagtntgccatgattgataacagaagcgaaactgtttatg

SEQ ID NO: 2199 - DNA, 825 bp, Arabidopsis thaliana
gtatatttccatttcttgaaattagtaactgaagatttctgatgccattagagagaccaatctgtttatgactccgttgaagtcatctaggactgatagtgaaatttcttcttcttattcatgattgatcaaccattagatggaggccaagaactctgtaatcggacgggaaaactgcagagctaaaggtggtaatccaggattcaaagtagcaattcttggagctgcaggtggaattggacaatctttatctttgctgatgaagatgaaccctcttgtctctttacttcatctctacgatgttgtcaatgctcctggcgtcactgctgacgtcagtcatatggacactggagctgttgtaagtatctctcttaaactttgaaaacttcacataagattacttcttcttgctaatgaatgagtaatgaccactcttgattgattaggtccgcgggttcttgggagcgaagcagcttgaggacgcgctaacgggtatggatcttgtgatcataccagccggtataccgaggaaaccagggatgacccgcgatgatctgtttaaaatcaatgctgggattgttaaaacactatgtgaaggtgtagcaaaatgttgtcctaatgctattgtcaacttgatcagcaaccctgtgaactctactgtccccattgccgctgaggttttcaagaaagctggaacttatgatcctaagaagctccttggagttactacactcgatgttgctcgtgccaacacatttgtggtaataatgcctaatgattcctcactccatttggttttgttgagttttaaacactaagaattta

SEQ ID NO: 2200 - DNA, 707 bp, Arabidopsis thaliana columbia
caatttaatagcatgtcaagaatgttcacactagacgacgtgtctcacacttctatatacgttttcaaacaatgaagagaaacaaagtttggttgctctgtaccgctctttgcctttaataaagaatcatgaagaagtgaataacttggctaggtcaagaaccaataaacattctccaatcgctttctcatggacattgtttctcagcacttgagcgaggaatagccaaacgcccgtcacactcacaaacgtcagaactacaagaccagagacagcccggtgcggtggcctcaaccattgtgttctcttcaccgctatctcagtggcagtggcagcaccatgcaacacaaagaaacaagtgacttcccaagttggaggcttacggatcatgtaaaagtagagcagctcatgcatcaagcctgagacaaagaacgatgccatgaccccagcaaacatagccccgtctggactgagtatgcgtttgaaaaaacgctgaaccggaatgtgaacggttgagcgtaggacggctgaaaccatgaggttccatctgcggctccagaagtcttgtagggaggtagctaggtagggctcattgaacaccggctcgatgttacaccaagaagagtagatacacggctccacaaagaccaagacaagttctactcaaggtaaatatggagacaatagagaccaagacaacaaaccga

SEQ ID NO: 2201 - DNA, 474 bp, Arabidopsis thaliana
tgacatcggttccttcagggaatagagcaagccataagggttcttgaggatccttaacagatgaaagcatttgccgcacaacaggttcgtcgacctcccgcctcctctccaccgggacacattccaaaacatgacagccccaaccaaaaataggtaatttcatcaagctgctcttgagcacgtatttcatgtagccaagacagccttttctcaaggcaatattccacagatacatccaatccacctccgtcctgtgatttgcaataagcaaaacacgtttctcaaccggaatgatgtctccagagaacaccacagttgtcccgttaaccgtttcacacaggtaaggccacaaagctaaccagagaccaaagattaacgaaacaacttttctagattgttgcacactcagaagccgtagacctagagcagctattggtgcaaagtacagcagaaacataaaagcagtagacagaa

SEQ ID NO: 2202 - DNA, 906 bp, Arabidopsis thaliana
gttgcggttttgcaatgtagagtcgactgatctctggtggggtcttgtatgatatttgtgtattttgtttattcttcattcttgtatgatattaagatttattagtcctagtagaatcaatcattattgttattttggtatttcaattgcactaaacggtctaacagagacaaatatcgatccaactaccaagaaacttaaatagaaggcttcactctcttgcttctttttgcagaacctgaaattagctgcaatgtcttcttcaagtacccttatagcttcttttgcttcatgtctacgcataaacccaacttcctctcttatctcagcatttctttatatagttatttaggaacaagtcgtaacttctgtagaattcaagttcttaaatttcgaagcagacaatgaggcctaaagcaaatcaaaaccacaagctgaaggttctccttgtttttcttcttgccaccttaattctcatcttcatcgtgagatcaactctgacatcttcacaggaacaccagactccacaagagacaagatcaacgcgttgctctggtgcctgcaataagctaccacgttccctcgcacaagccctgatccattactcgacctcagttatcacaccacaacaaacgctcaaagagatagcggtaagcagtagagtactcggcaagaagtcaccctgcaatttcttggtgtttggtctaggccatgacagcctcatgtggagctctctcaactatggaggccggactgtgtttcttgaagaagatgaagcatggataaaacagatcaagagacggtttccgatgctggaatcgtaccatgtaacatatgacagtacagtcaatcaagccgataatctcatagaagtcggaaaaggacctgaatgcacagccattggag

SEQ ID NO: 2203 - DNA, 349 bp, Arabidopsis thaliana
ccctagcttcttctgttgattcatcgtgtgaggctcttgcggctccagcgtacagcactggcctcccaccacggcccaccaggctgtctctcgcggggcattcatcgctgcaagaccagtcacagacgtcggtcttcctctcaggcacaacgacggacagcatacgcattcctggtctgtccttagccacaagtcttgctgtgcttcctcctctggttaggaccatgatgagagtggctctagctgagtcagcagttctgacagctgaagatgcaagtcactcgagtggagtcattggaactggagagtacagcatgactctcttgaagacatcaccgtagtcaagggt

SEQ ID NO: 2204 - DNA, 1131 bp, Arabidopsis thaliana
aatagaacaaacgaacaagcttatcacaaacagaaaattttccatcaattttccgaaagatttgaactttcaatttgggtttaagatttaagagataactactcaaagctaaacactttcaattgtaaaagaagaagcttttaatctcacttgagcaatcgaagatcggagatagttctaggaactttgagcttgccgtattcagcggcaggcatggtgaggtaaatacaaaagagtccggtggtgaaaacgagaaagacggtgaaaaacacggcgaattcccaccgtgagagaggaaatctctccgatttggttcgtttaccagtcggtgagtcatcgtttaagagtcctttagctgccgatgaagctgcggggctttcttcgtcttttactagctgtcttgctccaccgtcacctgttaaattccgaggagccgccattactgtgtctgtaatgctttctcaagaaaacccaattttgaaggaaactgaagaacttaacatttgttggatatgtgcaatttcagacgcaaagacttgatatttaataatatttataatttaattggaaatgggttttgctgatgcacagaattttgcgtttgcggatagtatcagggtttgattggttttcccgctgccgcccgcaaacgctgcgtttgtgggtggtagctgttattagcggttgccatcaatcatagaaattgctagataccgttttggaccgcttgaaattgccagatttcaaaagctccttaccgcaagcgtttgcgtttgtgggcggtacggttaggttaaaaaaaattaattaattaattaaaataattatgtcttccacccaaaccctatacttattcttatcagaaaaccctaatcaatgaaaccctattctctcaattatggcattcacccaaactgacgaaaatcaaagtcaaaatcaagaatcaaacgtaagtatgatctatcctttcatccattcatttgctagtgtaattctcgtaatatttcatggcatcgttgtttttatcttttttttgagttttttcattgaatacatgtttttgatttgttttctcgattagaaaatcatttggtcagacgagaccacatttgcgttacttcaacgggttat

SEQ ID NO: 2205 - DNA, 540 bp, Arabidopsis thaliana
ttgttcatcttgttctatctctgtatcttcttatttttaaatatgtcaatgtgtcagctcaataatgtttatgcagtgaaaaaattatcaccccaaaaaaatatttttcaagaaacatgcaataactgacacagaaaaaaaaaacgaatcaagaaacagtcattacattacacgaatcatatgttgggccttagtttagtaatgggcttataaacccaataagctcattttagccagaaaaccctaactatctcttctcgtctggagatataagtagaatcattttttgccgccgtttctcgctaacacaccgaaaactgaatcaaatctcctagctcttctacgcaaaatcgagtgcatcgacaatggcggaacgtggtgtcgaacgtggtggagatcgcggcgatttcggacgtggattcggtggtcgcggcggtggaagaggtggtccgagaggtcgtggtcgccgtgcaggtcgtgctccagaggaggagaaatgggtgccagtgactaagcttggtcgtctcgtaaaggaaggta

SEQ ID NO: 2206 - DNA, 671 bp, Arabidopsis thaliana columbia
ctatactgaatacacaaatccgttatcattgatcattgtcgaccgacaagacttaagatcctcacaaaaacaaccacaaaattctaattgcgatttggcatccacaatttggcgctagaaggagggtaagttaagtctttaacttcagagcaacgatcaattcaccatgagcaacaccgacggtcagagttccggcgactaaacctccaccctcgacgacatcaagcagctgcttcagcagttgtcagagaaaaccgaccggcaacagctcgcagtaacgacactctccgataagttcgtgtttttctaagaacattgcaatggccagctcgcagctttagcagcaaaccattccgagatcagatcagcgcacaatgcatacgccgagcgggttgattctctttctgcaggaacggcgcggactactggagctcgaacgcgactcaactttcagggtgtcgcaagcccaagcgtccagaattcgcaggaagcttctggccagcaatctccttcacctccagttgacgtcggggcaacgtcgacacagaatccagtcatacaatcttcaccagcaggccttgcgcagtctcagatgggacaatagctcggacgccggctccactggatccccatcagactcccgatttctaatcccgacaagagcaaacaca

SEQ ID NO: 2207 - DNA, 818 bp, Arabidopsis thaliana
cgatgattactcttctttggagcaggttagctgagtctcgcgttggtttttagtggaatctagtgtgtgttctttgatgattacaaaacttgaaaactgtagattctcatgggtttgacagaaaagattcacattatgttctgttttcgttttaggtgacggaggctcttgcacgggcgggtctagaatcttcaaatctcatcgttggtattgatttcactaagagtaacgaatggacaggttggtgagattctagattctgtctttgtgtaatgcatcaaatggtttcactctcaaaatcatactttgcttgtttgataacaggggccaggtccttcaataggaaaagcttacacttcataggcagtagtcccaatccttatgaacaagcgataactatcataggaagaaccttagccgcctttgacgaggacaacttgattccatgttatggttttggagatgcatcaacacatgatcaagacgtgttcagtttcaattcagaggatagattctgtaatggatttgaggaagtactttcccggtataaggagatcgtgcctcaacttaagcttgcaggtttatttcttttccttatttggccgcattttcatgaaatgctagctaaattcttaaatgtgaatgttgaatacttctgcagggccaacctcctttgctccgatcatcgatatggccatgaccattgttgagcagagtggtgggcaatatcacgtcctagtgataatagcagatgggcaggtacgaataaaaccagtatgactgttatgaacctttgtttttgtgtcaacaagaagaaa

SEQ ID NO: 2208 - DNA, 1023 bp, Arabidopsis thaliana
gtaacggacgccagtgtgctctaaagcaatgaacagaccgataccgctggtaatacccacacgcagactcaccggaatgttggctatcatccagtagcgaacgcgaaaatcgtcagtaacagcagacctatcgcgccccagaagattgcgcccatcccgacctgccacggcaagcccatcgcctgtacaacgacaaaagcgaagaacgcattcaggcccatagcgggtgccagtgcaactggcaggttagcaaacagtcccatcataatactgccgaatgcagcgatcagacaggtagtgacgaagacggcgctggtatccatgccagcaacgccaagaatttgcgggttaacaaaaacgatgtaaaccatcgtcaggaaggtggtaaaaccggcgatcacttcggtccgtgccgtcgtgccatgttcgcgcagtttaaacacgcgttccagcatcccctgaccagaagtctgggtggtatgttgatgactcattatctatttccgaacaaggagggaaaatccgtcgctatcgtataccaaaatgcgacaataggcgcgtttgtgagagacttttttattggatttacttatacggcaacgattgcgttcgcaaatcggctctacgaaaacgttaaactgattaaaaaggaaaggcatgtcccggatagaagcggtatttttcgactgcgacggtacgctggtcgacagtgaagtcatttgctctcgcgcatatgtaacgatgtttcaggaatttggtattacgctcgatcctgaagaggtattcaaacgtttcaaaggtgtaaaactgtacgaaattatcgatattgtttcccttgaacatggtgttacgttagcgaaaacagaagctgaacacgtttaccgtgcagaagtcgctcggctgttcgattcagaactggaagccatcgaaggggctggagcgctcctgtcagcgatcactgcgccaatgtgtgtggtatctacggccaaatacaaaatgcacatctatgggcaactgaatatg

SEQ ID NO: 2209 - DNA, 1032 bp, Arabidopsis thaliana
ctagaggatcccctggttaaatccatggaagaggaagaacacatatcccatttgcgcgaatgtttccagcagctcaacctcaacaacgtcaaacttaacccagccaagtgccgcttcggggtaagatccggtgaattcctcggatatctagtcacacatcgcgacatcgagggaaatctgtagcaaattgaggcattattaggaatgatatcgcctcaagacaagcgagaagtacagcgcctaactggaagagttgcagcccttaaccgattcatctcccgatccaccgacaaatgcttggctttttacgatgtgctccgggaaaacatgaaattcgaatggacaacccgatgcgaagaggcttttcaggaactcaagaggtatctggcgaccccaccaatcctcgcaaaacctgtagtcgcggaaccactctacttgtatgttgccgtgtaggacactgcagtcagcggagtgttagttcgagaagacagaggcgaacaaaaaccaatttttttacgtctcgcagacgttcaagggcgcagaatcttgctacccgcaaatggaaaaactagctttagcagtcgtaatgtcggctcggaaacagtgaccctattttcaatcccactccatcgtattaatgggatccatgccgctccgcgctgtcctacatagtccaagccaatcgggatgcttggctaaatgggcaatcgagctcaacgaacatgacatcgagtataggaacaaaacatgtgcaaaatcacaggtcctagccgattttatcgtcgaactacccacaaaggagacccgggagaacccgctcgatacaacttggctaatgcatgtagacggctcgtcatcaaagcaaggctcgggcgtgggcatccatctcacttcgccaacgggagaagttctcgaaaaatcattcagattgaactttgaggctaccaacaacgtgggcgagtacgaagcgctcgtgatcggacttaatctaactcgagggctaaaaatcgcgaaaatccgagctttttgtga

SEQ ID NO: 2210 - DNA, 840 bp, Arabidopsis thaliana
ttttgcatgcatattgcatatttgtgttgttttgagctgatttggagctgctggtgagctaattggaagaagtggacttgatcaaatcaacatactcgaccacgagctcgagtacagtcatcctgaagttccggaagtactcggccacaacctctacaggaaattcactcgactgcgacattctatccaccactcaaccacaaggtcgagtagacgacttccccacttcacaacaccactcgaccccctggtcgagtagctgccttcaccatcatcattcactcgacctatcactctaccaacaggtcgagtatcaccatcatcattcactcgaccaatcactctaccaacatggccgagtatcaccatcatcattcactcgaccaatcactctaccaacatggccgagtatcaccatcatcattcactcgaccaatcactctaccaccaagtcgagtactacaaccaccatccactcgaccaatcactctaccacatggtcgagtcccttatcatcattcactcgacgtctttactcgactgccagcttcagagtcttctccattccgcactcaaccagacactcgagcacaaggaagagaagaagactttagcttatcactcgaccactcactcgaccacctgggtcgagtactgttcttaatccgtcctaatactgcgtcgttttgagtatctagggtttgagaaatatttcgctataagtagcatgcacttaacattttcgacaagaagtttcgtatctagttctatatccgcagacttagatctggtcaatgaacttgttatctagggttaatttattgagcatgccaatcacct

SEQ ID NO: 2211 - DNA, 997 bp, Arabidopsis thaliana
ttcacaacccataaagggaagagagagttattcactggtatgagttcgtcgtttcaatgagattatacacaaaacaagattataactataatactgggttttggagactatggctggtggtaacgaagtcaaccttaacgaatgcaaggtaaactctctctccctttaaaaattagattcatttgctcaacttttgtatttctcttaaaattgaagatcatatagattcacccgtacggctcaattttattttacttccaaaaaaaaaagaagaagaggaaatctaagacgtcccatcatatccctctctaatgtattgatctctctctctctctctctctctctctctgtagagaattgtccactcaacacatgggtcctcatttccaatttcaagcttgcttacaaagtcctccgtcgccctgacggttctttcaaccgcgacctcgccgagttccttgaccgtaaagttcccgccaactctttccccctcgacggcgttttctccttcgaccacgtcgactcaacaactaaccttctcaccagaatctaccaacctgcgtctctccttcatcagacccgtcacggaaccctcgagctaaccaaacctctcagtactacagagatcgtccctgttctcattttcttccatggaggcagcttcactcattcctccgccaatagtgctatctacgacactttctgccgacgccttgtcaccatttgcggtgttgttgttgtctctgttgattaccggagatcccctgagcatcgctacccttgtgcttacgacgatggatggaacgctctcaactgggtcaagtccagagtctggcttcagagtggtaaagactccaatgtttatgtttatttggctggagatagctctggaggcaacattgctcacaatgtcgctgtcagagctaccaatgaaggagtcaaagtgttggagaacattcttcttcatccaatgtttggtggacaggagaggactcag

SEQ ID NO: 2212 - DNA, 1022 bp, Arabidopsis thaliana
ctaaagtagttggcccgattgcctttattggcctgatgatgccgcatatggcgcgttggctggtgggtgccgatcatcgctggtcgctgcccgtcacgctacttgctacccctgccctgctgctgtttgccgatatcatcgggcgggtgattgtgcccggcgaactgcgcgtttctgtggtcagtgcgtttattggtgcaccggtgctgatcttcctcgtgcgacgtaaaacgcgaggtggtgcatgatttacgtctctcgccgattactcatcacctgtttgctgctggtttccgcctgtgtggttgcaggtatctggggattacgcagcggtgccgtcacgctggaaacctcgcaggtattcgccgcgctgatgggcgatgcccgcgcagtatgacgatggtggtcaccgaatggcgtttaccacgcgtgctgatggcgctgttgattggcgcagcactgggcgtcagtggcgcgatttttcagtcgctgatgcgtaacccgctcggcagccctgacgtaatgggctttaacaccggggcgtggagcggcgtgctggtggcgatggtgctgtttggtcaggacctgacggctatcgcgctgtcagcaatggtgggcggcattgtcacttcgctgctggtctggctgctcgcctggcgcaacggcatcgacacctttcggttgattattatcggtatcggcgttcgcgccatgctggtggcctttaatacctggctgttgctgaaagcgtctttagaaacggcgctaacagcaggtttgtggaatgccggatcgctcaacggcctgacgtgggcaaaaacctcgccttccgcacccatcattatattgatgctcattgccgccgccttactggtacgccggatgcgcttgctggaaatgggcgatgataccgagtgtgcgctgggcgtcacggtcgaacgttcgcgtctgttaatgatgctggttgcagtggtgcttacgctgcggcaacagcgcttgccgggccgatttcctttattgct

SEQ ID NO: 2213 - DNA, 1388 bp, Arabidopsis thaliana
gcggtgggacccacgacaaatggttcataaagtcttcaaaaacaaataaatacgattgcattgcatatactaacgaatgtgatcataccagcacgaattcactagatcccatcagaactccgttgttaagcttgcttgggcgagagtgtactagtatgggtgacctcttggtaagtcatcgtgttgcatccctctattttttttttatttttttgggtaaaactgtatgactctgtaacttttataccgtgaggccaaacttggcatttgatacctttttggaaagcccaaagagagccctccgacgaaagaagcaggacaatggaattcttccattgattttttgtcgactccaaatttttacctttaagtattttttcggacctttccattatctatgctatattacggacctaaaattacttgttagaacattgttttcgaatatttttcatgtacaaatctcgttaagagtagtgataagtgtgcattttacatgttttgagcatccatttgtcatcactttagcatcatatcataactgttttataccatttctcatcatttgtcattactttacatctttaggataggtttgcatgaatgttgcatatttgtgttgatttcaggtgatttggagctgttgacgagctaactggaagaagcggacctgatcatgacaaaccattcgacccagaggtcgagtagaagcttcaagatctcaagacaccactcgacccccaggtcgagtagaagacatcaccacttcacctcaccactcgaccacgaggtcgagcgtctccatcacctgaccatcactcgatcacatcactcgaccccgagatcgagtgttttcaccaccattacctgatcatcactcgacctcatcactctacctggaagtcgagtatcaccttcaccaccactcgactacaccctcgatggcaagcttcagagtctgtttcattccgcactcaaccagacactcgagcacaaggaagaacagaagactccagctattcactcgacctcccactcgaccacttgggacgagtacaattcttaatccgtcccaatacttcgtcgttttgagtattagggtttcgaaatatttggctataagtagcatgtacttcacattttcgcagacaagtttttatctagttttattccgcagaccctgtgttctagaccttttgtaatccaaatttctctttatctattcagtattcagtattcagcatttgttcttgattttgtttactgttgttcattctgttatcatcctgctgttacactgttgttatcatgttttcaacttgttcaacgttaatgctttctgttatgatgtctaagtagtgaataggtttctgaggataggttagagt

SEQ ID NO: 2214 - DNA, 915 bp, Arabidopsis thaliana columbia
taaccatttacttcagttaaaagttggttgcccagttatgttgttgcgtaatcttgatcttggttgttaacattaggtgggtcttgtatatcaactggtctgttctgttgatccatagcaactggtctttgttgatcacagtctgcttttggtttttttgcttgtaactcacgagctattctttctattttgtctttgaaaggtagtatgtgtgcagaacctttggaccgagtttgcatgcacaaatattagtacctgtaccacaaaaacaaacagacgaaaagatgagttagtaacttgagtaatgtaaaagaacttgatcttaactttttctgatatcttgaatgtaacaatgcaacaatgaattggcaacggcgccaaattgataactaggtttttacgcctagttatatgctgaagtgtggtttagttcaattcccttaaacactaacatgtcgatgcagttatagggggtgtcaattgtggatgtcggattcacacactcaaatatttatttgtatagtgagacggattattcttgaggacaaaaataagtgtaaagaactattgattatggagaaagctatgagttttgtaagaaaatatgtatactaagtttgcaaacaaatgcgtgtgtctcttatggcccttggccctattatttatacctaagaattacaattaattctcatttacacacaattattctatcttaaatgtatccgtttcgatcttcgaattcattgttcaaacgttcgaatttgaattgacttcgagcttcctgggcttccccttccagcccaaaggccctttaatctaaccacctttaatcccgacttctcattcacctcgcggtatacggactgacctttcctcttcccaaggcactcgttcggtacttggccgctcttgaaa

SEQ ID NO: 2215 - DNA, 624 bp, Arabidopsis thaliana columbia
gtcctactgttgctgcttccttcactacttccttcattatctccaactggatttctattcaacaagaccataatcaaaaccgtcaaatgtaaaaaatcctggagttcttccgcgcaataaatcatatacatatcaaacaactaacctaggcttcttcaacggatcaacatacaactgaataccggataagtaaggcacataatactgcacagtggagtcattcccatgcatttctagaggatgcatctctaaaggaacaccagcaccgtatgcactccattcagcaaatgactcccaaagatcctccaaaacaaaatacgtatggcaatccgattcacgggttttaagttcccacctgctcctctacacaaaacaaattgcagcaaaaagcaatgctcataagccataatacaaaatcaactgagttctacactaaatcacatgacaaaactcaaagtcttctccaattcaactctataatatcaaacagagattacaaacacaacgaacactatagtatcaagttcaagtagccacaacagacccagaataagtatcaagaccaatagatttgaaaacagtgcttacgatgggaaataaacgagcaggaacacaggagtagta

SEQ ID NO: 2216 - DNA, 600 bp, Arabidopsis thaliana columbia
cataatttaactgaacctgattttgaatatttaggccaaaagacagaagggttttctggttcagatgtgtctgtttgtgtacgtaacttggcctgagttatttcttattgtccttaatttccccctatgttgctatagatagataagcctttgtcttgagaatctttttggctcttgcaggtaaaagatgttctgtttgaacctgttcgtaaaacacaagatgcaatgttctttttcaagtctcctgatggtacatggatgccatgtgggcctaggcaccctggtgcgatccagactacaatgcaagatctagcaacaaaagggcttgccgaaaaggtacgcatctaaactttgaatatatcatttaggttttgtatttcaagcttctctgatttctaaatcctttcaatccttacatatgacgatttctaaagactgaattgtgtatttcatgtgaataaattgcaacagattattcaccaccaatcaccagaacagatttcgagaaggtacttgcaagacaaaggccaacagtgagcaagtctgaccttgatgtcccgagagattccacaggagtttggagaagaagggtgatagatt

SEQ ID NO: 2217 - DNA, 1292 bp, Arabidopsis thaliana columbia
ccacggaatgaatctgggacatgggactggagctatgttagccctatgattgattcagcactgagttggataacattggccccgcaattactcaagtgggagaaaggaatcgaaagtgtctctgtatcaactactactctgttgtggttgtattcaggtgtcatgcgtacaatttccaaagtccttgagaaaatctctgcggagggagaggaagaacctctaccatggctaccggagtttgttccaaagattggccttgccattatcaagcacaagcttcttagtttttctgttgcagacgtaagtaggtttggaaaagactcttccaggtgttccgcttttatggagtatttgtgttttctaagagaacgatctcaagatgacgaactagcattagcttctgtgaattgtcttcatgggttaacacggactatcgtgtccatccaaaatatgatagaatctgctagatccaagatgaaagctccgcatcaggtaagtattccactggagatgatctgtgcttgcaaatgggatactggcagagtctctggctgagctaacatctgtgtcgtgctcttttagagattctgtttcatcagaatggcccatcgtgcaatcaattgagctacataaacgaggcggattggcccccggcgttggacttggttggggagctagcggtggtgggttttggtcaaccagagttctgttggcacaggctggtgccggtcttctgagtctctttcttaacatctctctgagcgactcgcagaatgatcagggatctgttggctttatggataaagtaaactccgctttagctatgtgtttgattgcaggtccaagggattatttactcgtggaaagagcctttgaatatgtccttagaccgcatgctttagaacacctggcctgctgtatcaagtcaaacaaaaaaaacatatcgtttgaatgggaatgcagcgaaggggactatcatcgtatgagcagtatgcttgcttctcacttcagacatagatggttacagcaaaagggaagatcgatagccgaggaaggggtcagtggggtaaggaagggcacagttggtctggagactattcatgaggacggtgaaatgtcaaatagttcaactcaggataaaaaatcagactcctcgaccatagagtgggctcccagagaatgccctacctccacactggtttctcagcgccatctcagcagtccacagtggtaaaacctcaacagggccaccagaatccacagagttgcttgaagttgcaaaagctggagtt

SEQ ID NO: 2218 - DNA, 662 bp, Arabidopsis thaliana columbia
  unsure (1)..(662): unsure at all n locations
gggacttctttccccggtggtgtgaaggactatgttgatgtgattctgagtgttttgcctttggcttctgggagtatcaggactgttctcgatattggatgtggagtgagttcagttacatgaatagacaccagaacttgattcatcttgatattttacagcagtattactactttcgattatgatggattccatgtgttttgttggacccaaaatgtcaggtagcgagttttggagcctttttgctgaactataagattttgacaatgtccattgcaccgagggatatacatgaggctcaagttcagttcgcattagaacgtggactccctgctatgctcggtgttttaagcacttataagctgccttacccgtcgaggtcttttgacatggtccattgttctagatgccttgtcaattggacttcctatggtaatgtgtgtatttaaatagacctgtttatatgatttagttcactgtgttttgaactgcttgcttcatccactctgcttctgatactgaaagagagaacattttatccagatgggctttacttgatggaggtggatcgtgttttatgtcctgagggatactgggtgttgtctggacccctgtagcatcaagggttanatttaagacccagaagagagattcgaaggagt

SEQ ID NO: 2219 - DNA, 1133 bp, Arabidopsis thaliana
aaagagcccaaaaactgactatgctcctgctcagatactatgttcgtatcatatcagatactatgttcgtaacaatgcattttttgaatcatgcatttttggagtatatctgattttggactataaaaattttccaatgcatttttttttttttgaatcatgtcaagaatcaaggggttttttattttctttttgggaccggcgtttacggacttcttttttttatgtgacaaagaaaaaggattgtgggttgaaagcccaaaagaaagagagggttgcaaagaggttgcaggtataactttaacttgttctgagtttccgatgagatgatctctgcctctctcctccaccggtaagagcatcgacatcaacgctcatataggataaaaaagattgttctaagggtagagacttagaaatcggactcctgagtatttgatttcatcatttcgtgaggtacttcaccctgtaaattatttatttataattattttctgtgattgtgttttttgatttccttaagctcaactcgtgtttgtgtatatatatatataaattgtctgttgatcaatcaattagagagatagagacaagaagacaatgttgaaaagagattgctcgagtgttgttggatcggaaagagagagagatggctccagtttggctttgaaaagacattgctctagtgtggtgaaattgctgctaccacacgatgttgttgggctcatcctcgagagacttcctgtggagtctctgctgagattcaagtgcgtatccaaccagtggaaatccacaatcgagtcccagtgttttcaagaacgacagttgatccgtcgtatggagtcccgaggtcctgatgttcttgtagtgtcctttgctgatgatgaagataagtatgggagaaaagctgtgtttggttcgtccatagtttctacgttcagattccctactctgcacaccttgatctgctatggtagttgtgaaggtctgatatgcatctactgtgtttactcaccgaatatcgtggtgaatcccgccactaaatggcatcgaagttgtcctctttccaacttgcaacagttcctcgacgacaaatttgaaaagaaagagtacgtaccttcaccatgatacgg

SEQ ID NO: 2220 - DNA, 519 bp, Arabidopsis thaliana
tatcatctgtcctattctcatgctccaaccacagtttatatgattccgctgctgctgcagcgcatccatcgcgcggatctgcgtatctccccacctgcaaacaacatttttcaatcacattaagaccccaaaccaacaaaaacatattgagatcttcaagagggtattttaccatatcaacaacagcttggcttggaagacactcgaaaatcccatcgcttgcaacaacaaagaacaaatggttaggcgagacatgaaccattgacacttctggctctgcaataactccaatgctctcagctgtcaaatcaccaacactcctcgtgaatgcggttcccggatacatcccgttttgtacccaaagtctcggcggatctcctccttcactctcttcgtttgcccatgtttgtatattcggatctttcaacccttccacttgatccacactcagcactctagctccacaagctttaaccctctcgcattcatctttcctaaaaggcgtttgatcgtaagaca

SEQ ID NO: 2221 - DNA, 390 bp, Arabidopsis thaliana
atcctaaagtagggttttcgttgttcggtgcacgattcttcagcacacggagaaggtaagtggttgattcgatatatggatcgtagtatttctcgacattatagctttggaaaaccatccgagtcaccatttgatcaagctcggctgcaaactccgcatacttatacaaacattcactaacatatataacccaagcaaagttgaatgtttacctatcggacaatgatagtcgaggattctcacacgttactggctcctttcacacatacctaacacgttcatttccttgtggccacatcacaccggtgaagcttctggttgcttctaacgaagtggcattatcaatgccaagactttcatgaagaggaagagctggaatctgaccaacgt

SEQ ID NO: 2222 - DNA, 526 bp, Arabidopsis thaliana
ctgactagttccagctgctcgactgcctcagcgacagtcaatggtggcatctcgaaagtcttggtacggacaatctgtagaaaaacccgcaataacagaaaacgtcatcataagatcagcaaactccaatgataaggcattagcctattaggtaagtctggaccaacctccttgattcaaaatcatcctcttcttcttcttctcctacgctcgagtcagtactgtcctcaacatcctccacaaccggctcaatcactggttcccttaccttcaatctgttgaaacctttcatgtgccttccatggtctgagtccttctccttgatcttcctcagcttcctctgtattatcgttgataccaagtcgatacaagcgtatactgtctcagcatcttcctcagcacgcacaacaccatgcttctttgtaaacaatgtcaccttaagtaccatagggaactacatattagcttctgaaagcgtttctaatatcgagatcaagtcacaacaaatcaataaaaacgacatgtt

SEQ ID NO: 2223 - DNA, 710 bp, Arabidopsis thaliana
cctgtcccgggaagagtccgaaagatatacatatggttgtaaataatttgtatatatatatatatatatatatataaataattacatacaaaataaaccaaattaaatgtggttacctgtaaacatgaccacgaatccagaagcatagcatttcttagaacacacgaagatctcacagatgaattttcaactgagtaagaaaaatttaagatctcaatggagttattatatacttatattctttcattatatagaggtgtcgagggccaatattaggtttctaattaggacccacatttgtttccctgcctataaatttcccaaacaaagcccgtcaaacacatgtaacagaaaaacacacaaacacgtctacgagataacacgaaacgcaagaacaatccttgttcattgtccaacattctcacgcctatacacaaacacatacaaacacgcaaaaagtcattaatatatggatcaaggaggtcgaggtgtcggtgccgagcatggaaagtaccggggagttcggagacgaccttggggaaaatatgcagcagagatacgagattcgaggaagcacggtgaacgtgtgtggcttggaacgttcgatacggcagaggaagcggctagagcctatgaccaagctgcttactccatgagaggccaagcagcaatccttaacttccctcatgagtataacatggggagtggtg

SEQ ID NO: 2224 - DNA, 763 bp, Arabidopsis thaliana
caagcaagaaagactttggaaaacgtagaaaacagaaatgaaatttaaaccgccccgaaaatggatccacagttgaataagtattttttaaccgccccaaaatgggttcgcggtcaaaccaaaatatctagatcgcccctaaatcgggtccacgatcgaattgttttaaaataaatacaagtacaaaatgacctctttaggtcgtttgattcttttcaccctcctcgacgctaacgtggcgaatgtcacttcggctgacgagatcgacgctggaaccatgctgatctgccacaggagcaacttgagaggattgtcttgaaaaaccgagctggtccggagacatgttcaggtcgtcatccccgaactcgatgacattcaaggcattgacctcgtcattcaccttctgagttaaagcattaagtccttctagctcggacgtcgcaatcttcgcacctctcttcatcagaatgccaaccacttcttcagcgccttaagcttgattgtgggaatccaccttgggcttaacgatgttctcttgctcgttgagataggccttcatcttgtcgaaacgagcttgggcttttctagtggtgcgtgcaaccttcgcatctcgattagtctgcagcctgttgcattccttctccccgtgctctttcaccacgacaaatgcgatctgaagatcactgatctctttcaaaagatcaaccttgcgaccattaagtgtggcgacctcgtcattcagcgagcttatctccaccttgtg

SEQ ID NO: 2225 - DNA, 880 bp, Arabidopsis thaliana
tcccccaatttttggaatatttgtaggatccactaattatatttagtaacccatcgctccaccaaaccactccctattcatttatccagagaattagggtttccatttcatcacgatctcaaatccgtttcccttcagcctagtttggtcctctttaattatcagtgattcttcaaattccttagatcattatttgttcactttcactattatactaatttgataatccaaaataacaaaaatcgtctgcgagaaaggaaaatgtacccaccctcgaccaatgtcccctactagacattactggcgacccccaaacgcccttgcccctgttaggggaaatcaatttgccgtgcagcctcttcgtcaacctttagttcattttaacctacaggtaatgtttactcaaaacaaatttcaatcaaattgaggcactcattttatatagactgaaattgatccaaaaattgcgaaattttgttttgaactagtatatagcctcacaaatttggtgttaatgttggtacgcattttctttcagcctcctccattccctgatttccacatgcctgatcatgtagcagctaaaatagtcagcttagtttgtgaggacggtgtagatatgctaaaggcttggattcaatcaggtccagatggaaaagccgttgttttttcaagtgaaaccctttcttctgtttgaatagataagtcccctttttttattcatatggctgaagaatcgtctagttttcacatgttttacaccaaatgcctcaccgcaaaaaatctgtacgccctatatcttcatagtttagtgctggcatttcatatgtttgagctccaagagttaattgctatattggatggcataaagaacgttttc

SEQ ID NO: 2226 - DNA, 1048 bp, Arabidopsis thaliana
caaattgttggcaaaaacaagcaaataatacatatttgtggggaaaaaaaaaaaaaaactacactttaatagaaagctaataacatattgttgacttatgataacttataacgtgacttcacacgcgtagtagtattacttaaaacttaggtcacgtgaactggatacttatgaaccgagtcaccccacgggttacccaccaatgactcgttagccggaatcgttctcaacgctctccacacaatactattacatttaaaacccgacccaaacgccaactgccaaaccctatctcctcgtttgacccgacatttagcctccacgtaagccagctcgtaccacagcgacgagcttgaagtgtttccaaagcggtgcaaagtcatccgagacggctcaagatcaaactcactaagtccaagacctttttcaaccgcgtcaagtaacgctctaccaccagcgtgaatacagaaatgcttgaaacatagtttaaaatccggaacatatggactaacctttaaccggaaaagcttactctttaccaaaaagaggataaaccggagtttttcagataaaggcaacacaagcggaccaagtgctgttagattcgtctttaacgagtcaccagcaacaaccgttagttctttagagagtgcgactccaacgatacctttactatcttctttttgttcagcacaagtgtagtgtttatcgctagagcctttgtgagtccttacaatatgagtcaattcgtacttagaccggactcggtcttgactccggtttgagagcataaccgcagcgccacctactcggaatagacagttagggactaacattgaccggtcgttgcctcgatacatgcttagggtcatgttctccgtactaacaataactgcgtaggtattagggtttgctttagtagatttgtggcgaggtcgacggagattgcgccggcgctgcatcccataccggagagattgtaagttttgacgtcggttttaagcttgtactggtttacgatcatggacgagagagatgggttagggtt

SEQ ID NO: 2227 - DNA, 586 bp, Arabidopsis thaliana
cgctgcctccaacaaggcggccgttttgtggaggtggatgaactctagacgctccaatccgacgtcgtctggattcaatccttggctacataagtcagtcacttgcccagccactagcccttttgtccctatggcctttgccagctccattacagcacggatcatcctctcaggggcaaccaacccatttgacacgaacgtcatgtgctcaaacgctaaagcaaggagtgcatcacccgccaaaaccgccatgtcttctccaaattccttgtttgaccaaaaaatagttcgtcactagtgagcaaatactaacatcaataaatgattcaaatctcgtgagcaattagcgtccatatgatttaacaacatactttatggttggtgggcttgcctctacggaggtcggcatcgtccatgcacgggaggtcgtcatggattagcgagctcgtgtggatcatctcgactgcacaagcggctgacatggcagtagcctcgtcgccacccacgagctcacaagcagcaatgcagaggagaggcctcacacgttttccgcccgctagtaatgagtaccgcaccgcctcttgta

SEQ ID NO: 2228 - DNA, 1405 bp, Arabidopsis thaliana
atgatgaagagtaatgagccaaataaatctcaagcaaatttggccttggaagagtaaagtctagataacaacaaaacttgatcatgttccaaacaaatctcaagagctgtccgctaaatattagataatatatcaaaaccaagagaaaacagcattgggggtggaaaacatatgaaatccgagtttagatatgcttcatggcattttattgagaagcaatatgcttattgacgatactgagggcagttgtctcctcgccgaagtcctgacaagaaatcacagaaacgtgttaagtaaaagaactatggaccatcatcaatgaatcctaaaaattagatgattcatccatgactttatataccttgacaacaagacatgagcatccaacaaccttcctggcattaccctcagaatcaatcttgcagagctgcaacaacatcaaagattcaatttgccattgataaccaaacattcatttaggaggataaactgagcgacaataaggtatatatgaagagtcagtattaaagaggaaaacatagacttacaccagcccattcgccaagggtcttggcacttggaactgttagcaacctgacttcgtgatcagcacagagagccttcacaagcttgacataatcaggctggttgcagtcttcagccaagacaacgagttgagccacacgcttctcaataagcttagcacactcatggagaccacgaacaacaccaccataagcacgagctttcctaagagtcaactccaatgcagtcattaagtccatgtcctctgggatggccgctggctcagcaacggggggaggaacaacaacaggggcagcctcatcactgaaaagtcaggacacaacacatgatatcatatacttggattgtccacaataaacatcgaaacatctaaagcatggaacaattctgatttgaaacttgtcaagaaccaactagacgcgattagaagaatcagacaagctaaacaaacaaaatgatactcgtacagcaactttctgattattccgaagcttgactaagtccacaaaacagaaatcaacaatgtaacaacagatgctatttaattaaatagataaggccacctcaaaatagaagagagaattatcgtggagtatatgaaaaagggatggataatcagagaaattagctacatgtattactgataacgcaagattcacaaatgcagttaacaacgaaggagaagcttaccctgacatattgtctctttgaaatgccttttaacgatggaaaaatacacaagtccttattatctgccaatataagtcatgcaaatgagcttagcaaacacctaaacaattaattctactagggaaaatataacgaagccaaatcggcggcggtaaaactaagttcgaca

SEQ ID NO: 2229 - DNA, 947 bp, Arabidopsis thaliana
ctaatatcttcaatttgttgcactttgcaagatgattctgaggcaatgcaaggaaggttgttggatgctcatgtctcgtgatcaaggtaacaaatcctttttacattctcttaatccatgaatcataggaacctctagatacttgcaaagtcattgagaaatgtgcctggtggtttatttgtgtggttctgtgttgattgttacaggatttcggtgaggagacaactgcactaaacattgtcaagaagcatcttgattctaactaaatcaagcaaaaaggtcaagtttacagatgctttcttctcaaaaggaaacgcattttgtggccactctttttttctttccagtcttttctgtttttgacattaaatactcagtagtggacatgtcttgagatttgtttggaacatgaaagttttgatgtttatgtaggttctttcagttcgctcatcaaggttttatattttgctttcttaccacgtagttctacttccattaaatgaaaatttcaatttcggaaaaaaaaaacaaattgacttcttggtatacataacaaaaccaagctaagacagacctgtagcaagacctaattctcctaggaaaaaaatagtttagaaattgtaaccaatcagaaaaaagggaaaaagaaagaaagaacgggttatctatataagagaggaactacagattgatcattccattattttctttcgttgccatagaaattaagaacctctctcaaccctataaaaatctgtcacttgagcattcgggtctctcatctggtgggattgtttttgggttttgattagggcttcttatttgatttctagttgttctttcttgcgcgatgggtgaaagaaaaggcttgaacaaatactatccaccaaactttgatccgaagcagattcctcggatccgaaaacctaagaatcagcacaggaaga

SEQ ID NO: 2230 - DNA, 951 bp, Arabidopsis thaliana
gctactgctattgttttcttcgagtaaagagatgatctttttcataccgagttggtcgaactgaaacaactgctgttcttgttgcaactctatttctctctgttccttgaagtgttgcctttttaggagacgactctttatcttctccgcattgttagtcgtaggctttgcctttttcttgaaatgggttctccaatagttcttgatctcattgtctgttcttcctggtaaactacgtgcaattgttgaccacctatacaaaaccctaatacttaagataaaagccatcgacaaacctaaaaaaacaaaaaaaagacttgaggttgtttgttttcgttttgaggtatttttacctatttccccacttagcgtgtagctcaagtattatactttcttcatgtggagtgatctgtcctctcttgaggtctggtctaaggtaattcacccatcttagtctgcagcttttgccattccttttcaatcctaacgatcaaaacattcatgaatcaatcattcattcatttgaagaaaaaaaaacatatattaaaacatgcattacacagaaagtggtggtacctgcgagtttagagacagagttccaacgaccttcaccgtgaacacggacgtattcgatcaaaagacggtcttcttcggcggtccatggaccctttctccaaacttcttccaccattccccatcctcctcctttcactccccaccaactcattcttcttctgattttgatttgaggaaaaatttgttctctctataagatctaccgatctcttttgctctttggctttgtcttgttatggaagctctgtgctactctgtcttaatgtcttatgttcttatatatgcactgacaaagctttcttgggtccaccacttttctccctcactatcttttttgttttgtttttatgttaagagagatggtgagggagatca

SEQ ID NO: 2231 - DNA, 1669 bp, Arabidopsis thaliana
caggttggtgattttggtctgtcaaagataaatagaaacactttggtcactggcggtgtaaggggatcctcccttggatggctcccgagctacttagtggaagcagcagcaaagtttctgaaaaggtatgagtccctaacattcttgtgcaagtaaatgacttgcaatgctctcaaattagttgttggtaatggtagatgaaaaacaaatataacccctttttgtacttatttagtttcaatgccctttacatgattttgcaagtaatatcgccatggatacttcatttacacacaggttgatgtgttctctttcggaattgtcttatgggaaattcttaccggtgaggaaccctacgccaatatgcattatggggcaataatcggtaagcctgggctaatgcaccataacatccctatacacattcagttctgacttcacgctttgcagaagtctgaatctcttaccatttgttactcgtgtgacaaaattgtaggaggcatagtgaacaatacattgagaccaaccgtgccaaactactgtgacccggagtggagaatgctgatggagcagtgttgggctcctgacccatttgttcgacctgcgttcccggaaatagccagacgtctccgcaccatgtcctcctctgcggtccacacaaaaccacacgctgtcaaccaccaaatccacaagtaatctatcaatttattattgctggtacgtaaatcgtaaaaaatggtttgtgtataaaatatttccttgctgcttctttcggatttgagtgctacagtttcaaggattggtgttgatttgtacaagaaaccctaaaagcacatattgtatagccattttcattatcattgagtgtaagtaaattgttttttttggtacaaagacttggaccttctttcaataaaataagatcaatctaatgtatatgtatggtttttgttttaatagctgataaaatagtcattccattgtttgtttaataacttggcaaacccaaaattttgatataactatacaacatcatagacattacatacaaacagaatataacaacacatacatatacatatattatacatagaaaatctgaccaacattcaaaaggctctcttgaggaacattgtagataacactatgttctctgcaaatcttcctaagaaatgcatacacatagtcaatcgctatcttcttgtagaacctcgcttccctcctggctcgaaccaccgtgttccccattatgtgtaccactcctgcgtccctgcacccgtttatgaactccagctcgtctactccactcatctggctcgacgctgtcactgtgttgctcacccgtttcactggggttattgactctatcgagtcaaatgtatcaaacgttgccagattctcgttctcattcccattcccgagcgtgtctttaagctgttgctggcttccgcagatgctgtagtcatcggaatccgaacagcctccttccatcatcgattcaaggcgtacgtacaagaagaggctctcaaagaggcgtttttcaaagtcatcatctttcttgtgcaagtctctgtatccgtacctgttaacaatggacgaccaaatatgtaacagttaatacaaagagtgttcaatcgacagtaatcacaggcatacactatttcagatg

SEQ ID NO: 2232 - DNA, 888 bp, Arabidopsis thaliana
ctgttttcatggcgggaacagatacatcagcagcagcaatgcagtgggcaatggggcaactaataaaccatccacaagcgttcaacaagttacgagaagagatcaataacgttgttggaagtaaaagactggtgaaagaatcagatgttcctaaccttccttacctccgagctgtcctaagggaaactctgaggctccacccttcagctcctctgatcataagagaatgcgcagaagactgccaggtgaacgggtgccttgtcaagtcaaaaacccgtgtactcgtaaatgtttatgcaatcatgcgagattcagaactatgggcagatgcagacagattcatccccgagagatttctagagagctctgaagagaagataggtgaacaccagatgcagttcaaggggcagaatttccgttaccttccatttgggagtggaaggagaggatgtccaggagcatcccttgccatgaatgtgatgcatataggtgtgggttcattggtgcagcgcttcgactggaagagtgttgatggacagaaggtcgatctgagccaaggttctggtttttctgctgagatggctcgaccacttgtgtgcaatcctgtggatcactttaacaccttctaagtgcttatgtataccgctagatgttacctgtttctgtaagatttccaagaagtatatctctaaaaacaccaactttcagattgaaaaaaatcttaatttcattctcgcctagacgaagtaataataactactattatgagaggaggaagggaggagctacatgtctactattttgagttttttagccaatcagagcgctccatgtcatacccattctcaccgatcttgcggtttcatacccactctcaccatcttgcgt

SEQ ID NO: 2233 - DNA, 490 bp, Arabidopsis thaliana columbia
gcagcaaggtcattggggcaagagactacacagccaaatctaaagcaaatcaaacagcgagagactacagtggacacggcacacacacagcgtcaatcgctgccggaaacgcagtcgcaaactcaaacttctatggacttggaaatggaaccgcgagaggtggcgttccagccgctcgaatcgccgtttacaaagtctgcgacaatgaaggatgcgacggagaagcaatgatgtctgcgtttgacgacgcaatcgctgacggtgtggatgtcatatctatctccatcgttcttgataacattccaccgttcgaggaagatccgattgcgattggagcgtttcacgctatggctgtaggagtactaactgttaacgcagccggtaacaatggaccaaaaatcagcactgtcacgagtaccgcaccatgggtgtttagtgttgcggctagtgttacgaatcgtgcgtttatggctaaagttgttcttggaga

SEQ ID NO: 2234 - DNA, 643 bp, Arabidopsis thaliana columbia
cccactgtgatggtttgggtgctaaattcgtccatgcgaaagcgaatctatcaccgtgaatgatgtccttcaatctcatgggtctgttccttatttcatatcgaaatttttccccgcgaacaatgtccaaagccgtgatgcccttgtctcggagcccttgcttgcgttgcaagtcaccgagatgaaagatggagtgttcattagttttggttacaatcacatggtggccgatggtacttgcttctggaagttctttcacacttggtccaagatttgtctgaatggttcggatcctagtattcagtctattgttctcaaagattggttttgtgacgggatcgattacccggtacatgttccggttttagagatggagacgctaccacgttgggaaccttcaactaaagagagagtttttcacttgtcaaagaagaacattttagatctcaaagcgaaacgcaacaacgaaattgacaccaatgatctgaaaatctcgtctcttcaagcggttgtggcatatctatggctatcaatcatcagacacagtggtctaaacagggaagaagaacacaatgcaatgtagcggcggatatgagacagaggctaaacgtcttctcaagaaagagtgttttgggaatgtacc

SEQ ID NO: 2235 - DNA, 587 bp, Arabidopsis thaliana
cactttagtttcatgccacaatcttacatataaattaagatttgttcagggtttgtttcacaccgaaagaattagagtttctaggtttggagaacgctctagtagaagcggaacactttccgatgtcgttttcgactcgaaaacattaattcaacaaggttgttgaacaccggtagtccatctttgcggcataccgaaataacctgagacaaacacaatgaatgttttcctgtttctaatttaaatttgatgagaaatcatacattaaaactgacctcgacagcggaagaagttaagtgaagggtcttaacgttgcgtatctcactgatgatatttttcacattcgcataattttgcaccttttgatagccatatcttaagtaatgaaggtccaacgtaactttggcaagtgaatctaaatgacaatgtggagctttacgcctaggaagatcagagtagtagaggtcgacaacatggcgtgtcaagtctaagaatgctagaatgattatgtataagacaattataataactattatcaatggtaagtgagaggtttttaatgcttttgctggatatgcagtatggat

SEQ ID NO: 2236 - DNA, 505 bp, Arabidopsis thaliana columbia
atctccctcaccgcctctgttatctcctccacatgatcaactatcactccctctatccccatcaaatgctgcatgtaaaccgcctcggctacattgtttagctttccgtatgtcatcagagagagcttggattcttttatcttgttgacaagagcggggttgcggaatactcccttcacctccgagacaatcccttggaggcctccttctaaacatactttgattgcttcctcaagcgaattccttctcgtgtcgtggtacatctcagttcctccgttggtcaagaagaatacctgtaattgaatttggatcataaattaagttgatggattaaagtggaaagagtgtacgtagcttttgggattccacaacttacggggtaggtggtctgcaacttcctgacaagaagggctgcatcaggatggaagctggagaagatgatagttctgtcgtttccgatatcagacacgacctgcaagattgggaggagaagacgggagaggtg

SEQ ID NO: 2237 - DNA, 349 bp, Arabidopsis thaliana columbia
tccggctgaagatcttggagggtttgggcctcttgccattcctttgccctcaggatagccatgtgaatggttcttcttccagaacttggcgattattgaagatcaacatggcagtccagataggccacaataaccaatggaagagaggaccagagccgatgcctgtgcgtcgtaggcagacttaggtattcactatgacaagtcgctctttaaatgacctgaatccatcgaaattgcgtctgagtgagaagggatccaaatcccagatactcccggcatatcagcagttggtgaacttattcagagtcgattctacttgatcacatcgtgggcaccttgtggggtcaga

SEQ ID NO: 2238 - DNA, 434 bp, Arabidopsis thaliana
gcgtgatgatatgtttcaaatgccttaagactactctctcacataagagatcgtcgatagtactttagggtcgacttccacaaagctcgtctgttcacacaataggctaacatatcacaattgagctagagagagaatgagtaaataaaagtaagtaaaataagcagattggaggtcttaagaccacataataaggcgtcagcacgacggtattctcaggccatagatgatcagtagcatctgctggatacctggtattgaagttaccaatgctcgctaaatcaagccagctgatatctccaatcgtatcctctgaacaaggtaccgagaagttgtacctcaccgcagccatgatgcaggtagtcccgttgatatcgcttgaaacgacaccagactgctttggaagcttctgtcagaccttgagtgaaggtaga

SEQ ID NO: 2239 - DNA, 530 bp, Arabidopsis thaliana
tgcataatttgatgacgaaattgttgttatcgtagctaaaacaaaatcgatctgtgtcaataatatagttgtacttttgttatggatctaatcctcaaaaacccgacaaccttaaaagatcctctgacattgaggaatctttggtctgactaatctcatctattgtcttcttgtcgtgtatattgtcaataatcgcagtggtaaaattttaatttgaatttatgtggtgtaacagaagaaaagcaagagagtaagaatgggatcggaacaaaacgatagcacaagcttcacgcaatcgcaagcttcagagccaaagctatgtgttaaaggatgtggtttctttggatcaccatcaaacatggatctctgttctaaatgttacagaggcatttgtgctgaggaagctcaaacagcagttgctaaagctgctgttgaaaaatctttcaagccttctcctcctcgtagtctcttcatagcagaacctcctgctgttgttgtggacccaaacccgaaaaggcggcagttgttgt

SEQ ID NO: 2240 - DNA, 337 bp, Arabidopsis thaliana
aagttttgagatcaacaaacctcagaatcgttcacaagaagagggattaaagagtcacgactctgctcaatttcactaccataataagcagaagaagaagaaatctctctcacatcacccttaaacataactttacatattgtatatgtcatcatcatctgtaaaaaacattcagtcaaatcacaatcacccgatacacgaaaacgagcaatcatatcactgtaaagatcaaaatcataggttcaaaaaacctttctattagagaaagcattgtactcgtgcataacccagtcggatttgtatccatcaagttccttactcatgtaaaacatcaaaa

SEQ ID NO: 2241 - DNA, 930 bp, Arabidopsis thaliana
ggtggtgtgaactgtgaccacagtctcagatttctaaagatttgatgattcgctcccttattttggacatgtgagtgtcttttgttggacagtgaatgactttgtctttccactttccgtaaagaagtcccaagaattttgctttagctttcttttctctcttcactttttcttttggcttttttcccacgactttctcggaaatattgcagacacagtaagaagatgatgtttatatcttcaaagattctcatcaactaaattttcatcacattacagtacattgcaaactatatagactgttcaatcttcttatagctaagaaactgataaaagaattgcaatcgctgagataatttgaccagtttctctcttctgataagattggaaagaagataacagtataaagcgttggtgaagtgttagagaagctcatcgcttggaaagcttacatataacatcggcgactgcaaaaagatattgagatttcaaaagactagtttgagaccatggcgaatcaggctgtgtagttaggcattgctttcttgaggaaggttattggctgagattcttcaggggctaaccggtcaaaaggaatgtagttctcctctttgtcatagacatgacacacagtcattatcgtcttcatcaatcgccagttccatgtagccaagtttgtatactgcaacaacaccccaaaagaagtagcccaggaaacttttagtgtcttattaacttcccaaaggaacacttattatgttgtggttcaaattactgtcatgttattcacaacaaatttacgagataagaaagtggttagtacctttccccagttctcttgtatagactcatgagctgcacggagattgtagctcggtattcttgggctaatatgatgcgggatgtgacgttgatatcatggcagagaat

SEQ ID NO: 2242 - DNA, 401 bp, Arabidopsis thaliana
ttcgttaaacactaattctgtaaccaaacctaagtttgtctagagacctatctactagattcctaatgatatataaagagaagaaatagagggattatttattaccattcttcgatcgatcatggagcagccatcagcacaaagtaaggtagggaaagtatcgaaaccttcggagagacaaagagagagaatgagtctcattcccatgtgacattcagatgtttcagctagagacgtgtctccggaggattttgtgtaggctctaaggagaatgatccaccagaaacctgagtccaccggagccactcttccaatcgcgctctcgccaaagtcagcattgatagagtcggtttccgttgatcgggtcgtgaatgaccttgaaactagccggcattgcgcct

SEQ ID NO: 2243 - DNA, 1758 bp, Arabidopsis thaliana
  unsure (1)..(1758): unsure at all n locations
ttttaacaatttggataaccactgatttaaccgttctttggtttcttttcagttgatatctcttgatatgggtgctctcattgctggagcaaagtatcggggagaattcgaagacagactaaaagctgtgcttaaggaagtcacagactcagaaggccaaatcattttgttcatcgatgagatccatacagttgttggtgcaggtatgcaaatttcctttgattgtttggaaacggtttatacattttcttgcaatgatttgtaattgattcttttgctttcaggtgcgactaatggggccatggatgctggtaatctgctgaaaccgatgctgggccgaggcgagttacgttgtatcggtgcaaccacgcttgatgaatataggaaatacatagagaaagatccagccttggagcgtaggtttcaacaggtttatgttgatcaacctacggttgaagacacgatttctattctccgtggtttgcgggaaaggtatgaactacatcatggagttcgcatctcagatagtgctctagtggaagctgctatcctctcagaccgttacatcagtggccggtttctacccgataaaggtttatactttgctattcccattttattatattatcttcattaatagacagtgttactaactgatttggtaattggtgttctagcaattgacttggtcgatgaagcggcagccaaattgaaaatggaaatcacttcgaaacctacagctcttgacgagcttgaccgttcggtaataaagcttgaaatggagaggctttcacttaccaatgatacagacaaagcttctagagagagattgaatcgaattgaaactgagttagtgctattaaaggagaaacaagctgagttaactgaacagtgggagcacgagaggtctgttatgtcccgtcttcagtcgattaaagaggagattgatcgagtaaacctcgagatccagcaggcggaacgtgaatacgatctcaaccgtgcagctgagctcaaatacggaagcttaaactcattgcagcgacacttatgtgctgcagagaaagagctgaacgagtacttaagctctgggacatctatgtccagagaacaggtcctgggtagcgatatcgccgagattgtgagtaaatggactggaatcccggtatcaaaacttcaacagtctgaacgagataagcttctacatttggaagaagaattgcataaaagagtagtcggtcaaaacccagcagtgactgcggtacatgaagcaatccaacgatcaagagctggtctttcggatccaggccgtcctatagctagtttcatgtttatgggaccaactggtgttggtaaaacagagctagccaaagcacttgcttcttatatgttcaacactgaagaagctttagtgagaattgacatgagtgaatacatggagaagcatgcggtgtctaggctcattggagctccacctggatatgttggttacgaagaaggaggacagttaacagacacggttagcagacggccttattcggtcattctatttgatgagattgagacagctcatggagatgtcttccatgtgtttctccaaatcttggacgatgggcgagtcacagattctcaaggacgtacagtgcgttcaccaataccgtcattattatgactcaaatgttggtcgcagtttattctgaacacacagatgatgatgctaatgacctctcttatgacacgattanagagagagtgatgaat

SEQ ID NO: 2244 - DNA, 839 bp, Arabidopsis thaliana columbia
tgagcttcctccatgaatcaagtttgttctttgagcacggcgagcttggcgaatttggcgttcagtcatgccactcatgtcaaacgcatcaacttcttcatgatcgacagaggatcttcttgcccgagacgaactcttccttcttgaatccatggtggtgagtttcaaccaagcaattagaaacaactctccaagaggtatcaaggggtaaggggatcagtttatttggtgatgaaatttggagcgtgaaaccgattgagtgcttgaggatgagcttggaagtgatcgagtaactttggtgaagtatgatgaagtgagaacgaattcgtgaagagtgatagggagagtttggagtgaaacttcgaagctttgtgagagatggagaggttgcgaaaatgagatgatgaaagagagagtttcaaaagtgggtttgtcgaattcaatgggtggaggagattggtgtttggtttctttgggaagggatagaaaagttgattataaatggtgaggggcatgggtaatcgctttgtccattgagtaaaagagtgttgggggaacaagtggggtcacgaagttatgccatggtcttcaaataatgagagctcgagcaaaggatcgagcatcctcttgaagtgcgaaaaatttgatccaacgacggggaacttttctttcttgtttactcgatcaaacggaccaaaattaacttctgaaagtcactcgatccaacgacggtaatgctcctctcatttggtcatccaaatcaatggctcaaaatactcctcctcattctactcgatcaacggttgagatttttcttgacttggtttgaatttactcga

SEQ ID NO: 2245 - DNA, 672 bp, Arabidopsis thaliana columbia
gccacgtcataacctccttctccctgtctagcaacagtctctcgtagtactcaatcatgtcattgagtttgttgtttgcctgaaccaagtaataatgaaaaagatttggcatctaagtggagggatgaagtttgaaaattattacgggtgaagagaactaacccgagatgagtggcggcatggagtaggaatcgctcgcgaattacagggcgccacctatcaaaggctggcaggatggtgtcttttcgagttttgaagcatcgaaagacatttccctctgtttccatcgctgttagaataaagaaaggattagaccaggcaaggagcgttaagtcagtaaatcgaaacgataaggcaggtataaacaaacggaaggtaatttctaacccgtgagcgacttggtctgaggaaccagaataaccttagttccagcatctcggacctcagcttcttctcgtcaggggtttgcactccggtcggccttttcacctccggatccagacgaaggagatacggtgactggaggaggaggacccatagaacgggatggtgccgatacgtaggagagcgatcagtttgggctctcgtcttatctcttttgggggaggagctgtcgccggttgatctgtctctctttttctgaattaagtcagcaagccgttcgctgcttag

SEQ ID NO: 2246 - DNA, 501 bp, Arabidopsis thaliana
tgtggcccagatcaatttatgaataaagttctttttttttctgttgcattttctttcactggtcttaagtttgatgtaacatctcagccttattattaggagactatggtgcgattggtttaatccaatttaattacttgcttttaatctcttgtgttcttgatgtgacaggcttttgggtaaagtggcattgatcactggaggagccacagggataggtgagagcattgttcgtctgttccacaagcacggtgccagagtctgcattgttgatctgcaagatgatctcggaggtgaggtgtgtaaaagtctgcttcgtggtgagtccatggagacggcttttttcatccatggcgatgttagagtggaagatgacattagcaatgctgttgactttgcagtcaaaaattttgggacgcttgatatacttatcaacaatgcaggattatgtggagcatcgtgccctgatattcgtaattatagtatgagtgagttcgagat

SEQ ID NO: 2247 - DNA, 960 bp, Arabidopsis thaliana
gggttaacgtttttggcggaaaattataggtttacgtttttgacgggaaaattacgggtttacgtttttggcgggaaaatcacgggtttacgtttttggcggaaaattataggcttacgtttttggcgggaaaaatacggatttacgtttttggctggaaaatcacgggtttacatttttggcgggaaaatcacgggtttacgttttttgcgggaaaatcacggatttacgtttttggcgggaaaatatgggtttacatttttggcgggaaaatcacaggtttacgtttttggcgggaaaattatggatttatgtttttggcggaaaatctcgggtttacgtttttggcgggtaaatcacggatttacgtttttggcgggaaaatcatgggttttcgtttttggcgggaaaatcatgggtttatgttttttagtggaaaaattacgaatttactttttctcaatttcatcgcttgtatatttaaaaattttggaaaaatattgattttattaaattggtttagatgtgttggttaagcttaaattgacattggtttagagattttagttggtttaattcaattttacaaaacttgatgggttaattgggtaaaccattgaaaccattaaccattacaacccaactcatttgactcatcaaaccaattgacccaataactcatttgacccatcaactcatttgagtcaaaaaaaaataactcattagagttcatgggttgagttgagttgagttgacccatgaattttgacccattttgacacccctagcagtgctacatcaatttttcttaatttttaattcattaaagagaacataagtaattgtctacttttgatttaagagcaactagcttttaaattttattaatcatttatgttatttatgtatgaaagtttccattttcatgataagacaaaaaatagacaatattgcatattc

SEQ ID NO: 2248 - DNA, 901 bp, Arabidopsis thaliana
tgctaaaattgcaaaatcatgttttcatccaaaatcgtgaaattgcattttattaccaagaaaacattttcccataaaatgacattttcccgccaaaatcacaaagaagtgttttccgtcaaaattgaaaatcatgtttttcgccgaaattgaaaatcatgttttccgccaaaagtgttttctctccaaaatccgaaacccgtattttctggccaaaattgtgtttttgcaaaaaaaaaatatattcactcataatggggtattcatcatcgttttgagtccagtttcgtatcattcatcactgttttatatcatttctcatcattcttgcagactttgcatgattaggatagctttgcatacatattgcatttctgagttgttttcaagtgatttggagctgtttgcgagcaaattggaagaaacgagccagaaccagaagacaaactcgaccaccaggtcgtgtgcatccagcaccatactcgaccccctagtcgagtgactttggagccattcttcccatctactcgacccccaggtcgagtaacctcagctcaggccactcgatgacgccactcgacccccaggtcgaatatcacttcgacttaccacctgaccacactcggccgttcactctaccacgttactcgaccccctcgtcgagtatcatcactcaccaccaacaccatcactcgaccgggccctcgatcacatcatcatagtctactcagattcgcactcaaccagacaagctgagcacaaggaagagaagaggagaagacaaagtgtttggaaacggcctggacctccatcggatcatgaagcccacctcggcccattatcattctatgggccgggcgattagttattggcatgtctactatcattttacttcgttttg

SEQ ID NO: 2249 - DNA, 517 bp, Arabidopsis thaliana
ctgacggatccagagaccaggtatacaatgatggaaaaactcgcactcgtagtggtaacatccagtcggaaactgtatccgtatttccagtctcatccaatcgaagtgttaacgaatcagccacttcgaacaattcttcatagtccaaatcaatccggaagactggcgaagtgggttgttgagttaagtgagtatgatatagagtacaagagccaagttgccatgaaggctcaagttttagacgatttcttgactgaattaccagtgcttggcgccctagagcaaccggagaatcaaacttggaatctacatgtagacgggtcttcatcaaaacaagaatccagagtgcgaataaagttggaatccccaacatcataaagtcttgaacagtcattccgtttattatttaacgcctctaacaacgaggcagagtatgaagctctaatcgtaggactcaggctagtacagggaattggtgctgaagaggtagtcgcttattgcgattcacaattggttg

SEQ ID NO: 2250 - DNA, 916 bp, Arabidopsis thaliana columbia
ctgttctaaaactgaagaattacccatatacaggatcacaactgatttgtaaaacgtcaaatcataataacttactcaaactgtttaaacttctgtttctgctgttttgttgttatgttaattctttttgcattccatctaaatttctatataagtgaagccttatccttttaacaattatcttttgtctttaatgacttcggtctatgaatgtaaaacctaatctcttctcatatttacgaaaaaaatgaaaaaaaaaaaaattagaacctaaatccccataaataagttcccgctaaatgggctgtaacaaatcactatagcacgtctatataatatattatagaccatgcatatatatatattcatggacgtgagaatatggacgtatctaacttactatcacgaacaattttttggaatatttgtaggatccactaattatattcagtaacccatcgctccaccacaccactccctattcatttatccagagaattagggttcccatttcatcacgatctcaaatctgtttcccttcagcctagttcggtcctctttatttatcggtgtttcttcaaattccttagatcgttatttgttcactttcagtactatactaatttgataagccaaaatgccaaaaatcgtctgcgagaaaggaaaatgtacccaccctcgaccaatgtcccctactagacattactggcgacccccaagcgcccttgcccctgttaggggaaatcaatttgccgtgtagcctcttcgtcaacctttggttcattttaacctacaggtaatgtttactcaaaaacaatttcaatcgaattgaggcactcattttatatagacttaaattgatcaaaaaattgcaaaatttagttttgaattggtatatagcctcacaaatttggtg

SEQ ID NO: 2251 - DNA, 1039 bp, Arabidopsis thaliana
caaaacaagtgacttcttaacattgtataagtaaagaaaacaaatgttcatagctaaaagaacttaccatctctacctcgatttgtaagaacgacattggctccgatacatgcttgtgaggaccaagacatccgtgctaatgatgtggttgaattctttgcgttggcttcttttgtgtcccaatagtcacactgcccacagtgtggtctcaatccaaggaggttgttgctgtaacctcgctgccttataaactatgtttttcatacgcagttgacagatcttctagaatttagcttcaatcaccggtcaatgagggatcccaagtgtgtgttttctacaaaacaaggagagtttgatgttagttacacaataatcaaaacaaaagtagaagatctgcgaattcgaggaagtatctttctcttcttccagtaggcacacatctccaactgtaatatggcccatcaaacttgtttgtaaaaatctttgtgatcttctgagttagcttacccttgtccttaccaaacctacaaacaaatttaaactaatcaaaccactaccaagaactaaatcaaacaaaatcatacagttcttatcattaaatcaaaccacaaacaataactaaatcttacctaatcgtacagttcatatcctaatgacactaattcatggcaaacttacaaaaacgttttaggatccaatgtgggagagatgatagtggtatattcctcaaggtcatgcgtcctaagaagctcatctaaagtagcgagtatattttccgaaaaaattggctcccttaacacatccttctcagattcgcttcttcttcatcatcttcttcctcgtgtgagttttgagattgagagttgtgatgcgaaaattagggtgtcgaggttgaggaagtggtggttgttgattcacgactggagtctgaatcgacgcctcccgttgaatcggtgttgaagattaattctatctagaggctagacgaacatatccccaaatctagattgagtcgatccggatgctcgaaatggagttg

SEQ ID NO: 2252 - DNA, 585 bp, Arabidopsis thaliana columbia
atttaaaatgcatgagacaaaaaggcttactttgcttgcaaatactccagtatggtagtcaatttttcttgtatttattagaaccctttgagccagcttactgatctcaggatcaaatccaggcattagttgatccagtgcctcaataaaagttacctgtaaaaaaaagaaagagttcccctgagcttggtcacttcctggagttgcagagcatcacaaaccttaagcaaaatatagctatcgcccatttgctcgatcaggttaccaatacaacaacatcctaagagccttttgttactattgagagaaaacagaaaactaaagagaacgcaaaaaacaacacactatcacaccagtgcaaatcattagcacaaaatcaaaatgttacctcacttccaagggccgtgtaaacatcactgaactcaagaccgatataaccacttcctactatcgcaatccagtcaggaacggactccaatttcaatgcatgatcacttgtgataacagtctttcctgcagcacaaaatatgaggaatattagggtacttgctatactaaaagaaatgagaagctttggtttttgag

SEQ ID NO: 2253 - DNA, 854 bp, Arabidopsis thaliana
ggatggacaaagagaagcatcagctctcaaaggttcaggtgaacggcgtactgttttctacaacagaggataatgatatcatccaagaaaacgatatgttcgaaagcagacaagcgttcttagctttttctcaaaagcataattacaacttccacacgcttcgacatgccaagcattcttcgatgatgatacttcaccatcttcacacctcaaacaagcatcattgctctcaaaactctagcagtctcacctgcacggcctgcaaaaaagatgtttcgacaacgatttacttcccttgtttgctctgtccggattaccgagcttgcactggatgctataccaaaaacagaacccttcgtcatcttcatattttccctacactcccttcagctaatagagcgccgtcgagaaccgtaatggtaagtatatgttacctgaaagtatatatcgtttctttggtttacttttgacttgtttactaaattaatcaacgtattactctcttaggttcttgagatattgaacgcaatactcgcatgcgcttctgtgtcagcacaagaccactaagtcatgctcatacccgaaatgccacgaagttaaagcattgttcactcacaatgtacaatgcaaaatcagaaagaagggaactcgttgtaatacttgctacaaattgtggcagacaataaggattcatgtgtaccattgccaagatctcaattgccccgtaccgcagtgcaggtaaatttccattcctctatttatgatttcaatgatcatctctgcaactttagcttttttatataactttgatatctcttatatactcagagataggaaggaagtcttgattagga

SEQ ID NO: 2254 - DNA, 539 bp, Arabidopsis thaliana columbia
ccctggagatgggttggttagtgggtttatgtaggctacgttgatctttgagcaaaccggccttatgggctgcggtgatatgactctgcttgtggttgcggttgtggttgtggtgatgggtccttgtagttgcgtcaagaagtctctctcctgtatcactttccgcggtcttgttcagatcaatgacaccttttcctttgatctctggctccatgcatttggaggaaggaggagagcattggagaagaggcaaagtcaccaaagtagaagagacaccattctcaaaaccgtagccaacttgaggtaggttaggtaacctatgatgagtgaaagcctgaaacgacagtgttttaataggtccaagaacacgttgtgtagaaatagtagaagtactagaagaaccgcatgacgactttggtctcttcatagcaagagaagagggacccatcccgcctcggcctcgcttgcgggttcttgtaggtcgcgcttgaagctgaggccagaggttacgaaggtaaggagattggctgattttgtga

SEQ ID NO: 2255 - DNA, 627 bp, Arabidopsis thaliana
gagttgaaatcaaagttagtgagcatctccaacggtttgcataattcttagagacaatgaagccaagtaaataaccaaaagccctatgcccatcacaccaccaagcctcatacggttactaaacagaaccaagaacgaccataccagtcctgcgaccagaaatccaagactctccaacaaacgaggatctgtcttaatcacaatgctcaacggataagcctcccatgcacatcccacaagcgatatcccgagagcaaacaatgtattgaagatcggaccggcgtaacatcccgatacagccacttgagctccttcgttcccatcgtgtagcgccattgtcaagttggttattagatctccaattgaattaccccaagcgaggaccgttaagcctaagatcgaagggcttacaccgaaaatgtatcctagtgaggtcaaaagcgcaactagctcttgtgctgatatgtaactccatgtcatgctcattacaaaccctcctgctaaccaaggcaacaaccatttctttggtggggttaatttcttcgtcgtggctcctgcaatgaaaccaagagctataccgatcaaacacccgatgagataaacaaccccgcctcaaaactcgtcggt

SEQ ID NO: 2256 - DNA, 689 bp, Arabidopsis thaliana
ccagttgcctgagaaataagtttctggtagtttctcatgccaggagctcacaacctgtataggatggccctcggttgtaaatatataattccttttggccacaaatgagtcatcgaagaggagatataggtacttgcacctacgaagaaagtgagataactaccaatgtgatgttctgcattgtataggtaagaaaagaatagcgtgtaagaaagtgaacgcacgtttcagcgagaaagaaactgtgctgatgatcttccaattgcatggtcgtcacatctctaacacttgcaaatccccctggcacctttgtgtagagattaagagattttaccattgattcaccaacatctagataccatggatctgcaaaaggaccaaaggaatgaaatagatttctatagtcagcggaggtatgcctcaaatttggtgcttcacataataaacattcagggtgagacaactaaaaaagagacaaaaataaaaaccttttgtagcttggtaaaggtagaacgtggattctgctaattcaggacgtagtggatagtacttcattgtcggatgtattatttgatgatcgagtagatacctgaacaaagatttgttcaatgtacttcagcgcaaacaacaaacttgaaaaatgacgtactcaagatcgatgtaggaagccgcaaagaaaagacaagtga

SEQ ID NO: 2257 - DNA, 1114 bp, Arabidopsis thaliana
tatattaatgttaaaaaaaattattagtgacctaatcaataacatcctttttgatcgtgatagtgatgacaccactcaatggaatattaaacaatctggtcgtacttcataatgaaatcagatcaattaagttacagagttttattcgttcaagaaagacattgaaatgtcgaactatatagctcataaactgaaagttgactgattttagcgggccttgatgggcttaaaatcggatccaataggcttgaaatttgcaaattccttttattccatgatatccaccttataataagcaataacaaaaatatgtgttaggaattattttacattagcccatattttttaatccacaataattagatctgggagatagacagatagtattaaattcataaattattgctattaatttattctttcgaatcatatctatgtataatattagatgctgcaacgcatttaatgtggtaatcatatgatattagaggaataattcggatttgatgtcatttgacccaaaagtcgtacgccaatagtacagttggctttgtacgatgcgtatgtatatacattaaaaagggccaaacaaacggaagcccaaaaaaagcccactaggccttagaaagaattcatctctaacacatttctcctacgcttaagcaacgccgtaacagcttctccgtacatacaatcgtcgccatctccggcgaacgcctccgtcaccagctcaacatcgttatcatcggaagccacaccagtcggccttacgaccaccagcgtcgctgcttcgagacaaatcccgctcttcagcatcagcgacggcgcgtgtctcatactcatcctcacgctaggtaccacagttcgttcccccacgcgctctgattctttattatccccacgcacctccgtctctctgtattctttcatccccgccgcgtccatcaccaccgtaccttcaccatcactgtcacgcacaatcaatttctccatctccttgtgatctttcaccaaatctctcatcaagtaatgacgcgtggaagccgccatcaacgcgctgatcgtccacaccacgcgcgtcttcaatccacaaacaaactccgaatcgtgatcc

SEQ ID NO: 2258 - DNA, 1038 bp, Arabidopsis thaliana columbia
tgagatgatactaaagctctctgattgattctcacacttctcgatcttcttccgattacttagatccagatcttcactctagatttctcgctctcaaatctcaaaagaagaaggatcagcagcaacaacagaaacaacggccgagaatgcagccgaaatcaaaggatgtggttgaagaaacaccagaagatctcatgcttagattcgcggctctgaaaacttctctcccctccgcgtcttcttcgtcctctgttcttcttcaggatgaaatcggagaagatggtgatgaaatcggagaagatgctgaagtggataagctgatccaatgggctatagacgcagcccgtctcgatccgtctccgtcttctgacgatgagcaaagccagaattgcgatacggatgatgagaatgattcaactagagatgttaaaccttaattttaacaatttggcttctcttgtaaggtatatatacatccctttttgtgcttgttaaagattgtcgctagaatgagtgaaagtttggaatttgcaatgagattgttaatttttcgaatgttgcatttcgtagatatatgagataaaagtgttgtcattgttacgatcatggaaaatggaatttgataacaatccaaatcatttgttgtcacgggttcgttgatatgaactagagaactagattcaaacattcatgataaataggttacactagaggaattagtacggtgggagcttcctaatgaactctaaaacagctttggcagtgttagtggcagccaaagatccaaacttatgaacagtgttatctcctccttctccagctaaatctgataaaccccttatcacaattatcggatacccatttgatgcgcatgtctggtcaaatccacaacacaaacatatcacttaacgatcaaaattatgtaaaaattaatggattcaaaattaccatggctactgcagaactctccatatcagaggaggagactccaaaagtatcgtataagaaatttctataggctgcattatccacaaatat

SEQ ID NO: 2259 - DNA, 536 bp, Arabidopsis thaliana columbia
agccctagggggaaactttctcgctcactcgctcgtctgcaaacaccatggaagacagtcctcaaggccttgtgagtctctctttgcttgtttgattttgtttgggaattttggattactcttaagtttttctgctgggcgtgtagaaaaggagtagagatccggatcaggatcaggatgacgacagcggcgaggctggcaaggccgacggaagcggcggagagaatcaggagcgcacagcgaccagattgagctcgatgacgacgatttccaggaaacccgtcccaagcccaagcgtagtcgcacccatcctcctcaacagaatctcattggtacaattcatattcctaaatcgctccaagctttgtgccaattgattgtttcctaaattgattgattgtttttcttagagagcttcatcttgtttgtttgggtagatctttcagctttcatattttttttgctaacagaggttgtcaaaggcaacggggatcttatttctaaagccgtcaagatttgggttgaaagatatgaag

SEQ ID NO: 2260 - DNA, 1037 bp, Arabidopsis thaliana
aagtacccatatacatgcattgcaaaacaatagaccacagttgtaacagttatgctttctccttgtgaatccaaaagctgatttgcaagaactacaagcggtttgatcattcaaagagatctctttgtgtaaacagatcgcagccgtcaaattcaacccgcaagctatactttcctaccaacctatcacctaaaggctcaacaagaacaggagagtttctatctctaacgtcacctaaaccaagttgtccattcatgccttttccccaagtataaacatttccaaatgaagttagaacagctacatgatgtgaacctgaagcaatatccttgacaaattgtcgtgttagattgcctaaaacaacatttaccgacttatcctttgcccgcggacatcctaactgtccgtggatcgagcttcccattgtataaaccgttcctgaaatgcttaaagcaacagttaaagtccatccacaagagacttttatgaaatcatgatcaatgagttcagtaacacaagttggcacaagctttctcttgctatcagcatgtcctaaccgtcctttatcgccatctccccaagtaaacagctttccacaactcttggcgttgtagaatttccggtcgttcgcggtttccactatagcagccgtgtgccacggtccacaagagacagatatgaccttcatggtctcaaagactcaacttctttcggctttgtaacactctcaagactcccatgtccaagaactccaaaagttccactaccataagtgaaaagctgaccagaactagtcacaattgccgtgtgccacgcgccacaagcaacacttaaaacagtcaaagatccgccaagaacatcggatatcttccgagtcaagaactggcttcctgactgttcaatggttccaccatcaattccccataaatacagctcaccagattccgtaacagcacacgtttgatgatcactacaagccactgatcgaactgcaacatcctcaagagactcaacgcgtttcggatggtcgatatcga

SEQ ID NO: 2261 - DNA, 540 bp, Arabidopsis thaliana columbia
ctgaaaaaaacttacgaaacccgttctgcatcctcaggttcctccattcaggtagtccagaagcagccacagcttagtaatggtgatcgcaagaggaaatataaaagcagaattgctgacataactaaaggttcagagagcgttaaaatccctcttgtcgatgatgttgggagtgaagctgtgccaaagtttacttacatccctcacaacattgtttaccaaagtgcttatctccacgtgtctctggctcgaatctctgatgaagattgctgcgcaaactgctaagggaactgtctttcagctgactttccttgcacttgtgctcgtgaaaccagtggagaatatgcttataccaaagaagggctgctaaaggatcagtttctggacacctgtcttaagatgaaacaggaaccagattcgttccctaaagtttactgcaaagactgccctttggagagagatccgataagggacatatggaacatgtgatggcacttaatccgaagttcacaaggatgctggggaagtgtggatgtgata

SEQ ID NO: 2262 - DNA, 505 bp, Arabidopsis thaliana
tgcatatttgagttgagtctcacctatacttgatttaccatcgcagggagctgccggtgctgttgtcttgtacttaggtcgcacacctgggatcttcattgtaggactatttggaattttgatattgtggatgtacgctaatttttggatcactggaacattatttatagttggaggcaagtgtccattttcttttccagaacgatttatgatgtcatagtcatatcttattgctctttttgtctctttcccattgtagttaaagctaatgaagttttcatctagtgttaatgtctagagttgtttgaatcaggttatgtgttctctttgaatcacgcacgggtggtggttcttatggcgacaatgtatgcaatgtactgtgtcaaagtcagacttggacggcctggagttattctctcgatgaatcttgcattcttgtccaacgatatatatatatgtcctcctcgatggtgtgatactgatagtggtaaagcacaagtggagg

SEQ ID NO: 2263 - DNA, 1511 bp, Arabidopsis thaliana
gtctgatacttgcattgctattacaaaaagaaggaaattagatgacaatatgtcaaatatatatacatggaaaaaacaatatatagagtatcagttctcttgtacctgtgactgcatccatgaagagtacgaaaggatccacttcatcaattggagattctaattcctcgtcatcgctaaaatcatcgtctgaaaagtcatcatcatcgctgtaagagcggaagtcctttgcctaatgataatacacaaaggaagtaacttagtgagctactacgactagcaaatttcacatttcatgagatcagagtagaggattagtttagggtcaaagaagacagacctgtgctgctaacttgcggagtgtacttccatcagtttcatctggattctcgtcatcgccgtcctcatcttcatcatctgtttggaattcatccatgtcgtcatcatcaccatcttcatcttcttcttcctcttctgcctttgccgcttctgtcacaaatgttcaaataggaatatcagcgaggtctgttataagaaaaatgagagatatgaaaagtcactgaccagcaagttgatccttgtatgccactaaaagctcgagaagagccctgaatacatgtggcaagacctctccaggcaattgaccagctggaaggctgaaaagtgatgtcaaccccaagatgcaaactttcttatcatgttctctgcatgtgaaccaaggaagaatgttatcttgaaagaaatgtgaggagaagagagaggagagagtgagatagaggttaaaaaaatttagattcacccacctcttgaagttagaacgtgcaccactcttcttcttttcttgcagcatttggaaccatagagtaaaaatttctgttgcgataccaaatcgttgcagtatgccaagtgccaaaggggtattgtagtaaaaggcatttgcaacctgcccaagggtatcaaagcagtacattcagcaattaatgccaatccttagcttaactcagtgacagacagcttaaaaaaagtagtaattaactctatgaagctaaaaataactgccgctactttccttaccacttcaaccagaaggcacttgaaggaagatttctcagcaccgcgtaccgatcaagtgtgattctcaggtagggttctacccattgatccacctggcccttgcatgtctgaagcactatccctaatagcttcggagctggctcgaggtcactgtcatcaatatttttattcgccataagctgcacatgagaaagatttaacaagttaaaccaacataagtatgtgtacggtggaaggaaaaaaaggatgaggccatctactgttttgtttatacgagtaaacgtacagaaactatcagatagtgagcttaccacagatatcacattccaaagattttgctggtaatctggttccttgcaagtaagataatgcccagtccccctggatatatagttgtgcaacgggaccaatatatctaatattatccaataggacga

SEQ ID NO: 2264 - DNA, 482 bp, Arabidopsis thaliana columbia
tcccgaaaataggtaaagcgcgaggaactgcttcaatatgtccaaggtgctattggagggttaaaattgagtgctgatattgcaaggtatacttggatgagaacccttttacaagatacataaatgttcctgtgttgaagctttgtttagcgttttaagaatgttttaagtcttaagattttacttcttttgttttggttctcgtttgtaactggatcagaatagatattgaagcacatactctgatggagaaactagataagactaaggtcaaggttctcgagcatgcttcaagtgaagatgcttcaaaaactgctgcatcaacagaggttattttttctctcctactttaccactgccacattgttcactcctgtgaggtttctaggaaaatctttattgcattgttttatttcccaagtattttcatgatttgcaacacatcgctggatcaatccctatgagatgtactgaaaagcttg

SEQ ID NO: 2265 - DNA, 1009 bp, Arabidopsis thaliana
ttttcccaaaaggtagctctatagcattcggctgcaaaattctcatatgctattggtttgtacaatacagcattcaaagcatgtggatttttggcttcaagagattttgtgaagaaatgataatagatggagtgcgtcgtggaccaccacatgtaataacgtgatttgtcaaggcgcacacaacttagagtttcctttgaatacacagccgatttaaatagtggtccagctttcacaaagggtttcaaagcatccacgctttcttcagcaacgtagctaacaattttagcaagtactggtgccgatatgtgaatttcagggataatagcaacctgtgttaaaaaaaaaagaaggtaagaaacaattggtttttggtttatgttggatgtcaaacgtataaaactatagcttatgacacgctgcactacctttttgacacctgaaacagatgagggttgtcactcatgtcgaccttcgttaacttgagcatggaagaaacttaaacgaatcgtggaaggtttttgtagctagagattattatggttagattaatttttatagttttcctgtttattaaaagttgtagttgtgaaggtgagaatatttccgtaatagcgaagtttatcagtgttatggagggaagtaaatttatattggtctttcaaggtaaaagagaataataatgttctctgtataactaccacatgatctacatatccacttaaaatttttgatttttagtttactaaattaggaatatttacttttacactgtcgctccaaatcaaaacttatctccgtaacacttgcgaaatggttaacatagggaatattctgctttacaaatttcagtttgtggggcgaaattaaaggaagtagaagaatagaagaatataaaccatatccttttttaaataagtatccacgatttctccccagtttagaaattattccttatttgatttcttacgagcatatcaattatgagaagacagaaacgcagcagtga

SEQ ID NO: 2266 - DNA, 1031 bp, Arabidopsis thaliana
cccccgtagacctccgataaggtttgcatcattaatataaaagaaactgctttgttttctgggacttgaactccaaacgtaggtgtagaagtattaataaacttttggttaactattgaaacaaatgaacttccactatatctgcttactttttagttaaaaatttaaataaaaaataaaaaataatataaataaaatgaaatagagttaatcccctgtttaactcgaaaatgtataggatgattgtaactttataagtaactaagtaaaattaatcagaaccaaaacttttttcgaataagagacctatcttaccagccattaaagatttaattaatactaatggaattatgggacaagaaaaatgacatacgaatacggtcactaattttttatacataataatagctagacatttgcatgtctgttaacaacctcccctatattatattcttgattagaacctatttggaatcatcaaaactgaaatgaaagataccaaaggtccaaaactaccacagagaatatatgtatgaattggaacatgggattggtagcctatttattttccatttccgaggcccaagcattaatatatgagaaatggtctctttttttttctttttttttttttttttgggcacaaaatacttcattacttagtgaacattcgagttacaaactgatgaaaaagctgatctagcaagagaatcagccaagcgattctgatcgcgcggaatgaaattaaacgagagggaattgaaacaagaggaaagatgcaggatgtcatgatgaatcgcgtgaagctccttgtgaggaagctcagagtgaagcgctttgagaagtatcaacgagtcggaagcgaattgaagatctgtaagccccgattcgattgcaactcgaacaacagctagagttgcgaacgcttcggctaacagaggagattggacattggagagggtcgccaaaccatggaggatactcgttctttgattgtccgaaaagatccagcccagtcaagctcttccatc

SEQ ID NO: 2267 - DNA, 786 bp, Arabidopsis thaliana
tcaaacttggaaattgcatgtagacggatcttcatcaaaagaagcgtccggagtgggattgatgtcgaatctccaacattggaaattcttgaacaagcattctgattttatttaacgctactaacaacgaggcagaatatgaagctttaatcgcaggacttagtttagcacaaggaattcgagccgaagtagtactctcttattgtgattcgcaactagttgttaacttgttcaatgttcaatggagattatgaagccaaagattcaagaatggaagcatatctcaatgtagttaaagatctgactaaaagcttcaaaaagttcgaactcattcgcatacctcgtggagaaaatatgactacggatgcacttgctgctttagcatcaacatcggatcctaaggttaaaagagtcatcccggtggaatgtatttcagagtaagcattaaagagaaaaaaagaagccctcgtcatttcaaagcagctatacgtgatcatggtgaacccgagatagagttgccacctgtcaaatgaagaaagtcaaatggttcaaccatacccgggcccggcgtgtcaaaagaaaatagtagcgaggagcccatcaatccgacagaagatgcagttccagaaacaattataagaaccgagccactaatcgaggaagatatccttgagccaaatgagcatcccgaaccagaactatgaatattcccgagatcgaccaaattctggctaaagattggagggctgattggagggagcaataaagtagtacattgtgacaggc

SEQ ID NO: 2268 - DNA, 915 bp, Arabidopsis thaliana
actcaatgtcgactggatgtctcaggacagaaccctaagacatctatttatacaaaacaaaataaaatgatggtaaacgggccaataacctaattacccggcccatagaaagataatgggccgagacgggcttcgtgatccgatggaggtccaggccgcttccaaacactttatcttcgcctcttctcttccttgtgctcagcttgtctggttgagtgcggatttgagtagactgtgaagacgtgatcgagtgtccggtcgagtgatggtgatggtgtggcgaagtgatactcgaccatggggtcgagtgatgtggtagagtgaacggtcgagtgttgtaaggtggtgtggcgaagtgatactcgaccatggggtcgagtgatgtggtagagtgaacggtcgagtgttgtcaagtggtcgagtaggtgggaagaatggctccgaagtcactcgacctgggggtcgagtatgtcttctggttccggctcgtttcttccaatttgctcgcaaacagctccaaatcacctaagacaactcataaatgcaatatgtatgcaaagctatcctaatcatgcaaagtatgcaagaatgataagaaatgatataaaacagtgatgaatgatacgaaactggactcaaaacgatgatgaatggacactgaaaacatgcaaattatagacatatcagtttccatttctagtccaaatacttaaccatacacatgacatcaagtcatatttgactctaaaacactaactaagcctcttcttgcttctcaaagctttgatagtgtagctgaaattcgtatgagtcattggctttgtatgttctaacaaggaaacactatttgggctttcaagattaggttgtagttcgagttcttatactaaatcatacacatgtcgtctggacata

SEQ ID NO: 2269 - DNA, 949 bp, Arabidopsis thaliana
gatgggagcgttgtgtgtggctctgtggtgggattctgagcagtctgaggaggtgtgtttgtgctagaggcaatactactgataggtttagtaagctctgaaccatccattccaaactccatctccaagtcacaaatctttagagagaatctatctctcttcacatcaaacctagcaccagctgtagctaggaacgctcttccaaaggataagaggatccttgggtttcttctcataatccaggaccatgaaatcagcagggataagagagttaccaaccttaacaggaacatcttcaaggattccttcagggattcgtttggaacgatccgcgaagaggagagtgatgcgagtcggcctgtagttagtcatgcctagtctctctacaacagacttaggcatgacgttgatgcttgatcccagatgacacaaagagcggctgaatctgcttgtggagatagagcaatcaagaacaaagctacctggatctggaagcttctcagtggtctgaccaggagtaatggtgcagatgtattcagctatgtctactctctgtgccttctcctctttggctttaggcagcatgattgcactgatgtctctggtgagcagcttagcttcatctgaactaattccattgtcaacaagttgtttgacatacctgttgagtgaggcggaagatgtctctcaagcatccttaggaagagtatggaggatcttctcaattatggctgtgcacttaacagcgtgaatctcctgcttagaacgacgcctcctcggataggggacaggaggagtgtagacagattcgggctgcataggtatttgtacctcacaaggtgcaatccggatccagtgtcgatcgacactagacgggtatcgatcgacaccgtcgtattgagtcgtctctgagaaaagtgtccatatggtgtcgatcgcacaggagggt

SEQ ID NO: 2270 - DNA, 694 bp, Arabidopsis thaliana
gtctgtaagtgagtactcaatggccctttcttggtaagctcctttttcatcatcttgatagtcgtcttttctggactgttttgatgtgaattcacatccttcttttctaaccataggaataacttcatcatttgggacgtccttgatgtcgagtggagcttggttggctttcccatcgagctctttgacttgatccttcaactctttcacattgtgtgttagctctattatagctttgtcgtgccattttgacctctccttgagttctaaccaatcatttgatgccctcacgcttgactctagctgtttggttgagcattctagtcgagtatcagttgagccttcctcgttcaatgtaacatcctctgtttctgacgcaatgtcacctttaaatatctctgatcctggtacttcgttgtgtgagtctaatgacatctcatagctcaaggtctcactggagagaaatccagtttcactacttttggttaaagtagtttgaaggtgatctctgtcaacaatctcctctagcagttcattacctagctgatccatttcctcaactaagaaggtttgtccttctattgttggcttcttcatagcgtccctgatgtcaaacttcattttgacatcctctcccagattaagattaatttttccctacttaacatctattactgctccaactgaagccaag

SEQ ID NO: 2271 - DNA, 898 bp, Arabidopsis thaliana
atgccagaagttcaaattacacatgcatatcaaccgattattgttgcaggttaagcgatcaagagtatatggagcttgtgtttgagaatggccagattcttgcaaagggccaaagatccaacgtttctctgcataatcaacgtaccaaatcgatcatggatttgtatgaggcagagtataacgaggatttcatgaagagtatcatccatggtggtggtggtgccatcacaaatctcggggacacgcaggttgttccacaaagtcatgttgctgctgcccatgaaacaaacatgttggaaagcaataaacatgttgacgattctgagactttgaaagcttcttcatcaaagaggatgatggttgattatcataaccgaaagaagatcaagtttatacctcctgatgagcaatccgtggttgctgataggtcgttcaaattgggctttgacacttcctccgtaggtttcactgaagacagtgaaggatcgatgtatctaagcagtgtaagagggattgattcacaatttttttggtttggtctatcttgttaggttcttgtctgaagacaggttttgtctcaacgcagagtctagatgacgagtcagatgatgcgaggccacaagttcctgcaagaacaagaaaagctttggtcaaaagaaaacgaaatgcagaagcgtataattcacctgagagagtaagtaatctctttaagatacaaagcatagtgaacactgaatctgatacaacggtataatggtattgtgcaacacagaatcaaagaaatgatatcaacaagaaaatgcgtactttgcaaaatctactacctaactctcacaaggtttatcataagaaccaactttttcatttatttcgaaagagatcaaaagctttttaaaga

SEQ ID NO: 2272 - DNA, 525 bp, Arabidopsis thaliana
ctagtaacggcctgctctaaagtagccccatcgatctcagatcaaggatagcacctgttacgagcaagctgttggcaacgttgttacgtccatcaccacagtataccaatgtcaagccttccaagcgaccgaagttttcttgaacagtcaagtagtcaccgatcaactcatcataatcgtaatcggcatcatgatgacttggaaaggtacgaagattccgaggattaagagggtatacatgatggtaaaggcttttcttttactcatattgcgagcgatggagtaggctgccatagggataaagatcattactgcaagtaaagacaagacagtgatgacgacagagttccaataatagcctccaatcccatcagctaagagacggctaaagttgtccatgtgaagttggttggaaagccaaagaaattatctacaatatccttagtgggtttgaaggaactaaagagggtagcaaggagcggcactaaaatcagaaccgatcctagaatcaatagaatgtatttg

SEQ ID NO: 2273 - DNA, 563 bp, Arabidopsis thaliana
agtaacgagtaacgtccgccagtgtgctctaaagctgatcgcggaagacggttaaaccttctttcaggctgagctggaaccagtcgcgacaggtcactcggttaccggtccagttatggaaatattcatggccgataacgcgttcaatatcgaggtaatctttgtcggtggcggtgtcggtgcgggccagcacatatttggagttaaagatattcagccccttattctccattgcgcccatattgaagaaatccaccgcgacgatcatatagatgtcgaggtcatactccaggccaaagcgttcttcatcccatttcatggagtttttcagcgaggtcatcgcccacggcgcgcgatcaaggttgccgcgatcgacgtacagctccagtgctacttcgcgaccagaacgcgtggtaaaggtatcgcgcagtacatcaaagtcgcctgccaccagcgcaaacaggtagcacggtttcgggaacgggtcctgcactgtaccaatggcgtccgttttccagttcgcttggcaacgcggttacattggaaacaggagggatattgat

SEQ ID NO: 2274 - DNA, 934 bp, Arabidopsis thaliana
ggttagtccagtgcatgtagttcctaagaaaggaggagttacagtagtcaagaacgagaaagacgagttgattcctcctcggacaatcacatgccatcagatgtgcatcgattacagaaagctgaatgctgccaccaggaaagaccatttccccttaccatttatcgatgagatgttggaaaggttagcaaatcaaaagtactattgctttcttgatggatactcaggattctttcagatcctgattcatccagacaaccaggagaaaacgactttcacctgcccctatggtacatttgcttatcggagaatgccctttggtctttgtaatactcctttaacatttaagagaggtatgatgtctatcttcacagacatgattgaggatatcatggaggtcttcaacgatgatttttcagtttatggatcatcgtttgaggatgtttagagaatctcagcaaagtgttagcaagatgtgaggagaaacatctggttttgaattgggagaaatgtcactttatggtgcaggatgggatagttcttagtcaccagatttctgagcatggtatagaagtatatagagctaagatcgaagttatgacaagtcttttagcacccgataatgtttaagcagtgaggagtttccttggacatactggtttctataggagattcatcaaagactttagcaaaatcgcaacaccactgactgctctactctgtaaagaagtcacattcgagtttacactagagtgtcatgatgcctttcagcagataaaacaagccttgataagcgcaccaattgttcaccaccagactgggatctacgttttgaggtaaggtgcgatgctagtgattgtgcagttggggctgttctaggacagaggaaggataagaacttcatgccactactatgcaagtaggcacttgatga

SEQ ID NO: 2275 - DNA, 545 bp, Arabidopsis thaliana columbia
tgccagattcctcggttgatcaacattgtgacctctcaaaacagtcagatgataagccaacaactgtacccaagaagaagaagaaaaaaaacaccataaacacgtcgaaaacgaaaaaaaaaaatacatagattatagattgatttagaggttaagaattttacctgtaatggcactatattaataacaggttgtaaacaatcttcaacttgaggaacttcgatagctcgacaagaaccactcgagcttaccgatgcagcatcaccttttgagcacattactattagtctccctttgcgtgcgtgaagttgctgaatcacagattgttgtttactgaaacaagcatcacgagtggcaatcacagctatggggagattctcatcaaccaaagctaaaggtccatgtttcatttctcctgcaagtattccttcactgtgcataagtgctacttcttttacttttaatgctccttctaaagctgttgcgtagttgtacctctgccaaacactagcagtgactgctcgtctatcaagagttgcgcgaga

SEQ ID NO: 2276 - DNA, 460 bp, Arabidopsis thaliana columbia
ctaagtcctttgagagatgttgcgccgccgttgctccgcctattcccggtggtagcgatggtggacctgttcttgatctcgctatgagccttcatgttctcgctgctatttactgtagtctcggccgatttgatgaagctgtaccacctcttgaacgagctattcaagtccctgatccgactcgtggccctgaccactctctcgctgcgttttctggtcatatgcaacttggtgatacgttgtctatgcttggtcagattgatagatctattgcttgttatgaagaaggtcttaagatccagatccagactttgggtgatactgatccacgagttggtgaaacttgcaggttctcttaactaagcatttaatggttaattaaactcttagattacgtttgctaaaagttactatataggttagatctaagtttctgaagtctctgataattttcaggtac

SEQ ID NO: 2277 - DNA, 476 bp, Arabidopsis thaliana columbia
tatctcgtggataagtctccagccgctgtttcacatgcttatctcacagctttgttacgataacctagtcctatgctaatatctttaaccatagttaaataattttaaccaaaccacggttaagtgtttcaactacataagtagctttgccggtgtattacaaacaaacaacacaaacaaaaaaaaagaactctttcgtcgactaatgtgatttattgttcaccggagtattaaagaagatgatgatcggagaaactcgcaggacttatcccactgttgaaatacctccatggccggtacttgaagagcttacaacgtcggagtttttttctccggtgatgaatagtccagattgtagcatgcttgaagctttggcggggttgcagcgttatttgccgtctaacgaaccggatccggagtcatacccggatctattgggtccggattcaccaatcgatgcttactcatgcgaccat

SEQ ID NO: 2278 - DNA, 608 bp, Arabidopsis thaliana columbia
tcaaacctaaataatgaatgtcacgtagacaagtttcgacgtctttataaacttgaagggcttggttaagattccgtcctatggcctctccgctactccctggtccaccggatcagagaagaaatctcgattggtgctggtcgaagcttccttcagatctcatgcaatttgtatttgaccgccttggttttgccgatttccaacgtgcaaaatccgtttgttcatcttggctttcagtttcgagaaattctcagccaaacaatcaaatcccttggatgattcgattccccaaggacaacaatcactgtctcttgttcaatcctgaagaggaagacaagatgtacaaaactccaaatctcggcaacgatttcgcaaagagctcttgtatcgccagttatggaagctggcttttgatgcaacctgaatcagaatacatggaagaagacttagaccatcaatgtaataatctctatattcttgatcttctaacccgcgagagaatcaatctaccgattctctcaaccagagtttggactcacatgtccgatattatggaccgatgagaaaagcaaagatcacctagttattggaatggctcatgaagaatt

SEQ ID NO: 2279 - DNA, 475 bp, Arabidopsis thaliana
tatataaaggtatgtttgtacgataacttatataataagtctatgatccagaaacttgactgcaaaagagttataagcactaatcaataatctactcttcttgtaaattagatttgttggaaaacaaacaaacatgatctcgaaatttgaactccatctgagatttgattaaatacactggattacaacaaggagaaaagagagaaaaactttaaaagatctctctaatcctaattaaactcactttacataacttttatgcaattaattattgccataataaaacaaaaattagtgttaattaaggaagaaacgtaggaatggtagtagaagagtgttggtgatgttgatgacgatgagcttgatctttcatctccgccgtagaagcatgaccacaccggtcacatctcaccggcgtaagaatcctgcgacaagaaggacaagattcgagctcggtacccggatcgagtcgacc

SEQ ID NO: 2280 - DNA, 944 bp, Arabidopsis thaliana
ttcttataacctttttgcagcaattcgtggttggttggttagaagatgttcaggggatattggatggttaaaatctggaggtgccaaggtaaaataattgttatatatcacattcctttcttctcactgtgtctaattattttctttcatctcataaacttttgaactatttttgctttggcattaaccaactgcgcagacaaatgagttaggtgaggtgctagtgaaagcatcagtactttccgagctccaacgcagggtacttaaagcggaactgctctgcgtgaaaaggaagaagagaacgacattcttcagcagaggcttcaacaatatgagaaccggtggtcagagtatgagacaaagatgaaatcaatggaagaaatctggcaaaagcaaatgaggtcgttgcagtccagtctttccatagcaaagaaaagcttagctgttgaggactcagcgagaaactcagatgcatctgtcaatgcgagtgatgcaacagattgggattcaagcagtaatcagttcaggagccaaacaagcaatggagtagggtcaagactacagcctatgagcgcagggctgagcgtgattgggcggttagcagaagaattcgagcagagagctcaagtgtttggtgatgatgcaaagttcttggtggaagtgaaatctggtcaggtggaagcaaacttggacccagacagagaactgaggaggctgaaacagatgtttgagacgtggaaaaaggattatggagggagattgcgggaaacgaaactgatactgagcaagctcgggagcgaagagagcagtggttcgatggagaaagtgaagaggaagtggtggggaaggagaaatagcaccaggtattgatgaaggagaagactattcttacaggcaaacttaggtcgtttgctaattaaggatttggcgggttttatctggta

SEQ ID NO: 2281 - DNA, 1225 bp, Arabidopsis thaliana
ccaaaagaacgaaaatcatcagcagaaacggatccagcagcaactccaacagaatctccattagaagaaagtacttcgtgatcatcttcctcttgatttgaaacctgcagcagcaattcactacttgcactgctagctctccttgacttgataatagcagcgtgtggtgtaggaaccaatctagaagcagccacagccgcagcaagcgcagcaccaggcttcacattcgaccttactcctgccaatagtgaaggcaaaggcaactgtctcaacgaagaagaagaagtcgaatttcgccgcgtcggaggaaatccgcgatgcaattcagattcaggtctcaatacagcaacgttagtaagggcttctgataagcggcgattcggatcgtcttgtttccgccggttaattgacggtggtgaggaaggaggagaagacgaagccgatgaagaactggaggcgttgagaatttcgtcgacagtacggtgaggaacggaggaagaatccaaatcggaatcggagtctgagtccgatacgaggaacgaatcgagatcaagttccatgtgcgacttcttaatagccgtgaacttcaaagtagccgtttggtattatcagaactctctgactgactcgactccgaacattctccgccggtactaaccgacgttctaatttcagctaaaacgagtccatcacaagaagaaaagaaaaaaaaaatgaaagcctctggattatgcagaaggttcaatttttactttttatacatttgacaacattagtataatcagtaaaaaacttacaaaacttctgagaaaccatggttcatgaaacctgcgtatccactgaattatcaagttgtaacagatgttcatatctagtcacgaacttttgttcttcttttctatttcaagatcaaattataaatagactgagatttggtaggaaagaagacgcagctgaatccaaaagtcaaattcaataagctccaatgcattttgagcataagataactctcatgaactacaaagaaggtcgtgagccaattgctaactccagtacatgatataagagtaaactgtagtagtgtcgaaatgacaaaacttaaaatctcaaagcaactaaagcaatagaacatatgaaacgtaaaatgaaaggagacaactaatcgaacaagccgaaaccaagatctccatcactctcttctgcgggttcgtcctacaaacaatta

SEQ ID NO: 2282 - DNA, 297 bp, Arabidopsis thaliana columbia
gattcatatagcacggaagttatactggggcagtttacaagtcactttttaccttgtaatggatcgtctagctctgattggtcaggctcagcccaatcatatgacttaacgtgcattgaaccataaacaagcttgcttagcactgtcatgcctggatgattatgaagtggtatgatagacccaggtggcatgcagaaaattccaatctgacaaaataatgatcaaagcataataagcagacaagtaaagcaagaatattgcatttcagaactttgtttaactgcagtaaacatgtgg

SEQ ID NO: 2283 - DNA, 518 bp, Arabidopsis thaliana
gatagagagatgatgagcttgaaggtgatatttgttcagcggtcgagtatatgaagagagatggtgacgtgatcgagtgaaggttgtgaggatgatgatatcgattgaagtcgagtgtttttatggggagagaagctggagtggtcgagttgagagatgaagtcgagtagtgaaggtgaggataaggttgcgtagtgatcgagtggagagatgggtgtgaagagattccatgtctcttggtctgctgcatggaggacatgggcgtcagtggtgggtcccactatggcttcttgtctttcttctgtgctctctgtttacaggaaaaacctcaggaaatcccgcaatcctttgtaaacttgataaactccctataagactttgtagcttctgttggtcgagtaaaatgatgatttaaaaatttatgggttttaaacatcactcatattcgaccaatatactcgagtgcaaggtctccaagtgcaattgaaagttttaaaaaaatttgcaatccactatac

SEQ ID NO: 2284 - DNA, 580 bp, Arabidopsis thaliana columbia
aaaccttataaaacgtccaaggactaataatgcatatagggaagtcttctggagcaaatttccacttctgtaaatttgaaagcgtcacggactttgctgagccgaaactggtgtcgatcgacaccaggagtgtgtcgatcgacactctctctgaatccggaatccgaaatcgtccttaccttccttttctttaggttttgctccaaaatgtctcctcatctccattgttgtcccattgcatagataacctgaaacgaccctaaaaagactcgagaaataacataaagactaaaaattttatacctaaaacatagataaaatcagtaaaaatagggatatatcaaacacaactagtccagaagggattcaatcaattctaaaattaaccattctacagactacggatcccacaaccattctatccatccttaagaactctaagtcactactcagacaacatgctaaaagacataatcgcaaataaataagtatattgcataactaaaaagataaagagtagagaaacaagatgatagacgaaatcaaatgcggaatctcaataactcggaaaaatcttgaa

SEQ ID NO: 2285 - DNA, 472 bp, Arabidopsis thaliana
ccccacttggatcgagatgcatttatgctcgatagcaaaacgtatgtaccagcgttatctggttcattctcgaaaagtttctttgcagcaacttcagctaaatccaatcgtgagtgagttttacacgctcctaacagagcaccccaaactgtagcatctggcttaatagtcatactttcgatcaactccattgccttatctacctgtcctgcacgcccaagcatatccaccgtgcaagaataatgctcaaccgttggagtcacgcaaaactttgattccattgattcaaatatctcaagcccttcctcgagttttccagcatagctacatgcctgcagaattgcaattaaggtcactttgtttggcatggtaccagatgatggcatctcgtgaaaaatcttaagagcttcctctcctagaccatgcgacgcatagccagaaatgattgaatccacatgataatgtcctttga

SEQ ID NO: 2286 - DNA, 526 bp, Arabidopsis thaliana columbia
tagtaatctgtattaatgtacccagttgttatttgtggttccataattaatttaaaaggttttaaaaataaaacaattactaatgattttaaaattgcacaaatgggtttagttgaggaaaaaatatattaaagaaatgggtcccacgttctctcaacttcctctcccgccaccattcggtccacgcgtacctcgtttacatcttctcccttcttcttcctcagcagctcaatcgaaaagtctttcccaccttgttgactccgtcgatggcgcggagaccaggaacctccgcttcttcttcacccacgatgtctccgtctcatcggatgagcggcggcggaggaggaatctccggcaaaagcacgctccggaaacaaaacgccgccgagctactcgcgaaggtcatggagaagcgcgaatatgattatgattacgacgatgaagatggaggtgaagatctgtaccaggtacatcttcccctcttactcagtctcgaagacgagatgataagcgtattggtaagggc

SEQ ID NO: 2287 - DNA, 527 bp, Arabidopsis thaliana
tgcaaatatcatgctccatgataagtgttagcagagcatatccagatattgaaggtagatcaacctctgttaatatcaaatcaacactttcaggctttccttttagcatctcccaagcttttaagccatcaggtactgcagcaactgatcaatacacaaaaccaaaccacattaatacaaatccttttagcttgttgtagaaactaagcgttgataaagatttctatatgaacacaaaaccgacaaaaaaatcgttgacttttctaaatttgactttgaattgtaacatttagccgcacgcgaatcagattcaaaacattagcatctcaatcgaattcataattctcagattctatacaaacaaaacctaaatctcaagcattgaaaccagaaactaacctctgtaactacatttcctgagaagagcagcgataatctgtctagtagaatcatcagcttcaacgagcaaaactctaagcgcgattttcgggagaaatctctcccacttcaccaaaccatcaacaccg

SEQ ID NO: 2288 - DNA, 450 bp, Arabidopsis thaliana
  unsure (1)..(450): unsure at all n locations
tgattcagcagttaactactacataatacagtttgtctttgaagtgttaggctctgattgtttcatcatttatcatttccattcaaatgattcatttacatgagtcatttgaatgatacatttgaatgatgtttgttttattatttgtaatttaatctaaatgatgcatttaaatggatctttaaatgtatgaacattttgaagttaatccacattaaaattaagataaaaatgactagaatgcccgtgctttcattttaactaatgaaaaatattcancatcattaccaattatcaataccaaacatattggcgggaaaatatgattttacggttttggcgggaaaatacgattttacggttttggcgggaaaatatacttttacagtttcgccgagaatacacgattttacggttttggcgataaaatacggttttgcgattttagcg

SEQ ID NO: 2289 - DNA, 972 bp, Arabidopsis thaliana
agaggatcccgagtatttgcaaatcacaggttgatcagggattgggtattgggagcaaattcccgttcttcaaccgccaccagttaaccatgacaaaattcattcagttgcgggaagtagaacaaggggctggtaagtcaccaccaccagttctagtcctccatgggcattacggaggctgcgttggcgaccttccaagctacgatgcttttgtcctcggtggtccgtactctgtccgtggctacaacatgggagagctcggtgctgctagaaacattgccgaggtaatacagcaaacactcaaaacaaaaacagtcttttctcctaaacccgaaaaatatgtgtgtctaatttggtttcatggattacaggtcggtgctgagatcagaatacccgtgaagaacacacatgtctacgcttttgttgagcatggaaatgatttaggaagctcaaaggatgtgaagggaaccctacagcagtgtacaggagaacgggtcagggttcatcctatggtgcaggtgtgaaactcggtttggtccgagctgagtatgctgtagatcacaacaatggaaccggtgctctgttcttccgatttggagagaggtattaaggtaatgtgagaagcaggctcatgttatccaccttagtcttttcattttctctgttgaggatctgctatttttctcttttttccttttcttttgtgttttctttttttttttctacttctttttcaataattgtttaatgttagtgtttgatgacgttgctgagttgtgctgagaatcgggaaagagtttgttcttcgtaatatgtctagacttttgtaggaaaattttgaaactttcaagtttcaaaaaatcgtatgaatagttgacaaatgaaaatttatattggtaacacgtctgtctgcatctgagttctcttttaaaaataacgaataagggatagtgcaatagaatttaatcaaat

SEQ ID NO: 2290 - DNA, 735 bp, Arabidopsis thaliana
ccgctgccaactcgatatgtccttacatcaaacactgaggacagtgtaattctagagggggaggatttttatcaagatgatgttttggctgacaacacaatcgaagagctcaaactcaccagtcaacccactcgaccacaagctcccccagctactcgctttgttgaaaaatcggaagctgcaaagaccaaagacacagtcttcgtgtcaccgccttacaaacctccccttccattccctggtcgttttaagaaagttctagttgcaaaatacagagccctcctggaaaaacacataaaggatatgtctttagtggactgtctcgcgctaatacatgacgagcacaagtacatgaaagtagtgttcatacaaggagtgttcatgtatgataggcgcctaaagaataatgatgaagtcacagctcttatacaagaggccagaaaacttaatgattctgaaactgtggaggaaaaaaatcaacagatgtcgtctggaaatcgttaactggtcaaggactaagcagcaaaatagtcaaaaacttattgaggaaagtcgacaaaagcttgaagaggcaatgtctatccaagagcacaatcaagagctgatatctaccatcaatactaatctacttttggcttacaaggtagaagaagaattttggaaacaaagaagcagacaattatggcttgcattaggggataaaaattcgggttactttcatgccatcactagagg

SEQ ID NO: 2291 - DNA, 593 bp, Arabidopsis thaliana
ttgtgaagggcatcgtctaaagagactggttgcctaacagtgagttcctcacggaacctagaggagaaccaaaggccgttacgaagggctgctatggctacctctttgtttaggtttgcaatttttgacttgattgctttgaattttttgacgtaagatcgcagggattcgttctgaagttgaccgagactccagaggtcggcttcagacgtcctgtgttcgataagtaccgaatactgttttaagaaagcggcggtgagctggtcgaaggtatcaatggagtccctttcgaggctagcaaataatttgagggcgtgacctacgaggttttctgcgaagaaacggcaatgacctgcttcgttttcttcgtctgtaaggtacgctcgtgttatagcgaaacggaaggatctcaaatgagcctattggtcgctcgacgtctcggaggctaaagcgagcgatcctatccgtgaacggcatcgctcactgctaagtgcattcgagaatgcatttgagccatgttcacgtttgtatgagctgcgtaattgcggaatgtttccattcacgacgttacgcggatcgaccggtgcttgggg

SEQ ID NO: 2292 - DNA, 505 bp, Arabidopsis thaliana
gacacgagaggagtgtgctttaaagctcttaagcgtagtaattttagcggacctgccagtttcagcttacgcttttactctcatttacgctgctgaggctggtatatgttgcatttttagtttagagtttacttaatttagaaaatacttaaataaatatgactgaactcgcgcaattacaggccagtgccgaacaggcagcggccttattgaaagcaatgagccaccctaaacgattgctgattctgtgcatgcttagcggttcccccggcaccagcgcgggagagctgacgcgcattaccggactgagtgcctctgcgacatcacagcatctcgctcgtatgcgggacgaagggcttatcgacagccaacgggatgcccaacgcattctatattccattaaaaatgaggcggtaaatgccattatcgccaccctgaaaaatgtctattgtccgtaagagtcactatggctttgacaaccatttcgccgcatgatgcacaagaa

SEQ ID NO: 2293 - DNA, 591 bp, Arabidopsis thaliana
gtggaattgcggagataaagaagaagatacttaggaaactgaaaacaagatgaaggcagatttcccggagtggttcaaagagatggacaaaaaggaacttgggtcggattcagggccgactacagctcaatacaagctaggccagctccagagtagctcggccagctcaaggttagcttggctagctcgaggagaagctctgccagctcgagggagtgttagtcagctccgccagctcgaccaagctaggaagggagtgaggcggttgggccaacggttggccaggcggttggacggttgagcggttcgactgttaggcggttgggcggttgggtggtcgaacagttacccctcttcgtcaaaagtcgcccaggaacggttatgggccaaaaggtgccttttcgggtgagaacggttaccgcccgaatccctgtaaatagaagggtcttggatttgatttgggacacagaaaaacacggggaaactcactaaagctctccagggcgtcttggagaggaaattacttaaaagagatcaccggttttcagagcatactcgtgtgcttgagagattggcgagggaaaggtgagg

SEQ ID NO: 2294 - DNA, 592 bp, Arabidopsis thaliana
ctaggagatcctaatttttttagaatgatcttatgccgaatgatcgcactgcattcgtcacttagcaccaccattccttggacttctttgatcctctctgtaatcatgtctttcacatatttgttagagtctcatataagtgcaagacagtcgacgagaggcatggtgacttcaagattttttaattatttctccaggagagctttgtacttctgtatcatgaccttcttgaatcgaccaggaaatgggagtgggggtttgtaaggtgggggaacgaagacgttgtctttggttttggcggcagctggtttttcaacaagaggagatgctacaggagctagtggtcgagtaggttggtcgagtataggctcttctattgctttttcagtggtatcttcattctgacataaatcctccccatctcgctccacactgtcctcagtgttttgattcggaccctcttttgtgggtaattctctaccgcttctaagcgtgatagcatgagcatactcctttgaatttggcattgattttccggaaggtcctgtaaatttgggtgctcaggtcgatccaatttggccttctatgtatc

SEQ ID NO: 2295 - DNA, 528 bp, Arabidopsis thaliana
tagtaacgtccgccagtgtgctctaaagggattgcggaaatagttatcttacgagccgtttttgagtatgattgcctatgtatgtttcaggctgtgggttcaatgaaccggatggtccaatcttacgatttggctatgcggaataatccggaggcggtcaacaagctggcggcggccgaggccagagcagagaaagctgagcgggagagagatgcggcggtctctgaggccaccgaggcgaaattggcgagggaggaggctgagagggaagcctatgtgaataaggagaatgctctcaaattagctgagagcaatatgaggatagactccaaggtcgttcgctgtaagcgaatgcttgccgaggcgagggggctcgaagacagcgaggtggctcgggctgcgcagaaagcaaggcgagaagtttcagaggtctttctcgccaagtttaaggtggccgaagagatagcagctcttctcgaggacgctaatgatcagttcatgtatttgtctcaagctcgggccaatgcg

SEQ ID NO: 2296 - DNA, 786 bp, Arabidopsis thaliana columbia
gggtaccgagcggaatagacaagccataccagaatcaaattgatgtagcgagctactgtaacttcatgacaagaactactagtgaagcattactcctcatcaccaatgctttaacttgtctttcgatgcagggatttgacaaagaacgaagaatttcagctgagaaagctatcaagagcaaagagactcctgttttcgcaatttctactcctatccaagccccgcctccaccctcatcagagaccagaatggagtctatgcttgtgcatcttcttgcaggcctaacaaagcttgatagcaaatatgattctctctccacaaagcttgatatcaactatgattctctctccacagatctcaatagcaagattgacaatctatgctctcaattctacaatctttcacctacatcaacttctatcaatgcagtcacactatgtagtggaaagcagctcaacccaatacttcagcgcgaacgttcagctgaaccttcatcttttctaaatgtagaaaaagactcagtgtcgattgatacatcagggtgtcgatcgacaccaattactcttgacgattctgttatgcctttctcgagtggaatcgacaattttgcggaggaggaggaaattattcccgatggtgtcgatcgacacccagctcgtttagaaaatgtgcaacttctgactgaaaccaagtcagcaaatcggcgaattcctttccccaagagtcctaaaacgttaagacaagccttagatgatttaagatgcaagactatgattgataagctga

SEQ ID NO: 2297 - DNA, 442 bp, Arabidopsis thaliana columbia
tgataatatttagctgtttctttttctgagctatccatgcagtctatgaaggtaaaggacctgaataggagatgtacgaggagaatatcaaacgattaaaccttagacatgtagcattccgtacaatgtggctcgcagctgaagattacccattgcgtctaggtactgcagatctcggtgtctgcttacacacttcctcgtcgggtttagaccttcccatgaaggtaagcacattgtttttatagctcatatgtctgagaagcacattgttgataataaggttaagaagatttaagacttgatttccattgtgtcaacttgctaccgatgtttggcgttctaggttgttgatatgttccgatgtggcccccagtatgctcggtttcctactcatggtaaataatcaatcacttacaatactttcacgaacaaatactataac

SEQ ID NO: 2298 - DNA, 468 bp, Arabidopsis thaliana columbia
ttaattcagttgtgattctatgtcttctaagtaatgcaaatttgtaaagtcaggacatttttggttatttgttcttacaggggctaataactgatagcgataaagatagcattttgagaggtcttgatgatattgagagacaaattgctgcaaataagtttgcatggaggactgatcgagaagatatgcatatgaacatttaagcagctcttactgatctcactggtgaacctgcttagacactgcatactgcaaggagcagatatgaccaagttgctactgacttcaggctttggtgtcgtgatgctatcgatacaattaatgtgaaaatcagacatcttcagagagcacttgtcgtcctggctttgacgaatgcggctttgattgatcctggttatactcatcttcaaagagctcagcctgttttatcggacacgttctcttaacttgggtagagcaggtatggaa

SEQ ID NO: 2299 - DNA, 681 bp, Arabidopsis thaliana
ctaaagtagtaatcgccaccgcatcggcgtgaatgtcatcgcggataatttcgcagaccttgcgtaatgactcgctattgacatggcgaaacagcggtagtgtgttgttggcgatatccagcgccacgttggcctgccgcgcggcgctggcctctttttcgccctcaacgctttgcaccagaagcacaataaagccgatacagacgctaccgaggatcattggaatgccgattttagagacgatatcgatccccaacgcggtagttggtgcccagacaattaccagaatcatggtcaacgtctcacacaacatgccgccgagaataccgacgcgccacgcatgtgctttcggggattttcaggttgatccagcccgatatacaacccgccagaatgctggtgataaagcaggggatcgccgtcacgccgccgatatcaattaaataccggtgaatacccgcaatcacgccggtaatgatgcctacccacgggccaaacagaatcccgccggacatcaccgcgataatacgtacgttcaccagcgagccttctacgggaacgccggaccaggtgcttgacagggcgaacagcgagaaaatggcggtaacggcgagcaattcttttggggaatgcgcggcttgtgcaacagttcgcgaacagcggatccggatgagaaagaca

SEQ ID NO: 2300 - DNA, 521 bp, Arabidopsis thaliana columbia
aacgaattaacttcagacatgagcaatacagggacctaagctaattggatcatcattttatgtattgcaggaaattcaagtaggaatgggaccttgtggagaattgagatacccatcataccctgagagcaacgggacctggagattccccggaattggagagttccagtgctacgacaaggtattttaaactagcagaaaaagccttgaaattcataagaacactagtcaagagattagacatataccagagaagatcatgtatacttatgcttacttatactccatttgcttcttctaagaaatgatacttgttgattgcagtatatgaaatcgtcacttcaagcatatgctgagtcaatcgggaaaactaactggggaacaagtggacctcatgatgccggcgagtacaagaacctcccagaagatactgaatttttcaggagagacggaacatggaatagcgagtatggaaagtttttcatggaatggtactccgggaagctgctagaacatggaga

SEQ ID NO: 2301 - DNA, 522 bp, Arabidopsis thaliana columbia
actataaagtgaatcttggactgtcttaatttcaaccatcaacttctctttcttttcctgaatatcaccaaacacctccttgttccatttcctcaaggttgtttgtattccttttaaagcttctggtgttgggatattacccttccaggatgctaaaagcagttccttaaaccctggatgcgacaaccaagcagcctcaaacctaaagggtcttcgaaacctattcttgccaactcccagcgccaattgcaagtacaggggtgcatgatctgacgctagaaagggcaaatgtgttaacgttgcctcctgccattttaatcgagcatgcgaacaacacaataccctatcaagtctcttagccacaaaaaaatctctcctcacgctcccgcttccaactgaattggttacccttgaaaccatgtcaacagtgaggaatcatttatccattctccaaaggcaatagaatcaggagatagtggccacttcctcctgatctctcatcaactctgacaatcatattaa

SEQ ID NO: 2302 - DNA, 1620 bp, Arabidopsis thaliana
aacaaagtaccaaaaccctaaaacgtttcaattttccagaataaaaaaaacgagtagaggtctcgaaacggaaaagattgaagctttagcagaaaaaatgagaagaacttacaagcaaaagaaccaactctgaaactgatttagggttttaagagggtgagactctgtagtgagagaaccggattttcgactttcctcagagaagagaatgtagtgaaaaactgatggtagatttgcttatgcaaagcgtatttttgatcaatgtatctctctgtccaaagaaagacgacaatttgaaactttaaaagacgaagtgaggaaagaaaagtgtatactctccacgaaggagagtcttcaaagatttgagaaacgcagcgtttgggagtcgtcattgactttttctgtatgaggcgaataagacaaactacaagtgaacctttctttctctctatgcagtgtcagtatgattgactgattttactccttcgagttgactggtttaactcctttaaatcatatgggcttcatcaagtatgggacggcccacaacatatgtctcttcttataagcgattgggtccaggacagacaacgttttgttctactacaattgaataacccagggaattcaagtatgatttcagtttttggtttacagtcgcattttgtatagttcctttggttcaagtgtgaaggcgataggggaagaataaaatcaagagattcagtaatcagcaagtcagctaaaccaaaacccttcatgcaaacagagtcaaaatacacattgaaaactgaaaaagtgggagtcaaaggttttgtcacgaaaagagcagtgatgctaacaagatatttgctgaacaaaagaagcatcatcaaggtttaggcagtctatttacaggccttgccatgtaaaggagtgatgatcaaatcaaaatttgaactaaatggcataaatgttgacgagaaattaagacaagtgtaaacagctaagtttaccaaagatccttacctatattcttaaccagattgccaaataaaatttcgaagattgatgctccactcaaagtgagtcacagctatgagattaaaagaataatcacttgtacggagaaaatctcagcccacatcataaattgccaaataaattagaagaagattgctcaaacacaatcttcaaaatagccaattgaaattcatcaaatcccttatgagtaaacctaatcttacacaaggaaggaaactaacagcttctaatcgagtagcagaaacaagcatgataatatcaaatttatgatatgatcgacggattagggtttctaaagttactttagagcatcgcaccgaccggtggggttccgagaagactcgcctgctcaaaatctatctcgcctaatcgatgatcttgctccaactctaagatcaaaggcacggcaaggatgagaaacgtcgtaccggcgatccacgccgccttcccggtgctctttaacagcttcttcgacacgtagacggcatcgcaagcggcgcgtcttccctgagaaacgatatcgtagtttgaaatcttcgccaagatgctcgaatccctttgccggctccgattttcttaggcgccattgattgaatg

SEQ ID NO: 2303 - DNA, 521 bp, Arabidopsis thaliana
aatctttaaaaggtccttttagattgaatgttttatacctgaaatgtaacttagtacgctgagatctcgaagccaaacggttgggagaacagcgagggtggtaagcagagcaaatagacgaggcgcatctaagtgaaaccctccaatacttagactagcatttggaaacattgatgaaagattatcaccttccaatattatgtattcaacactcatagcctgcatgcaaaatgaacttgtgtcaaactttgtgtaactttaccataacttgtatcaaactttgtgtaactttaccatatcataggaacattcagaatttctctctagacaaatatttcaatgtgtagttgatgaatttcaacattttcttatactaaaaaccaaatatttcatttatgaaacaagagagagggaaacaatatggaccgtgggcaaaggtgttgtctacgctcacatgtggtccattgttttgacttgagattcattttaggtacttattttgaaactttcaaaaatgtatt

SEQ ID NO: 2304 - DNA, 580 bp, Arabidopsis thaliana
  unsure (1)..(580): unsure at all n locations
nnnnnnnnnnnnnnnnnnnctaaaggcattgccgagatggcctaatgccgcggccagatcgctggggccgacgaagatgccgtctacgccttcggtagcggcaatggcatcgacgttatctacgccctgctgactttctatctggaccagaatagtgatgttcttgttcgactgagcgaaataatccgccacggtgccaaacatattggcgcggtgagaaacggagacgccgcgaatgccttccggtgggtaacgggttgatgccaccgccagctctgcttcctcttttgtttctacaaaaggaatcaggaagttatagaaaccgatatccagaagacgcttaataattaccggctcgttggtcggcactcgcactactggcgcgctggcgtgcctttcaaggccattaactgcggaataaacgtggagatatcgtttggcgcatgttcgccatccagcaccagccagtcaaacccagccaaaccaagaacttcagtgctaatcgggttagagagtgctgaccagcaaccaatttcgtactgtgtcgcagccagtgcggctttgaatttattcgggaaaa

SEQ ID NO: 2305 - DNA, 586 bp, Arabidopsis thaliana
  unsure (1)..(586): unsure at all n locations
nnnnnnnnnnnnnnnnnnnnnnctaaaggaacccgattcatgcgctctatccggcaaatccggagagcgccacgccatacagcccgtcttctcgccgttggctgaatgtgatttatatcgacgttaacgccgttgaagatttccatcttagcgaagaggctcaggcctggtggcagttgccgaccacgcaacagacgctgcaacaggcgcgcgatgccgactgggtcgattactccacggttaccgccctaaaaatgacagcattacgaatggcgtggaaaggtttcgcgcaacgtgatgatgagcagatggccgcgtttcgccagtttgttgcagagcagggcgacacgtgtatctggcaggcagcctttgatgcgctacatgcccagcaagtgaaagaggacgaaatgcgctggggctggcctgcatggcagagatgtatcagaacgtggattcccagaagtgcgtcagttctgcgaaaacatcgtgatgacgtcgatttttatctctggttgcagtggctggcttacagcgagtttgccgcctgctgggagataagcatggctatgaaatgctgattgcttgt

SEQ ID NO: 2306 - DNA, 462 bp, Arabidopsis thaliana columbia
ctttaaaataaacttcatttgataccgataaatcatcggcgttttatacgtattctacaacgcctccgagattcagtataagacctcctatgtcacttattagaacctcttcattcacatggaaagccgtgaagaaggtcttcactagatccctttccttttgaatcacgtctatatatgactctactaagtttctaataaagctccaagaaatcacgtacgtaaccttcattcgctctcttaatatatacataaataccatagtttctatatagttgataaggtttgcatctcgcaacggattgatggtacgtagttcaatggtcaccgcattgttctgtaaaatcttttttgggacacatatgtaattcagttgtatgacgcttatcaactctgaagttagtttatattcgaatgtctttaattttaattatggttagtctttaaaacaatcataagagg

SEQ ID NO: 2307 - DNA, 480 bp, Arabidopsis thaliana
tgtacttttgatacagatccgtttcaacaattctgatagttgaaaatgtgaactaaatgtgcatctttttttacagtaaagatagatcagaggcaactaaaggtcatgttgacttccccttttacgtcttctcgatttccccggcgaacgtgacacagtaaaactgttgaatctcatacagtatatcgacgtttagcatcacgatcaagagtctttgcatcctcctgaaaaacaaattggataagtcacaatagcacaaaccctatgtagtttaggagaacaaaaagatgttggagaaatagttcatgaactatgaaatccgattgtctcattgtagccaagaagttcctttcactgcttcccaatgcttagctgcagcaaacaccgcaataagaatataaggtatcagtcccccaaaaaataaggctcctaaacaaacctagatcctggccctagttaagttaaacgatgaaaccaatg

SEQ ID NO: 2308 - DNA, 726 bp, Arabidopsis thaliana columbia
attccagttgatcagaaaggaataaacagtaaacacaactaatccagaagggattcaataaatctacacttaacaaccagattcgaccaggggatccacaactactctatcccatcctcaaaaatcctaatcactactcagacaacatgcttaaagacaataacatagaaaggtcgaggtggtggtcgagtaggttggttgacaaaatggtttgggctgcttcttggcctttgtgatcgagtatgtgtatcagctgtcaggatggagtggttcttctcctctgcaatcgagtagaactggtggactggcaaagtggactgcctggtcgcctctacgatcgagtagaattgtagttgggactgcctcctcttctctgcgatcgagtgtaagtgtctggatggactgcttagctgactgcttccctctctcctactggtgatcgagtatgttggtggaaatgtgacatcatgttctgtttttcttctttctgagtgatataactcaaattgccttaagcttactccttcaaagaagagatcgtcgttagcacttaagggtcgaattccattgagctcttgatgttcacacaatatacttatgatgttgtttaataagctaaatgaagtaattgaatgttaaagacaaataagcaagtaaatgagttgtagattcaagtgattaaagcgtcaagtctaaggaattgtctcgggagatagataaattgta

SEQ ID NO: 2309 - DNA, 530 bp, Arabidopsis thaliana
agttgttgtttttggctatacaaacatttatgattctataagccgaaagacgctaggtttgttaactttgaaatgtgttaatttatatatgtatatatagtaatacggcttattaagtgaactactgttgggattgatataaataacgtttatcaaattaattaatgtaacttaattaataggtggcaggggttgggaacaagctggtaggttccatacaaggctcagtaaagccagtggagtttcatgataagtcagtgagagtgggttatgtcctaggtctcagagttgtgccgtcgtatcgacgccgtggcattggatcgattctggtgagaaaacttgaggaatggttcgagtctcgcaatgctgactatgcttacatggctattgaaaaggacaatgaggcctctcacggtctcttcatcgggagacttggctacgtcgtctttagaaccccgcaatcctggtcaacccgtcaacccggccgtggttaaaattccttctgcatcggaataaggaactaaaggtga

SEQ ID NO: 2310 - DNA, 817 bp, Arabidopsis thaliana
cccatcagacacagcagaagcttccgcctttagctgtaacaatctatctctcacattctgctcataagtttgagcaatcatctccgccttccgatcaacatacgtaccatccgacttagtatgtgtctctacaaacacctcaccaatagtgaccgttcttcccaatttctcctcctgcaatgaaaccaacacagctcaaatactcaaaaacatacatgtgaggtaactgaaagaggtaacagacaaacttgcaaattcgtcttggatttcttgaaaagactttggcccagagaagtggatgtgaggaccgagaccgttacggtcagagagacgagctttggaataggtccgactccgtttttgtgctggttcggtgtcccagtaagcgcacataacagcccacagagtttcaccaatccatggaggctgctctctagttctccttgcggtgctaaccatgtccttcaagcgccatttacagacctcattgaagtaatactgcacagtccctcttattaagggatcccaactgtgagttttctacaaaaaagagtagcttgagttagtgaaatttaacagattaagcaggaaagttaagaccgtaagagagatgcatgaccgcttaccgcaaactctagaacatcccctctctcttctatccaatggcacacatgaccagttatagtagggagcattaaatttctgtgtaaaaatccgagtgatctttctaaccaactttgatctcctgtcgcgagtaaacctccatgcacatgaaacaatgaaagaaaaaaacatgttacattagtgaaacaactca

SEQ ID NO: 2311 - DNA, 554 bp, Arabidopsis thaliana columbia
gatcttcactgaaaccttgagagttgtattgctaagaacgaatggacttttgtattaattatgacaaagcttttacaatgtgaaaagggattacaagtgtaaaagtgtgtgtatcaatgtaagttggattgaatgtctcttccaagtcgtcctacctcccttatataggtctacgcacgtggtagctccgtccgggatctgcggagatcctcctggatattcggcaggtcagttccgagatatcaggtccgctccacgaatatctcttcgtcagttcctaggtcatttcgtcagctgcgtaggtcctctacttaatgggcttagtggacttttgtgggctggcttggtattttcgcaggtggattcctggaggggaatccagctccaacagctatcctaatcatgcaaagtgtgcgagaatgatgagaaatgatataaaacagtgatgaatgatatgaaactagactccaaataatgatgaatgaacactgaaaacatgcaaattatagacatatcaagctcttccagcagctccatagaatctagttgaagag

SEQ ID NO: 2312 - DNA, 546 bp, Arabidopsis thaliana
caactgcttaagccaagaagatgcatccccagaatatgggaagagcttgcagggaaggtagtcagaagaaacaccttctgccttaatactcgaaaccaagtcttcaaactgctcaatatgatcgataggatgatcttgtgctagaccatgaaaagggtgggtactcacaagagtgtatagaaagcagggtttatctcaaaatcgcttctttcgaatgtaggtggtcggattgcagaccgattggaatagaagagatccggtctgttgtagtcatcaagagtcctccgacgaccatctgctctgatttcttcttggtgtcgagcgacacccatatggtgttgatcgacaccatcaacgatttctggtatcaggtttcactgttcatctattttctgaccctcttcgttgtatgctgacaagctttgtcgcgtaacactccagcagcatcaggtattactatcagaatcttgagttgcgtttgaattctttaaacttctgaaacacaagaagaaaaagaaataaaaacgcgtaagtaacaaaagaaaa

SEQ ID NO: 2313 - DNA, 798 bp, Arabidopsis thaliana columbia
  unsure (1)..(798): unsure at all n locations
aactttctatgtacaacaaattttacattagcccagcccaagttgtttaaaactatttttcctatgttattaactacatgggcctatactttctaaaacatgatatttagagaatctaaaagaagaaaagcaaaaacaaaataggcacctacaacacgtatcgtagatagagcgttaggttggttcaaagctctctcaacaacagccaagcccgcggccacacgtatcgtagatgacgttaggttggttcataaagggtaagttactaacacaatgttactttggtatggaataaacaaaagtgattgtacctaaggttgtaaaaccagggtcaatccttgcacgggtcaagagggtcttgacgacttcatctcagctcatgtacagctgaagacacatctttctatcaaattttggacctgcatcaatcatttagaaaatgttttcttaacaaataattgaaaacttacaagaaagtctatacacacaaaaaaagaatagttcatcatcattcctcttaactctattaaacgaggttttaacgcgccctcaattgtttctctcgtgcgattccgaaagcgaaaatctaggtcaccccattttcttcttccgccgctgctcctagtctcgttcccttggttggtcctcgccgactggtgggtctccccgatgggaaaggggaaaaagctcttcgccaattgtgctccgctcccaaaattcccgtgatgncccagtaatcgtactcagacagctctgcactcttgcgcttctttggtggtcaggttggggtgaagcggg

SEQ ID NO: 2314 - DNA, 618 bp, Arabidopsis thaliana
tgagtcgaaaaccatccgagcgtccctcaagtccccgcatttcacgtacatatccatcaaagaattatgtataaattcattactagatttgcggtttagaagtccactgacgatcatgtacccatgaatctctctgccctgcctcagtgaagctagacgaccgcaggtgggcagaacagttgtcaatgtaacaatatcaggtcggattccagaacaaagcatcctttcgaaaagagctaatgttccatcatgatcaccacagtagtcatgaacacataaaacagagttccatgtaaacaggtctctctcatccattgcttcgaatatactgtttgcctcttctagccatttactcttcccatacatatcaatcaatgcatttgacacaacaatatcagaaccagatcccgttttcaccgcaaggccatggattgacctaccgttgtcaatatcccctgaaacagtaaatgctgataagacgcttgtaatggtatgcctgctcacacctacaccttcttcacgcattttactaaagactaataaagcatcctcaaatctaaaaatctgtgaatacccattaactaaagcattccaaagcacactgtcatctctatcagg

SEQ ID NO: 2315 - DNA, 1389 bp, Arabidopsis thaliana
tagtaaagtgattctcccacattttgaatacatgtcaaccaaagaattgcccacttcaaccatcatttcaaaaccaatcttcaaacaaaacccatgaatctgcaaccccttttcaagcgcgttaagcaaaccacaagcttttagattcgtcgagaaagtgaactcgtttgggtaaataccctgacgccccatttcactgaaaagagacaatgatcccttaaggtcaccattaagtacatgtccactcattagagccgaccatgaaacaacatttctctcaggcatactgtcgaacaccttgtaagccatcaacggttctctgcatttacaatacatatcgataagatagttgctcgtaatcaaattcaaccctgatccagacttgagaagataacaatgaacttgacctccttgatcagaaagccccttccttgtgcaaactcgcaagatactaacaaggttttgtctctgattcgggatcatcggtgtaatctggtccaaatgaaacacgaatataaaatgcgagtttgtcaatattacaaacccaagcccatgatgaatttctgtttgtcaatagtacaaactcaagcacacgagagtcctcttcagtcagcgagtctgacaaaatgaacgaagttgctgtttgactttccgatgaaccagcacacagtctattacagccgatattgggccaattcatgggcctcttattcattttcgagattctcagattttcctacaaaaagttgctaccaagcatttttgggccaattcatgggcctcttatgtcttcgtaatctaaatatcatagctctgaaacatgtgaatctacaaaaccttctcaccacatcacatttaggcgaaccacattgtcttctaagagttatcatcttaatactcaaaagacttgactaagtaactaatttatggatcatggagcttgttgggtttgtcatttttccttgagagctttacttgatcctgttcttgaagagaaactcgacgtttctcatattggatttgctccttcgagctgtgagcttgagaactgcaccttctgagagcatccgttgcaccaccctcgtgatgttctttgtgtcatcaatgcccagatggtggcttcccatgagttttattccacactgcctcatcattgacaccattcctcttgcctgtcatgtcatctactattaatgagtttacaataacatacaataagatgatgatgcatagtgatatctccaatttacctcacggccatagaaattcaagtagacgtctttgagattgatccactccataaaatatggcggaagattgatgtttgaaactacgcattgctcaggaatctttgtctttatatcccagtttccactgataacattaaca

SEQ ID NO: 2316 - DNA, 469 bp, Arabidopsis thaliana
taaagaagtacatcgtaacggaaggtggtgtggctgccagttttcactggtcaggcggatgacccgtccggcagcatcgtattccatactgcgcgtcagcccgccctgcgtggtacggacggcctttccccacgcatcgtactgtgtcccgtttctgctgccgtccggggcaatgacggcggtcaggtcaccggcgatgttgtattcataccgcgtttcatggccctgcgtgtctttcacggcaattaactgtccacggctgtcgtatgcgcggtactgactcagcccttcctcgcggtgcaccgccgtcatctgcccgaagcggtcatggtcataacgggttacataaccggaacagtcggtgaagctcagcaactgaccgtaacggctccacgtcatggttttccggctgccggtggcatcttccgttgcgcagggtaagtcactgtgtggctttagagcacactgg

SEQ ID NO: 2317 - DNA, 828 bp, Arabidopsis thaliana columbia
tgctattattaaacatccagctcttatttggtataaggtaaaaatcggaaatattatgcaagcatgtatagtacttcacaatatgatagtagaggacgaatgagatgggtacacccaatatgatgtatcttattttgcacattcggagtcaacgagttctccagaagtggatttcacctattctacagatatgccttcaaatctcggtaatgtgatagccactcgaacccgacttcgggataggactaagcatgaaaaactgaaagctgatttgttgaatatatatggcaaagatttggtccgtatcaagcttaaatcttatcattattcatttttttcatttttatatgtttcattttgcttttatgttacgcatgtttataattttatatttctaataataattatgttttgtcaaattaaaaacattataatattaaattttatatttgttttaagaaactaacttaatgactcaacaaaaactctaaattttgaaatatataaaagttagtattattaaaatataaggaatccttaattagaactctccaatggacttgctcttaacatttttaataaagataagtaatataaatgagcttggatatctagttatttgtgcaaacccatttaataaatagatttaattgccctaagtcatttaactatttcccctaaatgggtttaaatctgtcaatttcttttatacatacctatttattaaatatgggttccatcccaaattaacatcacttacataagttatgagtattaaactaacctgagaaatattgataactcgtggaattcatgctcagtttaaag

SEQ ID NO: 2318 - DNA, 596 bp, Arabidopsis thaliana columbia
tgtttgcttggaatgaggaattttagatcatcagttcttgtggtgctaagtctgataatagttttgaatgtcgcacgagctagtgctaagagcaaggtaaatttgatagttttttttatcatacattgaacaaaaaataggttttaaccaacttctggttgttttgtgatgatgataattatataggttcatatagtgtatctgggggagaagcaacatgatgatcctaaatttgtcacagaatctcatcaccagatgttgtcttcacttcttggaaggtacacagctgattcaattccaatgggtcgcattatgtctaaagctcttactgaagagttttattcttgtgtcacagtaaagatgatgcccatgagtcaatggtgtatagttatcgacatggattctcaggctttgcggccaaactcaccaagtcacaagccaagaaaatcgctggtactcttaactcacacccatgtctttagcttcttagcactcaaatactttgatcgtctgagctgaatgtttcattgctgatgcatttttatctgcaaattcagatcccctgaagttatcatgtcatcggatagtactatgac

SEQ ID NO: 2319 - DNA, 558 bp, Arabidopsis thaliana columbia
tcaatggaatctgcattaccttgtcttatcataggaacctttctcaccgaagttttgatctgccgaaatggctcgaatatctatttgcttacggtggcgttctggcttttcaggtttacatatatatatatatatgctcactgtttgatatgaacattagattaagaatatatatattatgtatctttaatcgcaacttctaaattgtgtgtgcgcgcagggagacccaatagagtgggtgagcaaccatcggtaccatcataagcattgtgagacacaacgtgacccacacagccctacacaagggttttggtttagtcacatggcatggatatttgatacaagttctatccttgagaatgtaataacgattatcaatttgtaaaaccaaattaatttcttgatggccatgttaagatgatcaagttttttggatgctaagaataccgtttttcctatccggggaagagacctaaccctgactaaaccgttgggtgcatgctcgcagtgtggtggagaggagaatgtagatgaccttgtgaggcagccttctatagg

SEQ ID NO: 2320 - DNA, 814 bp, Arabidopsis thaliana
gcacagattccggcgatggttttgctgagctacgtggcgatgaatgttccagacagtgaacagttagcgaaagacgaagtgttaacggtattggaatggtcatcgaagcaagctaatgtacttgaagatgaagatatggaagctttgttgtatgaagctaagagcagactcgagctttaccaatcaagaggatctagaggctttcacttgtaattttcccattgaatgaattattagaaaatactaggatttgatttccacgtgtgttccaatgattttttatgtaggtgactctgttttttaaccactatcaaaaagttgtataaagttttatttttcaatacctaattttgtgtattgacaatgagagatcactgatcaccaacattttgtagttttgaaaagcataagcaaaagctgcaataccatagcctgaagctaaaagtacaatttatttgatggatattgatttagtagtaaccagccgaatcgggaaataaaatataaaaaaggccataccaagtccagcttaagcccatcagagtaaaaatcttggaccacaaacaattggcccaatgtaaaaattggactaagatcccaatcttatcgcgattcactgtaagaaaatcataacgtacgaccacgattaaaattcaagcgtggacgcgtgcacagctgataaacggacgtggataaaaaaaaagtgaaatagcaagtttcctaaatttctccagtcccaaagaatattccaccaaaatttttaattaggcggcatagtcaaattagggtttaatacattcccactaaaattagg

SEQ ID NO: 2321 - DNA, 812 bp, Arabidopsis thaliana
tccgccgccggataatggtttagtctcaggcacgagtcactcttctcatctctcagcattttactcagagtgtcccttggctctatccctagttcttcggcaaccatctccaacaccttgtacgacacttccttaatctccttcatgtactcctccaccgactcactgtttatatttgtttactcacaactgtcagattgtttcaatgaagaccaaagtagtactagctagaagatgaaaaaaacaaaacagagtgctctgtttcttgaaatgtataaagaaaaggagtgatgatttatttagaacaaagatttgtttttaacagtatcttaagtgaaaataagtgatgtaacgttgttttttgagattaccggaaaatttgaggggtttgacggaaaacggcggaggttttaggagaggagagctgaggattagcattgaggaggagatactcaatccaaccaacgtcaccgtttggtccaatccgtttattaccataaccgtacggttcaggtggaccggcccggtttttaagagactgaggcaagccgaagaagccaatagcctcctgctctaaccgagtcatgagttcgggtcggactccgtggtttacgaccttgaagaacccgaactcctcgcaggcttttacgattcgggttttcgcttccggatcggctaggttgacgacggggattgaatgggaagtgagaaccggaaccggtttgtatgtggggattagggagatgtggttatctaaagtgactggctgtggcaaaaccaccatgtttggtttttgtaggtttacacttaac

SEQ ID NO: 2322 - DNA, 1555 bp, Arabidopsis thaliana
ggagatcggatgcgtttaatagcaaagaagagattaaagctttagagaaatggaagcattggaaggtgaaagttgaagaggatcaaattaaggaaccaaggcctgctttagtagctcctaaagctacttggatgagtgatggaactcattggcccggtacttgggctgtctctggaccgcaccattcgagaggcgatcacgctagtgttatacaggtaatttatacacgcacggtttgatctccgattcgttagttatagtgcttgtgtttgactctgtgatttgtttacaggtgttgcttgatcctcctggtgatgaaccggtggaagggaaaggcggtgaggggcgcgcactggatcttgaaggagtagacattcgtttaccaatgcttgtttacgtgagccgcgagaaacgtcctggttatgaccataacaagaaggcaggagctatgaacgctttggtcagagcctcggctataatgtctaatggaccgttcatcttgaacttggactgtgaccactatgtctataactcaagagcttttagagatgggatctgtttcatgatggaccatgacggcgaccgtgtttcctatgttcagtttccgcagaggtttgaaggaattgatccatctgatcgctatgctaacaagaatactgttttcttcgacattaatctgcgagctctcgatgggatccaaggtccaatgtatgttgggacggggtgtctcttccgtcgaaccgcgctttacggtttcaacccgcctgatgtttttgtggttgaggaagaaccttctggttcctactgtttcccgctgatcaagaaacgcagtcctgcaaccgtagcttctgaaccagagtactacactgacgaggaggataggtttgatattggtttgattcggaagcaattcggtagctcgagtatgctagtgaattcggtaaaggtggcagagtttgaaggtagaccactagctacagttcactcaagccggctaggacgcccacctggctctttgactggaagccgcaaaccgcttgatttcgcgactgtgaatgaggcggttaacgtgatctcgtgctggtatgaagacaagactgaatgggggttcaacgttggatggatatatggttctgtaaccgaagacgtagtgactgggtttcgaatgcatgaaaaaggatggagatcattctactgcgtgacagagccagacgcattccgtggaagcgcacctataaacctaactgatcgactccaccaggttctccgatgggctacgggatcagtagagatcttcttctctcgaaacaacgccattttcgccggtccaaaactcaaactcctccagagaatcgcttacctcaatgttggaatctacccattcaccagcattttcatcttaacctactgcttcctcccgccgttatctctcttctccggtcacttcgttgttgaaaccctcactggatcattcctcatttaccttttgattatcacattgtctctctgtggattagctgttcttgtaacagtagcttgagggctagagtcgact

SEQ ID NO: 2323 - DNA, 478 bp, Arabidopsis thaliana columbia
  unsure (1)..(478): unsure at all n locations
tgtcgaatgtaaggatttgggttcggctcagtttcttgtggcgttggctatatcagctgggtttagagagtctggtatcacatcttgtggtgatggcaaaagggtaattatagctatacgatgctccattcgaatggaggttcctattggtgatacagagaagcttatggtgtcaccagagtatgtgaagttccttgttgatattgctaatgagaagatggatgctaataggaagcgaaccgatgggtttagtgtagctttggctagtaatggtttcaagaatccagatgaaaatgatgttgatgaagatgataattacgagaatctagctgcaaatcatgactcaagtatcaacaacggaaacttgtatcctggtaatatttgtaaaccctatgtgattgttgatttnttagatagatagcttgaataatgcaatggaattggtcaagttacagtcttcattgtagtgttgaatata

SEQ ID NO: 2324 - DNA, 585 bp, Arabidopsis thaliana columbia
caactatgcattggatgaggtcgaagaagttgcagcttaaatgggagaattcaaaaactctgtgtattctataccggtttatccgtttgtaacttgacccaaaccgtatgtaccgcaaaagtttaccaattatttctcctcatctgaatctcgagccggttttcttattctttcacagaatgtgtttggaaaattcagttaaaagtctctttctactcatggttagctctcttaaccgtcttcatattcattctgaaaccggtacaatttcccttggtaaacaccttaaaaactaaacacaaacactttgcttctgaattcattcattcggactaaccacgaagtgaaaataataattttgaagtcaaaatcttttcataactatacattttataaaatttataggagactaaaaaacatatgactttatccctaagtattagagtatttacactctaccatccataccgtcaagaagaccggtccacattcccttaaccggagggaagctgtcaacgaaggcttgccatggaggataaccactccacttgcccttacacgcccatccaaacgcagagacaaata

SEQ ID NO: 2325 - DNA, 1316 bp, Arabidopsis thaliana
accacagactccttggtggaatgcttttggatctcagccgttgactacagagacgctttccggcgaagcttctgattcattcaccggagttaaggcagttactacggaggcagaacaaggtgtgtggataaacaaacttctacaactctcttcactttctcacctggaaactctctcaactttcatatgtaatgggagctttcggattgttcttactgaattctctaagtgggtatcaattagccttgaaagaagacattacctctctgtttcttgcacattacagagtgaatgcaaatgtttgaaggtgattttatttatgctgtcattgatttaggtggtgaaaagagttcaagagatgtgccaaagcctcatgttgctttcgcgatgcaatcagcttgcttcgagtttggatttgctcagccaatggtagagttctcttgcagtggaacatcacaaagaaaaactttcatttccctttaattgttttcttgagtatttgctgtgttttgttttcattgtagatgtacacaaagcatcctcatgttgaacaatactatggagttgtttcagcatacggatctcagaggtcttcgggccgagtaatgattccactgaagatggagacagaagaagatggtaccatctatgtgaactcaaagcagtaccatggaattatcaggcgacgccagtcccgagcaaaggctgaaaaactgagtagatgccgtaaggtaacttattgaaactatctgatcattttttcagttatgcattcaaaaaatgttgccttatgttatgatgtttcagccatatatgcatcactcacgccatctccatgctatgcgccgtcctagaggatctggcgggcgtttcttgaacaccaagacagctgatgcggctaagcagtctaagccgagtaattctcagagttctgaagtctttcatccggaaaatgagaccataaactcatcgagggaagcaaatgagtcaaatctctcggattctgcagttacaagtatggattactttctaagttcgtcggcttattctcctggtggcatggtcatgcctatcaagtggaatgcagcagcaatggatattggctgctgcaaacttaatatatgatcagcagataggggacaagacatgatttggttcaccagtcttttgtcttgtcccttatctttcagccaaacggaaagagaacttgtgtcttggaaaaaagacattgagtttccttggtttataagattggtccttttaccatccgtttggctgtaaacaggcaaatcatctttggctcatgcttcatcaag

SEQ ID NO: 2326 - DNA, 529 bp, Arabidopsis thaliana
caaaaccctcgtattcatttgttatgacgataaaccggaccacggtctttctttacctttccgtgtggtttactctttggctgtaaaactttgtctgacctgaaagtcctcaaagtctcaattggctcttgacctccaataccagtttcttgactaatcgtaggtacctgatcatggacggattaaaaaaacttatccttaaaagaacaaaaccaaaaatgaagaagattcttcatggagttttgaactatgacaaggttttgatataccttgcagcgagacactaatttcacaccgtgaaaggtgaaaccgtttataaggatctctgtccataagtcttcagcaaatggttcacatccatcaacaaagatgctgtaacatttcccagtgagagttatcaagtgttgttacaaagcaataaaaacagtgaaggctttctgaagcatacttgggtctaaatcggttgatcggtacaggctccttgagaagcttattcagggaatcaagcgaaccctggaaatagcacgag

SEQ ID NO: 2327 - DNA, 562 bp, Arabidopsis thaliana
catgtctcagaacgagataatgatgaccgtatttccaatgttccagcaacacatcgagccacatctagtgcatgcacatgtgagtacacctgagattttagatttcacctactagtgaattgttctgtacaatctttccttgaatctgttactgttgcttactcgtttttgtgattaccattagctagtgaaaaacaaaaagcaatctgaattctataaacttttgagtatatatgatctgtatcgatacttaacaagtttttttcccaatgatacaggttaagattcgaaatgattttgatccagttctctctcccgagagctctttgtttgtattgaagagcaataaacaagtaagggttaaaatataatcacattctgaacttccttaatttacagcagcactcacgactcgtcatgtggttgataaggttccatatcaggatattctcagcatccttgattcgacaaaattctgcagttccgttcagaattttatcgatatatatttcaggctatctgggcttcgtgcgaatggtcagttgtcagatagtgactgcat

SEQ ID NO: 2328 - DNA, 580 bp, Arabidopsis thaliana
  unsure (1)..(580): unsure at all n locations
nnnnnnnnnnnnnnnnnnnnnnctaaagccggcagcactgctcatcggctggggtattactggcgctggcattttattgctggcctttgccatgctgatcctcacgcgcattcgtcccgaacttgacggcggtatctttacctatgcccgcgaagggtttggcgagctaatcggcttttgttccgcatggggatactggctgtgcgcagtcatcgccaacgtctcctatctggtgatcgttttttccgcgttaagcttttttacggacacgccggaattgcgcctgtttggcgatggtaatacctggcaatcgatagtcggtgcatcggctttattgtggattgttcactttttgatcctgcgcggggtgcaaaccgctgccagcattaacctggtggcgacactggcaaaattgttgccgctgggtctgtttgttgtgctggcgatgatgatgttcaaactggataccttcaagctcgacttcaccggacttgcacttggcgtacccgtttgggaacaggtgaaaaacacatgctgatcaccctgtgggttttcattggtgtggacggtgccgtggttg

SEQ ID NO: 2329 - DNA, 553 bp, Arabidopsis thaliana
gactgcttcgtggagtatataattgcattgcgtacaggagtagaagttaccaaaatagattggcatgacgcaagcttgacacaacttatcctcgtcgtaatctctgctcgtgttctcgtcaagtctcaaatgatgttgtgggtgaccgaaatgttgtatgactccgtcgcttattgtcacaaacgggtcaactacttcttcttcaacttcttcaggctctccctcaagttcgatgccatcccacacatttttttgtgttgcacatttcgaatgagccgcatacgaacagccgtccttgatgcaagtatagcccccgtaatcttcgtctatttttctgcgacaaacactacaagacaaatctcctcggtcaaaagaaaatgtaaatgatatacggtggagatggcgggatatctttatgacacgtggtaagccggtacatctaagatggacgacaaagtcgcaagggggacacatatagatcggggagcttgaatcggccaaggcacaaaggttgcaagttaaggaagcatgccttggaaacagagcaagtgta

SEQ ID NO: 2330 - DNA, 548 bp, Arabidopsis thaliana columbia
  unsure (1)..(548): unsure at all n locations
gattttggttatttcttgatatggtttgcataagtggtagatttatgatttagttgcaatgttcccaggtgggaagattatccactggcgattctatggatatgtctccacatgacgaagaatccatcacagcaaatgatgctacagttaaagatatggaggtcaacaatccataagtttcctgtgttgatgtacctggctccatactatgtgtttgtctttgtgtctttatcagttactacgacttatttacggattcttggcatttcagggagcagcagtggcctatgtggctgatatctttaaagtgcctacgattctaataaaaggtgtgactgatattgtggatggcaatagaccaacttctgaagaatttttggagaacttagctgcagtcactgccaaacttgatgagtcacttaccaaagtgattgacttcatcagtgggaaatgtctctcagacctctaacaagtcatacgtattaagtttcatctgttcagtatgtgcattgggcgaagaaagcatatganagatcaagcaaagggcg

SEQ ID NO: 2331 - DNA, 546 bp, Arabidopsis thaliana
tgcagacaggaaaagacgaccctgcataagtaaaacttaattacatgtgttatatactctctatatttctaaggaacaaagctgatgataagagaatgcggttgaatacaaaaaaaaatgtgatgtacatcaagggctcgttacctgcaaaggcattttccgctttaagtgacatgtaaagtcattgattagaaattcttcttgtgggagaccaaagagcttctgaaaagctgaatttgtttgaggagaccgcacattaatctgaaatttccattcagcagataagaacgcgcaacaacactaccagtttatatgttgattgagagaacaaagtcgtagccacataccttcttgcccacctctttctccatcttatttaaatagtctctgacaacatctccacctccgtgtatgatccaagaaaatcctcaagtgaagtttggattgacaagcctgagctagtttcccttgaagtggacccaaacatccgctaaatcagatatattagatctcacaaagttgacttcagcatgcccaatgaaacag

SEQ ID NO: 2332 - DNA, 610 bp, Arabidopsis thaliana
  unsure (1)..(610): unsure at all n locations
taacggccgccagtgtgctctaaagcaaagagacccgctgcatcttcgtcgaatccctcgatcgtgacacgttcgtcaacctcccttacctccgagtagagcacctctggcttgacgatattcaggtcgaacagccggggccgcgactggtacccaatctccaacaaatctcggaaccccttcgtgacgaggaaggcatgttttgtcccttttcgctcgaggagcgcgttcgtcgcgactgttgtacccatgcggatcgactctagctcgcctttcgggaggggaacgccgcgggggatctcttgaccgtagtagagcgagagaacccgtcgaatgccttgatcaggcagcgtcacagcntggctgagatggcggtttgggaccctcgagtgacataccttcagtcggggcatcggcgtaattagccggatccactgaaagcagcttcaaaacaacgtctggctgccctggtaagcttgcccagacatcggtgaatgtgccgccgcggtctgtgaatgtgagccttggtgtcttgttctctctaggatctggagtttggtggtctgaccaatcgcgatgcgaacaccgcggggcgcgtaatggacggcat

SEQ ID NO: 2333 - DNA, 512 bp, Arabidopsis thaliana
gttcagcttgtccttcgttgttgagggcttgtttcttctataagtgcgatgaacaagactgtgatttccagctacacgttcagtgcgccgtagtttctgagccgctagtccatgaaagtcatatgcatcctttattccttacatccgaaccatatgaggcaagactttgttcggtatgcaaaaaagaatcatggcttcttctttccacaaaagaaacattcaattgcattgaagagtgtgattttgctttgtgttttggatgtgctactttacctcaaaagttgaggtataagcatgataagcatatgctcactctttcttatgggaacaagacaagtaccatggcttattggtgtgaagtttgcgagggatacttaaatccaaaagagcgattttatacgtgtgaggaggattgttgtgtcacctccacattgaatgtatatttgctatgaccatgaaacgttattcgtggtggctcttctccggtaaaaaggtatcgttctacaaacaat

SEQ ID NO: 2334 - DNA, 329 bp, Arabidopsis thaliana columbia
tatagaactgtagagttgattcagcatgtcttcctttgctttctctacttgacaaagaacaacagcctgttcatggtcaattcacatcgcttagtagcatgaccgaggaatctctgtaagagaaaagagatggacaagaaaatttagagctttcgagcttttgcataaggatagttcacctttggaacattggctgcaaggctgttaagaacagcttcaacgtaaccccgtacttcttgggacatccaccggagctcctcttctggatcgatgggtttcctaaccatcttatcctgaaatacagacaaggataaaaacgtaagtctcag

SEQ ID NO: 2335 - DNA, 560 bp, Arabidopsis thaliana
ccttgtgattttgtggttcatctaaaatgtatcagcttaccacgtgtcataaggatatctcgccatcaacatcgtatctctttcaccacttctttcgacgaaggagattggtcttgtggtgtttgtcggaaaacaatcgacaacgattatgggggttattcttgtatcaaggacggttgttcatatgcagcacattcaagatgtgccacacaaaaaaatgtgtgggatggcatatatcttgagggagtgccagaagagattgaagaagaagaagttgagccgtttgtgacaataagcaaaggagtaatacaccattttagtcatcagaatcatcatttgaggcttgatgagaacgaaggcagagtttacgacgaaaataagatatgtcaagcatgcatcatgcccatctatttcggtaacttcttctcatgtatgcaatgtgattatattctccaatgaagaatgtgcaaatctttctctcaaagcatataacccgatacatccacatttgctctctctaatgggaggaaatgatgatgttaggaagtcaaggataagtg

SEQ ID NO: 2336 - DNA, 742 bp, Arabidopsis thaliana
catggtacttgtctcctccccataagaaagagtgagcatgtgcttatcatgcttatacctcacctcgtgaggtaaagtagcacatccaaaacacaaagcaaaggtacactcaccttcaatacaattgaatgtttccgtgtggctaagtggcttttttttgcaaaccccacatcttcttcgttctcttggtctggatgttaagaataaaggatgcacatgactttcatggactaatggctcagaaattgtggcacactgcacatgtagcttaaaacgatcacattcttctttaccgcactcatagaagaaaccattggtgcacatcctaggacacactgaacagaaatccttataatacttggtaacaccgtcgtatcctcccactagattgagcttatgtggatgtatcgggttatgtattttgcgagaaaaattcgcacattcttcatggagaatgaagttgcattgcatacaagagtagatgttaccaaaatagattggtgtgatgcatgcttgacactgcttattctcgtcgtagtctctgccggtattcttatccattctcaaatgatgtggatgactaaaatggtgtattgttccgtcacttattatcacaaatggctcaacttcttcttcttcaacttcttctggctctccctcaaggtctagaccatcccacacattcttttgtgttgccatcttgaatgtgcacatacgaacaaccgtccttgaggcaagtata

SEQ ID NO: 2337 - DNA, 799 bp, Arabidopsis thaliana
tccccaattgtaaactataaaataatttacaaatttttacatatattaattttaaaaaatgaattgtctccgcggtgaatctagtgttgaatataattgttatattctgcattactgaaataattaagtttggaatattgttcatttgatttcattacttatttgtttttatgtctcgttttgttatgagagtgttattgtcctttccccaagttaaataaatgtaatttaatcttgtaatggtttgattttattcatctaaaaaataaataaataagtagttgtttatatatacattaaacatacattttttggtcaaattaagtggcacaaaggctctactccgcgttaatttggaaaatcatcaactgattagcgaataaattatttgaaattttgatagaaaataaatgttcaaataaatataatgattagttagcccaatcacgagctaatcaaaccttaaaaaaaaaacaccaaatcaaacctatttattgtctaaaaccaattttgatattacacggagaaattaaataatacatttagctacttttttgtttgaaatagaaaagacattcaaaatagtaaacatataaaaccattgtaagaaaagaaatcaaattttttatttcttaacaaaaacgtgaaacgtttgtttccaaattagtcgcaagtcacggaccgtgtgacgcaaaaaaagtccattcacatcattattacataatttttgtcataaggaaaattaatttgattttccaaatttttttggttctcctcttcagaatatctgacgtggcat

SEQ ID NO: 2338 - DNA, 456 bp, Arabidopsis thaliana columbia
gataactccaatttttcaaagcgtctattccttgttccgaaacgtagctaacgattagagcaagtattggttccggaatatataacctggaattcttcattttctgctaaaagggtcgatgataagttagaggaatgattaatttaaggaataagtaaaggaaacatatttgtttgtttagttgcgaactaaaacctgttttgcagtgtgtccacgatttggtacaacaacgatggcagcggaaggtggatggatgtattactgaggaggaagatctggatcggcggggtggggagaatctctaatgtttgtattgagcagaacgggttataaagggagaaaggaaatgaaagtttctataaaatatttatattcgagagggataaagcttagtggggagaatgggtgcagttataaaattagttccataaaatgttggagacgaggtaacggtcg

SEQ ID NO: 2339 - DNA, 546 bp, Arabidopsis thaliana
caattcattagtataaacttgtaaatctttgccgaaaatcttgatccaagctctaaacgctattgaaagcttaccacacgctctgattcaacatctaaggcgcttgtggcttcatcaagaagcagaatctctgggttcttgaggacggctctagctatagcaattctctgtctctggccgcctgacatctgaatgccacgttcaccgactttggttgagtaaccttcagggagagagctgatgaaactgtgagcatttgcaagcttagctgcttccatgacttcagattcagaagctccttctttaccatacaagatgttctcatagatagtcgttgcaaacagagccggttcttgttgaaccagaccaatgtgtcttcgcagtgatttcaacttcagtttcttgatgtcttgccctgcaataaaattttattgattgaaaacagaattagctcactcaaccataagtccataaacaaagttcttgtgatgcaagaacctgtgatcagagttatttgtgatagaagaaattctgcaagagctagca

SEQ ID NO: 2340 - DNA, 776 bp, Arabidopsis thaliana columbia
gaatttacacttattcaagcagtaagcaaagaagacgatgtctcaaaacgcgcgcacttcgaattaagaaactcttctcgatttgtagaacatttggactccttgatcgacatcatacagtccggtatccgagcgaactcggagattccaagctcgatccaatctcaggggtgggagttgagggtgtgaagttcccttgatatcacggtgaccctgcctaacattcggttaatctttttgcggattttcctcctttttgatgtacacttctggtgcttaacatcaagagctttgatgaacgccatcacgatttcttaatctctatccaaaggtcccttgatcatcgcacatggagttcggattagggacctgaagaagccacgaggtggagaaggccctcttccaggcacgtttgggatgtcttcgtccatcatcccgaccctcgaaaagtatggcatggattttaaacatcgaaggttaaactccatagctgcaaaaagaaaagaaagtttagatgaaaaataaagagaacttaagagttgaaatttatagggattttaagatcgcaattccattcgagatctgagtgattcgtggaaagactcacgccttcaagtcttcccagcatttataacatatctccaaaacaaatattttgaaatcaagaaaataggaaagttccatgaattaaaaatgggtcggagccatagcaagttcaaaaggaaataataaaaacaataaagtaagtagcgagttcggaggacatttatggaaga

SEQ ID NO: 2341 - DNA, 504 bp, Arabidopsis thaliana
aaggaacttcttggtcgaaagaaggagtaaaatggatacgatggaaatgacgagatatccttatgacacgtggtaagctgatacacttttggtggaccacaaagtcgcaagggggacacatataaaatggacagcttgaatgtgtcaaggcacaaacgttgcaagttaaagaagtctttcttggaaattgagcaagtgtatgctcatgccacttcggttggtccaaagacaatactcttgttctctttatgcaagcaatattcatagcataatcgcaagccgagcaataataaaatacctcttcgagatctttatcgcaacaataacattccctggttgtgtccccattcaacaagacaagttggagggaatgttttggatgaagagtatgtttgatcacaactggagccttttcatattctccatggttctcgccattgcaagtttggcagcgaatatgactaacgccttcttcagatatccagattttctcccagttaaaag

SEQ ID NO: 2342 - DNA, 551 bp, Arabidopsis thaliana
ggtggtagtagactctcatgaactaatggttcagaaattttgctacactgcacgtgtagaatgaaacgacatccttctctatcgcactcatagaagaaaccagttgtgcacaaccagggacaagcagaacatgaattctcaatgttgattctatcggtagtgggagtcattagagtgagcatatgtggatgtatcgggtgatgtattttgcgagaaaaatttgcacattcttcgtggagaataaaattgcatttcatacaagagtagaatttaccggagtatattggcgtgatgcatgcttgacacaacttactctcgttgttatctctaccagtgttttcatcaagactcaaataatgttgttgatggctgaaatgttgtataattccattccctttactcacatatggctcaactccttctccatcaatttcttctggctttccttaagttcattaccatccagacattgctctgtgtggccaagttgaatgagctgcatacgaacaatcgtcattgatgcaagaatacccccgtaatcattgtagatt

SEQ ID NO: 2343 - DNA, 564 bp, Arabidopsis thaliana
cttctgccaagcaaatgcagaacaaagtaaagaagttattgacattatccgctcttatgcaggggcttcaggacaagaaatcaatttatccaaatcatccattatgtttggtaatgaggtaccttctcatgtaaggcacgatatcaaatcaattctcggaatatcacgtgaaggagggatggggacatatttaggacttccagaaaagattcatggttcaaaagctcaagtatttgcatttgtgagagataggctacaaacacgagtgaacacatggtcttctaagtttctttcaaaaggtggtaaagaagtcctaatcaaatcacaagcaaaagcccttccgacttatgtaatgtcgtgtttcttattaccaaaagcaatatattataagcttaacagtgcgattgccaatttttggtggagtaataaagtagagagtcggggaatacattggattgcatgggaccaaatttgttctcaactatcagacggaggtcttggattcaggacgttggaagagttcaatctcgcattattggcgacgaattatggagattattaaga

SEQ ID NO: 2344 - DNA, 643 bp, Arabidopsis thaliana columbia
tggtatgcagatggggaaacgatagtgcggaatgagaataatcaatcaatagcttatgcctatggttagtcttaacagtttgactagtgttcatgacttcatgagtttctgtaaccatcataaatcttgttctgtggaatggattgaagtttcatgcatcatgaatcaagacctaaattaaactagatatcaaggtccaatctgccatattttttcttgaaatttctgttgtcctttcttgcagatcgtgttttcgggcctactacgactacacgcaatgtctatgatgttgctgctcagcatgtcgttaatggtgctatggcgggggtcaatggtatggactaaacacttattattgccctctctagttaagactttattcttagaagagaaaaagatatttttagtatcaagcttacccgagctacagtaccatgaacagttgcatgaccattcatttagaaaatgagatctttgagttgccaaactctatctagtgcttgttctagtctctagaacaactttaagttagattttcttgcgaatttgattttattgtagtgactttgagtgttaatcaaccacagggacgattttcgcatatggagtgcaagcagtgggaaactcatacaatgcatgtaag

SEQ ID NO: 2345 - DNA, 531 bp, Arabidopsis thaliana
catcaacacaacagcccaaggtgattctttcattgccctccacacagttgcttgttgatgatccatcagaatcttgatgtataccgccgacatcgagaaaatatagatgcagagaagtgttgacgaagaaacaaacataaagaaatacctatagtttctctgccaatggacagaactttcccagtcagaatcacaggacaaaatggcagacaacagattggccaatcggcagataaaacagatcttggcctttcagataacagaaacagaaacctcacacttttttgggagataaaaatttacgaactttatatttttcaaagtcaatatgcttttgattgagcttaccagtccaatgcattgtcccacccatgggcaatgatgatcaaagcgctcaacacagttgttgcatatggagcaatgagagcagcgaggaggcctgtaaagcatgcatgtatcacagtatttcactctaacagaaacgccattaacaatgacttctttcgtcctgggaatttgacactcggtgtt

SEQ ID NO: 2346 - DNA, 482 bp, Arabidopsis thaliana
ggtagtttccaccgcctgtccagggttgagccctgggagatgaagagtctcatatgtgctcagtggacaatccggagagcactggatcaggtggattgtctgttcatgccaaaaacaagatttttactgaggtaaatcttctgtgctttttctttgcagcttgttgtgttgtgtacttgtctgaatgttgttgtgtacttgtctgaattatgctgtgtacttggcaacttgttgtgttgtgtacttgtctgaattctgttgtgtacttgtctgaattatgttgtgtacttggcagcttgttgtgttgtgtacttgtcggaattctgttgtgtacttgtgtgaattatgttgtgtacttggcagttgaattctgttatgttgtgtacttgtaaacttgtctgaattctgttgtgtacttgtctgaaatgtttgtgttgtgtctcttgtctttgatatcaagttctcgtaatcttggcagctta

SEQ ID NO: 2347 - DNA, 573 bp, Arabidopsis thaliana
tttgctcttcgtctggtttggatgtgaggtataaaggatgtatatgacttggatgatctagtggctcggaagctatggcacactgcacgtgtagataaaaacattttctgcaccgatagaggaaaccgacagtacgcttcctaggacacaccgagcattcatactcattgatctccccatcaccgtatcctgcctctaaattaagctgatgtggatgtatcggatgatctattttacgaggaaaatttgcgcatgtttcgtggagattataatcacagctaggcgtacacgagtagaagttaccaaaatagattggcgtaatgcatatgttacacagcttatcctcgtcgtaatctcttcccgtgtccacatcaagtctcaaaagatgacgatgagtgaaatgtcgtatgactccacttcctttcgttgcaaacggtggatctacttcttcctcattttcttctggcactccctcaagttctacaccatcccacacatttttttgtgttgccatcttgaatgtgcgcataccaacaacatttttgatcaagaatagctccgtataatttgttg

SEQ ID NO: 2348 - DNA, 564 bp, Arabidopsis thaliana
gtgaactctagatgggtaaactggataatgcaatgtattacctcagtttcttaccgtgtcgtgattaatggaggagccaaaaggtcgtattcggccattgcgtggaatccgtcaaggagaccccatttctccgtacttgtttatcgtatgtacggaagcacttatatcttagactaaaaaggccgagaaggaaaggcaaagttcaaggtcttcgaatttcatatgtgaacccacgagtctctcaccttttgtttgctgatgatagtttattcttctgccaagccaatgcccaacaaagtaaagaagttattgccattatccgctcttatggcggggcatcagggcaagagattaatctctccaaatcttccattatgtttggtaatgaggtcccatcgcccctaagacaagaaatcaaaacaattcttgggatttcaagggaaggagggatggggacatatttaggccttcctgaaaagatccatggttcaaaagcccaagtctttgcttttgtgagggatatgttacaaacgagagtcaactcatggtcttcaaaatttctct

SEQ ID NO: 2349 - DNA, 978 bp, Arabidopsis thaliana
cactgcacatgaatcttaaaataacatccttctttatcacacacatagaagaaacctgctatgcacgaccaaggacaagctgaacacttatcctcatactttctaacttcgttatatcctcccactagggagagcataggtggatgtatcgggtgatgtattttgcgagataaattcgcacattcttcgtgaagaatgaagctgcattgtatacaagagtagaggttaccaaaatagattggtgtgatgcatgcatcacactgcttactgtcatcgtaatctctgtctttgttctcatcaagtctcaaatgatgttgttgatgactaaaatgttgtatgattccatcacttatcgtcacaaacggctcaacttcttcttcaatctcttctaacaccccttcaagctctatgccatcccacacatttctttgtgtggcacatcttgaatgtgctccgtacgaacaatcatccttgatgcaagaataacccccaaaatcgttgtcgatagtttcgcgacaaacaccacaagatctatctcgttggtcgaacaaaggggtaaaagagatgcgatgggggtggcgagatatccttatgacacgtggtaagttgatacatcttagatggaccacaaaatcacaagggggacacatatagataggagagcttgcatcggccaaggcgcacacattgcaagttaagaaagcttgtctaggaaagagagcaagtgtatgctgatgccaattcggatggtctatatacaagactggtggtttttccgcacaaactatattcatagcataatcacaatccgagcaatagtagaatatcttttcgagatcctcctcacaacagaaacactttctggtttgaatccgatattgagttgctgaaagatattatttgcttaatgagtgatatgagctccgactctggctccggctccgaatccaagtccatagagctgacaagagagattag

SEQ ID NO: 2350 - DNA, 1610 bp, Arabidopsis thaliana
tgaatgatacagattcggattccgatatctatttggattcagattttgaagactatattgcggttatattgaatctcgagccggagccggagctcctatcactcatctatcaagtattcaccctcgtcagctctatgaattcaaagtgggagaagcttatttctgtacgccctcaagtagtacacagattgggaagagacaaaatttatatgaatgatgaacaagtctcgtgtagaaggtataacaagtgggcgtgtctccctaaaaactggtttatgttgtggtttatgggagaagacgacgaaacgcactttctttgcagagcttgcgaaggccagaaccataaagaacataacaacgctccagttgagatcaaacaccatcttcatcccaagcactcacttctgcttgtcaatattgaaatatatcctagagagaggaaatgctattgttgcgacgaagatctcggaactttcttttatcattgctcggcttgcgatttcactctgaatatagcttgtgtggagaaaccaccggtcttatctatagaccatcccaagtggcatgagcatacacttgttctgttttcgagaacaacttccttaacttgcgacgtctgtgccttggcctattcaacatctcctttctatatatgtccaccttgtggctttgtggtccatggaagatgcatagacttaccacgtgtcataaggatctcccgccatccccatcgtatctcttttaccccttcttttcatcaaggaaattggttttgtggtgtttgtcgcagaaagattgaaaatgatttcgggggttattcttgcgttaagtacggttgttcgtatgcggcacattcaaggtgtgccacacaaagcaatgtgtgggatggtgtagaacttgagggagagccagaagaagacattgaagaaattccgccatttgtgaggataagtgatggaatcatacagcatttcattcatcagtatcatcacttgcgacttgatgagaatacatgtagagaatacgacgaggataggctgtgtcaagcgtgcatcacgccaatctattttggcaacttgtactcttgtatgcaatgtggttttgttctccacgaaaaatgtgcagaactttctcgcaaaatacatcatccgatacatccacatatgctcagttttgtagcaagaggcaacggcgttagacgttgctgttcagcttgtccttggttaatcacaactggtttcttctatcggtgtgagagagaagaatgtgatttccaactacacgtgcagtgcgccacagtttcagagccattagtccatgaaagtcatatgcatcctttattcctgacatccaaaccaggagagtggaaagattgtagtgtctgcaaagagtcaaattattctttgacaaatgaaaaatttaattgcattgaggagtgtgactttgctttgtgttttggatgtgcacattacctcataaggtgaggtataagtatgataagcatatgctcactctttcttatgggaaggagacaagtaccatgacctattggtgtgaacttgcgagggagtaatagatcagagaacaggtcttatatgtgtgatgagtat

SEQ ID NO: 2351 - DNA, 461 bp, Arabidopsis thaliana
ttcattgaagtcagtcaccaatgaccattgaacagatgttttaaaatgtccacgtaagcaattgttgtttggaacgattttcggttagcattcgtgccttttttacctcaataaaaggccgtggcattaactcacttgtcttgagacgttatgtcgttaaaaccaagcccaaagttaatttcggcccaaatcgttttcaactttcccgccgtcttttaactttttagatttttggtgatggttttggggggaaagaaaacagaaaatataaaaataaaatttccgcactcccgactcttggtgtggtaggcaattctgaatcgcgaggtttagttctccggctgaatcagagaacgacgagtcggaaaaattcgaaactctagaactgaataaatgtcgacgtggcaattatttcccgattccagcggcgatggtttccggtgggaagtcgctggccggat

SEQ ID NO: 2352 - DNA, 574 bp, Arabidopsis thaliana
  unsure (1)..(574): unsure at all n locations
ctnnnnnnnnnnnnnnnnnnnnnnnctaaagagattacggttcattttatctttccggaagttggtccgattactgggcttccggacaaaatcgtagcaattactctattggctacagtaacagtacatcctggggcagctacagtgtcagtgcccagcgttcatggaatgaagacggcgacactgacgatagcgtttatcttagtttcaccattccaattgaaaaattacttggcactgaacaacgtacttcaggtttccagagtattgatactcaaataagcagtgactttaagggtaataaccaactcaacgttagcagcagtggctatagcgataacgctcgcgtcagttatagcgtgaatactggctatacgatgaataaagccagcaaagatttgagttatgttgggggttatgccagctatgagtcaccatggggaacgctggcaggttcaatttctgcaaatagcgataacagccgtcaagtttctctcagcaccgacggtggttttgtattgcatagcggtggactgactttcagtaatgatagttttagcgactctgatacact

SEQ ID NO: 2353 - DNA, 518 bp, Arabidopsis thaliana
tgttaaaaatgtttgagatatttcaagggtcttaaaactccttattgattttgtcaaccctactaaagaacagagaagaataaagtacagtacctggctacacatcggaacatccggaatgtttttggtccgattctcttcacaagaaacctctcttcttcagggacggtgtaaaccggaaggtacttgacgcagacaaagactacaaccgaatgaatcgcggggaggttggtgatgaaatgagagaaaatgtgaggaacaccacttgctaattccgtgtagactaacccgatccccgggacacggacaagcccgaggctgggaccgaggccgagtatccaactcatggacactttactgtgcatttcaaactcatatttcttgactgttgcgtaatgccagactgacattacttaaagagatatcgctgctatgatgagcggcaccatcctccttcatcgattttaaagatcacggctgagaagtacgataactccacaaagaaggagagaaaggtg

SEQ ID NO: 2354 - DNA, 408 bp, Arabidopsis thaliana
cctaaaatacttccgattctcaccggacggaactaaatcaccggacgtcgagattcagcttgatcagccaacgatgatgcacgatttcgcgattacagagaacttcgtcgtcgtacctgaccagcaagtcgttttcaagctgccggagatgatccgcggtgggtctccggtggtttacgacaagaacaaggtcgcaagattcgggattttagacaaatacgccgaagattcatcgaacattaagtggattgatgctccagattgcttctgcttccatctctggaacgcttgggaagagccagaaacagatgaagtcgtcgtgatagggtcctgtatgactccaccagactcaattttcaacgagtctgacgagaatctcaagagtgtcctgtctgaaatccgcctgaa

SEQ ID NO: 2355 - DNA, 771 bp, Arabidopsis thaliana
catcaactgataatccgaatttcctcaacatattaccgtaaccaccaccgcttatatgtccaccaacaccaaccgtgggacaaactccggcgggaaatccatggactttgcttttctcccaaattctgtaataaacctcaccaagagttgctccggcggagatccaagctgattgatcggcgatatcaacagagacatcacggagattcgacatgtcgagtataaaaaatggtttatcagagatgtaagagagaccttcgtaatcatggccaccacttcggattttgagaaggaaatttaaactttttgagcaagtgacggcggcgctgacgtggatatcggagcgaggagtgacgatgatagctggttttggcgtagatgaagtgttgaacctgccatttcgaatgtaagcacgaaggacggaggagaaagaagggtttgtccgagagaagacattgtcggtgatttgggcttgtggagattttgtcttgtcggagaaacattgaacgaatgattcgtagatagaatcagaagacggaggtgctgcggatgagaagaaagggagagatacgaggaagaagacaaagaaaaagacagagacaaaggtttgtgttgcaatcatcgttgtaatgagattcgttgcttcttctctgttctgtactttataaccaccactaaacagagaagataagatatgtttatttttatttttattttctagtaatcattttaactcccaatatctctatatatctttttgctatataatat

SEQ ID NO: 2356 - DNA, 531 bp, Arabidopsis thaliana
catcctggcctctattctccaatctagctttctccagtttctctacggaatctctcatctctgagctttctaaaggggcaaaaacaggagaaccctgaacagaaaaccctaaaagcacaagcacatcctcaagcgttatcgttgcttcaccccaagggaagaggaaagatttggtttcaggacaccatttctcaacaagagctagaagcaaagactgatttttacggattttgtacatcgatgcctttattgcctcaaaaatcccagcttttctccaaatgggttcgtgcaaagcttccatttttttagcccatgatttgaaattgggttgtgcagaccaaaacccattgaaagaaatcctagaaaacgactcatttaggtctgatgaagaaacagagagacggtgacgaggaagctctgctacagcaccatcaatggaggttacatagggttttagaaaatgggtttcaatcaagctactctctttacttgaatccatcatcaagtagcagaagatgaaagcaaaaagga

SEQ ID NO: 2357 - DNA, 747 bp, Arabidopsis thaliana columbia
caatttataaatattgaagattagtctgatttattattaatatgcaaatctctgattaataagaaataaattataatagaaatattgatgtgtactgatcatcttttaataaatgtttgagactacaaatactataatgaatcaaatgaacataaatgtatagatgaactgaataaaattccagatacaccttgaattaaatatgtattcatagtatttttttttaaaatgaaatctggattttaaatccttattattcaaaaaaatcttctcctttgatatttttgctataacaaattaaaataaaatctgtaatcactaatcatatcccttaactccctttaatatcttttgttgaccaaaacaaatatttttttgttatatgcaacgaataaaaaaacattgaaagtactttccaaaaacaaaacacgtcttcttctccctgcggttataaatagacacggataagtacaaagaacagaggaacacgagacccaagaaaaagatctcaaaatgctcacgacacctccacgaacctttgtctctgtccctttcttcttcttcttcctcctcttcctttctctacctctctcatctttctctcaatcgaactctgtatacaactctttcctcaagtgtttctccgacaagacgaaatctccacaatcgcaaatcactgacaatgtcttctctcagacaaaccctgctttctcctccgttcttcgtgcttacatccgcaatgcgagg

SEQ ID NO: 2358 - DNA, 754 bp, Arabidopsis thaliana
agcgtttagtactatttgaaaacaaaataaaaacaaaagacatgtgtttatggggatggagatgcagatggagataggaattggatacaatgcggatcccattttggaaagaaacaaggaaattgacctggaggccagtaagtttggtcagccgatatcttcgcatactggttaagtgcatgagaaatttgctcagttaggaggattggttttgtgttggtttgaagaaaagggtcgatcctagcttgtgcaaggccagatgcaagaaaaagcagaataaccaccattgctattgcagagagcttcacaatcatcttcatattttgatttgtgagtgaaaatgtttaggctaacttacttatttatattgttgtgacaaaaatagctaacagtagtatgatatcttttgttgactagaattatatgttgtgaccaaaaggaaaaggcaatatgataaatttttgactggaccaaagtgcaaagatcatattctcttgttttggaacaggattgtcaagcattcatagcttttaaattggatctgattgattacaacggtagctttagatttttctgttgtactttaaagatttttagttattttgtaattgtagaagtatgaacgggaaatcttttgttttttttacggcatattggtaaatttatctttagctttaagaaaaagaaaatatgactgatacattttatttgtgtattaattatttatatttctttttattaaagataatattta

SEQ ID NO: 2359 - DNA, 527 bp, Arabidopsis thaliana
cagcttcgagttctaagctgaatctcttctctgcttctttacaacaaataacttcactgtcaagctcatcctttactgcatgtagcttctccaactttgtgtcaacttcttgaaaacaaactcttgacacctgatgacacacaagagaatcgataaaagatgtctttagctcagctttctcagcttccacactctttaacatatcttccaactccattttgtcaccaacaactgcttcaatctctaagctcaatctcttttccgcttctctacaacatttaacttctctttcaagatcatccttttctgcttgtatcttctccaacttctccattaagctcaattcatatccatccttggagtttttagcctgtgtctcagtaggaagagccacaagacgttccatctcaaggaaatcatccatgagatcaatttcagttgatgaagtagtgccctgaagacttctattgccgcctttttcattcttgatttgatctaactcagaaataaatgctgatgatgccatg

SEQ ID NO: 2360 - DNA, 608 bp, Arabidopsis thaliana
  unsure (1)..(608): unsure at all n locations
ctnnnnnnnnnnnnnnnnnnnnnnnctaaagctggcgtcagtgcatggcactcttccagaccaaacatacgactttgcgcaggaagccttgcagccagaactcatcttctttttccgggccgaaaaccggcacgccgtaatgttgcgccagttccgccgctgcgccaacgtggtccagatgaccatgcgtcacgaggatctgcatcagtgtcaggccgctgtcatcaacttcctgtttgattttttccgcatcgccgccaggatcgaccagtgcggccagacgggtttgttcacaccagattaatgaacagttctgggagaatgcggtgaccggaataatacgatagttcatactgcccctgtttcgttaagcaattactaccagtgccgtgctggcccggtatcaatatgcacaaagttactacgtggataatatcctacaccaccatgcgcgcatagataacgcggctttgcgaatattgcttaacgcgataccttcaatatggaaatccatcgcctggcctttagtgtgataggttttcttcgctactccacggctgcgggcgcgtagttcattgttggtacaatagaacgataaccggaaatga

SEQ ID NO: 2361 - DNA, 577 bp, Arabidopsis thaliana
ggtattggtggtcattagatagcaagtttatcgcctatacagaagttgactcctcacagattcctttgttcagaataatgcatcagggaaaacgttcggttggttcagaggcgcaagaagatcatgcttatccttttgcaggagctctcaattctacacttcgtctcggggtagtttcttcagctggtggtggaaagacgacttggatgaatcttgtgtgcggaggaagaggcaatacagaggacgagtatcttggtagagtcaactggctgcccgggaatgtcctcatagtgcaggttctgaataggtcgcagagtaaactgaaaatcatcagctttgacataaacactggtcaaggaaacgtactgttgacggaagaatccgacacgtgggtgactttacatgactgttttactcctctggagaaagtcccttcatcgagaggttcaggaggattcatttgggccagtgagaggactggttttagacatttgtatctttatgagtctgatgggacatgccttggagctattactagcggtgaatggatggttgagcaaatagcaggtgtaaatga

SEQ ID NO: 2362 - DNA, 541 bp, Arabidopsis thaliana columbia
tcgaatatcctatgatcatttctatttgacaacatatccaatgattatcataataattattaaatttactaactatgttaaagagtaagtagttaaataaatagtttggtagttagtatcagttataaaccagagagaatcttttagactcgatcaaacaaagaccttccattacaaaacctcaaaagttgaagtcaataaaaatctcttacaaccacaacaacttctcagattcttcttcgctttgttgttcgttctcttcttcaagctctctgtctctccaaatgggcgacaccggtagacacaaatggttctccttccaccaccaccgttcagcctccgccacaactatgccacaacacaacagccccggcgaaactccaacagagttcctctgtcccatcaccggctttttgatgtcagacccgtcgtcgtcgcttctggtcaaacatttgaacgtatctccgtccaagtttgccggaatctcagttttgctccaaagctttacgacgggactcaaccagatttatccaccgtaatc

SEQ ID NO: 2363 - DNA, 537 bp, Arabidopsis thaliana columbia
actgttacttaactggtgtctgcctttcgagttggtcaataaaagattcatagttgtgctctctttactaagattttcctacttttttatttaacatcatgttaaacaaaacaaaaaagtagactttgaagtgtaagtgactttgctggtaaaaaaaaaggttaagaagtgcgtgacttataaagaaaaagagaatacttggcaaatatgtgtggagccaatgttgccttctccgtcttcagacttgaacagtagaggcagccaaaacatctcctttttagtctttatactctgatttgaggacccaaaacgatctattttgatccttctcaagcgtggcaatctctttcaagagattcttaaacaactgcttgtcattaaaagaaactatgtccctgaaatggttgacgatgctggtcgtgtctgcacttccacctttttgctgtacaaagctgcatatctttcggatcaggacctcgggctgcaacgaacctactctgctgcttgaaccgaagaagaagggaatgaagactgtgg

SEQ ID NO: 2364 - DNA, 699 bp, Arabidopsis thaliana
tagtaacggacgccagtgtgctgtaaagatcatctacacatatttgcatatccaaagagatttccctaatagccacagaagatgtagtatatatatatttcatgtatacacatcaccaacaaatcatttcgaataatttaccaaattagaaaagaagaataccaaaagaaacaaaatcaacaggaaaaataaatagagaaaaatgaagtttttatgtttcccctaaagtgacgtcgttttattaaaccctcacgaaaaagatactaagctcaggtccactgttcccatcaggattcatcatgtaatacgtctcggagtctcttgacccaatcactctctcgaaatgtgctctcatatacgtcaaatctccttcttgttgtcctcctcctcctccgccgctttgctccgtgatcgcgccactgctcaccggtaaaacaccagctcccatcgacacagcatgaagcatctgcatcaccacaagatcctcttccgttggttgtctcttcacaccataaccagatttcttaccgttacaatacaacgcccaaatcggttcgtcaatgattttggttttctcgctcggtttcttctcgcattccaacgcgattctcactaaaccgactccaagatcttgaagaagtttcccgttggaatcgctaactccaataaaagaatcggtaaagatcgcggattctcttg

SEQ ID NO: 2365 - DNA, 565 bp, Arabidopsis thaliana
tgttgtttgtgtacgatctagagactgcttctgctatctacagaaatcggattagtccagacccaattttcttgacttctgaagcttcctcagttgggggtttctatgccattaataggcgaggacaagttcttttggctacagtaaacgaggctaccattataccttttattagtggccaagtatgctaatcttttatgctattttcccgttataacctacccttttcatcatgtcatgctaagaaatctatgcttttgtatcacagttgaacaatttggagcttgctgtcaatcttgctaaaagaggaaacctcccaggtgcagaaaatctggtatgcgatgtttatcatggatctgttgtctcggtgaagtaattatatagttgttaaatggcagcttgaagaaaaaaaatgtcatttggtattgtgaagtttctcatattctgctcggatgttgcaggttgtccagcggttccaggagttgttcgctcaaacaaagtacaaggaggctgctgagcttgctgctgaatctcctcaaggaattttaaggacacttgatacagt

SEQ ID NO: 2366 - DNA, 591 bp, Arabidopsis thaliana
ggtattgtagttgataaataaggacaaaaaaaaatgtagaagatgattgatgacattggatatgtaagtttttcagttaataataataatggtgattgatcaaacagacccgatctatgttttgttccacgacgaggaatggggtgtccagttcgtgatgacaagaaactcttcgagctacttgtcttctcacaagctttggctgagtttagctggccttcaatcctacgcagaagagacgactttaggtaaacttaggacggtgaatttgctattttgtgttttggtttggtgtgatatcagaagttttggtttcttttttgtaggaagctctttgaagagtttgatccttcagctatagcacaattcacagagaagaggttgatgtctcttagagttaatgggtgtctaattctatccgaacagaaactgcgagcaattgtagagaacgcgaaatctgttctcaaggtaggcactgtgtgttttgctatgaaattgtagatactatgtgtttactgaaatagctttggttgtaatctgaaaacaggtcaagcaggaatttggatcgttcagtaattaatgttggagatt

SEQ ID NO: 2367 - DNA, 367 bp, Arabidopsis thaliana
actaccttcaaagacagaattgacagactagctcgtgagttataagaaacaaaagcaaaggaagactgtgatcaacaaagaccagctcctacggatcaacagataagaggagtttagatacaagacccacctaatgttgatcaaccaagaaacattggtgctggtgatgtcccaaggaatcatcaccaaagacaaggaatagtgccaccacctgttcagaacaacaactttgaaatcaatagtggtctcatctccatgatccaaggaaacaaatttcatggttttcccatggtagacctccttggaccatcttgacagttttgataggctctttagccttaccaagatcagtggtggcactgaagat

SEQ ID NO: 2368 - DNA, 744 bp, Arabidopsis thaliana
ccttgatttataaagtttaaacgcttaaaaagtccaataacgagagggcctttgaatcggattcgcaattatatttgtaacaagtaaataattgggccgactaaaggaatgaatatacttccaaaacaacattctcagtcggtgcatatggtacggacctaacgaatccaaacctaacaataaaaagaaaacgttacaaaaaaatatgtaacagagaaaataacaaaaatataacgaagggaaagactaaagaagagacacattcattaacaattcatacacctttgttcaaatcaacgaataagcttctttattttaatggcaaagccggaaaatgacgtcaccttaaccgagaaacaaacatggagcacatgggaagagcttcttctcgcctgcgccgtacaccgtcacggtaccgaatcatggaactctgtttccgccgaaatccagaaactgagtcccaacctctgttccctcaccgcctccgcttgccgccacaagtacttcgacctcaaaagccggttcacccaagagctgcccgtaccggaatccgtcgctgagatctcaaccgctccttggctagaggagttaaggaagctccgcgtcgatgagctccgtcgcgaagttgaacagtacgatttatctatctccacgttgcagtcgaaggtgaagcaattggaagaagagagagagatgagtttcgattaaccggacacggaaaccgagaatttagatctagagagg

SEQ ID NO: 2369 - DNA, 709 bp, Arabidopsis thaliana
cccaattaaaaatgactaatataatctcatatttgtaaaaaaaaaatatagggagttatttggtaccagaccagttaaatgacttcaaagcttacatagcaaagctgaatagcatcacaggagacgaagagaaaacaagatcaatcatatcgaatgcagtttttgtcatttccgctgggaataacgatattgccatcacatatttcacaaatccgataagaaacactcgatacactatcttttcatacactgacttgatggtttcatggactcaatcattcataaaggtataatacttttcaaagttaattccaaagttacatactctgacttaaaattttaaattccattatggacaaaacaatattgatataggaattatataatttgggagcaagaaaattcgcgattatgggaacattaccattgggttgcttgccgggagcaagcaatgctcttggaggtttatgtctagaacccgcaaacgcagtggctagactctttaataggaagttagcggatgaagtcaacaacctcaactcgatgctcccaggttctcgttcgatatacgtcgacatgtataatcctctcctcgaacttgtcaaaaaccctctaagatcaggtaaagtctaaatcaccaaaatctttactgctatagaattttcaattcttgtgaatcaatttttcatgatcatatttctggtttttt

SEQ ID NO: 2370 - DNA, 514 bp, Arabidopsis thaliana columbia
tgacagtttcttgcatcaaaattactccaagaccacttatctgcctaccttcacaaaggtactactgctggttggtatagtagttgtgtgccgaccaatattcaactggatagtgaagagaacccctgaaggaaagaaactcaaggcttcccatctatgcaccatttgcgtcatgttgtgcaccgccactttcctgtctgaaactgtagggtttccttacgtagtcggatccgtggctctcggtcttgtcactcctaagacgcctcctttcggtactggtctcactgacaagatcggtagcttctgttatgcggttcttatgccgtgttacgtcatcgggattggtaacaaagtggatttcttttcattcaatctacgcgacatcatatctttggagttccttatctttaccattagtgctgcaaagtttgcctccatcgtccttccatcgctttacttccaagttcctatatcacacgcagtgattgtcggcttcatcgtctgcatacaaggg

SEQ ID NO: 2371 - DNA, 512 bp, Arabidopsis thaliana
cacaccaaataaaagaaaaggaatagtgaaaaagaactaaataattcaaggccccaacaattagaagataaaatagaagaacccatttgttgagtatattaaacattgataatcttatataagttctctagatcatataccaaaatatatacatgtgaacatttcctctagaaattctagattgttaaaattctagaagtaatattcctgcttaaagccttagtaaaaatgtgagatagttgatcatgtgtgaaaacatggctagtggtgaagctgccgttgaggatctcatcttaaagggagtgacaacaatcgattttattgagtttgatacgttcatggaatattcggaaatgaacaacaatcaagttgtcacaaaaaaatatgaatgaacttgtcatggaaaaatcggaggcgtttgtaccaaagaccgaagagtcttctagaaaatttgagcgtggcaaatgaatgaagcaacggtaactaaacaccatgcgcgaggattacatgca

SEQ ID NO: 2372 - DNA, 560 bp, Arabidopsis thaliana
  unsure (1)..(560): unsure at all n locations
nnnnnnnnnnnnnnnnnnnnnnctaaagttaatcgcgtcgcacctattactaccggtgatgtggtactgcaaacgcgcgcagtggcggtcggggtgatgctcggtatcgacccggcgcaaaaagatccacttacaccgtatctggtcaatgtgaaacaaactgacctcgagccggggaaatataatgtcatcctcggcgaacaacttgcctcacagctaggcgttaatcgcggtgatcaaatccgcgtgatggtaccatctgccagccagttcacgccgatggggcgtattccaagccagcgcctgttcaatgtgattggcactttcgccgccaacagtgaagtcgatggctatgaaatgctggtgaatattgaggatgcctcgcgtctgatgcgttatccggcaggcaatattaccggctggcgtttgtggctggatgagccgctgaaagtcgactcattaagtcagcaaaaactgcctgaaggcacaaatggcaggactggcgtgatcgtaaaggcgagttgttccaggccgtacgcatggaaaaaaatatgatgggt

SEQ ID NO: 2373 - DNA, 519 bp, Arabidopsis thaliana
tcgcctcttgttaagtgttgtggtgctggaaattgcggaaactctttagaggtttatgatgagattgtgcctccaaggtgtttgtagtattgcctgagtgatgggaaacgggacttcccgtgttgttggttgtttcgtgccgtctaatgacaaaaacggtgttgatttggagtttctggaacctttagatgaaggtttaggccattccttttgctacgttaggccaagcatctttgagtctcctgatattactccgtctaactcggagaggttcaccattgattcaagcactattgattctgagacactcactgggtcttttcgaaacgatatcgttgatgatccttctttcttgaatagacacaacagtaaaggtttggcggaaactacgtttaaggcaatctcaggtgcttcggttagtgccaatgtttccacggctaggactgggaatcaaatggcattgtgttcaagtgacgttttggagcctgctgcttcatttgagagcacttcctcgtttgc

SEQ ID NO: 2374 - DNA, 586 bp, Arabidopsis thaliana
cgcatccataatggcaagatttagcaagagaaccgcagagcaggaatgcttcttgaaagcagatacggtgacaaatgtagatacaatgctgtaaaagcatgccacggataatgctaccacaaagtatctacacattagcaaacgaaaaaagtggatttagttaattaaatactacataaattaaaagatttatacgatatttaaatcatctgatacaaagatgttttttaaaataggttgacaaaaaagaaagaaagaagctgctttatcattatcactgaacatttactataattttgagtctttttcgttaactaaagttcgccaacttactttagactttccacaacctttgtttcgaaattccaactactcccacacgtaaataaacaattcatataagatcggcgatttgtatgtataaatataacttgttaagtatatgtttaaacatttacgtgatactacatcctcttttccatatacatgaccaaaatcctcttggtttctcaaaattaaatatatatatatgtatacatgaaaaaatccacgctctgaccagattttcaatggtccatacatgtga

SEQ ID NO: 2375 - DNA, 475 bp, Arabidopsis thaliana
gaaattcatgtgatgcgaatcgtcaacacttcacaagatctgacaaaaacaaattcaaaattctcgctctttaacggctctctctctcttctcttctctcgttcttcttcctcttttctttgcccaaacactagggtttcactgacgctctcgtagaagcgcagattcgatttactttccctctttcttctactttgggtttctaattgtagatttcacggcggagatgaagaagcactttacgttaccaagaaacgctatcttacgcgacggcggagagccacactcgccaaaccctagtatctcgaaatcgaagcctccacgcaaattaagatccgccaaagaaaatgctccacctctagatcggaacacgtcgacgcctgaccataggtcgatgagaatgaagaatccgttgcctccgcgtccgccgccgtctaatcctcttaaacggaaacttagtgcggagactgcgacg

SEQ ID NO: 2376 - DNA, 570 bp, Arabidopsis thaliana
cttgcaaaggatcttggaataacttttgtctttggaatacatatggttaattataagattggtttcttctacggatttatctttgatggaatctgtttagaacatatctgaagtttagagttgttgaattataggtagatgtgacgttgcaagatggtaggacgtttgagggtgtggtggtgaacgctgatttacaatccgacattgcattagtgaagataaagtcaaagacgccattgccaactgctaaacttggtttttcgagtaagcttcgtcctggagactgggtaatagcggtaggttgtcctctgtctctccagaacacagtaactgctggtattgtcaggtaaaataaacacatgtacttgcaaaagatttattctatatatttgataagttcttatagtcagaattgttgatttttttctttccggttttgctttttcttggtgctagttgtgttgatcgcaaaagcagtgatttgggtttaggaggcaaacatagagagtatcccaaacagactgctcgatcaatgcggtaacttcatctttctgtctctatgaatgggaa

SEQ ID NO: 2377 - DNA, 557 bp, Arabidopsis thaliana columbia
gaatacaaattgaaaggtttagttagggttacgaattatatggatgaagatgatacaactcttatttcatttacatttttctattggtataggccgtttcattgcttggatagttatgaatctggagatgattgctgcttgattactgggagaaaacgtgcaaggtttgatgaattcttcttttgatttctgttttgttattcgaattgagaagacagactgagaaagatttaacttaaattcatctgcagaaatgatgtacttggtagctcttggaagttgttgtttaagctgcggtggcctgattttgttgaccgtgtggaatcaccagctgattggcaacagctttactgggaaaagcatctccaaaagtatgccaattctattgacatgatcgatgatttgtttttcattgcttatgtaacttccttttgagttgtatctttatccgagtcacagttgtgttgatgaagcagctgaggtagctctgccgtcgacatttagtggtcggatttgtccattaatgtatctggtatgtgttcaatgacatcttgggt

SEQ ID NO: 2378 - DNA, 490 bp, Arabidopsis thaliana
atgaccttgatgaacaagttgtttcgcaagcatctcatagaattcaacagctttgtggtaatacatagcagaatctttatcaatatccttatgagaacgaataggatccgaaagctcccgagaaacaatctagaaaaaggcaacgaaagatcatcagcaagcagtagcactgagtttctagtaacggatatgaataacaagagaaaagacttacagctccagggccttgagtggaaggtccaccaataaaagccatgattctagcagcagagccaggaaagcaagctcctaagagactagcagcgatacggagagcaacaccagtgcatctcgcaggacggtgatcagctgcaacgggccagggactgtttcccagctcctcaagaacagagtgaagagtaaagtggcaatcagaggcaggtaacagaaaccgagcaatgtcgtcggaagagagaccatctctagcaccagcaatgacacctgaagaagg

SEQ ID NO: 2379 - DNA, 574 bp, Arabidopsis thaliana
cgttgagcactgttgccctctcctctctactcttccttcctccacctcgccggttccatgtatcatcacttcaattcagttgctcgccgatccggtcaccgacgaggtctttgctcaccttattcttcaaccgatgacgcagcagcagtttactccgactaattattcacgattcggcagattcgatggcgatgttgatgataacaacaaggtgactaccttcgccaaaattctcacgccttctgatgctaacaatggaggtggcttctccgttcctcgtttctgtgctgattccgtcttccctctgcttaattttcaaatcgatccaccggttcagaagctctacgtcactgatatccatggagctgtttgggatttcaggcatatctatcgcggtacaccgaggcgtcacttgctaacaacgggatggagtaagttcgtcaatagcaagaagctcatcgctggagattcggtggtgtttatgagaaaatctgcagatgagatgtcatcggcgttaggagactccgatctcaagcagcgacggaggaagtagctattacggaggagatgagta

SEQ ID NO: 2380 - DNA, 1344 bp, Arabidopsis thaliana
ccattctcttcctcttcatcttctctccttctagttttctctatttcctattctctccaaattcaccatttccttccaccactcagagatctccctttcttattagctatgtcttcttctaacacgccatcttctagcgccgccgctgccggatcgatagattcttccgccgcccggagaaattccaagagacccaagtgtatttctcctttccctcttcctcttcctttcgattctcgttggttagattcaatcaatattcgctgtgtctttgaattttgacttcaagttctttagtcaaaaatgattattagggttcttattttttcatcgaaagaattgatttttagctggaagtcttagctaggaatcgagaatgctatagctaaaagttgattgatctgcagattcgaaatttactcagcaggagcttcctgcttgcaaaccaattcttacgcctggttgggtaagcttctcttcgtattactcatgtttgagtctcccaagttttgtctttgaatcgctatcaaatttatcctttttccttatctctttttctgcaggtgatttcaacgtttttgatcattagtgttatcttcattccccttggtgttatttctctctttgcttctcaggatgtaagtgaccatgaccctgtgctaatcttcgtttcattgttatctatctcaaatgtttcaactctcatgcgcaggttgttgagatcgttgatcggtatgatagtgcatgcatacctctatctgatagggctaacaaggttgcatacattcaaggaactggaaataaatcttgtacccggacgctaattgtgagttccctatgcatgtgctttgttcttggagattttattagcctctgaatgcttttgtttactttctctgttctctttgggtatttttaggtgcctaagcgtatgaagcagcctatctacgtatattaccagcttgagaacttctaccagaatcaccgcaggtattgttgaaccgctacattgatatcacaaagtggttgggtgcaaggaaagaaatgttcgcatttaaaattagatgtgacttagattccttacatatttctggcatttgatatcataggtatgtgaaaagccgaagtgattcgcaattgagaagtgtgaaagatgagaatcaaatagacgcatgcaagcctgaggatgattttggtgggcagccaattgtgccatgtggtctaattgcttggagtctctttaatgacacatacgttctatcaagaaataaccagggtttaacggtaaacaagaaaggaattgcatggaagagcgacaaggaacacaagtttgggaaaaatgtg

SEQ ID NO: 2381 - DNA, 936 bp, Arabidopsis thaliana
gtcatcaggaggatggactattattgtagttattactagtcttgtctgatggccattgtatatcctggagataaccggtttcgctagctgattctggtggcggctgaacagcagccggggaaaacagaggacgagaatgagatgatgatgacgacgtagattgcatcattgaacctccagtgtgaccgaaacgcaacggaaacgacatttgatcgtataaatccaaagattgttgatgatgttgctgaaactgttgttgttgacgagccatttcagagtaactcaagttgtatgattgcatcaacggctgcgaatgaacgctttgattcgaagcaggtcttatgggcaaaagggtagtcgttgaacccgagttccttgactgggtcggtctttgagcagcggtttggtgcacaggttgtgcttcggttgaagcaggtctaacgagtttgacgttttcagggaagttgagtttggctttgttgcctctaaaccgaagtgcagcttcgtcgtaagctcttgctgctgattcagcattgtcgaacgtaccgagccaaactctagctgctttaaatggatctcgaatctcagccgcccactttccccatggtctttgtctaactcctctgtatcttcgccgaggttggtccccactaaacgacgacgtttcgctactagcagttgccgtagttgtatactcgtatgttgggcccggacctgacatgttactcgaagcttctctcactgcaaataaacagacaaacatgtaaaatttcacacttttgttgtcactcgtgaattaacactttcttacataagaaaaagaatcgataatattaatgtctccaataaagatattataaagttttttttttaagagcgagtatgagaaagtgatgaggcaaatgggtgacaaaaggaatgaacaagggagagtcg

SEQ ID NO: 2382 - DNA, 673 bp, Arabidopsis thaliana
caactaccacgtggtccgacctctcatgagcctctctaacgcctcttgcagcacgcattctgattctgcatctagtgcgctagttgcttcgtctagaagcaacactgtagggttcttgagcacagctctgtgtatcgcgatcctctgtttctgtccacctgataactgcactcctctttcgcctactggagttttgtaaccttcaggtaaaccactgatgaaaccgtgagcatttgcggctcgagctgcatcaattacctcggattcagttgcaccatctttaccataggcgatgttgtcgaagatcgttgctgcgaagagagctggttcttgttgaacaagaccgattttgagccttagagatttcaggtttagccggcggatgtctttgccatcaatcatgacttttccagcaagagggtcgtaaaaccgctcgatcatcgcaattacagaactcttccctgacccactcgcgcccacaagagcttggctatgtccagctcgaattctgaggttaaagtccctgaaaaccatgacgtcgggtcttgaagggtaagcgaaatcaacatgcctaaactcaatgtctccacggatcgtctccacgggatcagcatcagcatcatccgggtcaatcctggtctgcctgtccaagaccgagaaaactgaaccaaca

SEQ ID NO: 2383 - DNA, 994 bp, Arabidopsis thaliana
gtgcaaagtgcctctggaggagcccttctccccttcactcggagctggaactttaatttgggttatgaagaatatcctttcacgaaggatcgactgccagacatttgaatcagattgcacagagctagtctcgatggtgcagtctcttgaagaatgacacgctttctccaatcttctagatgagtttggatcgctccgtaatatttttcctctttttcgatatcttctatttctcgtttgagtaatattagggcggattgtctaccgcgtttttctaaattattattttctgaagttacgtatctaaactcttttcttccagattgggtaaccaatcatggaatcatcttttaattaatgtgtggttgataaaaaaagccggattgcaatagcgttgataaggctgcctcgttgaaagatctacatctacatatctgaattgatagatggttacctcacattttgtgcctttaaaagggttgcatttttcttgatgaatttgagtgccaaacttggtggtgactttgtctgcagaaattagttcttgtgcagaaaacatcaccaactgggtcgtactttcgtagttaatcccctcaataggtgcctagcagcgaatgcccaacaacttcgcgttatttctgaaaacttcatatctattttcttttaggtcgagcttcattggaaccaaatggtggctcatccatctattactaaagctatacagcaggtggacaagccatcatcatgttcctgtgaagctcgatctaaaagactacagatttgagattttcaaaaataacatgaagtacattctccacacttcctcatgttaatcacttcattttatctctctatttcacaatctctctggtttttgtgcgtttcttcgttgaaagttatttgcttttgttgagttagaatggcttcgtggtgccgttggaaattcattcatgtttcatgtgtgatagggagaggaactccgcaagcatatcgg

SEQ ID NO: 2384 - DNA, 929 bp, Arabidopsis thaliana columbia
gttctcaacttggtgattctcatatagggtctaatgaaagtaatggacgtattagcatctaagggccagcttgtcgaagaccgattcatgtggaggtatatgcctttggttttgtggagactacaatttactcctttttttctgggttctattagacttgttgccctcttacgtaatattcatttcttaattttctacagcttttattcatgccttctaggctgtgtgcacgaggtccttacaaatatcaaatgtcctgtttctgatcacgtaagtgggttcttgataccctttgctcctcctcttagccttggataagtgattttctggtttaacctccatatcagacttttttcctttgtttaagcagattttttaaatgttgcaggtcttaagtttcatagcgtcattgagaatgtttttctgttttggacttactggcccacctcagttatcagtttctgatgttgttcacaacgataagcatttgaatgtcaagctttctccattgatttctggagtaagtaagaatgccaagaatactccttataggccaccccacttgcgcaagagggatgatttgaacactaggcagccagtgtcttcaagctggcggcgcatatctgctcatgattctggtagttctgatgttatatcatcagattccgattttagtgacagtgacggctccgtaccggattcttattttgcccaaagctccaaggttagaatagctgcaattgtttgcatacaggtgagtaacaatgtattattcttagttggttctcatcttctacttaacttttcagtgacaattacttattcattttattttttccatgttaaggatctttgccaggctgattcaaagtcatttaccactcagtgggtgactctctttccaacaagtgatgtactcaagccaaggt

SEQ ID NO: 2385 - DNA, 934 bp, Arabidopsis thaliana
actctcaaccagaccaagcattactaccttctcgacggaaagggtggatgttacggtggcatgaagctatctgttaaagtagagaagcttcctcctccaccaaaatctgcacctgtcaagaacattggatcggtttcaatggtcacaggtctcgctcaattcatgattccggtatctctattcgctttccctgcaatgtgggatgtgatctcaaggatgtggtagtagtcaccagtcttcaaagttctttagttgaatcgaaaccgacctcaaaaattcttttcagggaaacctttttaatttagttgagtttctcttttctctttgtaatgttggattgttggttttcctttaatcttttgcctttgaattgattgttaaagaaagattgtatttgatttatttgagaaattaaattactgaaattttcttaagatgcaaaaaaatctcaaaattcttgctttgttggaagtgaatgagctgtggatcagttgttgaacataggagagtcattgtattcggattatctgtggattaatttctctttgacgtattttggcatatctgttccatgtgattttatctgtgattgttcgtattgtagcatccaccacatgtccttttcataaagctgtcaaatcttcttaccaaattggattaaattatgtttgaaaaatacttagatacgtgtatgtatttatgtttgaattttgcttgggagggtttttaagaatacgcgtaaatttaatatggacccctaaacgaatctaaaatgatgatgttgattgatcggtggggacgtggagaattgtagattgatgaaatgaagactctggacaaacctattttacttttattgtcttggtatatatatgtctttgtcagtgataatttagatgttacgacctttccaaatgtggatatagttagtgac

SEQ ID NO: 2386 - DNA, 812 bp, Arabidopsis thaliana
acattttcaatttatccatgacagcttttaatatctgatctatttttacagttccatctgataaaaactcttttggatgtgttaggatttgtttatcttcttatcttgactgaacacattattataatgcggttggtatattgccttaagcatcactgtcgataatgtgctatggcagggacatagctgaagccaaggaacaggagtacagggcttgggctcatgttcagagtttgaaatcatcccttgatgagcaaaatctggagttgcgcgttaaggcagcaaatgaagctgaagccgtttcccaacaaatgttggctgctgcggaagcagagattgctgatttaaggcagaaaatggatgattgtaaaaggtaaataagtataagtagaagtctgcaatttatagatgcaatcacgcagttcttccataggaattctttgagagttttttgtttgacaaggataagtcttttctgtttcagggatgtcgccaagcattctgatatcttgaaatctaaacatgaagaacatggaacatatctttctgaaatacaggttggcttatgaaatttcgtgtttctttgttcttaacatattttaaaaaccttgatgttgcgtatggatttacagtaactatattcttttagacaattggaagtgcctatgaggacattgtaccgcaaaaccaacagcttttgcttcaagttacagagagggatgactataacatcaaggtatcgtgtccaaactcttctagttcctctatctgatctatctctgtgacttctcacttactcttatatctagtag

SEQ ID NO: 2387 - DNA, 1050 bp, Arabidopsis thaliana
cacatttgacatttcaaccgtaatagcaaatagcaattcacacacaatatactgttgctaaggaaatataactagcacaatacgtaccttgctagtagaaccattggcccatttcaccttcacggaaccatttttaaaacctgtaacaacaccaatacttgacaaaaaatatgcgccactgtagtcactctctgtaagtaggtgtttcgcctctgtagcgacgattgtgtctgcatttggatcaaattttccttctggaagtaacttgaccaccacatcgctgaaacagaatccaaaatcagggtgctcaagcagttcatatgcactgacaatttcttccatcacctcatcaacacaacctgttgcttctttctcaacctgtattgtccattgtaccttcacagtttgttccttagcattgacagccttcacaactccccattttttgctgttgcaggtttccttttccacaacaaactgttcgggccaaaaatcatgagcattaacagcaccaacaggaagcagctgttgggaatcaactcccagactgcagctaccatcttgccacataacagcaaccttcatctttgtctttgtgataacaaatagctcatccaaacctgagttctgcatatttctgttaaaccctttttggaatgtcttatggcattcattgagattgtaggcagccacatttggagtttgccgctctgctatatcacagtgggaagagccagggagtatacaccagtcaccaagctgccaactcgcatgagaaacacaaggtaacaaagttaaactctcaggattctgcaaagcttgaggtgcagttaaattccgatcaccctccattacgatggaggcaacccaatcgacgtagacaagtcctgcttctacagtgcaaacagttcccataacctgggttcctctccaggtcccgcataaccatgtagttgatctgggggcatgggcagctttacctgaactctttgccctgggtaatacgaatattgagaacctcgagtaaatttgggggaatggcacaagttt

SEQ ID NO: 2388 - DNA, 532 bp, Arabidopsis thaliana
ggccactggtgatgaattcttgtccgatttcgaatgagctgcagattcagccagagcaactaccgctaaacaaagaggaaatcatcaaacaattctgtgagattgttggattgcatccagatgtcgcagtcgcttacctcgagcgttgccaatggagtttacaagttgccatcgactatttcatgaatgaggcatatttcacagaggatgtaacatccaacccgcctcttccattgataggactaccttcacaatcacagtttcaggcttcggggagctctttttctaggtgacttcccgattatacttagtatgagtctctctgccttctttcaagatctctgaacatccttatctgaatctttcttttttccgccattcacctacttgtacagtttgacgaacattgacccgactgatttcaccgtagctaatcttccaatggcatcgtctcaagtggatgtaactttccttctcttcctctgcactatttactatagtcttgctactttctcgaattgtgttagcttga

SEQ ID NO: 2389 - DNA, 1594 bp, Arabidopsis thaliana
ggatgagattctccgccaaatccgatctttccaccggaaacatggttcacgcctcttacctactcacctccggtgacctccgattccttttcactgctccttactctccgtctctctccgccggagagattaaaccgacaaccacagcttctatcccaagtttcgatcacggctcttgtcgttccttcttctcttcacatggtctcggtgttagagccgttgcgattgaagtagaagacgcagagtcagctttctccatcagtgtagctaatggcgctattccttcgtcgcctcctatcgtcctcaatgaagcagttacgatcgctgaggttaaactatacggcgatgttgttctccgatatgttagttacaaagcagaagataccgaaaaatccgaattcttgccagggttcgagcgtgtagaggatgcgtcgtcgttcccattggattatggtatccggcggcttgaccacgccgtgggaaacgttcctgagcttggtccggctttaacttatgtagcggggttcactggttttcaccaattcgcagagttcacagcagacgacgttggaaccgccgagagcggtttaaattcagcggtcctggctagcaatgatgaaatggttcttctaccgattaacgagccagtgcacggaacaaagaggaagagtcagattcagacgtatttggaacataacgaaggcgcagggctacaacatctggctctgatgagtgaagacatattcaggaccctgagagagatgaggaagaggagcagtattggaggattcgacttcatgccttctcctccgcctacttactaccagaatctcaagaaacgggtcggcgacgtgctcagcgatgatcagatcaaggagtgtgaggaattagggattcttgtagacagagatgatcaagggacgttgcttcaaatcttcacaaaaccactaggtgacaggtacagttcatttgatcaaacacatgttacagttccctaacaatccatttgatgataaacatgttacagtttactaagcaatctcttgtttatgattgtgttaataggccgacgatatttatagagataatccagagagtaggatgcatgatgaaagatgaggaagggaaggcttaccagagtggaggatgtggtggttttggcaaaggcaatttctctgagctcttcaagtccattgaagaatacgaaaagactcttgaagccaaacagttagtgggatgaacaagaagaagaaccaactaaaggattgtgtaattaatgtaaaactgttttatcttatcaaaacaatgttatacaacatctcatttaaaaacgagatcaatcaaaaaatacaatcttaaattcaaaaccaacgtataaaccaccattttgtgtaggaatgtataggatacggaaccagcattttgagatcctaatccttggggccgacgctgaactttgctataaagaacccgatggtatcgagctcagatgacgggtcgaatttctgaaccagttcttcttcaccgggttttaacacgtcctgcaaaacataactcggtttgtttgttagaatttatagacgggagatgagag

SEQ ID NO: 2390 - DNA, 446 bp, Arabidopsis thaliana
gtcttgctactttctcgaattgtgttagcttgaaagcttagcttaaaacagaacctgtaaaggaaaaatagggatcttagttttacattaggagttagcaacctagatatatctctcttgatggtctttctttggatgtggccttttttgttgttgaggaagatttaagcacggagacatttcttgatcctcaggccatccaaggctggacaagtgtggggcatgaagctgcaccgactacaattacactaactatctacttagacgatggtgggtctgtgacaccggtatatattccttttagatcagaccaaaccgtcagagacatccgcaatgccattgacgagctaacaccagctaacaacagatattacgatttgcgctcagtgggtggagaagatgattgcagggatatgaatgcaactgtaggcaacatttgtaagagt

SEQ ID NO: 2391 - DNA, 1447 bp, Arabidopsis thaliana
cctcttgttgagctctcttcatgatatcggggttgtgtaatagctcggccatcgcgaattctattacgtgcagtgatgtgtctgtaccaccgagcaccatgtcctagaaaaatacaaaaacagccatatataacaaatctatttgcgttacgagggacaattatttttaacttaccatgagtacggccttgacatcgttcatggtcaacttcgtcttttcagcttcttcatccttgactttcaacaagacgtctagaaaatccacagctctcccgtcactactgtccctatccatccccaaccgttggttaatgatccggtcgaacatctgatccattctttgagccggtcttcgcatacgcttagccaaaccctgaagatcaaaccggctcaataccgggaaaaagtcggagatattgggcactagcaggaggtcgttcatctctctaatcacctctaagaactcggctccaacaacctccctctcttcttccttaaccgttgttccccatagcatctgcgtcacaacattcaacatcatcaagaatatttgttctcccaggttaactggtgaaccgacccgagcctggtccgccaaataccggacggtttgccgagtctctcggcgacggaggtcagtggaggaatccaacatggcgtttctcagtatcctattaacacatagcttcctcagcatccgccactttggtccatacggcgaccaaatgatctccgtaccaccatacgtgttaacagggcccacagcagggacatcgtggttcgcgaagatgatgtcattcgttttgagaatctcttgcgctacttcagaagaggtgaccacgattgtgagcttggccccgagccagagtttgaaaatgggaccgtgctttttagccagcccttggaagtaggtgtgaagctccggttggaggaatggaaggtttccgataatgggaaggccccaaggtcccggcggcaacggtggagaccgccgtttgcatttggcgtagagccaaagacaccaacaaagagttgatataactatcacagttaaaccatagtcaagttggtccttgcgacttcggtttctaaagagactggaaatgtctgtcattttttttcatagatttgatgtagagaactgaggagcggttttgatcttcttttataattggtgaattttattattctctccatttaatgagcggtgttgttttgtatttttaatacagtttacaaaaattaatcttgtgtttatctttattatatcaactcaatataactagaaatagatatttacatatttttcttagtgtatgtgaacatgttatattaatatcaaaaacgtatagttttgctatgtgcaatgacaagaattgtttttccctgtttttaatctgatgtttagctacgacttggtttcttgggaggcacaaatatgtgtgag

SEQ ID NO: 2392 - DNA, 1089 bp, Arabidopsis thaliana
ttttcggttgattaaatgtttaacaaaatgtaaagcaaagattctagaaaaagaaaaccattcttgactttgctatttctttgacaaaaatgtgacgatattcttatgaacttttcatcatattttatcatcataatttcaagccttacggttatcacatgatccatattcatgtcaatgtcatgcttatccccgaatattacatactactgggtttatgtacataagatccggttcacgttaatgggctgatgctttttagataaggcccaactaaagctgtttcttttgttagccgtggaaacaaactgcccgttttgatttgatcgccgtaaggcccgtaacattgacagtggagaggctgaaaacatgatgggtataatagtcatttacttgagaagcctttatatttttcattgtacggtttaaccacaacatatctaaaccggtttccaaacacattctattactatgtaccccaaatttgatctcgacttcaaaatcggagaaatttcacggcatggctacagccgttggaagcgggacgggtgtagaggttggatttgcgactccaaggtgaggatttcgagtactatatgcagtcttactccattattctcggccggaattctaagaaatcgaccgtcgacgtcgacctctcatctctcggcggtgggatgaacatttctcgcaaccacgctcggatcttctatgacttcactagacgacgcttctctctcgaggtacttggcaaaaatggctgcttcgttgaaggtgtcctccatctccctgggaaccccaacgtcaagctcgattcacaggaccttttgcagattggtgacaaggagttctacttcctgcttccggtttggagtatcctaggcggtccattgggaccaggcaccacgtcttagggaaggctactgttgttccgtaccataattatcattcgggtccaggttccgggtcgggtaagaatggcgtccggagtagagagttgtatgagtacgatgatgaagacgacgatgaagaggaggatatcagaggcagtggaaagaaaccatggagagatggacatgaaggagtata

SEQ ID NO: 2393 - DNA, 836 bp, Arabidopsis thaliana
tgccggaactggacttctgctaattcttcttcttcctctaacaggactcctgctgatacttctcctggacaatcgaataggactcctgctgatacttcttctggacaatcgaataggactcctgctcacactcttcctagatgatcggactggactcctgctgatacgtctcctggatgaacgaaccggacttctgctcacactcttcctagatgatcggactggactcctgctcacactcttcctaggtgatcgaatgggactccggcttaggcttctcctagacaatcgagtgggactccggctcagacttcttctagataattgaataggactccggctcaggcttcttctagaagatcgaactggacttctgctaggtgatcttcttgacgatcttcttagtgggccctcccaaggcttccacgagatgcagatcttacaggactccggctagggcttctggcaatcctacctctcactggacttctgctgatgacccttttggggctcctcagtggacttctgcttaaactctttgaaggacttctactaatatctctttcctttttcacccgcaccggacttctactaacacttttggtagggctccttctgacatgcctgcccttttcctcactccctgggctttctcttctactgtttgtcaagttcttcacttggcggctacctttagcaggacttctgcccccattccatctaggacttgaactcgggctcttactctgactcctccgaggactaacactcgtgctcttactcactgtcctcttaggactcaagctccggctcctgcacattaactttaaaataag

SEQ ID NO: 2394 - DNA, 835 bp, Arabidopsis thaliana
aagtactaacctaaaagactccatacttatatcaaactatcggataaaaattgaaactttcgacccaaaacacaacagttaaagtgaaaactgaaaagcaagtacaacaaagaccaaccaaacaaagtaggattcaaaggaccaaaatatcaatctgggcaagaagaatcgaaccttctagctgagtggtgtcctcaggcggaggcggatcagggcctggaggagaaggaggaccaccagcgacggcgaggcggcgtaaacggcggggactcgctagtaggacggtgtttcgacggtgaaggtgatacggcggtgagaacggcgagagaattgagtagtggtagaggttagtgcttgtggtcgggttggacaaagccatcgccatttttcctcgacgataaaattaagaactcatttttatttaaggggtttctgattcagacatacacgtgtacgacaatttaaaaaaaaaacatttttgtggaaattactccaaatcaagagaattttataaaatttgatccatcaacaaatattttttgttgggtgtatatatttttctcagctctctttacaattgtaaatgtgtaaaaaagaatcttttagccgtatagaccttcttcttcccaaacttcaacaagaaactgcaccatttcctgcaatgataaaactttcaataacaaacaaaatttggatgagaatggatagttacttcctccagttcatggagttgaacttacatcaagaggtataggcctcggaaatcgcttgttgctcccaagtagactctcataagtcacattttcactgcaaaaacaatcaaactgtttatatt

SEQ ID NO: 2395 - DNA, 1013 bp, Arabidopsis thaliana
tactccagttactacgcaattatgttctgaaattatgtaaactcaaaacgatcatgttttgttttgttttggacacaaaataaaatcgaatcaatcattcacatttacaacaaggtctaagattttattttccttctcgtatcagcctacaatttaaatcaaactcatcaaaatatatcttagtgccttaaacaaaaaatacatatacacaaaaggtgtttttccatcaatgtcctaaaacaaaatccaaattcagacaataaagtcagatttaatggcattaaaggttattcactaaattcaacaacaaaaaagaagaaacagtaatcatttttttttgatactgtattacataatctcctaaaccaaatctatataataaacacttgtcgtctcaaagtttctttcttttttatcttacccttgaagcaagatccaaagaaaagtatactcctttatttttcatggtttcatactacaaaacctgctcttatttacatttttttgtctttaaacctcaaaacaaaagacaaaaaaaaaacggaaaactttcttttttccggacacataaaaacaacacaaactttattagacagaaacaaactagtaaaaagattttgaacatcaagaaacaaaaatctctctctgtctttctcaattatgaaactcacctatcaattcttcatcttctggttctttttaccattctttgcaatctccggtgatgatgattataaaaatctgatctttaaaggttgtgcaaatcagaaatctccagacccaactggtgttttctctcagaatctcaaaaacttattcacttctttagtttctcaatcatcacaaagctctttcgcttccgtaacctccggaactgataacaccaccgccgtgatcggtgtttttcagtgccgtggcgatctccaaaacgctcagtgttacgattgcgtctccaaaatccctaaactcgtttctaaactctgcggtggcggcagagatgacggtaatgtggt

SEQ ID NO: 2396 - DNA, 598 bp, Arabidopsis thaliana
cgatgtgggactctttcctgatcaataactccctgaaggtgggcttcgtttggtgctgggccattacttcttcagacgggccgatcctctcttctctcgtccaacgttgctagtcgtgatatgttgggcctttaatcatgttggtggggcgaacgatatccaacagcaagatctttagacaaggtaatgaaacaaactcaggatcaaccaagttcagcctatagagtttgagagataccaatgtctcacaaacgtaaaggcttagtggcatctcacacccttgagtaagacgaacatgtagacgttggatcttacgcttaacaaaggcatcaatccatggtttgagataggatgcatcatttccatctaaagataacttgaggctctctatgcatgaaactctatcggaatcgaaaaaccagttaccaaaactcaaaaaggcattgaaacttgagaacttcgaaaatgacaattccaaattatgaacccaaagccagagagttctcatctggtggataaacgcttgtcttacagcttctctgtgggaagatgattagaactgagttacaaaggactggtactggaacttgctgacctt

SEQ ID NO: 2397 - DNA, 451 bp, Arabidopsis thaliana columbia
cacatcaggttacttccatgctcttgctgaaactaacactcccttggtacccctctgcttcagaatcaagctctgcagtttcatctaatcagacgccgtttgactggaaagctaatatctgttctgttaagtcctcacctaaaaccaagcttttgctctggaagatggctcaaaatgctctccaggtgggagaaagccttgcacagcgccagatagttgattcattaaagtgcccccactgcggcctaagagaaactgaaatccatcttttctttgagtgctcttttgcctcccagatctggagaacagccccccttaaggattccttcgatccgagtatcttttagtcagtcactgaaggattaattgcagctatcaagtctgatctgcttacctcccataggcatctggcttggtcctctcgctctctggatatcctggactatatggg

SEQ ID NO: 2398 - DNA, 1274 bp, Arabidopsis thaliana
caaaatcccaactgtaagtatttttggttaaaggttcaaaagtttcgacttttcattcttgttgtaacttaatgttttttcataggacatagcgggttacatggaaggctgtaggtttctcccaaagctaaacaacgaacttccagtcaaaaactcgacttataaggagaggttctcgagtttggagaatcttgtgcttattatggtcagtcatcgaaccaacttctctgcgtaacttataagtttctttttgatggtaacgttttatttttgatcgaatatcagtttgagcatgacacaatattgatacctaaagaaacctcatggtttggatattatcctgatgggtctttcaagaccattcttccgccgcaagaggtaactttaacccttcaatcattgtttctaaatggctcaatattgcagatacattgagttgtagtaaatgtttggatttttttcctattgtagaccaagctatatactgaagactggattggtttgagaaccttagatgaagctggaaaagtgaagttcgttaacgtctctggaaatcatcttcagatatctcatacagacatgaagaagcatatagtgccatacctctgtgataaatcatcgtcgtcatcatccacaacaatggcagtttccggatcatcttcctcacaccagtggcttccaagtgtagggaacattattatggatcttattggtccagaagtggatcagcttcagcttgtgctacgtcatgtgtaaatctgatgtcctgtgttgttgtttgttctcttactaaacacgatcgtctcgtgatatgtttgtaacttgaagataaaacaagaaaactgttccaaaatccctctcaaaaaagttcttatagtcattgataaaatgtcaaatatatgtcacaagaaatggacagagccttataaagggatgatgaagaacaccattgatccttaaggtctgttattacagaaaatctcagaacgagacatagaaacataagtccacatatatatattacaacagcattctgtcttcaatccgaatcaaacatcttctgaggcaaattctgattctttgcagcatgagcctgattctttacttgtcttgacttgtatagtttgagagatgcagaggtatctagcactactcgttggctaagaaacaggctcaaatcctattataagatactttcataccttcaggagattctgcctgctgatgctctagattgcgacgacaatattcataaagatcttggcttcacgagg

SEQ ID NO: 2399 - DNA, 668 bp, Arabidopsis thaliana
cactgatacatcaactccagcaaggaaatcaatcaatctcttctctctatgcttacttctattattcttgctgtcctaactcttatcgaacttcacagaaatcctcaagcggttatctttaagacaaagacaaccaaaatgttagctccatcgatttcttccttctcagcaagaggacctcaacgaataagtcccaacattctcaagcctgacatatcagcgccgggactaaacattctcgcagcatactcgaagctagcatcggtaaccggttatccagacgacaatagacgaacactgttctccataatgtcaggaacgtcaatggcttgtcctcacgcagcagctgcagcagcttatgtcaaatcattccatcctgattggtctccagccgcaatcaaatccgcccttatgacaacaggtaactaaaatcatcaaacaaaaaagctcaaagcgttctcaaaagtaaaagaaagtttcaatctttacacttcctttacagctactcctatgagaatcaaaggcaacgaagcagaattaagttacgggtcgggtcaaattaacccgagaagagcgattcacccgggtctagtctacgacatcacagaggacgcatacctaagattcctatgtaaagaagggtacaatagcacaagcatcggactttt

SEQ ID NO: 2400 - DNA, 579 bp, Arabidopsis thaliana columbia
gttacactcattaagatcgtaccttatgggaaaaaaaactcaagagacaaaaaaaaaaggaaggcgcgtcagtgatggagaagattattgacgtagcttatggcgcatcagtgaaggtgggtttgacgttgttggagatgaatctgttgccggatattgtcattaggcggctcacacgtctgcttctggccggtcgtctccgttccggttacaaacccacggcggagatgcaactctccgatctgcctccgttttgttgactgtaagtgtcactgacacatatataattaaaagctcgtttttcttttcttttcaacatctagatttaatttatttatatttcagactagattttgttaattttgctttggtgttattgagtgattattatgacgattttgaaacaatctggtgtgtgtgtgttgcaagttgttacacgtacttcgcttgtggggcttcgtccgcaaacaactaacatgacggctttaggccgcacaatattaattctcgttgatgtgtgagtttttgagtaaaaatgacatgtgaaacaaaaagtagtttagatattgttgttgagag

SEQ ID NO: 2401 - DNA, 1124 bp, Arabidopsis thaliana
tgtttcagttcgccaggttgtctcttgcctgcccatggattcagcagcagttcaaaaggttaacctattcgggaatctccggatctacgcttattttcaactccccgaagcatttcgtcgcttactacgcccttcctcgtctctgggtgcctaggtatccaccgtaagcctttcctcgtttgaacctcgcccttaactttaaggctatgccatcctaaggtgctgctaaatggaaagatcttatcaacgtccatgaatgaaaaatcatagatcgaactgccgaatcggaaaaattgggtgctatcatatagctttgtatcggctaagttcacgagttggagataagcggactcgaaccgctgacatccgccacagggtaaaccaccgcctatcaggcccctgactgattctaccatagaggccaacgatagacaagaactcccccccgaacacagcttacaactttcatcgtactgtgctctccaaagagcaactcttctcaaaatctcaaaaggtgatgagctggaatcccattccaactaaggattcttgtggttctagaggatccagctacaggagaaccaggaacggagagctttcccccccttttccgccccaactctttcgaatgctggttttaagaatgagtgattgcccttctccgacccttactgcccaacctgcgagcggacagctaatgcattccacttattgaacagggttctatggtcggtccgcgacccctggataccgaaggcgtccttggggtgatctcgtagttcctacggggtggagacgatggggtcggtccatggattttccttccttttgccgcatttcgctcaaagggttgaagggagatagtgcatcaagctgttcgcaagggccaacttgatcctcttccccagggatcaatcccagacgagggaaccctaggagagccgccgactccaactaccgtccatgtacgatccatactagatctgaccaactgaccatcctacctcctctacgttcttgacagcccatctttgtctcagtagagtctttcagtggcatgtttcggtccttttccccattacttagaaaaagtgagccaccggttcaggtacaagatactatca

SEQ ID NO: 2402 - DNA, 611 bp, Arabidopsis thaliana
gatggttcggttatcatcgtcggtggtagaggaactaatacggttgagtattaccctccacgcgaaaacggtgccgttccgtttcagtttcttgctgacgtggaagacaaacaaatggataatctctatccgtacgttcatctcctccccgacgacgacggtggcaatctcttcatcttcgccaacagtcgcgccgttaaatacgatcaccggataaacgccgtcgtgaaagagtatccaccgttagacggtggtccgaggaattatccgtcaggtggatcatcggcgatgctagctatccaaggagatttcaccacagcggagattctaatctgcggcggagcacaatccggagccttcacagcgcgtgcaattgatgctccggcgcatggaacctgcggacgaatcgtagctaccgcggcggatcctgtttgggtgacggaggagatgccgttcgggagaatcatgggagatatggtgaatttaccgacgggagagattctgatcataaacggagctcaagccggaagccaaggattcgaaatgggatccgatccgtgtttatacccgcattttataccgacccgatcaaccaattggtttacgattca

SEQ ID NO: 2403 - DNA, 519 bp, Arabidopsis thaliana
taaagcagttctacggcggtggtcctttcattgtttcatctgatggttctttcatcgcctgcgcctgtggtgacgtcattaacatcgttgattctacggattcatcagtgaaatccacgattgaaggcgagtcggatacgctcactgctttagctcttagtcctgatgataagctccttttctctgctggacatagtagacaaatccgagtttgggatttggaaaccttgaaatgcattcgctcttggaaggtatatatatattgtactaactgatattgaattaggtttctcttttttaaaaaatttgatttctaaatatgattattgttgtccttgtggtgttttagtctataatttgtgcttaatgatgagcagggacacgaaggacctgtgatgggaatggcttgccacgcatctggaggattgctagctactgctggagctgataggaaagttcttgtttgggatgttgatggtggttctgcactcattatttcagaggccataaaggggttgt

SEQ ID NO: 2404 - DNA, 765 bp, Arabidopsis thaliana
tgcgaataagcagctcgtaacgatattctctgcgccgaattactgtggggaatttgacaatgcaggtgcgatgatgagtgtgtctgaggatttgacctgctcttttcagatcttaaaatctaatgacaagaaatcaaagttcagtttcggaagcagaggtggtgctaaaactagcttcccttatcctaaagtgaaggtatgtattaatcacatcactttttaatttgtggatatactgtagcacaaaaaatgaaatatggtaaatgcataataatttgctctattactaaatgtttttgaatgatttaacattttgaatctgtttgtgctcctcaataattttaaatctattcgcattgatagatgaaactttggattagtattgacttcaccgaattagacctaatgttagtcaaaactaacactgtggtatacttgaaaattggtttgctatgtttctcactagtaacttacaagtaatttatagccaaatcattgttgtcatgtcatgttacaaggcaagctcggaatctctaaccatttgatctaattaaacatgtttatttgcagtcgattctgagttcgcaaaattcgaaagaatacaactgatgaagatttaaaactccgcataataactattagaaaccatgccaacgtaactcgactactatatgatgagaaattaaagaggattttgaatttcggaattttgggaagcttctgtttttgttatgttttgtgttgtctgctgctatcacttgtgtg

SEQ ID NO: 2405 - DNA, 568 bp, Arabidopsis thaliana columbia
gatatatagtatgtttttggaatctttaaaaccaggtcacatggaagtgtcgaacaaaagaataagataatacaggtaattaacaatccttagtgggctgaacgttgaattaagaaataaagccacgagtttggttttcttgttatttaatttacgtctctctctatttatatgtttaacgttacacttattaagatcgtaccttagggaaaaaacactcaacagacaaaaaaaaaaaggaaggcgcatcagtgatggagaagattattgacgtagcttatggtgcatcagtgaaggcgggtttgacgttgttggagaagaatctgttgccggatcttgtcattaggcggctcatacgtctgcttttggccagtcgtctccgttccgtttacaaacccacggcggagatgcaactctccgatctcctccgttttgttgactgtaagtgacactgaaacatatatagttgctccttttcaacatctagattttatttatttatttgagattatagttacaaagctatatagagactagcagattttataatttgctttggtgttatgag

SEQ ID NO: 2406 - DNA, 828 bp, Arabidopsis thaliana
ggtcgactctactcaacaaataaggaaaggttaaatattttgtaatgtgttcctttattcaatagaagaagaagagtatttatacacatacatgttgcctgatcttgataagattatatctaagtaaatatattcatgtatatcctaataccccccccctcacgttggtaagtcgtaattacaagtacctaacgtggacaataaacgttcgaaagttggtcttggaagagctttggtgagaagatcagtagtagaaatatgaggagtagaaatgaccttgtctgtgaccgcatcacgaacttggtggcaatccttctcaatgtgtttagtgcgttcgtgaaagacggggttagcagcgatgtgaatggccgcttgactatcacaaaataacagaattggttgtgtatgatcgacaccaagagttgtcataagagccttcaaccattttatttctttgagtgtgtaggccattgcacgatattcagcttcggccgaggaagaggaaaccgtgtcttgtttcttggtcttccacgatattggagtgtcgcccaaatagagaacatatgcagagagagaacgacgagtccgagggcagggattgtagtcagagtcacaataggccgtaagagacaaagccctgtcagaacggagtaaaattccttgatcaggagaccccttgagataacgcacaagacgaagtgtcgcatgccaatgagcctctaacggagtttgcataaattgagatagaatatgaactgcatagctgagatccggtcgtgttatggtgagatatataaaccggtcaactaggcgtctatattgcgcggg

SEQ ID NO: 2407 - DNA, 902 bp, Arabidopsis thaliana
tttgaatatttgctactaacatgaacgattgcaacattttttattgttttcttataccttagaatctttttgactttacaagactaaattttaagaagatggaactaatcaaatctcaaattttatgcaagactaagacttatctacaatttacatggaatgtttttttcaaaaaacaaactttgtgtgatcagctggggccagggtcaaaaacactgttcctgtgaatccaattcatcatgacaaatgatcacatggcaacataaaaaaaagcccctttaatttttccgagtcaggctttcaagtttcagaaaccaaagatcttcacagcttgaaagtagtagactaacattatatatggagagataagctataaaaaaatattcacacttaagagttgggaagatcattagactaactactttaaagagatcttctagctgctttcttatttcctgcaactgttttatcttaggcttaacactaatattatgatcacatacctgcaagtaaaaaatttgggtttgaagtaaaaatacaaacttcagacccgcccaacaggcgagaaccgcggttgatacccgacggtgttgccattagggtttgaatcttggtccgggagtaacacggtttttcccctaactttatgttcatcacaagagcttttctgctcaaggatgttctctgacattttcctactctctgcaagtgccatgcatatagagaacgcttgtagttgtgaaagggatgaattatatgcaactgaatatatcccttctttgatcggtttaaagctcaagaacggatgctcctccgcttgttctcctggaaaaacgtagaaatgtgatgatgaaccttttggttttgatttggcagagagcaaaaaaaggacatttgattta

SEQ ID NO: 2408 - DNA, 492 bp, Arabidopsis thaliana columbia
gtcatgcatctttgtggtctaacattacacgaggctttcgctgctataattgcttattttctcttaagtctcattagttacatttcggtagtctatctgatctattggtatttggtagtctatctgatctgttacatttctttaattcccaggactcttgtatgagatgcttagatctgcaaagacagggagctcaatatccacctggaaggtatgtgttccttgtacgtcactgtggactggccagataatgttattccgctttaaggttgatactcatttttcggctaaatatttcctggtttcgtattttaggtactaatcatggacaaacttactgtcaagataatgtcgtacgcctgcaaaatggctgatatacacaagaaggagtttcatgtgagaatgaagtatttttgtacaaatgctagttccatatgatactttatttgggaataacttaattgtcgtagatatgaggctctgtagtggttg

SEQ ID NO: 2409 - DNA, 823 bp, Arabidopsis thaliana
aatcacgtttggcaatagagtgtatgagtatatgtgtgactatgtcaagcaaacgctcaatattccaaacactggcgggggtgggaaatatctcggtttacccgaacaatttggaagaaagaaaaaagagatgctccaatatattcaagaaaaggtcaaacataaaatctctgggtggcagaacagattcctctcagcagcaggaaaagaaaccttaaataaaagcagtagcctatgcgatgccgatctactcaatgaattgctttcaactacctaaggaaatttgttctgaaatcaacagcatgatagctcagttttggtggggttcaacgcctgataagaggaaactctcatgggtttcatggaagaaaatgtcacgctctaagaaaaatggtgggttgggatttagagatttgcataagttcaaccaagctctattggcaaatcaggtatggaaactgatacagcgacctcaatctcttttattccgactgcttaaagcacgatacttcagagatggttcaatacttaacgctaccaaaggaacacaaccatcatatggatggaactctttgcgttttgggcgagaactacttcaaagtggattacaactcgtcattagagatggaaaggatgcaaaaatagggttggatccctggctaccgacaactccgccgagaccacctctggttttaccggccgtaaatcctgaggcaaaagtacagctactaatggatgagatgacacgacaatgggacactccaaaatctattccatgattgacccattgaccatcatttggtaaaaggtctatattccagaa

SEQ ID NO: 2410 - DNA, 1204 bp, Arabidopsis thaliana
caaacatccaggaatgagggtgacaatttcattgaaatgcttatagttttaattaaaatgtactttagacaacaatatttaataagttgaaaagaaaagaagaagcatttcggtttcgccaaattaggttcggcttggttcctgcatcgttagcattgcttgctgccaaagaaaacatcaatttcatataattagatgtttcaccgtaacaaggtgtgtagtagataaatatgaatattctttttacctgaaagcaagacaatgtgtaatgcacatcacttgttgttatctggtggtgtataactattctgatcctgaaaacacatcccacatataaatagttttgaaaaattaatcaaaattttagtaaaactaaacatttttcacatgtaaacgtaaatgctacacataccgggatgagtttccccggataaggagaatgccattctcctctagattcttccgcagtttctcagccgtaagtcttgaaccatcctccatatccatgaaaatctgaatttgttgttatgtaacttaatggttagtcctagtgattgatgcatcactgagtcactattcgaaattaaatccggcataatgcatgttgttgacgaagaagaaaaacagactatagttgtgtcaatacgcaccatgttggtctccacggctgcaacatttactctaatccctttcatttgattcaacccttctgcaaatatttacgtaatgaatttactttttgctgctaattattgtagtgagtaaatgagtggtgccaacgtaacgtaccagctaacaacttagccttcttgtggtcatgttgtagctttgggaggttttcttggagtgcgaccaaagcggctgcgcacagaacacctatttgtctcattcctccacctaatgttttcctaaccgttttcgccttctctatgaagctttgcgaaccaacgattacagatcctaccggagctccaagacctttagagagacacacctgaaaccagagtgtgtgtgaatgactcttatcttttagctataattttcagatgttatagacgagaaagagagaaattggtacctgaacggagtccgcagccttaacaagcttatggactggaactccaagtgcctacaaaaagagatctcaagtcttttatttatgagtcttatggataaagaatggaaaacagttaggtgattgata

SEQ ID NO: 2411 - DNA, 640 bp, Arabidopsis thaliana
cgtttgtgtccactacgtttatgaacaaagtagtgttggattgtgttcttgtttgttgtatttggttatgattaagaatcgtttatgaacaaagtagtgttggattgtggaatacagctatgcttatttatcatctcaaacatctcacactcgccatttggaatacaactatgcttatttataaacttcctaatcctccacattgaatctgaaggcagaatcgcagcatatacttgccaaaaacactttactccatcttccttaccatcacaacccacacatttgaatccaattttatcagaatcgtacctatactgcttcagattgcacccagttcggagagcgtaatcgacgacggcttctttgagagcaacaccactgaaaaatgtttgcttctcgtacaaatggccatcgccacgctggagatgtgtttgaaatcttgcttcgtcttcgtcgttttcttcacggtcgctctccggataaacatcatggtggatttgaggttcgtcggtccattcattcagcatttcttccatgtgaaattcatctctatcttcggcttcaggatcgacatcaccaacattcgtagggtcatgcatcatcatcgccatctccacgaccttgagcagcagatcgaaaa

SEQ ID NO: 2412 - DNA, 934 bp, Arabidopsis thaliana
  unsure (1)..(934): unsure at all n locations
cagagttcgatcctggctcaggatgaacgctggcggcatgcttaacacatgcttaggcaaccacatatgagaaatagtttaaagttgggatgcaaccacatcagaaataatttgtttaagattatcgagaatgaggagttccaaactttcctatagagacggaatggagcagaccagctagctgtatatgtttgaccttattatataattactataagaactgtttttaacctcattttaataattcaagttatgttcatattcacgttatctaaagaaaaaagactatttttcgactcgaagacaacggtaggctttgcgttaaccattttatttcggctgagttaggatctgttcgtttctccatttgacagatccatccaactcatctattcaacatgtccatctgaatgattcattcgactcttgttcgtttcatttttagtcggttcatttgactggactatccgaatgagatgttgttcgtttgcttatctctatctccatccaaatgttttgtaataatacaaatacctanaatacccatgctttcatctaattatatttttattattacctgtaaacatattaattttaatttttaatctaaaatatatttaaaagtaaataaatttcaaatattagttttttatatttataaatttatttcatgtttttggcgggagaacgtgattttacagttttgacggaaaaactcgattttacggttttggcggaaaacaaaattttacgtttttggcggaaaaacgtgattttacgtttttcgcgagaaaacgtgattttacgttttggcgggaaaacgtgattttgcggttttggctggaaacatgattttgcggttttgacggaaaaacatgattttgcgattttgacggaaaacacgattttacggttttggcgggaaacgtgagtt

SEQ ID NO: 2413 - DNA, 1039 bp, Arabidopsis thaliana
cgtgtactttccgtctcgcttcactttagagaaccgcgtgccgtttaaaacatgcacgttgcaaccgttagcagactacacgccgtttttcttccttaatttctctatcttcttcacctgaatcttcttcgcctggacttgtcaaacttgtgcgtgattcatcgtcacatcgccttgatcatggaaactcctatcgatgctccgaataaggtgttgtattcacctgtctatccaatttcattatcattgtaactaataaaaatctggtatttttttctaaattctcgaggatattatttggttacaggacgaacatgaatgccctaggtggaagaaatcaactgtagtttttgtgttgggtaataataactccactctatgtaatcatatgcttgaaggttaatttttgtggtgttgagtggtttgattgattctataggtggtcctggaagtggaaaaggtactcagtgtgctaatgttgtgaagcactttagctatacccattttagtgctggtgatcttctcagagcagaaattaagtccggttctgaatttgggtaagtacatgcttcagtgagtctcatgtctctaactaattgttgtgtaaagtgaatcttgttctaatcttatgatatggttttttggtaatgaaaaccaaacacttggtgaagttttcagtttctttttctgtggaattgtttcagagccatgatccaaagtatgattgcagaggggagaatagtgccgtctgagatcacagtgaaacttttgtgtaaagctatggaggaaagtggtaatgataagttccttattgatggcttcctcgcaatgaagaaaatcgaaacgtattcgaaaatgttgtaagggtcatgttccttctcttgaacacattgtcaattgtcttctcgttgattcctattatagtctaaaatcaagttctacttgtctcgttaacctccttggtttaaactgtctggatcttgcaggctagaatcgagctgcttttgtctattctttgattgtcagaagagactagaaa

SEQ ID NO: 2414 - DNA, 648 bp, Arabidopsis thaliana
ctcatatagtacatagtacatagtgcttatgaatttttagatcttaagaatcaaggtaaggaaaaagttactatttggttgatattttttatgccggaatcttttcccacatgcattggaccgaatatattactcacacttttatcataagtaaaaccatattaaaaggacaaaaataattaaggagaaataaagtaaaaaagaacctgaaaattccaagagaggcttcgagaacgccggcgaaaaaagtggcggtgaaagcaaggtgaaggtaaagcttaggatctttctcagcatcaacttctttgctcagcatcgcacctgtcaacagagacgcaaccgcaaccgttcccaccgctaagtcccttgaactccctagcaccgcgtataccaatggcggtacaaaactcgaatctaaacgcaaaaaaacagttacaataagtacaaacgctacttcaaaaaatagtgtatatacacacacaaaaaacccgttaattgttaaggaaaataataaaaataaaagatgtataacgcttacaaaggccaagaattgggggcaagttagcaagtttggcgtaactgatgcttgagggatggcgagactagcgatggtgattcggcgatgagatctgatttgagacttgagat

SEQ ID NO: 2415 - DNA, 756 bp, Arabidopsis thaliana
tcgacttagcgatggagtcactctctttacacaaattgtatattcatgattttttttcctttttaaaaaaaataaaaacattacaaatcccctctctccatttgctgatcaatgaccattcgatggcctgaactcggtgtagccattaataccagacgtaaaacttggattcgaagcgtccaaaccaaagtaactgtgatggtaattagctgctgatgatgttccatcttccattccattgctcctcattgctggcaacgacaagtccatgttcgtcatttgccactgtctcggcatcattccgtctgtaccatatggtccacgtgccatgtaatgcaatccttcctctccgaaactcctggtcctgccaccagacaataactcaccatggtatgatgagtactgcccgttgaacacttgcggttgtggattgaatatgcttccgttatacaccatgttgctgcactgttcgtcttccagcagatcattgatgatgtctaggtgagggaactcatccgtcatcatgctttgtgcttgttgctgcgctatctgtacgtccatgtgggttcagcgatctgttgctagtaacggcgggtgagtaagtatcgttgtacatgcccatgtttacagaactggaacttcttcctgtccacaagagcccatcttgactgtaagggaagcttgtctgataagatgatgctgatgctctcgagtaagatgatgctggcaatgttgtcgggaaactccatgagagct

SEQ ID NO: 2416 - DNA, 887 bp, Arabidopsis thaliana
ccctgccgaggagagcttcacttagcggtgagattcacctgcgtagcggtctccagtatgctgatgaaatacacaaaacctctcctgcctaaaatgcattacatactacccttatccacaaaccaacaggaagctcttaagatgcaggctatcaacataattattgttcgtttaggccggtccgagccaccgctgagacgggaagtggttgactatttgacagattggaaaagtcagctgttcagcatgaggagaagcaaagccaacttcaataggttcacgacagtgttctccggtgcgctgtctgtttggaaatggatggaacaagtgtgcacatggaagactcccgtgacgacggctctggtgcacgtgctctacactatgcttgtgacgttcccggagatgattttgccgactgtgtttctgtatatggctgtgattgggatgtggaattacaggtttaagcctagatttcctcctcatatggacgccaaactatcttatgcagacaatgtaaattctgatgagcttgacgaagagtttgataccttcccgaccgtaagggctccggacattgtgaaaatgaggtaacaaaaatcaagaatgatcaaagaaaatcgaaaacgaagaaagacttggtcattggttgatagttttcctccctcatatttttcaggtacgaccggctgagatctgtggccgggaaggtacagtcggtggctggagacatagccgcacaaggagagcgagtgcaagcgttgctgagctggcgtgatccacgcgccaccgcaatattcgtgacgttctgtttcattattgccatggctctctacattaccccttttaaacttgtcgctctgttatccggttactacttcatgcgacat

SEQ ID NO: 2417 - DNA, 622 bp, Arabidopsis thaliana
gatattataaatttggacttaccaaatgtagcagatcggaaagtagtccagccgtcgatgaaactccggttacccgtgatcacggtggcatcgatgccgtcaccaaccatcataatgttccatttcttctttttaatctccacattctctacatacacacctctttttacatgtatgacatatcttttggtactatagtccggtgcagccaacaccgcgtcacttatcgtcgtgaaatttccggtcccgtctgcggctacaaccgcgtcacaaccgttatgttatcagtttgcaacaacttccgatcaccgggtttaacccatgaggggaacttactgaagccactatgagctttcgtcattgtctgggccttaatgggcttaggtttgggcttagagggaggagagtgaaccatcgttagtaaattccgaacggtcgtaccaaccttgctaagaccaccggccactatctttttgataattccattagtaccctcgaaaccgtcaagacatgtgtcctggttagaaagtgcggcgcttatccatgtccttagatccgaacccacgtctcctgtgctattgtctttacgtgacagtgacagtttaatgtattttgttagaca

SEQ ID NO: 2418 - DNA, 620 bp, Arabidopsis thaliana
tgagagccctttcctcgtaaacccaaccgcatacaatcctgtccttcctttccaaccattgttgtcagctactgtctttgggaaaccattctttgcaaagaactcattctcttgtagccaatatgggacgttgctgcggtaaccagtagctagaacaactgagtctacgtctagttgttctccattgacaagttcgactttgtttccgttaaaccttttgatccctggaaccacgttgatctttcctaaccggatcttctctatagctccgatgtcaagcaccggtgtcttgcctttcacgctttttagctccattggacccatctctggtcgtttcaaaccgtatttctcgatgtttccaagaaccatccaacttaaaaccaacaatatcttgtcgactaaccatagaggaaaccatcttaacatcttcattgcaagctcaaacgttgatttacccattacttccctcggcatcacgtgaagagagcttctcacgaccatggaaggcttagcgaaatggtttgctaggtcaagagaaacttccatgccggagtttcacaaccaacgacgagaacttttttcccggcgaatttctcgccggacttgtaatacaagcgtga

SEQ ID NO: 2419 - DNA, 644 bp, Arabidopsis thaliana
ccatccaaattctctggcctatgaaagcttccctaaggtagagatagtaaactgaacatataaacacaacacatggaaggtgttttgcggtactgattgttgtggtatttgtgcaggcaaacccggattacttaaagaacacaactattgttcttccagttcagataaacggcaagacaagaggcaccatagaggttgaagaaggatgctctgaagatgatgcttttgttctagcttcacaggacgacaaactcaggaaatatctagatggacaatcaatcaagaagcgaatctatgtgcctgggaagatcctcaacgttatcctagaccggactaatgtcaaggtcactacaaagtaggatttagaaagaagaaacaattacaaaacctgtcaaatgaacaaaattttatctctattgagagtttccattatatagaaaaagattcttttagaagcaaaagatctgttcttagataacatcagaagcaacagttccttctttccatcctccttgccgagctcgaagctcccacatgtaagaaagtcttctctgttcatctagagctgcttctgctttctctcttgctagctcacatgtttccatcccatactgcatttatcagcctctttctgatactgagac

SEQ ID NO: 2420 - DNA, 527 bp, Arabidopsis thaliana
atttgtatagaaagttgaaaacaacacttattttgaaaaaaataaaaactcttaaactacatttatatagaaacagagtatatatttaaacaactgaaaagtttttaattaattattgagttttaactcttaattactttaagatatatattttctaattttcgttgcatttttcagtttcatgtttgttttcagtttcaatagaaatcttgcaaaaccaaaatgaacacacaagtctcagtgtaacaacagctatgtgatgaataaacaacaatgaaaaatttattagaagtatcacaatccgttactcaaattacaaaccatgaccttaattattactattgtaactttatagagtctatttcttttgtttgagcatttatgatgctgaaaccacactccagagatcagatccaggcaggcttatttagagcagtgacgactgccttgatctgcaagtaattattgagactgtatatgcctttctctctcccattcccactcatcttgtaacaccaaatggtatg

SEQ ID NO: 2421 - DNA, 774 bp, Arabidopsis thaliana
agtctttagactttagtttaaaagaagagagtattagatttatcgagacagtaactcaaagtctgctcattaataagaaaatatcaaatgactgtgtctcactttactgggggtatgtctgttgaggtcttatgcatctcttatggctaagtgtgagtactgagtagtatgtttgcagtatgaaattgttgatagggtgattcacaatatgagaatagagatgtaactttgatagttaaagcataatattgcgagagtcgtctctatttcatattgcgtctttagactacattacaagatctaataagttgctgtataaagctgaccttttgcacgttaatttttcagattcttgtaactgggttctttcacgacagcttccaacatttgggaagatcaaacctcatctgcatatgtggagagttgcgtgtccccgccgaatttctccagatgggggtttatcgttgcttccttcctcctcaatctcctggggtggtgaacctttatcttagtgtcgatggaaacaaaccgatcagccaattgttcagcttcgaacaccgctcagttcagtttatcgaaaaagccatccctcaagacgaccagctatacaagtgggaagaatttgagttccaagtcagacttgctcatcttctgttcacttcttcgaacaaaatcagcgttttaactagtaaaatatcacctgaaaaccttcttgaggctaagaaactcgccagcaggacttcgcatctcttaaatagttgggcttatttaatg

SEQ ID NO: 2422 - DNA, 527 bp, Arabidopsis thaliana
gatataaagccaataatcagcacaaaagagttagattcatacattacacttcatgaaaaaaacaatttctggattggcatcatcttttacacaacaaaaggaaaagcttgttttgtctacgaacattcatccccaaaatatatgtagcaaattgtcatgaaacaaaaatctttgttcctaaagccatcattataactacataaagccaaactaaacaaaataaaccgaacacacatcagtctctagtggcacatcggttaattaccagcattaggcaaagcagccatgaacgagttataggatgactcaagatcaaagtgaagttgccgagcctgctgctcagtgagttcatctgaagctcccatctttgacagcctcaaaagccattccttcatcttaatcttcccctcgaaatctggtggcaatatacttagtttgttaagagaagccgagagatcagacaacaacggatacacctgatcaacagcaaccatgttgagtttcaaagaatccatggaagtgatgaa

SEQ ID NO: 2423 - DNA, 527 bp, Arabidopsis thaliana
gcaacaacagaataagactgaccctctgccagttccactacgacgctcaaaggcccttcgaggacgttccccatcaccaccctcattgctgaatccaccacgacgaccaccaccaggtccaccaccttcaccacggaaggaaccacgaggagcaccaccaccgccacgcctctcgtaagaagactttgaaacatctccttcacctgagggtttagtgtatccccctgaatatccattgttaccatcatcacggttgtaaccaccacgaccacggttaaatcctccacggcctccaccaccacgtggagcatcactccttgcctctctcactagtcaacagcatcaaaactaatcatacactaatctcaatcattcaaccgacaaaacacaactccatgaataatcaagagaatccaaacaataacacagacagcttactccagtaataaagatcgaatttttctgattaaatattgatttatgagaagaacctcaccggcttgagcaggaggaagtggcttcgatgg

SEQ ID NO: 2424 - DNA, 830 bp, Arabidopsis thaliana
ttctttactcattattcaggtaagaatggatcctaaaaatacagagattgatctagacagcttgatgtttgcaaagctaccagagcttagtgatgcagacaaggagaaacaagaggcagattatatttatcgatatagatacaatggtggaggagcatcccaagtttggcttgcatcaggcaggtaaactcatctttgtttttctattcttgctgcgggaaactatggacaaattactcaaagggttttcccttggtatctctttgttatcccctatgagtgatatgattgtgccatagatgtgatcaaacaaaaaaatttaaccaccttattatgaaagtattacatctatctaggtatcattaatatatgccattaaagtggaagtgagatatcattgtcccttttgttgattatatatagtccataaaaaaaagaaaaaagaaggagatagacactttttattacttcatttcactttggtaatcatatcttattgtagtaatcagctcttttgttcgaaaactaatattcaagatattgttggcgtaactatttctgttcttatctggtataacttttcctctaagctctcaacatgattgtatttctgatttatctccccttcttgatagatatgttgtcatagatttgtctgcggggccttgtacatatgggaagattgaaactgaagagggcagtgttagtcccagaacagtgccaaggatacgaaacattgtgcttccaggaaatgttagccctgttggtcatcagtctacccatgatatcttttctggtcagttagcagcgttggtagctactactaattg

SEQ ID NO: 2425 - DNA, 524 bp, Arabidopsis thaliana
atggttgcggaaaagagaagagattgtctctgacgaggcaaacaatctatgatcttttcaacatctctcttgaatcctaagtctagcaatagatcagcctcgtcaactataaacaatttaagggccatcaaacgcgatgttaagccagacttattctctaaatgatccaagagtcttcccggagttgctattagtatctgcaacaaggtacggaaacaaaagaagattcaccacaacaactagaaaatataaacaattcctgttaaacagggaatcacggttggtcaaacctggcatggctcagattctaggcgttgttgatcaagtctgaagcgcgtaccaccaattagagtctgaacaccgatcccgtcatggtttttgagcagagccttgccctctgcagcgatctggcttgcaagttctcttgtaggacagaggataagaacaaaaatcggagcaactttgtgaacgcccttaccgctgttcatagctttcagaactgtttcaattgcaggaagctgttt

SEQ ID NO: 2426 - DNA, 1137 bp, Arabidopsis thaliana
ctgtggataatgtaatggaggagaagcaagagcctcatgactcgatttacagtgcaaaaaggtattttaaactggctgtgtaaaggaatttgatttgtcaagtttaaatcttgatgaactctgttaatggttgcagatttgatgagtcttgtatatctcctttgacgctaaaggcactttctgcgtctggcattcttaagatgactagagtacaggatgccactctctctgagtgcctagacggtatgtattcttctagttcttttctgattactctgctggttttagtttcttcttttggctcaaatggttagcatttgacaacgtattatcttttatataaagcaggtaaagatgcattagtcaaagccaaaactgggacgggaaagagcatggcgtttttggtattttacaatcccttatcctgagattatgccttagcttttgttgtttcttaagataacgttgtaagattgaaaaaaagcttcctgcaattgaaacagttctgaaagctatgaacagcggtaagggcgttaacaaagttgctccgatttttgctcttatcctctgtcccacaagagaacttgcaagccagatcgctgcagagggcaaggctctactcaaattccatgacgggattggtgttcagactctaattggtggtacacgcttcaaacttgatcaacaacgcctagaatctgagccatgtcaggtttgaccaatcgtgattctctgttttacaggaattgtttatatttctagttggtgtggtcaatctccttttctttccgtaccttgttgcagatactaatagcaactccgggaagactcttggatcatatagagaataagtctggcttaacatcgcgtttgatggcgcttaaattgtttatagttgacgaggctgaccttttgctagacttaggattcaggagagatgtcgaaaaaatcatagattgtttgcctcgtcagagacaatctcttctcttttctgcaaccattccgaaagaggtacaattgctatataattaacttcatatattcttacctttagcacaaaatccaatgcggacacacacggctaaaatttagattaaattcaggtccgtcgagtctcacagcttgttttgaaaaggg

SEQ ID NO: 2427 - DNA, 594 bp, Arabidopsis thaliana
agagagttctgaaagagtaaaagatgcagagaatgttagtcaaaagagccggggaaataggagaggaagccaatccacgaggcaaaagttacttgcggatgttgatcggaaatgcaagttggtggattttgggaatgcttgttggacttataaacagtttacgagtgatattcagacaagacagtaccggtgtcctgaggttgttcttggctcaaaatactcaacctcagcggatatgtggtcatttgcttgcatttgttttgagcttgccaccggagatgttctattcgatcctcacagtggtgaaaactttgagcgagatgaggtatatatctcttatgtgatttctcatactttgtgaaaaaataaaatcgtttcatgtcgtttgtactcaattgtaacactaatggactttggtttcaggatcacttggcattgatgatggagcttctcgggatgatgccacgaaaggtaaatccaaaaacacagtgttctcttatttatcaatatcaagaatagagctttttaaagggattttgttaaatgtagattgcattaggtggacccattcgcgggattcttcaccgacaggtg

SEQ ID NO: 2428 - DNA, 622 bp, Arabidopsis thaliana
gcaatctacggttgaaaacaaatgaagctcatcaatacaaaattaggctctactattttctgagtttcaaccatcaagatttgcagtcatatgcaaccaaaacaactaagatccaactttagaaaggattcgatactagagatatatcatgcaatcttatatggtcacaacacaacgactatgtttatcagctttacctttcgtggcatcatccctagaagctccatcatcaatgccaggtgatcctgaaacaaaggcaaccagttcaagactgcacataatagtgatacaacttagctcttcataccaaactggcaaagaaagtgaatatatatgaacatacctcatcccggtcataattttcaccactgtgaggatcgaacaagacatctccggtggccagctcgaaacaaatacaagcaaaggaccacatatctgcagaagttgagtattttgagccaagaacaacctctggacatcgatactgtcttgtctgaatatcgcttgtgaactgtttatatgtccaacaagcattcccaaaatctactaatttgcatttgcactctatatcactcagtaatttctgccttgtggatcggcttcctctcctactcacccgacc

SEQ ID NO: 2429 - DNA, 789 bp, Arabidopsis thaliana
aagctaactttctgtccagcttttgaagcagcacatgctaatgctcgagcaatcagtgttttaccagtgcctggaggaccacacagcagtacacctctgggaggagtaatgctgtaacttgcaaagaactctggatacagcaacggaaagaaaaccatttccttcaaatcattaatgtattcggacagcccaccaatgtcatcaaaatttatatcctcattaatctgcagtggctggatatctgcacctcctttagagcttgggccagcagtctgaacaccagaagttaatgcagccaaaccatcactctggtgaccccaaccagaagctccaacgttcaaccccaatgaacttgacccatacgtgtccaaacccccaaatagccaaggtgctccagatctgtttccacctcgagcccagggaattgcagggccctggtccaactcgtccacaagaagagaatcatctgaatcatctgttcttgtaaagcgatggcgcttgtgaggccgagacccacctctcctaccatctcttccaaccctggtgcccatgccctgatgcaatactctccgaggagatctaggttgttgttgcttgttgatttctcccgtaggcattctccggacttcagcacggtttcgcagatcatatctctaacttccatcttgttcttcatcaccctcttcatcatcatcaccatcttcttctccctcatcttcgccatcgccttcatcttctccattaccctcgtcttcagcctcaacctcattttcaccatcatccgcatca

SEQ ID NO: 2430 - DNA, 863 bp, Arabidopsis thaliana
gcaacactcggtgaagtttactacaggatttgggaaaaaaccaaaagtcatggattccccgccggagtttgtcccacggttggagccggagtcacattagcggtggtggctacggaaacatgatccgaaaatacggactctccgttgattacgtcaccgacgccaaaatcgttgatgttaatggacaggttcttgatcggaaaggaatgggagaagacatgttttgggccattaacggtggaggcggtgctagcttcggtgttatcctagctttcaagatcaaactcgtccctgttccaccgaccgtaaccgttttcagagtagagaaaaacttagtcgaaaatgctactgaaatggttcataaatggcaatttgttgcacccaagaccgatccaggtctattcatgaggctattgttgcagccggtgactaggaataaaatgcaaacggttcgagcatcggttgtggctctcttcttgggggccaaaacactgttatgtctatgctaaccaaagaattcccggagcttggtttgaagaaggagaactgcacggagatgacttggatacagtcggtgatgtggtgggcaaacaacgataacgtacgcagattaaaccggagattctactggaccgaaaccctgatatggcgactttcgggaaaaggaaatctgatttcgttgagaaagagatcactaaagatgttttagatttcttgttcaagaaaatgattgaagttgggaagatagggttagtgtttaatccttacggagggataatgagtacggtggctacaacgaagacaccattcccacataggaagaagctttacaaaatccagcattcgatgaactggaaagatcc

SEQ ID NO: 2431 - DNA, 682 bp, Arabidopsis thaliana
cgatggtaaatagttaggaaactcccttaattatttcaacttgtaatttttcttttcttttcgtttcggtttgaggatgttagatatagaaaacgagtgtagagtaaaaatacattgttcttaaactgtctcaatgttatatagtctgatttcttctcatagtagatactacttttgcatacaaactcatttttaagtctttcagaagaacactaaggtgttgatagcttcttcggattgaccagccaatattaacctcaaagatagcaaaaatctcataaagcaaccactgaatgcaattgaaattttttgaaactataagaccaaaaccaagaattagaactccaaattagtcattcatatccaattgagaagaatggaccaacttttcaacaaacctaacatatttaatgactaaaattaggtacgaagccgttttgttatccaatccttaatctctctaagcatcagaacttgacaacttattaacaccgtctggctctctactcttacaaagctcttccagaagcgaatccaaactcttccaagacgaaccagtcccttgagccatagcttttttcgccattttcgcatactcttttacattcttcatcgttgtcttcccatctctccctccatcaattgtttacctaaatagtacaataataaatacaacaagggg

SEQ ID NO: 2432 - DNA, 513 bp, Arabidopsis thaliana
cattatacattatgttcaggctcaacaaggtaaccacattttattgcattgttgcacacgtcttttgtctgtttactgattaacctaaagcaatatttcgtggatgaaagtcaatcattcataactatatttcctctcaccaggattcatcagtttggattgcgggttgccgagtaacgagcctccatatattgaaccggtaaccggattagtattctcatcggatgcggatcacatccctagtggaataagcggtagaatccagaagaatctggaagcagtacacataaagccgtatttgtttctgagatactttccagatgggctacgaaattgctatactctagatgtccttcagaaccgaagatacatgatcaaagctgtgtttgtgtatggaaattacgatggttataatgattatacgagttttgatctgtatctaggtcctaataagtgggtaagagttgacttggaaggaaaggtcaatggcagtgttgaagagattattcacat

SEQ ID NO: 2433 - DNA, 567 bp, Arabidopsis thaliana columbia
tgtcttggatcatctcagccatctggtcctaacggatctgtgtaggtggcaacgaatcagaaccgttgataaattggagcctgatgagcggtggtgggtctctgggtggatgaagatgagggaatggtctgagatcgtagctggtcccaaatggaaaacttttatccgtcgctttggacgtaatcactgctgcaacggtggcattgacggtggttgtaatcggccggagcatgttagtttccggtacgattcgtggagttactcgttgaatttcgacgacgggaaacagacgggtcatttcgaagatgagtttccttaccgtgattactcgatgaggttcgctgcgccgtctctgccggtttctactaaatgctccattgatttcgacaatgataaccacgcgccgtcgctgtttaagtgaaaaatgtcacgcgcttctctgttccggtactgctctgttctaaatgggctggcgctaacgtgcaccgcacatgatgaaaggggagatacattagaagaaacagtggatttttttctttgcaaagaaatattagttttttacacagc

SEQ ID NO: 2434 - DNA, 567 bp, Arabidopsis thaliana
tcctccttctgttcagtaccctggtgcaccaaggccattaggtgttccaatgatgcagcccatgtatcaacaacaccagctctctatgtctgggccacatggacatccttcaatgatgatgagtcgaccaccacaaatgcaacctgttatgcgtgtgccgcctccaccgggatctcagttttctcatatgcaagttcctcaaccttatggtcagcttccaccgctttcgatggggatgatgcaaccaccacctatggctgagatgcctcctcctccaccacccggggaggcaccaccgcctcttcctgaggagccagagccaaaaagacagaagctcgatgagtcagcccttgttccagaagaccagtttcttgctcagcatccggtaatattttcttcgactcttgattcattttcttatcttttatctttcttctttcgtttgagttgtatcttacctgttttacacattttcagggtccggctacaatcagggtttctaagccaaacgagaatgatggacaagtcatggagatcacagtgcagtcgttatccgaaaacgtggga

SEQ ID NO: 2435 - DNA, 1221 bp, Arabidopsis thaliana
atgaacgttagttagattccctctaaattcgactttctgaagaagtcagatccttatcacgcatattacaagcacaaggttagtgaataccttgctaagaatcaagatgaaggagctcaggaacctgaagctccagctacccttaaaggtgatgcacaacactatcgccggccttttcttttaagcgatccggctcccaagttcccagattatgttctccctgaaggatatactatagaggatgttgatactatttttctcacagcgcagattgtgggtcggtacggggaggaattttggttggatttgatcaaggaagtggataacaaacctcagtttgagtttttgaagccagctgacagcaagttcgattatttcaatcggctttctgttgtggcttcggaaggactaaagcgatccgaaaagctgactagttctcgtatggcgattgttagtaaggcttttttctaccatcttcgtcgtcaaaatgaaaagcgggagttgacccacaaggagggagcggcaaaggcttgtactctgtttggtgctttgtatgcttttgtgggtcctgatggctgctttgctgacatcaaggacgaagatttgccactacttcaacacccttcagcgatcaagaacatactaacaaagctgcagcctcgtatgcctccgcttgggggggaatctgaggaaccagagtttgacgagtctgtccttgttccagaagaccagtttcttgctcaacatccggttattttttcccctctgacttgactctgtactctgtatctaattaggagtaacatacatttgcagggtcctcaacgatcatggtttctgttccagaccccgatgattggaaagtcgttaagatcacagtgcagtcgctatcggaaaacgtggcaagtttgaaggagaaaatatctggcgagatccaatttcctacaaacaaacagaagttacgtggaaaagccggattcttaaaggacaacacgtcgcttgcacattacaacgtgggagcaggtgaaatcttaacactgtcttggtggtgagaacgcagggaaaagcttttcaatcagagttacattgaacaaggacgtgttattagatattctaaatactcttactctcgcttaagatttacgtgtttgagggatactctagagtttttggtaccaaaccttatttgtttccttgagatggtaaaacaaagttttactt

SEQ ID NO: 2436 - DNA, 1151 bp, Arabidopsis thaliana
cagctgttttattaatttgctttctcttttataatgtagattgtggttgttggtgatacttgtgatgtgtctttaatcaagtaatttgctttatgcagggttctaatcaggccccatcctgcaatctggcgcttagttcatggaatggccgtcatttactttgttgcacttacttttttgctctttcaggttcacttttttttcctccctagatccttcttacttgcctatgcctgtgatttatatatggattcttgttttaagtgagcaaactctaatagttacattattcatgctcccagagacgtgatgatgcacggcagttcatgaagtttctccaccctgaccttggaataggtaagagtttcggagaggaatgctgtttattcgaggagctaccacatcaatgattgaccatcttattgagtttgctcatgttgcagaacttcctgagaaatcatacggtgctgattgccgtatatatgtgcctgatcacccaacaaacaggtttaagaatctttatgtagggtatcttctcaacaactcccctttaccttaaccaaccttcatatcacctaaaggcttatgctttgattaaaatttatcaggacacagtatttgatgagtttttcttggctcacatctttggttggtgggggaaagcaattctgatccggaaccagccgcttctttgggtgctttcaattggttttgagttattggaggttggtctttgtcttcgttttcttatattacaggttccaatttgatatatacaaaaatatcgcttcgcctgtgtcaccgaaaagttatatttatgttctccaggttacttttcggcatatgttaccaaatttcaacgagtgctggtgggacagtattgttcttgatatcttgatatgcaactggtttggtatgattcttaagctaccttgctattctatatgtagtgcttttaaacatgttatggataacagcttttcttgttttaatcatggtaggtatctgggcaggaatgtatacagttcgatattttgatgtttatacatatgagtgggttggcattagccgccagcctaacattattggcaaagtaggtttgttcaaccttgagagtgcatacacatggtcctagccgttgtacatccaat

SEQ ID NO: 2437 - DNA, 737 bp, Arabidopsis thaliana
tctatcatggtttctgttttttaattgaatacatttatctttaaaaaaagtttaggtttggttggttcgaaattagtttcagtttaccaaatctctaacaactcagccatttttaccaaattgtgacttatttgtctactggatcagttttattggtagctctatatacctgaacttcaagatcgattggactggaccgaaaatctcgtcttgagcgataagcatgtcatcctgtagttgaaccaagcgttcgagattaatgccatggagaatcggtaatagaagaacattaaagatgtcttagaagagttttctttttaccttaacattagagaagacagtaggttggatgaagtaacctttgtctccaatctgatcaccaccacattcaagagtagcattgctttcgatacctgactttatgtacttcatcactttctcaaattgcttcaaatcgatctatacaaagtttttgtgaaaacggaaatcacaaaaccaatcaacaaagtagaaaagctaaactcttcttaatggaaggaaggaatgtgtatgtgttacctgaggaccctgttcaatgcctttcctgaaaggatcaccaacaacacgtttcaatgcgcgtgcctttgatttccaacaaactcatcatacactttctcatgaacaaatgtccgagacccgcgcagaacattgccctacaaaaacattctcaacattactcaagactagctaggaaatga

SEQ ID NO: 2438 - DNA, 1443 bp, Arabidopsis thaliana columbia
tggaagttttgagttcgaataaggagttgttcctcgagtttttgcaggagtcgaataacttcttctctcatcatctccacagtttccagtccacagatccaccaacctcagagaagtctaagcggatcactattttgaagccttcaaagaccgttgctgatgaaaagtttggaaatgaaccagccattgaatcttcgagagacggaagtaagagtggcaagggtcttgattttttcaaatggccggttgaagaagaatatccgacaaagcaatcaactcgaatagttgttctgaaacctaacggtcaagtcacaaaggcttcatcatgtccaacctctccaagaggttttgaggggagagagtcaagagatgtggctaggagagtgaagagccagatacttaaggaagaaactttacaatcttctgtcttttccaacggctatatatgcgatgatagttctcttaacgactacgcagattctgaaatcatgtcaccggtttctaggcattcatgggattatataaacaagtatgatagccctttttcttcttcgccttttagcagagcctcgggttctccagagtcatcatctgtctgcagagaggccaagaaacggctttctgaaagatgggcattgatggcagcagccaatgagaatttgcaggaggccaaagttattgaaaagaaaggctctaatatttccttaggtgatatgcttgcacttccagatttaagagaagatcttataactgaagaagaagaaacaagcaatggtaatgaacaggagggtcctaaagtatctgcatcttgctttgatggtaatttcagtagagaagaaggaaagttaaagcctcctaaaggccttacacgatcaaaatctctccctgaatcatcgacaagtcttggtcacaaatccctagatagttccaacaagagtaaatcatccagagttccagaggagctgacaaagtcaaagagcttgaaatggtctctgaaaggtaaagtctcaaactttcttttctcaaggagcaagaaagccagtaaggagagatcttatgaggaatcaccctgaaatctaggatgtctcgatgtaacaatgaatatgatgcatcagtgtctgccagaatcatgacttctcgggaggtagtatactcatataaacacacatttactgatttcactccattcctctgttgcattcttttatttacaaacaagtattcttttttatgtgtctcaacagggaggcttatcaattacaaagccgaccattttcggaaactctagcgagtggcgcgatgagcctagtcccatttcagtcctggaaacttcttttgatgaggaggatggaatcttttttaattcctctatcttgaatagatcatcatcttctcttggtaagctttctttttaaagcttcacactttgttatttatcccatt

SEQ ID NO: 2439 - DNA, 779 bp, Arabidopsis thaliana
tattttcttattttattttcttttttgacggctgaatgatttgtttttctgtccgaagacgaatctacggaaacgacgacgtttccagtggctgacatggtaggataaaaaattcggttcaatattttttagcaggtgagcgcttcgtatttaaccgggattggatggttgaaaccagccctggttagtagattcccaaccgcagcgagatctctacagaatactccttggtacgcattggaatttaccggtttcgtttcagcgtttccggttctcttaatagaaccggatttttcaaccggtttgcgttcttcaatcttttgagcgtgacgaatggcgttcttcctctgctcctcggctatgatcgctgtcacggcggtgtatcctttctgaatcaaacggtaaagcaacagagacgacattttggctcgatctctaaccgaatcgacgtcgttttgatcggtgaactcgcaccgttcgatgaaagaagaggctctatcgggtttgtatctgagacatagcaatagatgagctcgatcgagctccgatctggtgcatccgcgtctgactccgatcaagccgtaataatcgacattcccagtttctccgtttgcgattttctgcttaagtttctgcgttttcgttgtcaaaacgcacaatttcccaggaatctctctgtatttcacgttgtgccgcttccacaccggacccggaagcttccgatcgcgtaaaatggtgttgtagagaagcttcaagtgttctagatcgtgaagcgaatc

SEQ ID NO: 2440 - DNA, 432 bp, Arabidopsis thaliana columbia
tgtgcaacatttgaagtttattttagatgacacatacaacaattataccttaaaaataacatttgaattagctaactgagtgcacaaaaaaaaaaacttatcatctaactgaactcatagccaatttgtatgttaggtaccattctcagactcctaatgaaagcaggagaaaaagattggtggttgtctcattgccaagccaaactattacaaagctcatggttggcatctttgtatgatacacttgaacacacaacaaaccaatctatattatcatctttgtatgataacctagggtttctggatggttctagcctaggattttgatctagtcaaaattagcttaagtattcggtcgattctagctttgcatggtggtctcttagacactttgatgattactacgcaaaaatcccatcttggactttttgt

SEQ ID NO: 2441 - DNA, 576 bp, Arabidopsis thaliana columbia
tgaagttttccgtagaagcagcttcttattagctttggaatcgttggcattttgcaccacaacatccttttccttgttcattatcaaacacggtgtttgttcctccctgagaatttccacacaactagcattcgggtaattgccgaaaagattctgagtttcactggagggattggaaacacttgatgatccgccgccctcaacgctgagattcacaccgctactcatagattcctctgctcggggaatgatcctgaactgcagcctttgttcagggaatggttcaaagaaggtggtacaacgcgacatgatcaaatgcaccatgctttcatcaaacggtctctgatacagaccaacattttatgaagtaaccaccaaaaccaatgacagactttctatgcgaaatgctaacatgtttttaccatatcgaaagcgaacagctcaacgagaccatcactcacaggaacaagaacacgagtgctgaacatttcctgccaaaacacatggagatcagattgttcttatgatcaaacgagtaaaaaaggctgacgaaaagagtcttttttacgattttag

SEQ ID NO: 2442 - DNA, 1443 bp, Arabidopsis thaliana
agaggacggatcaatgctttgaatcgtaaggccatcgagcattcattggggaaataggctctccgcctcagggtgacgaggcttgctgcagaagagaatgttgctccacattctttggagaagacattagatttgtcttgataggagaaagcatgctctgcttattattctgcagctgattaagaagcgcggacttgtgggaaggcgatagaacagatgaaacagcaagttgatcagagaaacgaggagatgcaacctcagctgagaagagttcctccagatttgaagggttcagtgtcttaggacgagcggaatgattcataaagcgtggactgtgcatatcgccagcaagctgacgttgcatttcaaactcatgcagcatgctaagctgctcagaaggaatatctctagcgttaagagaagatctcagacgactcaactggatattgcttccaggaagattcaacgccggtatgttctgctgaggccaacccatcgatgaatggggcatactaccatttccagaaggagatattggtggggtgaacgaatgttgagcagcagatggtgagcctggtaacatgttcaaaactgacgccatgtccatagtagaggcggaaacagcagacgaagcccgaggagatggcaatccagatcctgtggaagggtacaagggacgcaactcctcatttgcgtgacgaagaagcaaacccttcggttgcaacccattccgtccttgcacaatcgtgttctgtactgagcagggtgtagccagcattcaaaaaccccatgagcatattcacacatatcaccttgcttacaggatcctttcttaaaatccgggcatggaacacacgtatagtgaaacttcctcgggtctcttctccttgcattctcacctgggtgtgcaaatggacattcagtccagtcatgggaatatgctcgagaacatgggcggatcttgaacgagaacatacgaaactcatcggttgaataaatcccgcttttgatatcaggcaatgatggatcaattgggtactctttcttctctgatgcgaaagttacatcagtaccgtgtggcttagtcggagaggatactgaatctaaggagagtaacgaggaaccattatcaggggatgatgagagagaccggaaacttgatcccaagctagatgacgaggcatgcagatcttcagatataatctcgtctttcttcaagatctcttcaaggatggttctcaaaccaggagcgtgtggagacacaacaagaacatcaacaggacgatttccatgagcatcagggatattaggatctgctcctacactcaaaagcaacttgacaacatccaaggaattcacagaagcaccagaagcagcgcaatgaagagcagtacttttatcaggaccacaagacagattcaactccgcttccgggaaagaaag

SEQ ID NO: 2443 - DNA, 730 bp, Arabidopsis thaliana
ctcattggtgtatctcttgcctctgcttttcatgaaagcgagatccaaatgccttggtcggactccttctagcatcattcatggcccttacattcactgtaccagtcagcattatcacagctactactaatcaggtaccacatataacttccactacagattcctcaaaataacatgatttggatattttctcactttgaaaatgttgtgatgcagactccaggtctgaacattatcacagaatatctcatgggtgtgttgttaccggggagaccaatagctaacgtctgcttcaaaacttatgggtacataagcatgtcacaagctatatcattccttaacgacttcaagctaggccattacatgaagataccaccaagatcgatgttcttagtccagttcataggaacggtgatagcaggaacagtgaatatatcagtggcatggtacttgctgacatcagtagaaaacatctgccagaaggagttgcttcctccaaacagtccatggacatgtccaagtgacagagttttcttcgacgcatcagtgatttggggattagtaggacccaagagaatctttggtcggctaggaaactacgctgcactaaactgattcttcttaggtggactaataggacctggcctcgtgtggcttcgccaaaaagccgttcccaacgaaaacatggatctcgcagatcaatctcccagttcttttaggagcaacagca

SEQ ID NO: 2444 - DNA, 1051 bp, Arabidopsis thaliana
gtttttggtaagttgccctaaagggcaaagacctctaaatacaactcgaaatagacaaaacgctgagtttaataaaagatacagagatgctgtcagactctagatgatcgagagtctttctatggactggctgaaaatcaaagtctatcagaagcttggcaaaaattcctgaaaaattagcttcatatgattatattggcaataatccggcaacatgcgggttattctgatcgcttctagtgcacattgcggatggtattgctatgcgctgtatcgtcctgaacgtagctggagcttaaagatccaccaacgattagattacaagtaccaaacacaagaaattggtcaatgatgattacctgacgattaacagtatcaagataaggacaatcacgacgaacttcaacatggcgtgaatgctttcctctccccttggaagcatcatcatcatcatcttcgtcgtcatcgacctctacttgagcttctcctttcactttgttaccatttccctctcctttcgcaactacattacaacgagtttgcgatttattctgctggttattatcatcatcgtaagcattagcaaacggcaaaagaggattgttgaaacctagtggtggaggtggcgaatcagaccgttccatcactctcttcctcttcacctctctctcttcctcagaaacaccattcttcacttctctttcacctttcattctcaaaattttccctaagctaaagcttgcttcaaaaaccttagaacacaaaatcccagcgattcacgaagaatcctcaaccaaagaagcaatgaactcttccaaaaaacgccaaatacttcaaatcagaagcgtcgacagtcgcgaatctactcgaacttatctctcgttcccaattttctcgagaaacttcaaaatccgccacaacgcagacgttaaacaaacaacctattaaagcttcaagagccgactcaagtctcacccagattgattaactcggttaaaaggccgaatatttattattgggcacactgttatagccaataacaatctgttca

SEQ ID NO: 2445 - DNA, 487 bp, Arabidopsis thaliana
gtctgcatcgacgacaacgaatccgtgccaatccctgcgtgatcagggacaagatcaggatcatcgccgtgaccagcaacaaaatcaggaccatcggcgtgacaatcgactagatcaggtccgttatgaacctcaacaacaacattacggtaacctgactcgcttgggaaagattgatttgcctcgttttgatggtactgggattaaggagtggttgttcaaggtggaagagttttttggaattgattttacacctgcagatctgaaggtgaagatggttgctattcattttgatagtcatgctgcaacatggcatcattcttttatgcagtcaggtgtgggtttggaggtgctatatgactggcctggttatgtgaggctgttgaagtagaggtttgatgatgaatgtcatgatccaatggctgaattgaagaagctgcaggagacagatgggatagttgattacattagaggtttgaacagatta

SEQ ID NO: 2446 - DNA, 1902 bp, Arabidopsis thaliana
ctacagcaaatgcagtcgtcgaagaattactcaaggacagagatgggttgttgctagagctgagagaaaacttggagctagctcagaaacaaatgaagaaagtcgcggacaaacacaggagagatgttgagttcaaggagggcgatttggtctacttaaaactgaggccgtatcgacaagggtcgttggtacacagaaaaaacgagaagctctcgcagcgatactatggaccctaccaggtgattagcaagattggtaaggtcgcatacaaactcaggctaccggattacagtcaaattcatccggtgttccatgtgtcccagctgaaaccagcggttcctccctctttcactgctcaagaactgcccaagattgtgactccttctttagagtgggcgacggagccagaaaagcttctggatatcagacagagtagaacaacagacggtgccgacgtcttggttcaatggagtggcatgtcagctttggaggcaacgtgggagccattagtgactctagtgaagcaattcccgagcttcgatcttgaggacaagatcggtcttctgcgagggagcattgataggctaagggttccactagctactatgagaaagagaatgagaactggcgggagaaaagctaaagctatggagaagtatttgaaaaaggtcttgaagaaaagtggctaagagacgaaggaaagaagaaggcatagaaagactcttgttcatctagagtctttcaccatctctctatcttttattaaactcagcattttgtctatttcgagttgtatttaaaggtctttgcctctttagggcaaccttaccaaaaacaatcatcaaaacttataacattaaagttattaattctcttctcatcttgttctccgtcaaaaacggcgcaatagaattagtttactctgtttttactcttgttcttagtatccgttgagtccatatctatcattggtgctttcattttgatgagtgcgatggctctccggtaaaccaagccgccgcaaacgattctctaccagagtcggccgaactcagtgacgcgatacgtccgccgttgccagaacctccttcggtgacttccttggcgacgcgaatgacagctgctgagaaagagatgctctatctgcgtgacgcagtcacccagatcctccgaaaccagatcttcggcgttcctcgtgaaggccacaacactccgatgggtttttcatcccctgttccgggagtacagtttcctgcttctcaaactccaagtcacgacattcaaaaccgcgactttatgtgtgtgggtcaaaacccagagacacacctccggctgcgcgaaactcgttttcgtcctccacccttagaccaaccgcgatttcaggcttctccttcggagcctctccgctttcaggcgtcttcttcggaaccaccggccttctcaacacccccgtttcaacatcaaccaggcttgcagaccggactacagttccagtaacctgttcccttccagacacctccgttacaacagcagtgtccttcaccacgtcttcgaacagagacaccacaaaggacggtggagttgcctgcttatgagggtggtaacgcagaagattggctctttcgtttggagcagtgtttcctttccaatcagaccctagaggaggacaagttagaaaaggccatatcttgtttgacaggagcagcagtgacttggtggagatgctcaaaggagcgagaacagatctatacttggagagattttcaggagaaattcagagtgcgtttcagaccaagtagaggcagttcggctattgatcacctattgaacataaggcagacagggagtgtcgatgagtatcgtgaaagatttgaagagcttgtggtagacttacctcatgtg

SEQ ID NO: 2447 - DNA, 1298 bp, Arabidopsis thaliana
tctaaatccttgctgctgtcacctgtttgtcttcatctccactattttacggtaggatccgcccattgtggcaggtagaggtattaactattacagtgttacgtataagatgacaaccaaagtcttcgtatacactaaatcccaagatgattttcaggatgctgattgtctttctttatcttttgggtcagcttcatatagataaagttctacattctgttgactgtgtagacatatgctgagcaagaaatcatttgcaaagaagaaatgtctcactgttttatgcaaagacatacatacataagcagatcagtattatgaattcagatgtacataaaccaacatcaccacgataatcaaacaagtttacaacatgaaaatgcacatataatctcacgttccatcaacatgaagagacttaggagagttgaagtactccacattcttttacatcccattctttacagtagactgtgagctcaaagcaaagctcgttggaagtcacatctacttctaaattaaaggtatacaaatgcccgacaaatgttactgcgcgaggtagagagagatatcccggtgggcatggaacaatgacgccattctgtttgtccatgatcttatattgcagatacatactgtacgtaccaccacatggcggattgtcaacattatcaaccaacataacgcaagccttgaatctcaaaggtttatgaggaggcctctcattcagcttcactgttacaatacttccagtagctcggtcactaaagtaggcaggcacttctccaccgggtacgactgaaactggacgattcgatgcctggatgatgagatctctcgcttcttgatttagtttgaagcagttatagaagttgagagacatatctggattgcaaaaagagcaatctagtttctcaagggattcacaattttcggcatctaggaacaaaagggaatccggaagttgtgggagtgataccagcttctgcgatccgtttagtacaagtcgacgtagacgagagaatcccttgatccatggaccgagctcttgtatttctgtatcggtcaagtgcaaatctgtgatactgtcaagagcatgtggcgagttcttgaggttttcgcaatatgacatatgcaattcttcaagacgagaccatgacctaatccccaaggggacttcttctactgcagtcctggtgaggtggagaagtttgatgtttgtggaaatctcaggaaaagttttcaagagcgagcaattttggagataaagttcctcaagagactctaggttgatgttg

SEQ ID NO: 2448 - DNA, 935 bp, Arabidopsis thaliana columbia
cgtcctgaatcggtgaatctttttcaatcaagtccgcgtcctgaaccctaagcctggttccttgttgacccaccacagttgctgcaatcgttgcagccatatctcccattcctttcaagtcagagacacccctcaagataccgtataagatccctgaagcatatgcatctccagcaccacatgtatcaactggcacgcatggggacggaggaatgtagatggcctctccttttactccaatatatgacccgttgattccatcggtaacagaaacaaacggaacaaagtggctcatgtatcttgtcgctgaaattggactttcctctgcggaaaagtgacaaaacgctcttgcttcatcgctatttgcaaatacaatatccgcatagttccccacaatgtccctgaatcaacagaaaaccatcagcatttatctaggttcaagtttcgttttttcgagagacattcacagcttgaagcatcaaagcttctatgacttatcaagctacagaagataatcactctcttcgtattatttccaactgttcctatccgatggaactgacccaaaatcaaatagacgcaagaatgtattcaagtaaagggagaagaaactgaccagaaatcatcataatgcctctctatgcaggacacatctgatgctgtcacagcaacaagtgccccgtttctgtgggcttcttcgcaggcttttgttatggttcttatagtatcaggaagctcaaacaaatagccttccacaacaaagacatttgtcttggctatcaaactagccaaacaagaatcataattaacgacagaggatgttccctgaaattatacataacattaggtttgttatttagtgggatcaataaaactgaaaaacttatcagagttacaatgctactactatctcaatgtggttgctttatggaagc

SEQ ID NO: 2449 - DNA, 541 bp, Arabidopsis thaliana
tgttgttcctcgtggaacattcagcaccattggaccctacagattggatatatgtgatacacttagaagattgcccaccctctgactgaagcatctcatcctcttggctcttctccttaccacaaaccgccaacaaatccacacttccaccatcaaccaagtaaggtagagctttaagcgatagaacaaagttatatgaggctcactctcccttaccctacggaagttccttacaaccatgttggtagcaacagtgacaggcggcctagtgttgacaagaaaacagagagttggccgggtagccagtaactaattttgggtttccagttctctgcatcaagttcaaactctgaactaacatggttgtgaaactctacatatgtcatcttcgggttcatacacatggtcatggcataacaatcctttgcaaccacaaattcccaaacgcctttgtctgaatattccacgaaccagctataacatagacatttacgtcttccctctgtcacagtaacatataattttgttacattgcaaatga

SEQ ID NO: 2450 - DNA, 877 bp, Arabidopsis thaliana
taaatcgctaaagttgtttgcatatggtttttgtctttgacatccgccctatgtagataacatcttcttcagaagacgctggacataaccatctacaaatgtagatgtcatcaaatacgggctcagcatcagacaaacctaaaagactatcattgtcttcagttgtgtaacctccacatctgttgttcctacatgatctctctagtaattcggaacagatttgttgatgtcttcttttgcagtagagggtccaacaatttcagcctcttgtggttgagctatagaagaaggatggctactcccaagtggaatatcttcgccatcaggtggctccaaccctcatactcccaatcatcatcatcatcatctggagtagattcactaaacccaatagtgtaagaagtattgtcagcctcatcaccactatcaaatagtttacgcttcccattgatcttctgctttgctagttccactctctccaattcttctacctctattagcatcctcatatcctcagataaaggctcatcttcctcatctgcatttgaaatctcatcatagtgtgacaattatggtgtgactgcattagcaagatttattataccactaacattggtgcccagaaactgttcaccaacgttctcattcatctctagtactacacagtcaatgtcatcttcaacttcacactcttctacaactgttggccaaccaacctctattatacctgagttgtgaacatcagagccagtttcatactccaaagtatatgtccttacaacagagttgctcccatttaaaagtgacgcagctgattggagaatgttgttcctcgtggacattcagcaccattggaccgtacagattggatatatgt

SEQ ID NO: 2451 - DNA, 500 bp, Arabidopsis thaliana
ctaaaggcgcaccgctcgaaattccgtgaagcgagactcggaaatcgtgtttctcagatccctcctctccgtcttcttcattctctcgatgacgagaacgtgccggtggaaagcaacatctttggctcttcggctgtccgtgaactcgtggaagaattaagctgcaaagcgaacttcctcgttgcccgcaagttggttgcagctctgcctgacaaagctttccttcgccgccagcaatcaccaaacccccgtcgcctccactcatttgtcgatcgcatgaacagactcgggtttgggtttgacgaatctagcagcggaagttgcagagtagtctctgcaaggttaaggacgatgatttgcgcaaggttagccatcttactcaagaccgtcccttggttattcggttgtatctaattgacgacagggaatggaaacaatcttcgtgaaatccatgcagcgtgcgaagtactatgtggcaggcactgtacaggatgaaatgc

SEQ ID NO: 2452 - DNA, 1188 bp, Arabidopsis thaliana
ctcccccacgcttgttttaaaggacagttacactgtcccgctggctcaacctgtccgaagaaaacgcatccatggatatgaacctttgtcttcccaaactggtcgagatattggaggaaatcgaggatgtggtttgatccacactgcgagatgtgaaccggtggctgttggttacgcaggtattgacaaaacgtgttccagtctcgtcgtttctgtgactcgtaccggcttaacgctggcgggttaggaggtgattgcggttggtgtggttgtggttgcggttgcgattgcggttgagacgatccttctgctatgcctttgcctttgttgctatgactagccatggtagaacgttgatggttatgttgacatgatcatcacctcaggctcatagctaatagatacgattcatcagaaaagaaaaagtttttttttttcttttggtcttgaaaggagaagaagaggggaatatagagaaactatgtcaatgatggtgggggaaaactttagaaaattttatacactaattagaaaattaaatcttattatattctcgcgtaaattatttgatgggaataatatatatacacacacgtagcatcaaatctataagggctacaaaaaaactgaaagctagtgttctattactttattttcattttcagcaaaatctagtgttctataattaatcaacctcgaatatataaatcattttttaaaaccaagttcgtttttagttgaaagtaaagtgattgctgttcagaattatttcgaaccaaacaaacttaaaacgtagatgtatataaaattaaactaattaagtaaatgcaaattaagtatatgatattttttggattatcaagttaagtgatagatgagggagacaggggatggggccagcaagagtgctttagttctttctttttcaatcagtagacctatcaaattattttcccttcctttaatttgtacgattagcatttaagtattgtttactatttactttatttaaatatatttgttgctattaaaattgtaattatgtttccattcagcttagcaatcattgtcaacgaatattgccgccctattatgatgcgtaacaaaagaaaaacaataatactggaatggagaaatacacataaagtataaagtatgatctagtagaaataccaatatatttacgta

SEQ ID NO: 2453 - DNA, 462 bp, Arabidopsis thaliana
gattgtttgtggcaagaagaacagcagcttctttcagatggatgattctgggggaaatttagtgacacatgtgagcagaaaacaatttaaaaataaaatttgtttagattgtgaccatcaaggatttgaattctgaatatgagtataatttcttggcaggtttggaggctttggaacaatgattcacccttagatctcatcgaccctgcgattaaggaaagctacgataatgatgaagtcattagatgtatccatatcggaattaaatgtgttcaagaaactccggcagatcgtccagagatgtctacaatctttcaaatgcttaccaatagctccattactctgcctgtgactcgaccacctggattaatcttcaggaacagacccaatttagaccccttaacctatggatccgagcaggggcaatccagcagcatgtctgtacctttttctatagatagt

SEQ ID NO: 2454 - DNA, 996 bp, Arabidopsis thaliana
cggcagattataaaagtttaattcttaatctcgttctctgcaaacaacttattaaagatatacaacatgaatttagagatggcaagtaaaattctttattaattttcttattggtcacactcgcccgatgaagactcggatcggaaccgagtcttttggtatcgacgttccattaaccaaataatgaaatggaagcaaattttgtttcactctcattgttcatcaactacttgtttccctttgctcataacattgttctttttgtttgcgctgtagctcccgaagagactctctatttcttctaaaggcacaccacgtgtctccgggaggaaagtgaagaagaagacccacgcggcaaccgcaactccggcgaagagaaggaatgcaccaccgatggtgagacccttagaaagagataggaatgtcattcctataataccactcattagtctattcaacatcactcccaaacttgctccttgcgctcttagcctcacggggaatatctctgaggcgtagaccacgtcacggggcctgcacctaatgagaatgtgccacaaaagtcatcaccgtcgtaactgcgagccctatagcccacttgagtgtttgcccggggttcctgttgatcaccgtgagactagttccaagtgcggtcaaggaaagaaacattccgcccatactcgtaagcaacaaggcacgacgtccgaaccgatccaccacacaagtccctaccacgatgaagagagtcttgacaactccgacagcgaccgtagccaagagctggtcattcttggacttcagtccagcctttgagaagattgtcggagagtaaggcacaaccgcatcaattccagaggcttgctgggcgaaatgaataccaaggcatgctatgaggatgtgtcgaacggacggggttggtcgaacgagaaggtccttccacacgccttttccagcgctctttttattcggaacgactataacatcgtctgtcatatc

SEQ ID NO: 2455 - DNA, 1050 bp, Arabidopsis thaliana
ctaggatcacctcgtcatgtaaaaccattgtgtaatatgttttcttatgatgataatttggtcatgtaaaatatgttttcatctgtaaagtgattaagatgataatttggtcatgtaaactatgttttcatctgtaaagtggtgggctgcacttagtccaaattggcgtcatactcttttctattaattatagcatttattggtacagatacgaatcgattttgatatatttcaatattatatcacacacatgtccatttccatatattaagaacaaaccaattgtaaaaaacaaaaaaaagaacaaaaccacctttggaccttatcaatagcttgttaaaatgacattcaagtacttttctacatgtcttaattagtttcagatgatcctcaccattaccatctttcacccttccttcctctcaagaactcatctccaataaggtaaggaaaaaaaaacactggttttgcttctcttttcctcaatcttatttcttaaacaatcttaatcatcttttaggtgtttcatcaaaagtctaaaccatggctgacaccaaacaaggttataagtcaatgcatttaccttaactagccattgatacaatttttcctcttgcctaaaatgttaatgtaaaccaatcatgtgtggtttagatatggagaattcagaggatggaaggaagctagtgaagatgagctcgcttaaacagaaagcgataagcgcatcaaatagattcaagaactctttcaagaagaagactcggaggaccagcagcaaaattgtgtccgtagccaatacagacgacatcaacggggacgattatctgtccgtggaagcgttccgtcaagtcctcgtccttgacgaccttttgccccccaaacacgatgatcttcacatgatgctcaggtttttatatttttctttaagatccctactaggtcaaatgatgtgttgtggtatgaaataaaatatcatgaagtcaactaatggaaaaattatacgaatccaaacgaatattttatttgatgaggagctggtttaatagatga

SEQ ID NO: 2456 - DNA, 727 bp, Arabidopsis thaliana
ctctggtcttgttatcatattaaaacataggaagattttgcggtctagatagagatgctaagtaacaattgaaattatgcagagttacatggatgcggaaattagagggatcatggcacagtacatgccattggaaagtcaaccacccaacacaagtggtcaccatatggatatatgagtgaagttatcaacacaagccaagagactctctctctttctatgagtagctttaagtttccatgtaaatgaatcaatggacttgatacaactctagagaaaagaaaaaagccacaaacagaaataagtgtacctgcactatttgtaagaaatgtggatttgcagatggaatctcctttttgtctgcatattactcttacaatgtaaaatagacataactggatgaataatgagtgttacattatttactgttgaaactaacttaagatccataagaagaaaaacaataaactttgattgagagattgttaaactttctccagctcatctctgtgtttctcaatctgttctttcacaagcttctgcgactcttggaaaagcctcatgtgcttctttataagctcatcttttgtcttaagctcttcctccattactgcaatatcctgtgaagaacagaacagaagagagcagaaactggtaagacaatatgtgtttggagtttcacattggtaaataaaccacaccttcttaaggctttcagctctcgagg

SEQ ID NO: 2457 - DNA, 598 bp, Arabidopsis thaliana columbia
atatcaatgtattatcatacattgtagaatgtagattatattttcttagttctaagaaacaattaaaaaaaaaaaaaggttatatgttactgatggaaaatcttgtttaggtaccagtgaacaaactcgtgatgttcaaattagagattcattggcgaaacaaactcgtataccaattttgggactattttagtttgaaatgtgatttatacattttattcgtatggtttgggtatataaaatagaaaactggttaaccataactaagtaacctgaacaatgtgtatcattaaagagtttgaacatgatcaataatactccactcttaccaaatgtaaacccaagattggtttttctcttctttaaaccccaatttatttacattccaagactgtttaagctgaaaactttttaagagagtgggttggcaaatcagtcgagagttagtactgagtaaaaatttccataggctcatttctttctctcatcgtcgagatggagatagatcggtcaagacaggaggaccccgccgttctctgcagtctccagagcggtatctgtgtggactgggtgaattaaggattgactctcaagaagt

SEQ ID NO: 2458 - DNA, 701 bp, Arabidopsis thaliana
tgacagttactactcatttaccacgagtatttacatgaaagacgggaacagactgctttcaattggaaaaagaggaaaaacaatgacctacctagtaaaaggaaaggcttcattttcaagccaattttccggagcatgtacttttcatcattagtaataccctccttgtcaatatcagaaagttgaggactctctctattctccagatccgccaggactttttctgcatttgctttcttttccaacgcctaaagacaaaaactaaccgttcagaactaaaaaaggtctcgcaaacccaatggattcaagtataaattgtctgttagggcataccatggacaacttcatactagttttttcaaggattgcctcaggagaatttcgctgtcttgatttcatctgatgggtttgtatatgatccttctgatccttagcttctagttcaatatcctctttaacagcccgaggttttatttcctcttcgttttcagtcagcttattaccatgcacactagaattctccattatcattgtttgccttctcctctcttctattgcagaagaaactgcagatgggaggaaatcctttcctctgtacaggacaatgaaatctttatcccgagatatcagagtccctccagtcaaccactgcaacatacatatattttcgctcatcaatagatctctttagttatatggga

SEQ ID NO: 2459 - DNA, 1069 bp, Arabidopsis thaliana
tatcagtatatagacatgttcttattttaggagtcaagatattgatgttttgagtttaccaatgcccatgcccccaacaaaagaaaacaagattaataatcaaaattgaaaatagacaaatagataaaggaagaccttagagtgacaaaagacatgagcgccaaacatggcgaccctctagttcattatttggaagacaaagatcctaaggatcaacatcaaaccctctctctctttgcttcattacgtaaaagtttgtgttgagaggattgatggcgaagatcagaacggatgctccggtgatgcctccggagactcctcctcggagcagtgaggtgggagagattgacacccgcgctcccttccaatccgttagagacgcccttagtttattccgtcaagttagcttttccaagaagcaaccacctcgtctctcctcctcctcctcttctcagtctcaggtatacacacattcttcctctctgcatgcctctttctctcattttacaaaacgtgtctctctataaatatcttttctttcttcgttaaggacacaacaacggatgtgtcggataaggagatgcaacttctgttagccgaacaagaaatggatagagtcaagatatgtcttgatggctctgtcgcagctaaagcacaagctctctctgatctcgactctgctcaacgaaaggctgctgatttaagggttaaactagaatccatcaaacattcaaggaaatgtgctatctctaccaaacacaccatgaatcaacggttagaacaacttcaatctgaaaaccaagaaacagagagcacaagagaggattacattttgattaccgcggagctgttcatggcgaaatacgagctcgcggaattaaaacaacagtttaacctctccgtggaagagagactagctgaacttcagagggcagaggaagcagagtgtgcgtctatggttaactccaacaagatcaaagacatgtcgcatgacatagcggaaatgcgtgatgctgctgagcgacttaattctgatgctgcaaggaaaaaagaggaagaggaacagata

SEQ ID NO: 2460 - DNA, 593 bp, Arabidopsis thaliana
cggaccatttcatcgcaggcatttaagcgagaccatggttctcctcaggttttggctgttcatttgaattacattgcagtgggtacgtccaaaggggtcattgtcgttgtaccaagtaaatattcttctgatcatgcagatcaaatggaatcaaaggttgtcttttacatcattacttttgtccatttctaggttatttgtacacgagtttattataaccttacctgggtagatatatgctcatattattaataactatgtttacaaatctttagatgatttggcttggtttacaaggagaaaggtcccagtccccggttacctcagtttgcttcaatcagatagggagccttctgctagcaggttatggtgatggacatgttacagtttgggacatgcagagagcgtcgatagcaaaagtgatcactgaacatactgcaccagtagtatatgccttttttctaggccgggattctcagggttctcgccaatttaaagttattacaagtgatactaagggtgttgtttttaaacacagtttttcttatgctcggctgttgaacatgtatacggtggaaacgcaggtaaattta

SEQ ID NO: 2461 - DNA, 1019 bp, Arabidopsis thaliana
gtcggtgatgtcatcaagggtcgaaggtaattggttgtgaacatgattttgaagtttggatatatagccaatgatagttgcttcatgttagagactacattaccaaaatttcacataatcttataaagttttgtttttgatgccaggattgttattgttccgcaactggaggtgttaaaacagatttctgatattatcgggcatcctgttccaggaggaaagcataatgatcaacgtggagcagattctggtattaagtttaatacaactgagcaacaaggtagtggtatccgtcaagtaaacaatatcgagccagggagaagtaatgcagctatttcacctcaggttggtggtactggttctagtgttcctgcatcaacaacaccttccactcgggcatacagcaatccgtcttcaggtaatggagtcactaggcaggactatgctcgtgatcctccaacaagttatcctcatcagcctcaaccaccaccaccgatgtatgcaaacaggggaccagtggctaggaatgaagcacctcctaagataattccagttaatgctcttagtccatattcaggtaggtggaccatcaaggccagagtcacgaataaagcagcacttaagcaatacagtaatccccgtgggaatgggaaagtgttcaactttgatcttcttgatgctgatggcggagaaatacgtgttacttgttttaacgctgtggctgatcaattctatgaccagattgttgttggtaatctctatcttatctcgaggggaagtttgcggcctgcacaaaagaactttaatcatcttcgaaatgattacgagatcatgctggataatgcatcaactataagacaatgctatgaagaggatgctgcaattccgcgccatcagttccatttccgtaccattggggatattgagagcatggagaataactgcatcgttgatgtaattggtattgtgtcatctatcagtcctactgtaacaataacgaggaaaaacggaactgcaac

SEQ ID NO: 2462 - DNA, 999 bp, Arabidopsis thaliana
taagcaagcgttctatgaatctcttctgtttccttatggtggtagatgaggtctctctcgatttcttaagaaaaaatactactgtgaggaaagatgttgaaggaggcatatgggttggcatttggcgtctgattctactgaaaactcctccatatgatgagcctaggaggaacggtaaagtcccgaaaatcttaactcacaggttattccctgaagcacagtacagcatttggattgatgggaaaatggagcttattgttgaccccttgcttattctagaaaggtatgaatacaaataaggatataagacccgtagaaaatggagcttattgttgcccttgcttattctagcagattatatacttctccacaatgtttattagcacagggactatcagtctccgtgttactaagaaaaggctaatagatgcatatttcgctttcatctcactttcaggtatttgtggcgtgggaaacatacttttgccattgcccaacacaaacaccaccgaaacatatatgaggaagctgatgcgtgcaagaggagaaagcgatacgcccgacctctggttgatcttcatatgaaaatatatcgatacgagggcttggaaccatggagcatcaagaagaacactgttagtggtaaagaccatagcaaaaacatcaatgtcatcgtgcaccttattgattactaagcatcttgtcttgcgttccacagatgttccagagggagctgtgataataagagagcacactgcaatgaacaatctgttcagctgcctgtggttcaatgaggtacacctgttaacaccgagggaccagctaagctttgggtatgtagtggacagactaaaaggagccttcaaggtgttcatgttccagaactgtgagtataactctctcttcgaactgcaccctcacattcgagagcattcctcgaagattgagtgggtcaagagtcttcaggaactcaaagggaagggagagagtttgaaggaa

SEQ ID NO: 2463 - DNA, 364 bp, Arabidopsis thaliana
catcccaatgaaagtcgctaaaaccgtattctcaccaggcttcgtaccgttgactaaagtcaaagttaacctcacgaacaaattccgatccgtactatgagcaaaactctgccacttcattataagatcaacggctccttctccgacagtttttccgactttaaaaaccgtaactttctcaggcaccggtactagctggatcttgtagccgaggacaacaccgtagctcgctgcaccacctccacgaatcgcccaaaaacggtcttcccccatcgaaacccgatcggtgaagatatttccgttcgaatcaacgatcccggagccgaaaacgttatccaccgacaaaccatactttctcatcaga

SEQ ID NO: 2464 - DNA, 1123 bp, Arabidopsis thaliana columbia
catcaaatctgctggagaaaggagacttattcagttgaatgagcttgatgagatacgaactgtaacaacccgccccgtgagacccgcacacgtggccactctctgccacgtggcatcctgttggctctgcagcgcatctacccaaacatcgacacgaattcatgcttatgacaactcgaagctctacaaggaacgcacaaaagcttaccacgacaaaaagatcctcactcggacctttgagcctaatgacctacttttttatgattctaagttgacaatatttcctggaaaattatcttttcgttggtcaggtccctacacagtccacttggttaggccatctggaacagtcattctcaaaaacaacaatggaaaaccatttgccgtgaatggatagagagtcaaacattactgggctgaagccaaattccagtagaaaaaccttcggatcttcaggacccatctgttgattaagcaactgtagagtcaagctattgcctataaacaagcgattagtgggaggcacccactggtaagtatttctccttttaatttatatcattcatttgattcttaacttaggatttttgaatttataggattttaattcagatttaaaaaaaaaaaaaaaaaaaaagaagaagaatagagtgttgaccaaaaacgcgatggtgtcaatcgacactagggtggtgtcgattgacaccctcattctctagatccttctcttctgcatgccgcaccacgtaccaagagttggattttcctcgtcggctcttccatatcagctgctttctcctccacccatcgcgatggagccacatgtctttcagcagtacgtcgtcggcagtttcaagagcgtctagaatgccatagctaccctttctcgctgcggttgtgtttctcccactcgtcgtcgtcgtcgctctcccgcacccacctccggctcagagcatgaggactagccatcctccctatctttctttgttttctgactttgtttttgctttatttcagactattggttatttgttttgaaacttgttacacttatttttctatgctttgttggacctattgatgtgtgttttagtgattaacagtctaaccggagatccatgtg

SEQ ID NO: 2465 - DNA, 859 bp, Arabidopsis thaliana
gtggcacacatttctcccggtgctagttgcgcacgcttgttccctgtccaggtcaggatccgaagcggcggccacgacttcgaaggactctcttacacctccacagctccgttcttcctcatcgacttgctcaacttcaaatccgttgatgtgaatctcacggaaggaacggcttgggttgataccggcgctacactgggagagctttattataaaatcgctgagaaaagcaatgttcttgggtttccggcgggtttgtgtactacattgggcgttggtggacatattagcggcggagggtacgggacaatgatgagaaagtatggtttgtcggtggacaacgttgtcggctccaggatcatcgactctaatgggaacacctacttcgatcgaatgtcgatgggggaagagcttttctgggcggttcgaggaggtggagccgcgagtttcggcatcgtgatgggatacaaaatccggttggttccggttccggagaaagttacggtttttagcgtcggaaaaaccgtcggagaaggagccgttgatcttataatgaagtggcagaacttctctcatagtacggatcggaatttgtttgtgaagctgactttgactttagtcaacggtgcaaagccgggtgaaaaaaaggttttagcgactttcattgggatgaatcttggcgggtttgataagacgttgaacgtgatgaaccgggatttccggagttaaagctgaagaaaaccgattgtaccgagatgagatggatcgattcggttctgttttgggccggttatccggttggtacaccgacttctgtgctactaaacctacggtcacaaaaaagttgttcatgaaacgg

SEQ ID NO: 2466 - DNA, 790 bp, Arabidopsis thaliana
  unsure (1)..(790): unsure at all n locations
catgaggtcttttgtttgttgcccataggtacacatcatatagggtcctgcgacgctgcgtttcataagtctcccttccatgatacagtaccttgcactctgggctttgagttttttggcctcccacttgtcgggaggtgtgatccctcgttcgatgtaatcgatgattgggattctccagtcgttgtacggttcaggttcgtatggggcaggttgtttgggggtttcgagctccgctgcacttacctccgcggctgctgcgagactctatctgcggcggtggtgctttaggttactcgcgtgaagttgcaagttgtcgaggtttccatcccagcatgtttgaccgttagtcgatgctcgggtgttctattccttcgaccgggataattcttttggcgaaaggatctgacgtggaagcgagactgccaaggcgtctacagaggtgttttctcctctagggatcctggttaattcaaacaattcaaactgttgggtcaaggttttgtctagttcgaggtacgcttccatgcgcccgtctttagcttcgtattccccgtggaactggctggtgacgagttgtatgcgtgtatatcgcagatccccattccttgagctagcttaatgccagcaatgagggcttcgtactcagacgcgttgtttgatgcgttgaatccgagtcggaacgattgttcgatgacttcgccggtggggnaggtgagttgtatcctactccggatccttgtcggttggaggaccgtcgacatggaggaccacatcttattggagttgg

SEQ ID NO: 2467 - DNA, 1517 bp, Arabidopsis thaliana columbia
tgaccaactcgctattccgtcgcaaactttgcgacgaatatttccctcgcacgtttgcgagacaattgcgaggaaactgcgtggaagtcatgattcaccgcaaagacgtcgcaaatttgcgagggctttgcgggaaactgagttcccccataaatttgcgacgcacttgtgacgataacttattctgtagcaatttttgcgacggagttgcgagttttcgcgggttagggtctaggattgcgagtcttattataaatatttgaagtttataaaactaagacaaaatgatgtttaatttcataggacggggttatatgttcagaatgatttgggtcgatatacatacgggatgatattttacagattaaatcttagatataacaatcaaaagggagatttgcaaaagtgccatttttgtaataagcttttgcaacaatgcccttttctgatggccatttttaaaactgccctttctaatgtggaaaataatggtttcccccttactgaataattagggtttcactctcattttgacaaacctactcacattcgtcgacaaattgttctctctgataaaactcacattcgccgacgaattgttttctccctgacaaacctcaaattcgccgacgaatagatctctccgacaaacctcttcttcgccgacgaatctctccgagggaacatgaccaactcgatattccgtcgcaaactttgcgacgtatatttccttcgcaaatttgcaagacaattgcaaggaaactgcgtggaagtcatgattcccgcaaaaccgtcgcaaatttgcgagggctttgcgggaaacagagttcccccgcaaattgtgacgcacttgcgacgataatttattctctagcaaattttccgatggagttgcgagtcttcgcgggttaggtgaacacaatttaaatttttttactatttgttttatgttttggttatcatttacggtaacattcgttagttctcttattataaatatttgaagtttatataaaactcagacaaaatgatgtttaatttcataggacagggttatatggacagaataatttgggtcgatattaataggggatgatattctacaggtgaaatcttagatataacaatcaaaagggagatttgcaaaagtgccaatttctaataaccttttgcaacaatgccagccatttttaaaattgccccttctaatgtggaaaataacggtcttacccttactgaataattagggttcactttcattttgacaaacctctccgttttcgccgacgaattgttctctccaataaaacttaaattcgtcgacaaattgttctctccgacaaacctcaacttcgccaacgaatagatctctccaacaaacctcttcttggccgacaaatagatctctccgacagaacaggaccaactcgctattccgtcgcgaactttacgacgagtatatccctcgcaaatgtgcgagacaattgcgaggaaactgcgtagaagccatgattccc

SEQ ID NO: 2468 - DNA, 854 bp, Arabidopsis thaliana
gttttctctatgtgcaactgtcgatgggagtgcatttatggctcaagatttgtgcattctaaacacagcagggccaaagaagcggcaggccgtggctctccgtattagcgctgatgcgacggtcgtttatcgttgcagaatcaatgcctatcaagacaccctttgttgctctgtttcgtgaagttataagattaatatgttttttaaaaattttaagtgtcataagttactgtttgattataaaaatatcgtgatgtggcatagcatattggaatatacagctctattaaaaccatatattgaataacactttggttttagtccatcgttctacacaacttagggcattacagtagaagaacatatttttataaaaaggttttaagtttcctatgtttttaaaaaaacaattataggccttttttatgtatttatatttgttaagcttttcattcactatttttctttaacctttttaaagttaataaaatgttttgttaatgaacttagtttagtaaaagtttagacttaagaaaaataaatcttaaactctaagactttgattacaaaataaaaaataaggactttctagtgtaaggtgcttaaactttgattacaaaataaaaatttttgttttgattaatcaaataaatgagttagttttgctatccattaagacaactatgtttgaaaaaattcgattatgtgaatttgatgaatggttttgcaggcaaaaatctaaatagatgtatatttaaagaatgtaattttgatttttcctccatttttgcttacaaaatgcttataatttttttaaaaaaactgttttataaagttttagtagaacttttgta

SEQ ID NO: 2469 - DNA, 537 bp, Arabidopsis thaliana
tagcattgactctttgcttgatgacattcctcagcctgacattgatgcttttgttcatggactctgatttgtattttttattctgcttgtttcagttttgttgttttttgtttgtctttttatacgagacagattccaccaaacttcaataatttgaaaagatataaaatattttgctttttaaaaacatgttgatgttgaaacaatagaaacctaacttgcggaacccgccaagacttgttgctaaaataagaacattacttaacttgtggctcaagcaaccatatgaaaatttataaaacaaccaaaacacatatgatcaatctttcaaaatacaaacataacgtatcttctcttagcaatcgatcaaaagacagttcagagaaagggaagtcgtatcggttttggagacgaaaggattgatacgaacccaaacaagtgaaaacacagaagcaagcaagatagaccagagaataccaatagtaggtgttctgttttgtctcccataagacctttgaggaatggataaagatgaag

SEQ ID NO: 2470 - DNA, 1042 bp, Arabidopsis thaliana
tagtaacggtcgccagtgtgctctaaaggatcatctgcatcggcacgtggcctgggccttcaatcatcacctgcacgtcatattcccaggcaattttggtcagttcgcccagcgtatgcagctcggcaaactgcgcttcatcgttggcgtcctgaatagaaccggggcgcagaccgtcgcccagcgaagcaatacgtcataagcggcacagatttcacaaatttcgcggaagtgttgatagaggaaattttcctgatgatgggagaggcaccatttcgccataatcgaaccgccgcgagagacgataccggtcaggcgtttcgcggtcatcggcacatagcgcacgagtacgcccgcatggatagtgaagtaatccacaccttgctcggcctgttccagcagcgtgtcgcggaacgcttcccaggtaagatcttcggcgatcccgttaaccttctccagcgcctggtagatcggcactgtaccgatcggcaccgggctgttacgcaaaatccactcgcgggtttcgtgaatatagcgaccggtggagagatccatcaccgtatccgctccccagcgcgtggaccataccagcttttccacttcttcttcgatggaagaggtgaccgccgagttgccgatattggcgttaacttttaccaggaaattgcgaccaataatcatcggctccgattccggatgattaatgttggccgggataatcgcacgtccggcagcaacttcatcacggacaaattccgcagtgatattttccggcagatgtgcgccaaagctcattcccggatgctggtggcgtaaaacctcgctacggatgcgctcgcggcccatattctcgcggatggcgatgaattccatttccggcgtgatgatgccctggcgggcgtagtgcagttgggtgacacggcgtcctgctttggcgcgttttggtgttagtacgccgctaaaacgcagttcgtcgaggccatcatctgccagccgcgctttagtgtgatcggaactgcgcacggtaagttcttcggtatcg

SEQ ID NO: 2471 - DNA, 620 bp, Arabidopsis thaliana
ctagtaacgtgcgccagtgtgctctaaagcggtcatctatcttccaacagccaccatgccccgagttcgcgttagttcaagccaaaattgccatgagaaggaaggtcggctcctactagctgtacaggctataaaaaaaaggagattatattaatacgcgaggcagcacatcactttaatatgcctgaatctatactacatacgcgacaacgcgggactacaaatcgcgcggaatctcgcgcaaatagccataaattgactgagattaaagaggaagtacttaagcagtagattctttctttagatctatgcagagcagctcctacaaaagctcatgtataagaaatggctaatattctgcttgcaaagcatggttccaccccaatccagactgtcggccagaaataggtatataattaaactcaacgccacctggagcttgagtcttgcttgttaaggcaatacaactgccagcaagcaaagcaagagaacccaaaggttatttaagcatggtttaatactatacaagccacaattgaacaatacaggatcctaccagatgatatctcaactttgataagactggctttgcaatgggcctttgtgcacatcagaaagtg

SEQ ID NO: 2472 - DNA, 811 bp, Arabidopsis thaliana columbia
agttatgatagatagacatttgatttgattatagaagctagagttatgttgtttcttgaacattgatatacctcgattttcactcattttaactatgatttaggtatagtttttagagttcttttgttatttttagagtcttgtatagtttattcaggtctttacatgtttgggatgcatttggagaatatagagtattctggagaaaaacataaaacttatgctacaaaagcaatccgaagaccaaacttcacgtaggtgtcaatcgacaccacccttggtgtcgctcgacaccaatatccgacgccaattcaattgcgcaacttattgaagttttgaagatttccaaattcgcttcagaacttttccttattttcaaagaagtccctacacaattttaggaatttatacaatagaaactctataaattaataatgttgggaccatgaattttattaatttatagtgatattaatttatcctataaattaataaatattaatttatcctattaacccacaattatttgtgtatatggaatgttatacgtaaaatataatattatattcttcttaaaatgtttcttaatttaattttccatatattttgttgtttagatatataattatgttaggttttttatttttctttgacttctttaatttatttttctgtaagatattgtgtttgtatatctaagatattaacgtgaagtaaagtaaacatgaattttaatccaattttttttacataaatcttagcaataccttctcaaatacaaaattaactatgacggatcaaatactcaaag

SEQ ID NO: 2473 - DNA, 547 bp, Arabidopsis thaliana
actgctaatcaaattgagttcttcgcgctgcaggaggtaaacgaaatgtgggcaggtttgggatactatcggcgggcacgttttcttttagaggtaaatactcttctgcaatctggggtttgatcctagttgatacgttcactaaatatcattgtgatcttttcttcttgtcttgattctcacagggtgcaaagatggttgttgcagggacggagggtttccctaatcaagcgtctagcttgatgaaagttaaaggaataggacagtacacagccggagcaattgcctcaattgctttcaatgaggtgagtcagtttcatttttttcagtcatcaatgtaagacatctaagtaattatctttacgtcttttgacacttattatgaaccaggcagtacctgttgttgatggaaatgtgataagagtgcttgctagattaaaagccatctcagctaatccaaaagaccgacttacggccaggaatttctggtgaaataacttttgtatttgctcgaatgtatcgctattgagactatactgaaagagag

SEQ ID NO: 2474 - DNA, 754 bp, Arabidopsis thaliana
cgatatttcccattggcccttttcacattcatgacgtcccagcctcgtctagcagcttgttagaaccggaccagagttgcattccatggttagatatgcgtgaaacgagatcagtagtctacgtgagcttagggagcattgcgagtcttaacgagtctgacttcttggagattgcttgtggactaagaaacaccaaccaatccttcttgtgggttgtccggcctggttcagtccatggcagagattggatcgaatcattaccttcagggttcatggaaagtctcgatggtaaaggaaagatagtgagatgggcaccgcagctagacgttcttgcgcatagagccacgggagggtttttgactcataatggatggaactcgacattagagagtatatgcgaaggagtacctatgatctgcttgccttgtaagtgggaccaatttgtaaacgcgagattcataagcgaagtttggagggttgggattcacttggaaggtcggatagagcgaagagaaatcgagagagctgttataagactaatggttgagtcgaaaggagaagagattcgaggtagaatcaaagtcttgcgagacgaagtaagaaggtcagttaaacaaggaggttcgtcatatcgatctttagatgagttggttgatcgtatatcaatcatcatcgagccactagtgcctacgtgacacatgaaatgggattctctatacgaaactcttgtcaattgattatagaacaaagtgga

SEQ ID NO: 2475 - DNA, 746 bp, Arabidopsis thaliana columbia
cctggttgtgtcctcctcctcgtcatcatccttttcgctgccggatggaccacttcgacaggagcgtttataggactaggaacttcacctcgagcacagaggtacatgtagagcatagtcgggatcccgggtacgcagtcgaagttcctccactcccattggaagggatcactctccatggccctcactttcttttctacacgagcgatgcgggcctcgagcggttgccttttgaggcctaaatgctgtctctcattgcacaagcggcgtgaggaaagagaacgccggctggtttgaaaccatcgccggacaagaacaatgggctgccgggatcgagaggacaaactgtggcgactccatcgttttccattcttgtaatgtttaccaagtaaatttctgaaatcatactaggaaattttggtggcagattggactcttatttatagagggttaggttttatcttgaaaccaaaaacttagtaattatggcgtgtttgaatggtttaaaccatttttggaaatcgaaaaaagacaattgttgcctcttagacgtgaagctttttcttgtttctcgaggaatggaaagggaaaggcaaccgacgcattaaacacgaaaggtccattaaatacaaagtaaaataatcgaggcctaagcccaatagttaagccgaattgattaaacacgagatgggaaattcacgttttaaacgagctcaattctcgcgttctaagagtaacgggttacg

SEQ ID NO: 2476 - DNA, 597 bp, Arabidopsis thaliana
ggttcagcctggtctgggaagaaaaaggtttgtggtggagcttgggttctcagagatgaacatgggtctgtcattttacatagtagaagggcttttaatgggtgttctaacaaaaaagaagccagcctgcgatgtattttttgggctattgatagtatgcgtagccatagagtttcaagggtgttgttcgcttttgagccaggagacttgttgtctgcttttactaggccgaaagcgtggccctctcttgcatataatgttggagaactaacttattttttggacaaggttgaagagtggaaggtagtggaagaaaaagtggtttccaataggggagcttctcttatagctcaaagtgtggtacagatttcagtcgtacgtcgcttccggtcctccacgttggctttctcagctctttgagagagagagaatctctacctagaccttactcttctcttgttgatattggactgtttcaatcacaattttttggtgatcggtgcatataggtgtcctttctgtaagctgttgttttcttttgtaaaggttcaatcaactttctaatcacaatataatataattcagtgaaaaaaaaaa

SEQ ID NO: 2477 - DNA, 710 bp, Arabidopsis thaliana
ctcagaatcaccagaataacggttgcttgatccgcctgaacgcccaccaccataaccaccactgctgccaccataaccaccaccgcctgaacgaccaccaaagcttgaaccacgatccctcatgcctcctccaaaggaaccaccggatcgagaacctattccttcaaacatgcttgcgccttcaacgttccacagcaatgctagggagctgaattccaaaccccaatgggataacaaacattgacttcatacattcaggaaaagaaacaaagaagtaaaaagaaagtcagattatctaacctcagtgaatcggctcccaacttctctctcaattatttttacagccctggattgatcttgactgtagatcagaatagcacttcctttctttccagcccgacccgttcgcccggttcgatggacaaatgtctccgtgttattaggaagctcatagtgaatgatctattcacaatcacaacacggatatataggtttagttagatgagaaccaaaactcgttaagagcaagaaaagtgtagttttgactcaccaaatcgacattaggtacatcaagtccacgggcagcaacatcagtcgcaacaagaatattgaaatgcccatctcggaaaccagcaagcgttctttccctctgactctgggatatatcaccgtgtaaagcttcacatttgaagcttctagccatattgggg

SEQ ID NO: 2478 - DNA, 978 bp, Arabidopsis thaliana
ggttttgatttttgcaaaaacgataaaccttaaaaccggaaaaataactaaaaccaaaccggaaaacggtacgccaaattactaatcatctatttctacttgttaaataatattagtaggatcacaaacagatacttcccaacaaattacatctgtgcccctttgtgattcaaagtttcatttcatttcaaacttgtattattagctcatatgatcatattcctttaaccttatcatcatcatcactgtatttcaaactatgacaatggagtcatacaaaaccctagaaatcattcgcaagaacactgattcctccgtatttcatctcatcatcaacagaccatcacatctcaacgccttatctctcgatttcttcatcgaattccccaaagctctctcatctctcgaccaaaatccagatgtctccgtcatcatcctctccggcgccggaaaacacttctgctccggtatcgatctcaattccctctcttcaatctcgacacaatcctcctccggtaacgacagaggacgatctagcgagcagctacgccgtaagatcaagtcgatgcaagcggcgattacagcgattgaacaatgccggaaacctgtaatcgccgctattcacggcgcgtgtatcggtggcggtgttgatctgattaccgcttgtgatattaggtattgctctgaggatgcgtttttctcgattaaagaggttgatctagcgattgttgcggatcttggtacacttcagcgattaccgagtatcgttgggtatgctaacgccatggaattggctttaactgctcggagattctctggaagtgaagcaaaggatcttggtttggtttcaaagttttcggatctaaatcggagcttgataatggcggcactacaatcgccgaagtaatcaatctagttttgcttaaatctgttgaatctatggttgatttgttcaattttgattctgagatgatgaga

SEQ ID NO: 2479 - DNA, 1120 bp, Arabidopsis thaliana columbia
ctttggcttgaaataaagctaggctaaaggtatgagaagctgctctaaaaatgagagacagctacttggattaacagagggtggtgaagtgaataagataatccaagtatgtatatggtagccatgagttcacaaacaatgcatagacatgataattgcaaattcagttcaggttctaatagatatggaatggcatcagataagcgagtttcgaatcaaagcagtatagtcaagttacaaattcaaagcagggtgtagtcttacttcatagatacagtcggttatgcaaccgagaactaacaacctgggcattgaacttacttcattgaatcaaaacatgcttatcgctttgaaataatcattatcccctatgcaaatgagcaaatcctaaatgcaagtactctatatacaatcctaaaatgatatgcaatctacatgacactctgtttttgatgaattcattttatgaaattttttcaatttttttttgtttttctatgccttagatgatgcaaaatttgaaataagaaaagagaacacaatgttaaacatgtcttgaatcctcccccaaacaaaaatgaaccttgagggttgcaaagagttggcagctctcctctttgtatcccccacattggcagctcatgaatgttgcaagattggccaattccatcaagtattccacatcaccacaaataccaagctcttgcatcgtttccttatgagggtacctagttccctcaaacttcaactccttcaaatattgatagtactcgctcgggattggttctctcttcctccttggtcggtttcttctcccaacaggggttggtgtatcatccccgatgatctcaacctcttctttagaaaccgcttcttcaaagggtgcctctccatggtgttcttcttcagcttcaacgaccctctttccccgagctacttcttctctttgcatggtcgagcggcttgagcttcctcgttgaaccaagcttgatctttgagcacgacgagcttggcgaatttggcgttcagtcatgccacacatgtcaaacacctcaacttcttcatgatcaacagaggatcttcttgcccgagacgaactcttccttcttgaatccttggt

SEQ ID NO: 2480 - DNA, 954 bp, Arabidopsis thaliana
tccaacagtccatcaagtttccggcgccggaatgatccgtagccatcttcgtgaactggagagtccttccctcggcgacagtgatgacatgaaaggtcgatatgagatatgacatcattagaaatgagagcagaagaggcttcgaagtagatttagtagccattgcttctttttgtgttatggattctttgtaagagattatgagtgtgatgtgacgaatatatagtagaagattatgagggagacgaaaagtttttttgtcgtttaatgttgtagtaattatcacagtgatcgtggttaatttaattaccctctaatcctctatctaagcatttaccgtgtctttattaaattatccgttacgcccagttttgcaagctattgggccaactaaattgggctttatggaaacccattaaaataaataaattattatgtttagtttagtataagcccgttctatggaaacgtgattgtaagtttcaggcgagagagatgagcgcgacggagctgccgacgaaggaggacacatacttaaaggccacgagggggcggttttagcggcgaggtttaacggtgacggaaactacgctctcacctgtggcaaggatcgaactatccgcctctggaacccgcaccgtggaatcttaatcaagacctacaaatctcatggccgcgaagtccgcgacgttcatgttacttcgtatgaaatcagctctttctcatctgatgttttttcttttgaactattcgtgattttgattcaatttctgcagtttaagtttaagtttagatagtccaaatttattggattctggttctgtgtgttgattgttgttgctttcagcttaaattgagtacataagagaacgaatctcacattcccgagctttttgttgttcaatgatttttgttgcttgcttgcagctataaacgatcgaattagacacgaga

SEQ ID NO: 2481 - DNA, 1282 bp, Arabidopsis thaliana
gaggatatgaaataatgatataacttatgttggtttatgagacaagaagtagctacagaatttatatatagctcgactccttgtaaactactcaactcgagataccgagttctctcctaagtcaactccattattgctgagtcgggtcaaaaccaacacaacacttctctcagtaagattcttttaccatcgtttgatccaaacccaccaaagctgctccttccacttgactgagaagaacggtctgaaccaaatcctcctgaagaaccgcctgaaccaaagcttccgaaaccagatgagcggtctgaaccaccagagtaacggctgcttgatccccctgaacctccataactaccaccaccaccacctgaacggccactgctgccaccataacctccataactaccaccacctgaacggccactgctgctaccgtaactaccatacccaccaccgcctgatcgacctcctccgaacgacccaccagatctagcacctactccttcaaacatcgttgcgcttcctctttccacagcaatgctaggcagctgaattcaaaaccaaatagattcagaactgtttgttacccaagctattcatacaaaagatacaaaggtggtaaagaaagatattaacctcattgaatctgcttccgacttctttctcaatcattttaacagccctggtttgatcttgaccgtggatgagaatcgcgcttcctttctttccagcacgaccagttcgccccgttcggtgaacaaacgtctccgtgttattaggaagctcataatgaattacctgtacacaaagcacaatacaggttaataaaatgagaaacagaactagttaagcgcaagaaaaggtattgttttcactcactaaatcgacattaggtacatcaagtccacgggcagcaacatcagttgcaacaagaatactgaaattcccatccctgaaaccagcaagtgttctttctctctgagcttgagatatgtcaccgtgtaaagcttcacatttatagctttttgccaatccaaatgcaaggcgatctgcatcacgttttgtttgggtaaagacaatgcattttcctcctttgccatgttcctgtaaaggagaagatgttataaaatcacgactggaaacaaaaatgaagaatcaaaacaagatacagataattggcttaaaagcaaagtaaagaaaacatacctttacaagaggaccaatgatggatgctcttccataagaatctgcagcgatagaatacatagtaatcccatctgca

SEQ ID NO: 2482 - DNA, 1062 bp, Arabidopsis thaliana
cagggctgcctctagctaggtagcaatgctttgtttaatgactctgcaatgttgcttgacattagattatacctctctccttcaaaatatgccctgctccaattttcaactcctatcccttccaagaattcccaacaacgaacattcctctgctttattctatcatactcatcatcgaaatctttcttcctgtacatacttcctgctctccacacaagtgatggaagtccacttttttcaggtactttgccttaacattccttcgtatgtgcaccaaacaaaagccatgatgtgctttagggtacacctcaggtatagacttcaatatggaagagttcctatctgaaacaaatgttaagtcttgcccatcgttaacaatttcactcagctgctgcataaaccatctccacgactcatctgtctcactgtccactattgcaaaggcaatgggaaatatttgaaaattggcgtcttggcaacttgctgtaagtaagcatcccaaatatttcccaaataggtctgttccatcaactactacaactcgcctaacatacgaaagtcctcgcacactagcccccaaagcaacaaacacatatttgaatcagtcatcaccattatcatctctaaccgtttctaacttctacactgttccagggtttgcaagttttaagacatgttagttcaacgggtaatagtgcgtaagaactctcgtctgtcccttgtgctgtcactacagccaattctttcactttccacgccttccagtacgaaaccctaacattgtgctcagtgagaatacattctggcaggtctcttgctcttggcccacaataagcgtttgcatattttgacctcaaaagagcagcaacaacctttgatgtagcgtgtttcgaaaacctgctacacgtttccacattacagagatgatcaagcttagctttcctcacctcatattcttctgaatcacctactttatgtgcaaagactctccaatcacatattcttttgtcacacattctgctactagatagtctttgcggtaccttgtaaatgtgaatttga

SEQ ID NO: 2483 - DNA, 904 bp, Arabidopsis thaliana columbia
cttatttctaagaaattggagtctttgggaaatcttttatattaggttgtctttattataatccggtagatatgtttttaatggaattacatgaatacatttgtcaagttattccttttaattatttattttaacaatattataatagctacttgacaaatcgtaattagttaaattccccaatgtcttcagttttttttgggttgcctctttggaaactctctacggcaacgtcttcgctatttcggttcttaaaattatgattatatggctgataaataaatgtaagagttggaatttatttgattaagaaacttccttacaacatcaaggaatataaactgcatagaaaaagaaatagtaaaaaaaaaagaaataacaaaaacagctttgctttgacactgtgataacccacaactctataagcattaaattaagggtaaattatatacagtagccgttgacccacttttattttctgattttgacattgtgggctgggcctttcaattcttaacctttcagccaaaaactaaccaaaatgcccttgacgcttcctgaccgggtttggacgtacggactgcgtcgttggaatccaattgaagcgtacactgttcaccgacgggaagtgcattaaatgttttctgggtttcggcgaatttgacactgtaacttggaattaaaatttttaaaaaaattgttgggctcagatgttttaaatgctaaaaagttttgacaaaactaaaactcatgattacctattataatagagattatattataagatatttacataattgagattagaattttggacaaaaaaaacgaatccaaattgtgttacggtgaagaatctgaagttttcagttgctgtttacaaagtttgaacgtttgaacgggagac

SEQ ID NO: 2484 - DNA, 988 bp, Arabidopsis thaliana
cttcatttcctaactactctagacctttcatttaatgattctaaaggtcaaatcatgtcttcaattgaaaacctttctcatctcacctatctcgacctgtctgttaatcatttttcgggtcaagttccatcttcaattggaaacctgtctcatctcaccttcctcgacctttattgtaatcaattttcgggtcaggttccatcatcaattggtaatctttctcatctcacgactctagaactttcttttaatcggttttttggtcagtttccgtcttctattggaggtctttctcatctcacgactctcaaccttttcgttaacaattttttgggtcagattccatcttcaattggaaatctttctaatctcacctctctctacctttgtaagaacaatttttcgggtcagattccatctttcattggaaacctttctcaacttacccgtctcgacctctctagtaacaatttctttggtgaaatccctggctggttatggacgctaccaaacttgttctacgtgaatctctcttacaacactttcatcggtttccaaagaccaaataaacctgaaccatctatgggacacttgcttggctccaacaataacttcaccggcaagattccttctttcatatgtgagttgcgttctctagaaactctcgatttatcagacaacaactttagtggtttaatccctcgttgtatgggaaatctcaagagtaatctttcacatctaaaccttcgtcaaaataatcttagcggaggtcttccaaagcacatatttgaaatactgaggtctctagatgtcggccataaccagctagtgggaaagcttccaagatctttgagatttttctctactcttgaagttttgaacgtggaaagcaacagaatcaatgacacgtttccgttctggttgacttctctaccaaagctacaagttctagtccttcgctccaatgcattccatggaccaatacatg

SEQ ID NO: 2485 - DNA, 130 bp, Arabidopsis thaliana
tcgactctagaactggaacggcacgttcatccgcgaacggttagctttcgccacgtcattgcggtagaaatcgctgttatcaatcaccccatatagcagttctgctttttgctgattgattttatccatt

SEQ ID NO: 2486 - DNA, 571 bp, Arabidopsis thaliana
taactccaccgccgcgttgaattctgatctcgtcgtcatcctcgctgctctcctctgcgccttgatttgcgttctcggcttaatcgccgtttctcgatgtgtctggctccgtcgtctcgcagccggaaacagaacagtctccggatctcaaactcaatctcctcaacctccggtggcagcggcgaacaaaggcctgaagaagaaagtccttcaatctctcccgaagcttacgttctcgccagagtcacctgagtcggagaaattcgcagagtgcgcgatctgtctagctgaattctctgccggcgacgagctccgagttttaccgcagtgtggtcacgggttccacgtggcttgcattgacacgtggctaggatctcactcgtcttgcccttcttgccgtcagatcttggttgttgccaggtgtcacaagtgtggaggtttacccggtagctctagctccggacttgaatccgaacccgaaatcgagatccgaatcaagcaaggcgaagatgaccccaactccttcttgccataatcattttagtttcccatttatttattagaaaactct

SEQ ID NO: 2487 - DNA, 1069 bp, Arabidopsis thaliana
gctcaaagggagtcatggaaacaaacttgcagacctgtaatagggatagatggagcttttctgaaatgggacataaaaggacatctattagccacagttggaagagatggtgacaatcgaattgtccgtattgcttggtctgtagtcgagatagaaaatgatgacaattgggactggttcttgagatagctctctacaagcttggggctatgcgaaatgactgatctagcaatcatttcagataaacaatctgttagtctctattctataagattcccttcatatatctactgtaatttgagatagacaatcatactaaacttgtgttttttttgttgttttgcagggtttagtcaaggctatccataccattcttccgcaagctgagcatcgacaatgttcaaaacacatcatggataattggaaaagggacaaccacgacattgagctacaacgtctattttggaagatagcacgcagctacaccgtataagagttcaataattaccatgcagacttaaaaaggtacaatatccaagcctacacgtctctccaacttactagtccgattacatggtttagagcattctttagaaccggtacatgttgcaacgacaatctcaacaatctgagtgagtcattcaatagaaccattagacaagctaggcggaaaccactattagatcttctagaggatattaggaggcaatgcatggttaggacagctaaaaggtttatcattgctgacaggtgcaaaacaaagttcacaccaagagctcatgctgagattgagaagatgattgctggggtccagaatacacagagatacatgtccagggataatttgcatgaaatctatgtcaatggagttggctactttgttgatatggacttaaagacatgcggctgcaggaaatggcaaatggttgggatccatgtgttcatgcaacatgtgtgataatagggaaaaaagagaaggttgagagctatgtgaacgactactacacaagaaataggtggcgagaaacatatttcggtggtattagcgcagccaagggatgcttttgtg

SEQ ID NO: 2488 - DNA, 1553 bp, Arabidopsis thaliana
gatactatgtttttgttgggatctcagtcacactctttataaagagcatagagcaatcaagaacaaagctacctggatctggaagcttctcagtggtctgaccaggagtgatggtgcggatgtattcagcaatgtctactctctttgccttcttctttttggccttaagcagcatgattgcactgatgtccctggtaagcagtttagcttcatttgagctaattccattgtcaaaaagtcgcttaacatatctgttgagtgaagaagaaaatgtctcagaagcatccttaggaagagtatgaaggatcttctccattattgttgtgcacttagcagcatgaatctactgcttagaacgacacttccccggataaggaacatgaggagtgtaaacacacttgggctgcataggtatttgcacctcacaaggtgcagtacgaatccagtgtcgatcgacactagaggggtatcgatcgacaccgtcgtactcagtcgtctcagagaagagcgtcacctatggtgtcgatcgacacagagggtgtcagtcgacaccatctctgcaactgcgagctccaactcgtctttagtgtccaattccttccacacatcatctccttctctgatcaagatggcattgcagctcttccttgggttagtgatatgtctataatttgcatgttttcagtgttcattcatcatcattttgagtctagtttcatatcattcatcactgttttatatcatttcttatcattcttacatactttgcatgattaggatagctttgcatacatattgcatttctgagttgttttcaagtgatttggagctgtttgcgagcaaattggaagaagcgagccagaaccagaggacatactcgaccccctggccgagtacatccagcacaatactcgaccccctggtcgagtgactttggagccattctacccatctactcaacccccaggtcgagtaaccgcagctcaggccactcgatgacattactcggccccctggttgagtatcactttgccacaccacctgaccacactcggccgttcactccaccgcgttactcgaccccctgatcgagtatcatcactcaccatgaacaccatcacacgaccaagcactcgatcacatcttcggagtctactcaaatccgcactcaaccagacaagatgaacacaaggaagagaagaggagaagatgaagtgtttggaagcggcctggagccccatcagatcacaaagcccatctccagggacaagcaacaggagcaatggatctcgtcaagaagatggcagaaatccacaacaaggttgattgcactttcaacgatctgaatatcaaacttgaggcacttacctctaaggtcagatacatggaaggacaaactgcgtcaacctctgctccaaaagtaacaggtcttccagggaagtcaatccaaaacccgaaagaatacgccacacgtcacgcaatcactatctgtcatgatcgagagctgcctactcgacatgtctccaactcaatcgctgaggtctctggattgg

SEQ ID NO: 2489 - DNA, 875 bp, Arabidopsis thaliana
tatagcgacgtcctccttgttatctctgtgaaggagtccctgaaacataaaagggaaaggtttcaacgttaagttgcattaatctttgtgtttgtatgctttaaagggttttagttcatacttggaagacgagagtttcgagttttggagaattcttaagcagctttgttaatggtttccatccaacatttgggtcactcttgatagttaaatgactcaagttttcgaatatcggtatttgtttgcaacaatatgtgagtacctgaaaccaaaaccatctcatgatcaactagatatcatcatcactcagatgcaatcattgactcaaatccttatacaaaatagcatagaatgagaaagattagaagaaagatgagagtggaatacaaacctcgagagtttcgggagataagtagagaacccgaacattgcggagtccaactataaaatctgttgcattgccgaccatacagtttacctcattttttctaagtctcacctctcgtatctgatccactgtcatccaaatatcgatcttggcttcaacaagcaaatcaaaattcacttttggataattgttagctatgacttgagcatattccaagtagacaagatttggagtatcaaaagacacattatttggattttcatcatcgtgcatatagccaaaactactcattttctggcaacaaaacgtcagtctcttgagagtcgcgacagaaacagtgaaagatgtccatacacacgaccccataccatcgagaacaagttcttcgagcacgggacaaccagaaaggagctttctaaacccaatatcgttctcatcaaacataactgactggaggtatagagtcttaagctttggaagatgacat

SEQ ID NO: 2490 - DNA, 835 bp, Arabidopsis thaliana
acaaatccacaacttgtccactgcaaagtataacagtagaatattctaacctttagcgatctccattcagaatcatgccagaccgaagacttattttcctgaacaccaactattgtgccactgaacctgcatagttaaaacgcacacaaaaaaaaagactagaagttatattcagctttatcagcaaaaagaaaacaatatagttagttttgataccttttctcgggagcttcttccccctcgaatctcatcttgaaacgcatgcctacagacagcttctgggtcttagcttcgagatacctattgacgctcacaataaactctgacctacttgtcctgataatagaagatatgtcagcctggatttgcagcaaaatgattatcatcaagcatatgcaggcaacagtaactcaatggaataagatgcatatttattaaaaaatggctggtgtgtccgtcccagaccggctaaataaatctaacatagcaaaattttcagtttctaaatggagctgaaagtctgatgcagcaactgatgtgttttggaccatttgatgagaccttggcttgtagaagacagaaaagattgttcctgttgtaatggcatgagctgctgttgcaaggaccccaatatgcatgctatgacttgaaatgacagatgacgggatattagtctgttgtctcatgtgccgcctaacacctactcggagctcttcattctcacccctgaaagataatactatgtcacatgtccagccgtatgtggcaaaaataatatcgagacgaatgaaatgaggagcttgccttaagaatatgaaagcacaccagccactag

SEQ ID NO: 2491 - DNA, 695 bp, Arabidopsis thaliana
tcgttggtgatataaagaggatgagattgtatggttgtagacgtggagactagcttgtaacttttttttttttgtgcacctcttaattataatcactcaatcaaagttttgagcatacaatgaaagggaattcttcgctaaggaatctgccaacacattggcctcccttttaatgaaacgacaaacaaataactcaaaggatagagagctaattaaaatgtctgaaatgatgccatggatctcagatatgagaattccggcattgatggcttgaatcagctggaggcagtcgctctcgatgagaagctgcttcacatttgcttgggtcgcggcagtaacagttgcgcgcatcgctagcccttctgccgtaagagaagatgatacattcaagcatagagatgaatgctctgactccaaacttgtctcctcatgtgcaaacgtccagcctaaacctgctgctcttaaatcaagtctccaagctgcatcaactttacacctagctccacaagtcggaaagataggaagatcaaaccttgagattggctccaacaggggattgatctgcagctttccagtctgtgcttcttgccactctctaacatccttaactgctttaaccaaagtttcctcgatagtaaagattttattgttaacacctgctggtttcttattgccagagggtcaaaggatcaggg

SEQ ID NO: 2492 - DNA, 1173 bp, Arabidopsis thaliana columbia
taaacatgtcgattatttcctctggatatcaacatcttcaagaacctgcagggagtcttggatttggcactatggcattcaagctcagttgacaactgtcaaagggactaaatttgtattgctctagattctagtgcttaggtcaaaccttaaatacaccatctacattgcggccaccaacaaggaaagtgcaacctgtccgtttgcaatcaccaagtatctccaacatccttttgatgcttccttcatagtactttggctgcaagaaattcagtttcttaatcttctttgatagtgtggaacaggaagatatagagcacttcaaatgtcttactaagtttcaggtcgctcaccacaacaggtagtgtataaatataactgtaaggaaaaaaaaaaaaaaaaaagaggatcagggaacggttcagtttttacatacattgacaagcctcgctgcagtgtcagcgccaattacaaaactgcttcctgggaagagttcagctttcttgtagaagtatggctgatttgaaactattatcgtctttcctgccaaccggatactaaaccaatatcaaatcatggcacaagcatatagacaaaataaatgcattggaaacaattatagctcgactctggatcataaaactgattggtctttctctagttggaaacaattggatcatagagataccaaaaaagtggtgcacaagattgaaaagataaatagatagtgaaaaataaagatccggcctaccaactacttcaaattgcttgacacgatctttaatctgtgcaattgtaagccgtggtttgtcggcatttattgcggatatttcaaaacatgggtagccgcccccacaaacactgcatcaacaaatctgcttgtgagattgtttctattttattttccagagaaaaagaacagttatctgatttgttgtttggagatagtaaaattgtcaaaatgccagaggcctctccaaaatccaacaacggaatcaattcatacagtcacaacatgtggccacaacgaaagatattatcaattactactcttgcataatatagcatatcagatttaactaagacgcatagagacagcgaagagtcaaaagacacagaagactcaggttatacataatgattgacattacaacggttatctcttttaacatg

SEQ ID NO: 2493 - DNA, 827 bp, Arabidopsis thaliana
gaagctgggaattggttgataacctagctcaaccagatggtaattacaacgaggactgcgacatgaccatcagaggcacatctaacacggatgacaaacacaggaaggagatcaaagcactaaatgaaaacttggacaagattcttcttagccagcagaaccatgtgcacttccttgttgatgaggagctgtatcaagtccaagatggggaggggaaccacttagaagaagttagctacatcaacaatcaaggtggctacaaaggatacaacaacttcaagactaacaaccccaacctctcttaccgcagcaccaacgttgttaatcctcaggatacggtgtatcctccacagcaacaacaaggtcagaacaaactttttgttccctacaaccaaggttttgtttcgaagcagcaatttcaggggaactaccagcagcaaccaccacctggttttgcccctcggcaaaaacaaggtcctgctactcctgacgctgacatgaaacaaatgctacaacaactgcttcaagggcaagcctctggctccatggagatggctaagaagatatctgagttacacaataagttggactatagctacaatgatctaaatatcaaggtggaaacactgaataccaaagcccgatacttggagggacattctacatctacttccgctcaaaaacagataagccaacttctaggaaaagcaattcagaatccaaaagaatatgctcatgctatcactctacgcactggtaaagcacttccaactacagaggaaccaaagacagtcactgaggataatgcagatcaagatggagagaat

SEQ ID NO: 2494 - DNA, 1312 bp, Arabidopsis thaliana columbia
acgtttgtttgctaagttttttattcttcttcgtaaatctgagtttttgatgataacttatatatccattaatcaattacgagtaacaaatgcagagaagaagcaggttcaatgaaaaaggtcttactatctccaataacaatatctacacatatcatccttcataaaacgggattcaaattatcaatatgaaattaaaaacgtggaggagccatcaattaactaagtgaccttaaggagacacacaaaaagacacaaagcataatgataaacatcaagcagaataagattttacaatcgaatattcaaactttagtgattaatatttttttacggtgccacattatgcgatcatttgaaacataataatatgtccgatctccataacttaataaaaaaatcagttaacgcaacaattgcctaaggcataacctattttgtaccttaaactgaacctaatcgagaatcttcagatcaaaccagaaaaatatttactgtagtcaagttcaagttcaaacttgtacattaattcaaaaataaaataaaatcgagttgaatcaaagcaaaccgataaaccgagttgaaccaaaatctgaccgaattgaacttgaaacggcgtcgtattggaaatttaagattagaacaaacgagtgagaagaacagagcaagaagaagaacagaacatgaaatcaccaaaacctccgaatctctctgataaatctcttaaacccaatttcttccacggacaccgtaagccgtcacaaaaccgcccaactgtctacggtggtctcttctccaaccgccaatctatacccagagtctcaccccaaccacaatccaactccctcgctcaccgaacacctttcgatctccgcaaatgggatccagaaacccatctccctcctccttctccgccgtcacattccacggtgatctccgccgcctccgagcgtctatctccaatcgcgagattcgtcctcgacgcattccgtgagaaccgtaaccattggggtccctcagtggtctccgagctaaacaaactccgccgcgtcacaccaagtatcgtcgccgaggttttgaaactaggtaacgatgctgcagtcgcggctaagttctttcattgggctggtaaacaaaaagggtataaacacgatttcgctgcttacaatgcttttgcttattgccttaatcgaaacggacattttcgtgctgcggatcagttacctgagcttatggattctcagggaagaccaccgcctcttgataaagtcttcacgcttgagaggcttggtaaaaatatcggctacttggg

SEQ ID NO: 2495 - DNA, 859 bp, Arabidopsis thaliana
actgggagagccaaacaatccttccaagcgcttgattgataacctatactcatgaccatacacagagaattgcaagaatcccaatccttcacaatccaactcatcagaggtcataccttggtaaagctctacttggagcgtggagaggaattgtattgtctcatcttcatacgctacatacggataagccatcagagtgtccagatgacaactctggtataggtgctgaacatcttccaataatccgagttgtgcaagtgaggtcgagcaaggatacctcgtgctacataactcattcagcttgaaaagcctaacatattcctcagcaggtaatacgtcgggcttgtgcagaagtttggtagctctgcgagtctgttcaggcatgtactcgtcttctagatcttcgtctataagctcatacctctctgtcatcgctcttttccctcgggctatctcagctttccttctgaagctttcatattctctctagccttgaagatgacgactctgtctcatccatgttgtagtcaggatcaacagaagaactgccactgtaattgctcataattctcctgtagagatttagaactcaaagctcaaatgtcaatagcttagtctcaaagatagcaatgaaaccaaaattgttgtcaataggcaatgaaatagattgaattgatcgagtacaattctgtactcgagtaacctaagctgttcctgagctccccttagacgaattggatcgagtatcttctcagaggtcgagtgggaatgctacagtaggtcgagtgaatcgtggaggtagagtgagtcgtgaagcctagaggtcgagtaacttctctgaagttggaaggctctgttg

SEQ ID NO: 2496 - DNA, 880 bp, Arabidopsis thaliana
tgtccaccttgcattatcaggtacaatactaactgtgtgttaagcagaaggggttgtatctaattatttaacttgcacatatattttaggaatttgagcatttttccgggacctatgttcgagaactttacagacgagtcgcgttcaaattctcaaagagaacatagttttaatcatctgtaacttggaaaagatttttccaccatcattttttgatgttatggaacacttacctatccatctcccatacgaagctgaattgggtggccctgtccaatataggtggatgtatccatttgagaggtttttcaaaaagttgaaaggaaaagcaaagaacaaaagatatgctgcaggctcaattgttgagtcatatatcaatgacgagattgcttatttttcagagcactactttgccgatcatatacaaataaaatcaaggtaaatacctttatttatttaacaatttgctatactacttcgatcttaattaaattatatgtatcaggttaacaagattcgatgaaggtgaagttcctgtatatcatgtccctggagtacctaacatatttatgcaggtcggccgtccaagtggttcaatgcatgtagaatggcttttagagaaagattaccaaaatgcacatgcatatattttaggaaattgtgactattttaaaccatttgagaggtatttttaatcactttgatttattcataggtaagatcactttgatttatttgtctttttttgttgagactgtatgttcgagaattatctttctgcgaaatatccatccttggccgaaaaagaactctacgtcagaagagctgaagaatatcatctatgggttaaagaatatgcaagtctacaattaattttggt

SEQ ID NO: 2497 - DNA, 1468 bp, Arabidopsis thaliana columbia
caatgtcgtcgcaccgactcgccactgcctccgccactcgtaatctccccagacccgaaaccacaatatgtaatattagtttcgtcccaagcgtcattcgaaccgacgacttctaaacttcgcctaggatttttatcaattgagctaacaacacttggtcatctttattattcttttgtttataaaacatttcttcataatcaaaacaccatttttgaatccttaagttattaattcattatgcggaacggtcaaagggaaactgaacttcaaactcaaaatggtagtagtaattatatctttgtctttctatatcaaattgttgatgttctgtctcatgtcacaagatagttatgacttatgaacatgaaacatttggtactaaatacgacaattttttctttgattattgatataatcatgcatgttaagcaaaatttgattatgaaattttttaggttggaaatgagagactacctcaagtaacgtggcaacggaagttgaacagcaaagtgaagaacccttctgagttcaagatgagtataagagatgttcttcatctggtacattctttttatagttagctaaaatcaaaatgacaaaagtttataagacaaaaattttttttttgatgtttggatattaaaacttgtggcttttttgaagtttcctctaggctatagattgtggcgttacactaaagaagaggcaaaaaaaggaagagtgagttgctttatattcacaaaaacatttgtcttttgaaacaaattctcaaacgttatcttcttaatttactagttttcgatgtacgatatcttcaaaaagcgccatgtaagaggcgaccatggtgtcccattaggtggaattgggtatgtataaacacatgataagatcactttttttctataagcaacatgttgatcttctctaggaatgttgtaaattttacacaaacgcgtatttttagtggaggaagcatcggaaggagttacaaaggtgaatttcagcagtttaagctcttccctaaaatttgtgaagaagctccaatcctcacaaaccagttctctgtaagtctctcttgtactcacacttacaatcacaaagatatacttacttgttgattacgttttgataatgtttaggtttttgtgtcgagacccggtggcttgagctactccactgttctatgcccaacaaagccaaaatctgtaaagtaagccacttaatagctttgtagcttattataacagttataacttatgctgtatatgtagaggtaaaacagaggatttaggaatagaatcatgggactggaacatggaaggggacaaatctacctatcatgctttgtatccaaggtcttggaccgtatacaacggtatgaaatgacataattatgggtcattatagatcaaatgtttcagatcatgattccaaagatatagtgaatgtgtcactttggagacag

SEQ ID NO: 2498 - DNA, 1079 bp, Arabidopsis thaliana columbia
gatttctccgcggaactgcgatatctcgtgtcgtcatctgttaaaatttgaataaagttagaatatttcaaacagatacacattggcaaagagattggtaagtcaatggaggtgagaaagctgaacctggtttcttcgtcgacaatgtcgtaacccgcttcttcctctttgaagaccgaaagaaacgggaaaaggaagaggctttacgagagtgggcgagtcgggtcgggtaagaaaaggttaatcggttcatagaattgggtcgatatagaagtacggtattcgtcacccacatgatcggagagctagactagacggaagagagagaaatacgtcggcgaagcgaaaataataaaatttgaggcgacggaaaataataaacttgtaagcacgtgacactcacgtgctcaaatactgagtgatttcctttttaggaatgtgacaagtttaggcacttttagaaaattttattccatttgaggcactttgcagagatgaggcattttttcaactttttcatcgaatttatgacaaatttgcccctaaaagtgaaaacgaaaatactttagcgtttggaagttggtatatgatgagtgggtcgttggatggaagttgtaactattatcagattatatatataatttaattactcaaaaaagtataatgaatattctttctctatttgtactttttttcttcgtcttcttcatcgtctacttcttttttcttcatcgactcttcttttctttctttatctatctctttcttcatctttcagtctttccttgcaaaatcaaacatgagagactttgtcaaaatcgtgtagcttctatatttccctttacagagaagcctctctagatttaagtgacgattaggcttattcgattggtttcggagcggcagcgcttgtgactaacgacggaagcttgagtgtatcagacaataacatctagaggtgaaagaagaaaatttttgttccctcaatcttacaaccaatcgatccaggttttgcgatgattcttcaattctacgaatagaatttagagttttgttagattgtgtaaatatctgattca

SEQ ID NO: 2499 - DNA, 1395 bp, Arabidopsis thaliana
tgaaatgaagtttgatatcaatgatgttatgaagaagccgacaatagaagaacataccttcttaattaaggaagtggatcagctagctggtgcactgctagtggaacttgaagaagcaaatgattcaaaaactgttttgaccaagaatggtaaagatgggtatctccctagtgaaactttgagttctaagaattcattagactcacaaaaggcagcagttgactcagaggtttacaagggcttgatggggtctgacacaaatgttatgaaagctaatgacgtaagttcaacacatgctcgaccaactacttccaccaacaactcgaagaagcctccaacttgtcccgaaagctcatgctcgaccaaacaactcaaggcaagcactcagatgtcagatgattggttagaactcaaggagagatctaaatggcaagacaaagccatacaagagttaacacatattgtgaaagagctaaaggatcaaatcaaggagctcaatggaaaagccaaccaagtaccactcaacatcaaggacgcccctgacgatggagacctgtcaagaaatcctaatgagtatgatgatcactctactaaagaaggagaggagacctcatttcctctctacaacccaccgtaagcctaatgagtatgagaagtcaagcttaaagacatacaacaagctcacttgggagcaaatcccatgtctatctttgtacatatctttattttccttgttgtttttgatgcatttggttagtgttttcaggagataagtataaagagctgagtgaagtggattctggctctgagagtacaacactatactcgaccacaaagcaatgaaggatactcgaccatgttctagcttatccacgccaggagatcactcgactgcggtgctggccgcagcagaagaatggaggtcgagtatactcatggcggtgctggccgccatagaggcactgaggtcgagtacccacatgcaggagctgagacagaacagggcggctcgtctatggcctgggagcaatcacatgcagccattgacgaccaacttcgttcgttcttcgagtgaggtaagcgtctcacttcaccattgtattatatcatctcttgtgatttgttcttcattttgtttctgtgattggatttgtcctgagtactctcttccaagtttattcacacagtggactgtgtgatttaagtttgggggaggtctcaggaagtgtgtgttgcactgtgtatatgttttagtctgcattcatttaaggcatagaaaaaccaaaacaatttgaaaaatttcagaaaatgatttcataaaaaagagtgttaatgtagttgcattacatttaggatcgagtcgagagtgttgcatttaggattgttgcataagca

SEQ ID NO: 2500 - DNA, 1006 bp, Arabidopsis thaliana
gaattccaaagtcagatacttagaagcataatccgcatctacctctgctcccaaagttacgggacttccagggaagtcaattagaatcccaaggagtatgctaatgttcatgctatcaacataaggagtggaagtgagttatccactagagagagacccaagtcagtcactaaagacagtgcataccaagatggggaggatttcagtctcaataaagatcaagttgactagtcactcgagcagccactcaactagtcacttgagcagccactcgagcagccactcgacctctcactcgagcagccactcgaccagtcactcgagctcccacttgaccactttactcgaccgaccttcccagcaacatcacaaactgctctgaaaccagttgctgtcaaaaacaaataaaaagttttcattctttatccttacaagcccccacttccatttcctggtcgacacaagaaagaattagaagataagtacagagctatgtttgccaagaacataaaacaagttgaaggcaggatacgtcttgttaatgctctaacgcgtatcctggattcccaaaagttcctcaaagacttgatcatggagagaattcaagaggtttagaaaacaacagttatgagccatgagtgcagtgccatcatagatgagaacgatgtctcagaaaaactaggagaccctggttcattcactctaccatactccctaggttcattgactttcaataaatgcctttgtgacctaggagcgtcagtaaatctcatgccactctcagtagctaagaggttgggttttaacaagtattaaaaatactgcaatatctccttgatcttggctgataggtctgttagactacctcatgagttattagaagatttgcctattagattggaaatgtggaggtgcctacaaacttcgtagtgctaaacatggatgaagaaccaaaagatcccttgatattaagaaggccctttttggctacagctggagcaatcat

SEQ ID NO: 2501 - DNA, 1014 bp, Arabidopsis thaliana
ctgagacttgtatatgtaccacaaataatgtatgaaaattgtgtaccacgaataatttagaatgaatgtgtatcacaaactttattctatgtatgttttgactataaataatggaatcgtctctcgatatctcacaaatcaatcttttctattattcttctttgcttcaactacaaaaacaatctttcccttaattgttctttgcttctaccacaaaataatcaatcaccaaatctaccaaataatatggcctcttcgtcccgtactcccttagacgatgccatggaagaaagctttgatcaattacttgatcaacaattcgaaaatatgttcgtcgaattgtctaatagcgaagaggtggccaagaaaaataggaaacgagcttattttgacagaaaacgcgaagaaggacacgtccttttatggaacgattattttagtgataatgcgatcttcccacttcaaacttttcgccgccgttttcgaatgaagaagccgttgttcttgcgtattgttgatcgactctccagtgaactcatgttctttcaacatcgaagagatgctacaggaaggtttggacactctccaatacaaaaatgtacggcagccattcgtttgctagcttatggctatgcgtctgatgcggttgacgaatacctccgtatgggtgaaccactgcaatgtcttgcttggagaattttacaaagggaattatttctttcttcggagatgaatatctaagagcacctacggccacaaatttgagaagactactcaatatcggaaagatacgcggatttcccgggatgataggaagtctcgattgtatgcattgggagtggaagaattgccctaccgcttggaaaggccagtatacacgtggctctggaaaaccaaccatcgttttagaggcgatcgcatcacaagatctctggatttggcacgtattttttggacctccaggtaccttaaacgatataaatattcttgatcgatcaccaatttttgatgata

SEQ ID NO: 2502 - DNA, 811 bp, Arabidopsis thaliana columbia
atgattcacacagccttacgcatgactgctcttgttagttctaacttctaaacccaattgatctcttatgtagggtccctttgacacatttctggtgggtggggatactgctgaggttaacgatataaaattcagcaacgatgggaaatccatgctcctaacgactacaaataacaatatctacgttcttgatgcatatcgtggagagaaggtaatcacgttctctatctttcacctgaagaagacagaacgttaggtttcaagttggtaaaagacggtatgttattttgcagaaatgtggttttagtttggagccttcacagggtacacccatagaggccaccttcacaccagatggcaagtatgttctgtcaggtaatacgcgttcctagatgatcttttatcatgactcatctacacaatattcaaatttaatcagcttagttttctttttcggatacaggttcaggtgatggaaccttacatgcgtggaacatcgagaacccatctgaggtaaagtgcagaataatcaacaccactaggacactgattcacttaaaagtgatgaataatttataaagttgtagatactatttttgcgttatgctttcacagtatttaaattttagtggggattttgtgtaaaaagcaggtggcgaggtgggagaacaacataggagtagtgtcgtgtctgaaatgggcaccacgtagagccatgttcgttgctgcttctacggttctcacattctggatcccaaacgacggtgaatcaccagcccccgccgatcctcctaccgatcaacaacagtga

SEQ ID NO: 2503 - DNA, 595 bp, Arabidopsis thaliana
caactctaagagatgggccgggtgaggcacgtgtctcacgtgctgaggtagctgcgtgcagagtagggtgaacgtcgaagccacaaggcttacactggtaatagagtccctcggctgattcgtcgcagatgtcgcacatacgtctgttttggtgcgtctgttctggtcccttaaagactagccggagctggtgctgtggatgaataaaggtggcgagggtagaggggcacgtggcacaatgatcgtgaagattgtagtcacaccgggtgcaacggtaggtcttcccaaagccgtaggttttgcagccatcgcatgtgaactcaccatatccgtcgaccttcgttaatgaatggatatgggtaaaatgttggactacttgctgttctggcctcgacaaagacatctcgtgttagaggtacttatatctcgtttttttttttttttttttctttagaaaggttaggatttaggaattttatagaccattcccaagtatttttgtaggattgtttgggaaacaaccaagaagttttgattagttttcgttacaaaatataaaatttggttagcgaatttcagataaataataattttt

SEQ ID NO: 2504 - DNA, 951 bp, Arabidopsis thaliana
actatacatggcacaatcgtacagataaatccaaggtcactacaaagtaagtttctttttcttctcccaataattagaacataactctactaatttgttgtgcttgattgactaaactgtatacgttttcttggcgtagacatacttttgctgcaatgtcatttctagctgagatttttatcttcctttacgttggaatggacgctctcgatatcgagaaatgggacgttgtacgcaacaggtgagacttagagtgtgataatacatcaatatcttttgtttcattttcataatattgtttaacaattttggcagtcctggtcagtcgattggagttagttcaatacttcttgggcttattcttctgggtcgcgccgcgttcgtgtttccactttccttcttgtccaatttaacaaagtcttcaccggatgagaaaatagacttaaagaaacaagtaaccatttggtgggctggtctgatgcgtggtgcagtgtcaatggctcttgcttataaccaggttttgatccgtgaactacaagaaacaaagataaaaaagtgatctttgggttttaataagttcccatgacttaatctcttctctctgttacatcatagttcacaacttcaggacacaccaaggttcttgggaacgctatcatgatcaccagtaccatcactgttgttcttttcagtactgtggtacgtttcaacactttgttcaaaccggtttgcttcctactgaagtcaaatcgggtttagcctatccaacacgtaacctaatctctaaccttttttgcaggtgtttggattgctaaccaaaccgttagtcaaacatttgcagccttcatcaaaacagtcctccacgaccgcgctgcagatcacactaagatcttctttccacgatccgatcctccatgagccgttgctcagtcccaaggccagtcagaatac

SEQ ID NO: 2505 - DNA, 966 bp, Arabidopsis thaliana
tataatttgaaattcgcgcagttgatttgtacagtagacttaaaaaatataagttgtatgatgatagaggttttgaactgatggtagacataatgcgtatgtaagtctgtctaaaaaaactaatgcatttgattataaagaagtttaggccgttaatgatatgtggaacttgaagaaacagagtgtctgaagttcaacaggcgtgtctgaagcaacacagagcagaacaaaggaacagaggaagcggaaaagaagcagttgcttttgccagcgtggcatgttgattggagtgaagaaaaggcgtatcactttagacaaaggagacgaagtcgtcagacagaggacgtgggcctagtgtcaagataatgatgaggagctagacttggaccttctagataaagtggagcatcctgccttttccgagaaactacataagagaagtttcggtctcttagtagaacttgttcttgtgggttttattggtgagtgaacaaagtgagcacacggttgttgttgtgtttgtgagctgggtagttttagtatctgacatgagcaaatcaggttgttgatgttgcgtaacactgtccaaagttatctgtgattgatcagtttgaaagttgttctaataaagtgtgtttattggagttgtgttctttgtcttgtcaaagtacttagagttcttttactacaattggtatcagagcgggtaaccaatctgagattagtatatctgaacaggttagatcctaattatggaaccaacggatgttagtactggtacaggcaaggttttactgctagatactaagcggtatggatactggaaagtttgtatgacacaaatcattagaggccaaggtaagatgcttggactgtagtagaggaaggatgggaacctccgtttgatctaacagaagatgggttcaaaatcactaaaccaaaggcgaattggactgcagaagggga

SEQ ID NO: 2506 - DNA, 597 bp, Arabidopsis thaliana
tcgaaacttgaaacataggaaacaggaatgattctattacacatagttcagcctcgtacaacacagcagctttgtgtttcccttatttagcttggacgaaagaagaataaccacaagtttataggtgctacttaccatggttggcaaagaacccaccattagtgtggcagcaaactttaagcaggtcacagggtcatatttggataggagaatgccaaataacatcgtcccagctatctatttaaggttacaattatgtcaattgatgaattactggagttcaaaagttcaaagggcataaagtacatagattccatagagaaaattactatacctcgcaaagcagatctattctgtggagaacagcatttgcttgagcaagagcgattggtctgtttatgccggccaactaccaaatgataaattaattacttcagtcggtttatcttcttataaaaacaggtattctatggcatcacaaagaaagcataccaatacaacccaatcacgttcaatggcgactccagatgctattcccatagactgtcaatggccctgcgaatacaatgcaaaaatcaaggctgcagaagaattgat

SEQ ID NO: 2507 - DNA, 837 bp, Arabidopsis thaliana
tgtaggcactctctggatatatttacgggatactttcatggcaatgtcctatttgtatggtaaaaaatttgttgctaaaccaacacctctcattctacaacttcgtgaagaactttatcctcaaccttatgctgaaattgtttggagccaagctcgcagtcgatgtgcgaaggtaaatcatatatattatgcattgtatgctcatgagcacatcacgattattaactctctataataaattaaacaatcaagatttaattggtacaaagtaaaatatgatgcaggaagatctatattatccacaatcattggtacaagacttgttttggaaacttgttcacatgttttcggagaatatcttaaatcgatggcctttcaacaagctcattagagaaaaagctattcgaacggcaatggaactcattcactaccatgacgaagccacccggtacattacaggtggagcagtgccaaaggtaatattagcatttttttgtgttaacacaatttattaagagtttgtatccaaatagtaacataacaacgatcctaacacaaaccactaagctacatgtcctcgtcaaaagatataaacatcaaatagaggaaaacgaaagaagaccaaaaaacagtgatgaaacattgtttatataactatattaggtgtttcatatgcttgcttgttgggttgaagatccagagagtgattattttaaaaaacatcttgcgcgagtctctcatttcatatggattgcggaggacggcttgaaaatccaggtcagtctctttttttttttttgacgacgacactatgaacctcaatagcattaatttttt

SEQ ID NO: 2508 - DNA, 1073 bp, Arabidopsis thaliana
ttgagatatcgtctatgaaatctctatagacctcaaacttcctatgttcttactttagggtgattgtcggcggcttggacgacccatgtgccggtacgtggcccaaaaacaaagaaacgtggctcatcagcttgtctttcctagaaaatttagtcccacaagagcaaacccactttatatccccacaatgcttctcgtgtgtcctaagatcagacagaaccgagaaatgcttcacactacatctcctgcacatatacattttgggacaatgactcctcttgtaatgattcttggcgcaaatcacagatttcaacggttgaaacttctcgtgcctctggttccatctacacccgtgttgaggacaggagtagtaatgtttctttaacgagtatcctcctttcttgtcttggctcgttgggctgatcaaggcctcacgtgtcttgtactcatccccgtgcgctctcatgtgcatccttagattagcgtctctcttaaaccctttcccacaaatctggcagtaatgcgtgtatttcgctagtaggtccgctacgtctagctccagtatatcgtagctcccggaacttggtttagaacgatgtttatcttttttagggtttatggtttcggtgttgtaccaatcaagattctggtcgggaaacgagatctgccctctttcttggacaccaaaaaggttggtcgactcttgcacaaaatcatgacccgggtcggtttcttgtcgggaaactccaaaaccattgcatctacggtttgatcattatcgatatcgttgttgttgttgttagatccgatttggagttgttggcaagtatataacatggatgaagcagccgtgatgatctcttgaaccaaacttccgatgttagccacggccaaagacgttgaccccgaggattggttaatgttattagtagataccatgtagaagctgaccagagattggatctgatggactttttcatgtaaggtagatagattgtatagaagagagagtgaaacgtcgtcgtcttccattgatttcgtcccggtcgtggtcacgggattaacatagattt

SEQ ID NO: 2509 - DNA, 1191 bp, Arabidopsis thaliana
ccaagtaaagtgaatcataattcaaagcttaaagggaagatacaaaattacaaaccttggaagacattgttggaagcatggcattacgctctcgtacaagacttccatctctccaaaacgtcaagttagctcgaggaagcaacaatccaggatcggtacatagacactttaacatcaggaccaatcttctcaatcacttcaaatctcaccatcccaccatcaaccaaaagttcatccccaactcttacatctacaccacacacaaagaccaaatgattcctatttcatacgcagtcaccataatattcatctaatgttttcacttccacttttacataaacataattgcatataccttcagcgaaaccatcgtagctaacactaatggtacgttcaggacgagaagaatcaaaagctctaacagtgaaagtccaaacctcaccatcctgtaaaaatgtcatcaccaccaaagcttaaacatctaaatcacaaacacagcaatgtctacatcgaattcaaatcaaaataagaagagattaaacaacctctgctttagctgaagcttcaccaccaagatctcccatatgaatctcactaccttcagtatccatcataatagcaaccgcaaagcctttctcctcattaagcctccgaacactacgaatcacaccgcggtgccaatcacgcgtaccgtgacacatattaagccttgccacattcatacctcccacagcaagcgcctcaagctgctcaaatccacaagtcgccggtccgatcgtacagatcagcttcgtcctcctcgtacttctaaatccattctccttaagctcagcttccgtcacagtatcaacctcaatcccagacgtatcagtcgtaaccgccgtagcgacaacggatctctcatcagacttcacagcaccagtaccgttaggtgagagaagtacttgcgaggatgatgatgaggacgatgaatcgagatccggtgaaggagatgatgacgaggaggctctgatggaagtgtatttggtgggttgttagagggaagcgacggaaggagatagaggagagaggacggttgaattgtgagtgagggagatggagaaggtgaggagtgtgtgaaggagtggagaattgaatagactgagacatggtttcgccggcgacggaggaagagagatcggagaaatcgaa

SEQ ID NO: 2510 - DNA, 1157 bp, Arabidopsis thaliana
ctgaatggtccagcgaccctgtgatcgagtgcgatcgagtggatgtcatgaggtggtgatcgagtgattgcttcggcttctattctcttcttcgttctcagcttgtctggttgagtgcagaacgagcagataggccttctggtgatcgagtggtgatcgagtagttctgatggggtgattcctccggctttgcgattgagtgaaactgagctgctggcttctccggggttgcgatagagtgatttgccctggcagtgctccgaggctgcaatagagtacttttgccgaacgtcattgggcattctgactttcttttctgtttctcctttgtttgaactccaaaagcatccaaagtacctgaaaacaaccaaatatgcaatgcacatgcaatcctaatgcaaattcgtcctaagtatgcaaaacacactaaaacgactcctaatgagatgaaatgtggatgaaacaatgacaaagtggtgaagaatgaatgcctaaatcatgcaaattatagacatatcaaagatgaaggctgagcctattgttcgcgctgaagtattgagttgagctgctttccgcagcgtagtgtaattgcattgatagaagcggatgtaggtgaaagattggagcagtgagagcgtagattgtcaaaccctgtggatagagaatcatatttggtatggagatcggttgagagagagtcatattggcttttaagctccattctgggttctgatgagggtggagggtgggctaggataggaggagagattgctgaaacatgagtctctttgcacttggtagctttctcagctgaaattcttcgttctttgtcaaattactacgtcgaatgaccagttaaagcattggtgattaggattaatgcttcactagtggttcttgtcatgaagttacaggagcttgctgcatcaagttgaatctggtatggcttgtctattcctttgtagaagatgttgatgagttagctctcttggaaaccatgttggggacattcacgttgataggtcctgaatcggagccaagatgctttaagggattctgctggagcttgggtgaacgaagaaatttgcaaacgaatttcctctatcacgaactcatcgaagaaatgattcatgaatgcattctttgtatctgggatc

SEQ ID NO: 2511 - DNA, 779 bp, Arabidopsis thaliana
gatggagtcgcatcactttcatcatccacgctttcctgaatgtccactgaagagcacgtgagggtagtggagtaggtttgaatcgtttcaccattctctcgattatggcgtccttctcttccgaggtggattgaatgagatggcgagaaccagcagaatggttgaattcaacaatagagacttcaatctgagtagaagcctctccttcttgaacatcaatgtccccagtgattaaatcaaggacaggtcgagttggcagctctcgatcatgacagatggtgatggcgtgagtagttgcatactcctttggattctgtcttgactttaggtgcagaggtagatgttgattgtccttccaaatatctgactttggtattcaatgcctccactttggcattcaggtcattgtagctgcactccagcttatggtgcaattcagataatttcttaacaattttcattgagctatatgcttatccctgtagcagctgttgtaccatctgtttcatttcagcatcatgagcaacaggaccttggttttgctgaggtgcaaaccaggtggtggtggctactggtagttcctctagaattgctgcttgggaacgaaaccttggttgtagggaacaaaattctgaccttgttgttgctgtggaggatacatctgatcctgaggattagcaacgttggtgctgcggtaggagaagttggggttgttgggtatgaagttgtcatatccattgtagccacccctggctgttaccgccccatctgggacttgt

SEQ ID NO: 2512 - DNA, 374 bp, Arabidopsis thaliana
cgccagtgtgctctagtgtgctctaaaggctgatcaagcaaggtttggtgacagttaacggacaagtggtgcgtgaactagcaaccactatcaagtcaggcgacaaggtcgaagttgaaggtcaacctatctacaacgaagaaaaggtctattatctgcttaacaaaccacgcggtgtcatttccagtgtaacagatgacaagggtcgcacaccggtcatcaactctataccaccagtcgcatgaacattggtcatatccacaccaagctgagataggatcttcatggctgacttgactgtattaggaatgtcatgaagtttgagatccaaaaagacactatgacccaaaccttttaagtaggacacaatctca

SEQ ID NO: 2513 - DNA, 1404 bp, Arabidopsis thaliana columbia
cagccatttaaaacgctatagagcttgtcttatctgaccaacttctatttttcacttcgcaactttcatcgcacctacccttcctactgctgaattcggcgaattcttcaagattatcatcgaaggaaaaaccctttggaactccttcactctcgaccggttcatagaagccaaccacaagcttaggatgagcccccctggacatctcctccagctgccactgcccccttctttatccaaagggacttctgctcgggccatcacagctcgacgcaagacaatgtccaagtcgattgtggaggcttgcgaagtgaacaaatcattcttccaatccacagtcgacaaaaaggaatatagcagaaccttgctagtcaacgatggcagtgccgaatgggcaagatctgccggtgcttacagacccactcctcaccgtaaaggtcacagcggccggtcatcccacaaggagcgatcacctcgctgtgactcaccttggcccacttcccaaactggactctgcagcgagccaattgctgacctgattcggaagaagagagacagaccaacccgcagaagctcctcccccaaaagagacaagacgagggcccggactgaccgctctcctcggccgtcgctgccaccccgatctatgggccctcctcctccagtcaccgtatctccttcgtctggatcaggaggtgaaaaggcagagcggagacagatccgagatgctggaactaaagctgttttggttcctcagaccaagtcgctcacgggttagaaatttcctcccatttttattattacattttttaccatttcgacttattgacttagagttccttgaccggtccgaccttctttaacagcgatggaaacggagggaaacgtctttcaatgtttcaaaaccggaaaagacaccatcctgccagccttcgataggtggcgtcctgcaatttgtgaacgagtcctactccatgcccatcactcatctcgagttagttcctttttcccacaatagatcttttaatctttgctcctttactctgtcgctaaccccttctcgttgttatctgattcaggcgaacagcgaactcaacgacatgattgagtactacgaaaagctactacttgacagggaaaaaatgttatggcgtgaaaagataagtcttcgtcccttgagtccaatctccgctcttcaaatgacaccaggctgaaattggaggatcaattggccaacctgtccaccgaactcatgaagtccaacggcgagctgcaggaacagtaccaaaggtacgataaaatccaagaagaactctcaacttctcgggacagactttcggaatcctaatccagtgcctacgaattgtccaaccagatgtccgaattgcagcttaagtacaaagc

SEQ ID NO: 2514 - DNA, 803 bp, Arabidopsis thaliana
tgcaaaccacttagatgggagtgcatggaacagatttttgattgaagcaagggttttcttaatcaaaaaccaaggatgatgccagtttttatccttgttcaggagatgcgagatggttcctgttagcattcgggtatgccgagaaatacccatttttctttgatgaacttctcatggtgagaagctcgttcagttcagggaccccgataacgaatccggcttccgccgcaatagttatgatcccaaagatagttcggaggaggttgggggttagttggggtagagcaattataagagcatctaagtaacagaccaaggccttgggaagagggaaggtcaacccgcagcccttgaaatagatcttgtaaacgcataaataaccagggcgagggtcttccggggactcaaaggggccatgcatctctgattccgccataatctcaggcagaatctggtagagatcttttagtcgttcgagggattgaagggtacagatggatgtgtagtgtggaccggcgatatcgttcaggcgagtgcatatgtcattgttagaaccccctcgtcgaaagcggggattcgggtctttcagtatcaggattcatcgaggaaggtgaaaaaattaagcgttcgaagaagagaaagttggcagaagaaaaaggcgagaaattttattctaaagaaaaagcggaaaagtaagaaagaggtaaatgaatttacctacgcaagctggtggtgatgatgaaccgcctcgggagtcgtggaggaagcggaaggattttccgctttaatagtaataattaaga

SEQ ID NO: 2515 - DNA, 1081 bp, Arabidopsis thaliana
tcaagcccgtaatcttcccgaaatttggagttcccaggattgtaataagtgatggtggaaagcatttcatcaacaaggtttttgaaaatcttttgaagaagcatggagtaaagcataaggtcgccaccccttataacccacagacaagcggacaggttgagatctccaacaaggagataaaaacaattttggaaaagactgttgggattacaaggaaagactggtctgcaaagctcgatgacgcattgtgggcttataggacagccttcaagacccccattggtacaactcctttcaatcttctctatggaaaatcatgtcacctacctgttgagctcgagtacaaagccatgtgggcggtaaaacttctgaactttgacataaaaaacgctgaggagaagcggttgatccaactcagtgaccttgatgagatccgtttagaagcttatgagagctctaaaatctacaaggagagaactaagctttttcatgacaagaagatcatcacgaaggatttttaggttggtgatcaggtgctgctattcaactctcgcttgaaactctttccaggaaagcttaagtctagatggttgggcccttctgcatcactgaggtccgtccttatggagcagtcactctagctggtaagagtggagactttacagtaaatggtcaaaggctcaagaaatacttagcaggccaaatccttccagaggtgacatcggtcatctccaggaacttcttgatgattaaaggagtaaaggagtcaagctaatgactttaaacaagcttacttgggaggaagtcccatgactatctctgtaaataatttcttattttctcgttatttcttatttgtcttggttatgtttgtggttctcaggaacaaaggaacaatatggagatagagtaaaaattcaaaacttttactctacagaagacctgaagatcgagtgtacagcccgttggagtacaaaatattgaaacatgtgtgttgcacctcgagaccgtacattcgccctcatcgctcttcaaacagagtgtgggcctcgcgctgaggatcacctagagagagaatcta

SEQ ID NO: 2516 - DNA, 547 bp, Arabidopsis thaliana
tgcttaccttggttcctgcccaaagtttctgaagctgactgtaagagagattgagttcaacaaggtggcatggatcaaagtcttgtggcaaggattgcaaaggatagttctcccagtggaggagtcttagctcatcaggcagaaacttaagtcctttcggaaggcggaggctataatgggttttcataactggaacaatagatcttcaggaatctaaggcttagcatattctcaaaggcaccaggcttcacatcaaatgttaagttcgatgtgtccagaagtatgccttcgatatcttcagtgccctgaaatataagggaaggagatagatcaagaagttggttcatctccaaaagtaattaagttttgtataaaaatgatagaatatgccagaccagagtacgagtatatgttgctttgggatcttcatttgcttcgagttcgtcatcttcaagaaggaatttgatgctccaaggatctgacagtctgcgacgcctctcgatctgtactgtttctccatcgattatttctcggccaaagtcttgga

SEQ ID NO: 2517 - DNA, 2733 bp, Arabidopsis thaliana
tccccgattgcgatgatatcgaatgaaagaaatatcatgaataacaatatcggagctataaaatcgattcatcgtcaagaatttaatagtataacataggaagatcttttatccacaccgaatacataatgagattcccgatccaataaaaaaaaaagttctttatgattctttttcccggctttcctttctaaaacctagtagtttactttccttgtacaatcatctgatgaagtatcataaaaaacttcgattctttacaaaaagagtttctaaagaaccttaaataaacaatagaaatcaatatagagaaaacaagtacgaagttcaatttgaaataaaaaaattgaaagggtttatcatctttttggaaaacaaagaaagggaatgtgacaaagacgagtcccggtaaaaaaacgaaaatattcaaaaaaaattaacgagttaatttttcttacgagttttttattcgacatcgactctaatctttaaaaagagcctattcattagggaagacacattttatctttattaaaaaaaaacctctttccttggttgaattcgaactatttaaaattccttgacttcatagaaagaaaagtatatataggtactcttggcaaatgtattatacgcgatcctattccattttcctacacgaaattatgggagagcggttgacaaaaagcggaaaccccatacagtatctctttcttgaagtgttgaatgctctcaataattcatttacatatgtttctctaccctagttaaaataatcgaccctttcttttgctttatgaaaaaagaaaaatcaaataaaaagataaatgaaaccattttcatccccttgctcggaaacaaaaaggggagttgatgtattgaatccgccgggactgacggggctcgaacccgcagcttccgccttgacagggcggtgctctgaccaattgaactacaatcccatggaaataaagcgggtagcttacatattccttcttatgatttcattttaatcatttcaattttaaattcaaatttttgttttgtaacaaagaaagtcacaagtgatatattgatatctatatggatatcactttagtgagagcaagacggattactgggtaatccttacattattatcaaatcaattgataatctattttttacaaaaaaatagattattttatcgactctgttcattaaagtttctctttaaaggatccatatcggaatccttagcaagatcaagatcggaattttttatggaaaaaaaaagtaactaaacataagaaataaagaaaaaagtaaagtcgaactataccctataccctgaaatttgacctttttttcttaccccttctctgtcatttatgcaaaaaaaaaaaaatggttatgtagacagctaattattgggccgagctggatttgaaccagcgtagacatattgccaacgaatttacagtccgtccccattaaccgctcgggcatcgacccaggaagaatctattctaactttatggataatccatgatcaacttcctttcgtagtaccctacccccaggggaagtcgaatccccgctgcctccttgaaagagagatgtcctgaaccactagacgatgggggcatacttgctcaaccgccatcatactatgatcatagtatgatcagtttttttaaattgtcaatataatgaaatgaaatggtatgactagcttataaggttttttcttttttctatagaattctatatcattttttttttacatttgtattcatattctaatcataattctataacaaataaatatactttctttttatatttgaagtggaaatattaaaattaaaaaataaataaaaaaaaatctaaaaatcgtctagtacggaatcttttcaagaagtgattggtctaacataaaaaaaaaaaagaaaaaaagagggttaagtttcgttttttttttactttccttgatagattgcctcatctcattgttaagaaatagtagtatccctgtctaacactaatccaagaaagtcagccagaatccatcttctaattagggaaaaaggtggatttataagttaagttatcaaaaatttgctttttttttttttagaaaattattgttcagaggataatccgtatctcttcatcacatgtcaagataaaatatcttgggtgtatgtcaacttgctgagtacatgtataaatcaaattaatttcgttcgatgcgctaggctattaaaaaaaaattcattgcatggatatttatcaaatccaatattaaaaaagcaaaaaataccccgttaagtaaatttgaagtcaattcaaattctcatttctagttcccaaatgagctactaaccactatgcgtctattgtatatatgggggatatatatatatatatagattttatttactaccggctcagtcaggaattaaaccaagacggcccttttaactcagtggtagagtaacgccatggtaaggcgtaagtcatcggttcaaatccgataaggggcttttacgttctttactttctaatagtcaaaatttcatttgaaagtctataatttaatttcaaattttgttaatttcattctaataaatttcattctaataatataataactaataataaagttagcgagtaatttaaaaaataaaaatgaacatttgtatattataatacaattacaatgaataatgataagtcgtctcttgaatc

SEQ ID NO: 2518 - DNA, 844 bp, Arabidopsis thaliana
gaccgggatgaggacgaaccgtgcgaccgtgtctggttattggaaggcgaccgggaaggacaaggagatctttagaggcaaaggttgtcttgttgggatgaagaaaacacttgttttctatacaggaagagctcctaaaggtgaaaagaccaattgggttatgcatgaatatcgtcttgatggaaaatattcttatcataacctccccaaaaccgcaagggtatgtcaaagtttaccactctttttgcaaaaatatgattcggtttaataaaatagatccgagtttgatgcatacaaaatttgtttgttgagaaatgtttatctatagttcgttttttttatatatgccttagttcaagaataatccaaaacatgaaacttaattaggaacttaattaattagtaatctaaatgctaaatttttttttgtttgtgtgatggttataggatgaatgggtggtgtgtagggtttttcacaagaacgctcctagtactacaatcactactacaaaacaactctcaaggattgattctcttgataacattgatcatctcttagacttctcatctctccctcctctcatagatccgggtttcttgggtcaacccggcccaagcttctccggtgcccgtcaacaacacgatctcaaacctgttctccaccatcctacaaccgcaccagtcgacaacacttaccttcctacgcaagctctcaatttcccttaccactcggtccataattccggatctgatttcggctaaggggcaggttcaggcaataataacaaaggtatgatcaagttggagcattctcttgtgagtgtgtccaagaaaccggtttgag

SEQ ID NO: 2519 - DNA, 1127 bp, Arabidopsis thaliana columbia
tcttatgcctctttctcgtcctccgatgggaatggaaagcagcgtgagcaagagaacgccgctggctcaaatccgtcgtcggacaggcacatcgggctgtcggagtcgagaggacaaacgctggaagctccttcgttctccatcattgaagtatttaccaagtaaatttttgagatcatgcttgaaaaatttagtgatagttcgtattcttatttatagagagttagggttttctttggaaccacaaatttaataattgtggcgtgtccgaatggtttagaccatctctggaactcgcgaacaagcaattattgcctcaaaggcgtgaagctttttcctgtttcttgagaagggaagtggcaaccatcacattaaatacaaaaggctcattaagtatacagaagaatagttaaggcccaagcctagtaaataaacctaattgattaaacccgaggtggggaattcgcaaccaaaaatgagcttggttctcacgtttaaagagaaaagtctgatcaacctgaaaatcttgaaacttagccacatggccaacaaatacttaaaggaacggattttgcaaatccgctttctataaaacacaaacttgggatcatagttatgaaggtttaaaagcctcctcaagcaaatacttgttcgaaaatgaagcatccttaggcgataaatagattagttcaaaaaataactttaagttttggttatttgggacaatccccatgaaaaatggacgcatccattacgaatcaccaggcgtctcaaactcggcgacagtcggttcagggtggaccgtctcagcggctgctgactctagcccagtcgtttcaccaatagggggttgcttagtagaggtctccagttcaaacccggaaatgtcctcatcattcgcgatgatcaccgtttcgctatttaccaccaaagggacttcaggcaagatgggagtaggctcgggagttttcaccggcatggcaaccatctcgggttcagtgggcaaacattttgaatcagaaaaatgcgagtacaactagtttcagattgatattgaagtttcaaacatcacaacttaccatcctagtctaaacctgactcactcaaaggaggtcattctgtagaga

SEQ ID NO: 2520 - DNA, 1802 bp, Arabidopsis thaliana columbia
gagagatggtgagggaagtagagtaaatggggaagacgacaatgttagaaggagaaaccccaacggtgtgatctttatgagcatgagttaagaaatgatgtctctttcttctcttcgtctccgtgtatggtccaaaagtgtcgacggcaaatggtaaacctcttggcatctctatcgacatcacggccctctaacgccggcgacggatataaccaatgactagggtttctgcttccgccgataattttagagtgaaatgtgattctggttgctttctagggttttgggttctccgattgatttactctgaagaagaaccacttcagatccggcggataaaaattgtttctgcagaagcgagggaaaattaccctccgatcttaaaagtaaaatttataaaattacacgttatatacttcgaaataaatcgtttcttatttttatatatttatgatttaatcgcataatatgattttgtctaaacgataattcgttgttattatagatgtaataatttaaaaattaaagagaaaaacaatttaattaatccatgaacccacccaaactcgaacaatttaccacagtaaacaaagcattcaaatcaaacaagcttagaaaaatatagatcagacataatacagtatttggcaagtgaataaattactaatactcatatacaaaggagtttacagaaatctttattgtttgtgtgtggttttgtgatacttgtccttgacccaacgaaaaccaatagcagaaccagtcttgagcttcttaaaaccagaagaagctacagctttggttttgtctaacccttgtcccattttctccttgtacttggtcgtgtttgacgttgctccacttccgctgcttctcacgacggcgccgctgccgattcggcctcctttggcagagtcgccgctattgtcccactggtcagcccacgatgttccgttcattattgtatatcgtcttctcaaaagttttaaaatcgaaatggaatttgtactttgaagtttatttgtgatgttctctcggttcctctgttttgtttatatacacattcatatttcaagagacgcgttatgtatggtcaaaccttgtgttcgtgaacaaatatgacttctattgatttgcttcttctttaactttattttatatgaattgtcacactcaatataatcttctggaacattaaaagaatctctcgtggaaaaaattgaagtaaattctttatattttatagaatcaagtacacattgaggaaacttcttcaaattccccgagtctagacgaagactcttcaatgttttgacttgacgactctgaagttgagaaactcaagcataacgactattttttttttctcaaggttctcgaacaaatctgattttctcatttgggtaaagaatttaaaatcgaggagataagagaactaataggtggataatcagaaaatgctctgttttataggctctgagtaaaataaacatgatcgtcttgtgctttgggattagtcaaggtatagaaaagtcggacgattaaaaatgtaaccaagtagtgtgagaaatattctaactcaacgaccaaaattagcttcttccattagtttaataagctgagaaatggggttatatatgccaacaatcttacaactacagctaatttctctaatcaaccatttttcccagaagatcaaatggaatttgatgacaggaccttcgaagattacttgtgacttgtgagtcaaggaacatcatcacattggtctgctgcaaccctttcttctctgagaatggtaa

SEQ ID NO: 2521 - DNA, 982 bp, Arabidopsis thaliana columbia
caccgccgcctcacagataacaatgaatctcccaagaatatcgcgaggggtggctcaaagccttatataaagcgccttaagggacatgtaaaagggacacgcacaaaaacgctctcaacctcacgctatcaaaaacgctctgattttaaaggcaaaaacacttattttcatatttctaaacacttgtacgatcaaatcctcattatttcaataatataactaagagcaccgtctgcggtaatcaacaaaaaaaaaaaaaaaaaaaaaaagaaggcgccgtcgagggttttccgagcaaggatgatgcctacactgattacttcttcttcgtggctttgaaggacgttgtccttgaagatcttgtcgggaaagttctgacgaaatggggaattttgggtagtttagacattccgtgaattgacttgtctgtgcgcgaggtgattattgtaatttatgctgacattatttgttgatctgtttccgcagatcgcctgatcaggtttctcgagccgtgtcctgacgatctcatttcctgtcatcgagagctatcggcccgcaagtgtcactggatgaagcacttctcccaagatcgagtcgaaagagcgctcagtctatttcacggcgtttcctggccatccagctcggaatcctccgatcaccgaacgtaatttttcgtcgatatgcagacttctaaacccaccatccgagaagtttacgagaagaagaggcttgccgctgagaggaaacgtgcggctgaggaaagacgtgtcgtggaagagagcggcgctgctgaaacttccgggtctcgggaggttgttccagaggttgctgcacctgcgcgccggatgttgtcgaccaagtcccggctgatcctccggccgaagctgctacacaggcgataatcgcgctccctgcgcgagataaggcccgggaaaacgcccagatcgaacctgcgaggagaagatgaggagaagaagaaaag

SEQ ID NO: 2522 - DNA, 781 bp, Arabidopsis thaliana
gcatgaagcaggatcattctcgagccttagactcctccttccgaacgtcctcccgaaaaggttcccctttccttctcgagaagcgctataactgcctgcacctctcgggttctgccggagagatatgctcattagattgttcccatttgaagcgcagggctctggccgcggcaaacaattcgttctcgccgtacaccgagtctccgtcgggagtagcgctgctggataacgacgggaactggtaccgtggatggtatattgaatcagtggcgtcgaaccctagtttgggtccggtacaagctgcgctggttgatttcgtggctcgtagccgaggcaaaatgttcaataagatcgtccaagcggtgctggtggaaaagaataacgcgagcgtgagtcaagagcgcacagcgaagataattttagacactatagctccgaactgcgatttcaaggtctttcattgctccgtggattgcgcaaaaagactgaagtatcttcgtgaaacctggtgatagatacgttaggggattacactggtcttcattattaaactaatttattattctatcataattatgctttttgtttacttcttggtttggtttggttcgttaaaaccttttagatttttaataatgtcatagaatcataattacgttatgttttcttctccggttcatgttacttttaatttcagtggtgtcaatatataatatattctaattatgttttattttcttctttggttcatgttacgtttttgatataatttcaatgtagt

SEQ ID NO: 2523 - DNA, 565 bp, Arabidopsis thaliana
gcctcgtgtagattcccatcctgagcatacccaataaccatcgtgttccaagaaacaacatctctctcaggcatactatcgaacactacgcgtgcacgcaccaacatccctgatttgacatacccagagaccatattgttccacgaatacaagttcctgagatgcatttgatcaaacactttacaagcatcaataggtttaccgcatttcatgtacattccgattaaatgattggacaaaagcgtgttgggtctcttgaatccagtaatcttcaagtgacgatgaatccatttgccttgtttcaaagactttgtatctccacactgctggagcagagatgctaggaggtcaaagggtaatcgaatcccttgttgagtcaaggactcgagacgagatacggcctgagagagctctgctttcgttgcgtgtttgctgagaaacgattgggcgacacagattggccgtttcctagggttactgatgggcattggagggagaaaccaccatgggaagcgactttaacgatttgcgattggatcccggcgaacacaagtcagaaagggtt

SEQ ID NO: 2524 - DNA, 1141 bp, Arabidopsis thaliana
gaatgagtttgaacttcttatagtttttagccaagtctttgaccacctcaagatatgcctccattcgtgattcttttgcttcatagtcaccattgaactggttaacaactagttgcgagtcacagtaggcgaccaactcatcggccccaactccttgtgccaacctatgtccagcaatcaatgcttcgtactctgcctcattgttagatacagtaaataacaatcgaaatgactgctcaaggatttccgaagtgggagattctaatttgattcccaacccggatccattttttgatgacgatccatcaacatgcaacttccaagtctgatttggcggttgctcctgccctccgagtaccggtaactctgttaaaaaatcggcaaggacttgagctttcatggcaactcggctcttgtactctatatcatactcacttaattccaccgcccatttcgccaatctaccggactggttcgggctatggagaatagttcgatgtggttgatttgataatacttcgattggatgggattgaaaatatggtcgaagcttccgagctgaggttactattgcaagtgcaaggttttccatcatcgtataccttatctcaggatccgtcatagatttacttatgtagtaaattggtttttgctctccccggtcttctcggattaagactccgctaaccgcatggtccgaaactgagacatatagatagagtttttcgtctacctctggtttggacaatacgggtggagaagtcagatacgcctttagctgtctgaacgcttcttcacacttctcatcccaaagaaattccttgtttccctttaggatttgatagaagggtaaagatttatcggtcgacctcgaaataaaacgattcaatgctgcaatccgaccagttagccgttgtacttccttaaaattttttggagatgacatgttgagaaaagcgttgatttgatttggatttgcctcaattcctctctttctgacaatgtagctaagaaattccccggatgggactccaaatgtacacttcgccggattcaacttcatttgatattggttaagaatcgcaaaacactccttctagatgtttcacgtgatcttccttttttaatgaattgactagca

SEQ ID NO: 2525 - DNA, 799 bp, Arabidopsis thaliana
aacaaaactgatgattccgacgaccgttctttctggcaaaactcgacttcttacgatgccagcagcaagattttcctcgtcaccaccgtttccttctctattattatcatcatcgtgttcgtttattatctctacgcaaaattcgttctccaccgtagatcagccttccaagacctctccttctctgtcgtttctcagccgccaaaacgtggcctcgattctctagtcatcgcttctctcccaacgttcgtggttggaatcaagaatgacgtggcgggtacggaatgtgcggtttgtctaagcttattggaggagaaagataatgcaaggatgttaccgaactgcaaacacgtgttccacgtgtcttgcgttgacacgtggctcaccacgcagtccacttgtcccgtttgtcgaactgaagccgagccaagtcatccaaggcttgagcctgagcctagggaagggccagttggcgactttgcaccgccgttagatttcgcgggggttgataacaaaaccggcggatcatcggtttcgaggttagactcgttccggaggattttgacaagggaaagatcttcgaacaggcgggatcattctcgcgttgaccaagatcgtgaattggatattgaaagacagtgaattcagtatatagtatatacacacatacgccggttaaaaaaaaaaaagtataaacacacatgcatccataattaatccttaattcatgaaccataatacttcttcttccttttaactttttattcttgtactgaaatcttttgtatgtgtaaatatg

SEQ ID NO: 2526 - DNA, 540 bp, Arabidopsis thaliana
caaaagatatgggagatattgatcgaactgtggcagtctttgtaaacatgtttatgggttcaatcgcacagcttctttcaactgttatcttgattggcattgtcagcactctgtccctgtgggccatcatgcccctgttggtcgtgttctatggagcttatctgtattaccaggtaacctacatactttttaaacgcaatgctatctacattcatgactacagatcgagacatggaaaactgagaccaaaaggaacactgattgtgtcatatctgttgtgtcataacctgatttttccttattgtagaacacatctcgggaaattaaacgtatggattccactacaagatcgccagtttatgctcaatttggtgaggcattgaatggactatctagtatccgtgcttataaagcatatgacaggatggctgaaattaatggaaggtcaatggacaataacatcagattcacacttgtaaacatggctgcaaatcggtggctgggaatccgtttggaagttttgggaggtccatggtttgg

SEQ ID NO: 2527 - DNA, 765 bp, Arabidopsis thaliana
gtttataccatttctcatcatttctcatcattttgcatgtttaggatagttttgcatgcatgttgcatatttgtgttgttttcaggtgatttggagttgttgacgagctaattggaagaagcggacctgatcatgtcaaaccactcgaccccttggccgagtagatgcttcacgacctcaagagaccactcgaccccctagtcgagtaccaccatgagagtcactcgatcacatcactcgaccacctggtcgagtatcatcacctccaccacctgaccatcactcgatcacaccactcgaccaaaaggtcgagtatcttcatcaccgtcactcgatcactctaccaccaagccgagtaccaccatctccatcacccgacttcatactcgattgccagcttcagagtcttctccattccacactcaaccagacacttgagcacaaggaagaaaagaagactccagcttatcactcgaccattcactcgaccgccttggtcaagtaccgtttttaatccgtcccaatactgcatcgttttgagtataagggtttcagaatatttcgctataagtagcatgtactttacagtttttataaaagagttttattccgtagacactgtgttcttgacgtttttgtaatccggatttctcttaatctattcagtattcagtttttacttttgattccgtttactattgttcatcctgttatcatcctgctattactctgttgatatcatgttttcatcctgctatgacgtct

SEQ ID NO: 2528 - DNA, 1418 bp, Arabidopsis thaliana
ggcaatgaccttgttgccagatttggtggtaagctgatgaacatccatgcttttttctggtgttatcccggtgaacataagctttccggtctcctcgtctttacccacgtcgtatgttggtggcggtgggaagaaagcgaactttgcagccatgtttgacgtcacattacccatatcaattagtattattgttcagcaaaagggtaaaagaaaaaaactttcaatgagaaagaaggagaaaacaaaaacaaaaacccaaaccccaaaatctctccctccctctctctttggatctaagaaaagaaaacaaagaaaatggttaaatttttgtgtttcgtgggtttatgtttaggggagaggaaggaaataaaatggaaggtgatggtggagaatatttggcgggagaaagaagttgagctgtttcattaacaaatttaatatagattctgtcatatatattaaactcagctacaaatttcaactgtgaataaatttgatgctatatgattttcaccatgaaatgtgatatctcttcattccacaatcaaaattgcaagcagctacagattttagcatatcaacctcattttaacacaaccatctctctctcttttggcacaaacacttgaaacccttcttttacctcacatgaactttctcgggtcagtttggtgtctcattctcagctgtttccgggacttcttccacgatttctggagtgtgtaacaaagggattggactgttaccgcgttcactagtcgagctactgctattgatcacttcactttccattggctttagagaaactttagggagtgtatctgcaggagcaataagtgaatgctcttctgaatgtttcggcttgttcagagctcgacagtgaggacagtagtaagtaatgtatgggaaatcctctttccgggcgagtcctgcatgttgagagaggaagagagacattgtacaattaagttatcaatggtattgcatctagtgtgtattagaagacaaaagacagagataatgtctcactcaccgttatgcatacggcagtttccacagatgagtgcatatgactgacttggatcttcgcctacaaggagagccgcaatgcgtgagatccagctaccatcatgagcagcatattcctgaggattataatgctccaacaccatctgttggttttgttctgtgacggtgattctttcgcttgttccagaatggttagactcgttatccgaatgatcaattggagtggtctcagcgctgttgcctcttgtattagtctgacttcggttcctgagcccacccgagtgtttggcattgttctttcctgcggtaggctcaagttgggagtcactcctacgaatactttcaagcctggctcagcacccaacttggatgccagaacagttgcagca

SEQ ID NO: 2529 - DNA, 1696 bp, Arabidopsis thaliana columbia
gctacctctctttgtgtttcttgatgagatcaactttatggcggaaagcatcttttttaccagtttaaaatatatttcaaagtctttaaagtgtagatcatcacgtgttttgcaaacaattttggtaattaatttactaaagataattttaaaaatctactatcgcaaaagtcatattcatatcatgaactagtaaaatacaacaaaaaaaaaaacaatgaaaaagcagagttaggtataaaaaaacgctatccaataaattgaatattgaagaagattaataagaaaggtgtaggctcgtagtgctaaaatcgaaaagggaatgatccatcatccaagagtgaatacatttaacagaaacagagacaatctgtaatggtaaaagataattagaattcaaacccccaaaacgtataacaatcgtcgtttacgacagtagaatcgcatatttacccaccaaaaccctattgtcttgttgtatagaaacaaaccagaatcaaaactgtaagcaccttcatatattagcaatccatagcataagattacttgaatgagtactcgcatccacaaacacacatgcacacacaaaatctcttctctgtagcaccaacacgactaagccttcttcttagctcactggatcttcctcagctcggtgtcccggtctcagtaattgcagcttcctcttttatttctggagtggggctacttccacgttcactactcgagctgctgctattaaccacttcgctggtctcaatcagtggcagagagtctgtgattggtgaagcggaaatagcaggaagaagtacattctcctctgaatgcttcggtttgttcagagcattacagtgagggcaatagtatgtaatgtaagcaaaatcctctttccgagcaagtcctgcatttacaaagcatattgcaaaattatgttagaaataagtatatagttgaaagattcaggtaaaggatttgcttaaacattcattcaccattgtgcatacgacagtttccacaaatgagcgcatatgattgtgtgggatcttcgcccacaagtagagccgcaatgcgtgagatccaactgccatcatgagcagcatatccctgagggctgtaatgctcaaccaacatctgctggttttgctctgtggtgcctggaaatctctcgcttgttccagaatggtgagactcatcatcagaatgatgtgttgaagtgctcccagaaccgtggggtcttgtatttggttgccttcgattcctcaacccacgtgattggttaacctccatgtcattgctcttgcccgaggatggatcgagttgggattcatctcctaaatatactttcaagcctgaatcggcacccaatttggatgccaggacagttgcggcagctgcctttgcagctgggtccgggtcatatctctgcatcaaaacaattctgttagcaccagctctacatgcagtagttaacctcttcaagtcggcaaacattgatctctctttcgttgcatggctatgccacgcctacgagacatacttaagaaaaccactttatgtatttctattgctatatacaggcatagatgcatgtctctgttggcattaaatacaatgaattccaactgccatgtcagactaagattccaactttctattcataattgctattatcccaaaatatggacaacaatcttcg

SEQ ID NO: 2530 - DNA, 714 bp, Arabidopsis thaliana
gctcgagagatctaaagagcgttgttcaaatttcgtcaccggacgtgatgccggacgcggtacgtaatcattgctctctgacaggtttttataaccgtcaatagaagacatcacttcaagcatatgttccgcataaggttcccagtcggtcgccatatgggctacgccccccagctgcagtttgctttttaccagttcggcaaacggcacctgaacgatacggcgtttattatggcgcgctttgtgccacgggtcagggaaaaagagctgcaccatgcgcaatgaattgtcaggaatcattttatgcagcacttcaaccgcatcgtgacacatcacgcgcaggttgcttaaaccttcttcatgcgcagaagccaggcacgcaccaacgcccggtgaatgcacttcaatgccgaggaagtcctgctcagggcgatctttagccattgccaccagcgacgcccccatgccaaaaccaatctcaagcgtcaccggcgcttcacggccaaaaagcgcggggaaatccagcatatcttcgctgaactcaacgcccatcaccggccagtagttttccagcgcatgttcctggcctttggtcagtcgcccctggggcgcacaaaactacggatacggcgcagtgggcggccgttttcatcaaattccggtgaaatgacgtcgtttttcataaagggttagtcgcttgtgaaagtgtctgaa

SEQ ID NO: 2531 - DNA, 1162 bp, Arabidopsis thaliana
gtgagaaggtaaacaaacgaaaacagcaaaaaataaaataaaatgagtagactgaagttactaaagatttgaaaattttctgcaggttgggaagtttatccagttgattgcaacatttgtgggtggatttgttttagcgtttgtgaaaggatggttacttacacttgttatgttagtttcaattcctcttctagctatagctggtgcagctatgccgattatagttactagagcttcttctcgtgaacaagctgcttatgcaaaagcatcgactgttgttgaacaaactttggggtctattcgaaccgtaagaatgctttcttttcccttttgcaaggttgatgttaaccaagttattgtgtttttttcttcaggttgcttctttcacgggagagaagctagcgatgaaaagctacagagaatttataaatttagcctatcgagcgagtgttaagcaaggtttctctatggggttaggtcttggagtagtgttttttgtgttcttttgcagctatgctttagctatatggtttggtggagaaatgatacttaaaaaagggtatacaggtggggaagtggttaatgtaatggtcactgtggtcgcaagttcgatgtgagtaatatattcatattattctctgtagtctcaacacagttaaaacggtttaaaaactgtggttttctctttttataggtctttagggcaaacaacaccttgtctaaccgcatttgcgcctggtaaagctgcagcttataagatgtttgaaacgatcgaaagaaagccgtcgattgatgcttttgatctaaatggtaaggtcttagaagatatccgaggcgaaatcgagctgcgagatgtgtgttttagttaccctgcgagacctatggaagaggtttttggcggattctcgctgttgattccgagtggtgcaaccgctgctctggtaggggaaagcgggagtgggaaatcttctgtgatcagtttgatagaaagattttatgatccaagttccggcagtgtgcttattgatggtgttaacttaaaggagtttcagttgaaatggattaggggaaagattggattggttagtcaagaacctgttctgttttcttcaagtataatggagaatatcggctacgggaaagagacgcaacagtttaagag

SEQ ID NO: 2532 - DNA, 888 bp, Arabidopsis thaliana
gtgagttgaaagctcgaaagaataatgacgacgatttccgatttttcaccttaattggtcggcgagatactgtcgagggttccgatgacatctttgaaagcagtgcggtgtacttgcaaaaagtggaacgttttatcgaaagataggattatttgcgcacaggaaggagtttctaggattcatgatgatggattctagagtctgttggatgaaattcgatctccaagggatccgcaacaacaccttggtcgatatatccttgtataaggcaagttggtcaacttgatcagatggaggtatctaaactcttcactgcgacggcttgttgttatgcgtggtgaaggataactcgatgctcttggtgtggaaccctatttaggtcaaaccgtacggatccaaccgagaaacagtttccacagattagacaggtatgctcttggttacgacaagaaccgtaaccacaagatcctgaggtttgtggatgatcacctcgctgtcggagaacacgttttcgggtatgaaatctatgattttagctctagctcatggagggttctcgatgtcactcccgactgggatatacagttttaccaacgcggggtatctttgaatggaaatacctactttttcgctcaagagaagattacagaggacggagagtatgaagagtttgaagattttttactctattttgatttctccaccggagaggtttgaaccgcgtcttcctctgccattccacttttatgttttagaaaccgtgtctctctctagtgttagagatgagcagcttgccgtgttatatcagcgcttggattcatacgagatcttggatatctggcttaccactaagattgagcctagtgcggtttcgtggagggggatcct

SEQ ID NO: 2533 - DNA, 623 bp, Arabidopsis thaliana columbia
tgacaaacacttttctccgaaattttcagcctttttctaaagttgtgctagaaaaataaagtgcttaggaaatgcagacatgcctagaaaaatgaaatatttttcactcttagacgtctggtgtgtctcttagatatgccagtatcccatgaaaattgcttataatatgagtttacacatcagctgtaaaattgactagccatcgttgatgacgattgattagaacttgcactcgcgttcccactgaaaagttattataaactctaggcagtaccaattctgtcttagctgctctgataggcagaggattcccaagtggactgtcatgaactttggatgtatttgtcaagtagatccttttgataatggtattttgttgcaggacttctttgaggacgtaggacctctgctaagtatgcaattgggaagtaaagctctggaaggtctgtttcgggtgtttaactcatatgtagatgtgctggtaagagcacttcctggttcgatagaagaagaagatccaaattttgaaagttcatgtaataagattgtccaaatggctgagacggaggcaaaccaacttgcattactcgcaaatgcatcattgctagcggatgaattacttc

SEQ ID NO: 2534 - DNA, 498 bp, Arabidopsis thaliana
attttcattaaatatttgtgtttccgtaattatttttcgttgatttttttgttttgttttaccgtgaatgccttatctttttaaagagacatacaaaaatacacaaaagggaaagcctaacaaagtaaaatctagtaagtgctttttacagaaaattggtcgcttattcggctgcttttaattaaggtctcagtcgtggaaaaaaaaagaaggctgctttttaaggtggcaggaccgcaggaacaatctcaggtgggagattgaggtgagtcttgaggaagttaatgccttcattgttaaggaaccagtagtaatgtacccaagtaaaagtctctttgacatactcctttgacaaaaagctctacataagcttaatcacctgcaggattcggaacactcgatcaagggatgttgtggcaaattcaagtcctcttttagcatacaaaactttctcgaaataaaagtaacatttctaagtaatcctagtgaatcacattg

SEQ ID NO: 2535 - DNA, 1341 bp, Arabidopsis thaliana
cgacgatggcagcgatgaacccatcaacgaacccgacgaccactgaagtccgacgaaccatatccccctaggacaaccccggtgctgtgatttcccacccgtagctgcaagcaacaaactacgatgagtgggtctgtagcatgaaaactgcattgtgctctcgaaagaaatttggctttctcgacggctcaattgcgcgacctgcagaaaacgctcccgatttggaggattggtggaccattcaagcgttacttgtctcttggataaagatgtctattgatccaagtctccgatctaacgtctcacaccgtgatgttgcgaaggatctgtgggaccatctaaagaaacgattctctgtcactaatggactgagaattcaacagatcaaagccgagctagcatgctgcaaacaaaggggtctagccattgagacctactttggaaagctaactcgcatttgggacagtatggcgaactatcgtcctttgagagtttgcaagtgtcgtaagtgtgagtgtgatcttggcacacttcaagagaaggacattgaagaagacaaggtacatcaattcctttttgggctggacgatacacatttccgaacagtgaggtcaagcttggttttgagagttccgatccaatctatggaggaagaatataatatggtacgacaagaggaagatatggtaagaaatggaatcaaaggcgttgaatagagctcagaagtaaacgcatttgctgtccacaccactacaccatttcaaagagatgagagagataagtcagtgttttgcaaactctgcaacagagcgggtcattctagcgaccggtctatggcgtgataggctatccagagtggtggggagatagaccgagatctcgctctacgtctagctgtggtcgtggacgtggaggcgcaaacagaggggctggaaagagtcgtggcagcacttcgtacgtcaacgccatcggagttaatgaaccaacaggttatgcagccgctaactacgtcatcaccgacaatgacagagacggagtgaccggtttctccgattcacagtggaaggtgattaagaatctgctcaatgctaacactagcaaagtctatgaatccgaaaatctgacaggtacgtactcttttccctcttggataatggatacaggggctacacatcacttgacgggttagttagaaatcttaacggatgttaaagatattcaaccagttggaattgtgttagctgatgggagacaacgagtgttagttaaagaacgatcagtgaggcttgggccgaattggacactaaaatcagtttattatgttgatgggtttcaatcgaa

SEQ ID NO: 2536 - DNA, 1298 bp, Arabidopsis thaliana
ctgaatcactgaagcttatcaaagatttctctttaagtttgctcttgttaggacattcaaacttagtgtgacccacacctttgcattcaagacatttcatttcttttctcttggtgattggacactcgggtttaatgtgaccaaaaccaccacactcatagcattgaatttccttcttctttcttaagtcatcattctcagatctggagaatcttccacgtgatctctctccatctttattgcttcagggcgtactgtcacgattctgacctatttctacacgttttagagctttcccaaaattcctagctagcagtgccattccatccttaatctgctgaaactgctcagagccttgatctgcattaaatgcaatattcttcgacggtttgactttgtcttgatcaggttccatttcttctgacttgagcattcccacaagatcaacaaatgatattttatcagtattcccggcaaccctcataactgctttgtgggcaggaaacttcggtggcagacaccgtaacagtttcttaaccaatttttgatctttgtaggtctttcccaaaacttcagcctcattcgcaagagcacttatctttgaactgaacttcacaattgtttcatatggttccatcttgagatactcaaactgagtagcaatgtgatccagtcttgttctctttacactcgaagttccctcatgagatttctgtaatgtatcccatgcttgtttcgctgacttgcacccttgaataagcttaaactcgtcttcatcaataccattgacaatagcattcatagcccttgcattaaactttgattgaagtttctcttctgttgtccagtttgcttcggtttagtgattttgaacccatcttctgttagatcgaacggaggttcccaaccttcctctacagcagtccaagcatcttcaccttggcctctaatgatttgtgtcatacgaactttccaatatccataccgcttagtatctagcagtaataccttgcatgtaccagtactaacatccgttggttccacaactaggatctaacctgttcagatatactaatctcagattggttacccgctctgataccaattgaagtaaaagaaccctaagtactttgacaagataaagaacacaactccaataaacacactttattagaacaactttcaaactgatcaatcacagataagtttggacagtattatgcaacatcaacaacctgatttgctactgtcagaacctaaaaactacccagctcacaaacacagcaacagccatgtgc

SEQ ID NO: 2537 - DNA, 981 bp, Arabidopsis thaliana
tggtatctggatatgctaaaagcggaagaaaggaagaagctttggagctttttaggatattaccagtcaagaatttgtattcttggactgcgttgatctctggttttgtacagagtgggaaagggcttgaagctttttctgttttcactgaaatgaggagagaaagagttgacattttggatcctttagttctttcgagcatcgttggcgcttgtgctaatttggcagcttctatagcggggaggcaggttcatgggttggttatagctctaggatttgattcttgtgtgtttattagtaacgcccttatcgatatgtacgctaaatgcagcgatgttatagctgcaaaggatattttcagtaggatgcgtcacagagatgtagtttcatggacatcgcttatagttggaatggctcagcacgggcaggctgagaaggcattagcgttgtatgatgacatggtttctcacggtgtaaagcccaatgaggtcacatttgttgggttgatatatgcgtgtagccatgtcggttttgttgagaaaggccgtgagcttttccaatcaatgactaaggactatggaattcgcccatctttgcagcattatacatgcttattggatcttctcggtcgctctggactccttgatgaggctgagaacttaattcatacaatgccgtttcctccagatgaaccaacatgggctgctttacttacggcttgcaagcgccagggacgaggtcagatgggtataagaatcgctgatcatctcgtaagcagctttaaactgaaagatccatcgacttatatacttttatcaaacatctatgcaagtgcttctttgtggggaaaagtatcagaagcaagaaggaaactaggagaaatggaagttagaaaggatccagggcacagtagcgtcgaggtacggaaagaaaccgaagtgttttacgcaggagaaacatctcatcctctaaaagaagaca

SEQ ID NO: 2538 - DNA, 1209 bp, Arabidopsis thaliana
gtggaatgtcgatgatgccaatcatgttacctgatggaaggatccgatacgtcttgtaagttcttatctatactccatatactgatctcatgtgtttgctataagacacgtttactgatctgatgtgttgaaatgtaataggcaacagcctggactagcagcgatgccacaaccaccaccgaggccttctccaccgtataggggatgcagcggttcgagcagcagcaaacaaagtagcgacaacggtagaggacgaagctgttacaatccttattagtaatttcataaattatgtcttctttatttggaaaaacaccccaaccaagtcacggaaaataaaaagtcaattttaaccattgtgttttcgtttttgtgtcatttgttttaaattgaatccaattttttcacacatgtctctttgtttctggttccttagtagcctgataaggtctgaccctatcgaagacaagaaaaagactaagactgataaaataacaagacaataggaaatgcaccttgaacggcggagagtgtagatgagagagagaatttcaagattaatgttgttgattgtttatttgataacaaaaccctaaaagggaaggttccttaaatagcatctactgagactcaatacaaaacgcaacatttcgataacccaaaagtaaaacgacacagttggcgagctggcgacgtgtctttctgtgccgagctggcgagctgtctttctgtgccttagccacttttaaatagaagcttcctcaggaacttcttacgagctctgcctttccttccatttgatctcgcccttcttctcacaccagccaacgtcactcgtaacctatcaatgctcccgcgcagaagactgaccttgtcctcaaggtcgaagtccgggtactgctgcaccaaagtgaggagcggctcccaagttgattccaaggttgataatccagaccactgtaccagcacctttggtcctgaatttgtgttgctctgtcggatatctagcagcttctcaggtcctgtgttccattccagtgtgggtgatagtatcttgggaagttcctgcggggtgaatgacggaggtacagcccttttcagttgagatacatggaacaccgggtgaattgtgctgtgttcgggtagttggagcttgtaagcgacctgacctatgcgttgcagcactttaaaatggaccgaagtagcgct

SEQ ID NO: 2539 - DNA, 1354 bp, Arabidopsis thaliana
atctcaaattcaacatggagaatttcatcaagcaataatatgaatcaacggtaatctagagactcaaaattctaaaagaccaaggccggcggcgaagggaaccaagaacttcaaaggtaaaatcaatgtaattcttggagggtctaaactctaccgtaactccatcagtgcaatcaagaagcatagacgcaacgttcatttgaaatcaagcttaagtgaagaggtagattttcaaggcacttcgatattgttcgaggagatggagacgcaacatctcgaaagacctcatgatgatgcgctcgtaattacgttggatgttgctaacttcgaagtgtcaaggatcctcattgatattggcagtttggtagacttaatttttcttatcactttggaaaggatggggataagcaaggcgaacgtggtaggacctccatcacccttagtggcttttacaagtgaataggcaatgtctctcggaactatcaagctaccagttttggctggaaagacctcgaagattgtggattttgtcgtgttcgataaaccagcagcctataacatcattcttggaactccgtggatctatcaaatgaaagcggtcccttctacttatcaccagtgcctcaaattcccaactccgagtggagtggaaacaattcggggagatcaagaagcttcgagaacttgttatttagctagccaccgattaaaaattcaataacaattaatgaaacccgcaaagaaaggagtgatcccaagatttcctagcgggcataaagtagatgatgtcgtgatcgaagtaattctagaagcagataaactagatcaaaaagtccgaatcggagctactttatcgggcgaagtaaaggaagccttgattgagctgttaaaaaggaacaagaaattatttgcctggtcggcagcagatatgcctggcatagatccaaatataatttgtcacgagttaaaagtagacccgagtttcaaacaggtgaaacaaaaagaagaaaactcggagtggagagagctaaagcagtaaacgacgaagtggataaacttctgaaaattggatctataagggaggtacaatatccagaattgttagcaaacaccgttgtagtcaaaaagaagaatggaaaggatagagtgtgcatcgactttacagatctcaacaaagcttgtccggaagagagtttccactcccacacatagatcgtcttgtggagtcaacgccgggaatgaattgttatccttcatggatgccttttcgggatataccaaatcatgatgaatccggaagattaagagaaaacttcatttatcacggataggggtatctattgtacaaagttat

SEQ ID NO: 2540 - DNA, 972 bp, Arabidopsis thaliana
atctctggttgcggccatctgccacacgaggagtgtcctacaacacttgtttccgctctcggctccttcatttgcagactgatacctaaactaccaaactcctaaaaccacacaagaccatctcaaagaagagtttgatggaaacatctgcgagaacatcaggagctctctacacaagaatacgatttttcgtggttccatccatcagcgtaaatcaggcatcagtgtattcttaaagggattaaaactcccaccagatttgctacaaagaactttgcttcagaatcacatcgacgtcaactaggccaagtgaatattatcagcctaattttcttaaacacaaacctgtgatttttacttatgtatgatgtatatatgaattctatttagagataatacaaatccttcccaatgaatttgctttcaagcttctccagcgaacaaaccagcaaggtaggtagtcagaaatggtttttggataatcattcgaatacatttttaaagatagataaatcgactggcgtctctaacacaaagtacgctgatcgaacgaacaatagcaaacgatcctaaaaagagcttctctagcatcttatcaaacaacaactcttaaaaacatttagtaaacagatgagcaacacagaacaaagcgggtaactaaaaaagtcctattccttggcggatttgttgatgagactcttgtggatatgagggatgactccaccaccagctatagttcctttgatgagagtatcgagctcctcatctccacgaatcgcaagctgcaaatgcctcggcgagatacgtatcaccgtcaagtccttgctggcgttaccagccgactccataacttctgcagtcagatactccaatattgctgctgtgtcaacagatgcagttgctccgaatcttccatgagcagtggaccttgtctttaacagacgatgcaccctatcaactgggaactgcaca

SEQ ID NO: 2541 - DNA, 1063 bp, Arabidopsis thaliana
ctctatagctaaaggagattgattcttttggtgtttctaaaaaagtagaattttttttcttctgatattcacataagtataaagggtatgcagtcaaaattgttcccgcacaaaagagaaaggagattttatttgtctaacctctttggttatgagtcttagactctctgtttaagaagtaccaagcgattgaatttcacaagcttctcaatctcttgctagttccttcctgttagcttcaagaagaggccaaacaattataagaatataaattttattacataaacaacaaaatcgcaaaggctttagtagcgattaagatttatcataacttatgtaagattatttgccaacacttcctagtatatatgtttacaagttatgatttttttcttgatccaaaatttcattacgtgttaacatattcttcaggtgaaaacggttacctcaaaaaagctgccaaacatgttgtagacacatatgaaagcatgaatcacaaatcaaatatgttttcaattcaccgtaatttgattaacaaaaactaagaaattagcaatggctgagagagtcatcagagctgatgcaaaaggagttttgagagatgaggatggacaagcctacaatgaggctggtcagagattggatgatcatggactcatcctacctgaggacgccaatgaggatcaagcgcgcctcaatgcgcagttagctgctagagatgcagcagggctcggtgtcgagcgacaccaactgggtgtcgatcgacaccatcgggagcagcacgcaaatgcaataggtgtcgaacgacacaacagaggtgtcgatcgacaccaacaccagattcttgcagctattcctctagctgtggaaccacgtcgtactcttggggatttcaacaggtcagaccggttctatgctaatcgatcagcgattgtatccccaccattccagagaaacgactatgagctgaagcctggctactttgctttagttggcgagcatcctttccatggcttatctcatgagcaaccaatggatcatatcgagcgattagaggaccttg

SEQ ID NO: 2542 - DNA, 1103 bp, Arabidopsis thaliana
cgtttgtgtgagtccggtattagcgcaagacagtctactagaggcattgtgatttcaaggtccttcaattttttttccaagagagcttcatacttcttcatcagttgcttcttaaatctccctggaaatggtaatggaggcttgtagggtggaggaacaaagactttatccttggttttagcagatgcagtctttttaactgaagaaagtactacttgagcttgggatcgagtactctgatcgagtatgggctcctctaatgctattttagcttgaatttcattctgaacaaaatcctccccttcttgaacttcactgtccctagtgatggaggtagaggcatgtcgagttggcagctctcgatcatggcagatattgatggcgtgagcagtggcgtactccttaggattctggattgctttccctggaagctggcctgggttgttgttaacagatggtgtagcgaggatgccttccacatatctcatcctagtgctcagtgattcgaacttgctgttaagttcgacgctttgtcggtcgactttgttatttaatttacccaacttcttagcgatttccattgctcctgtggcttgtccttgaatgagcagctggagcatagtcattatgtctgaattctgaggcgcaactggctgttgtatgatgggtgtgaaccaggtggtggttgctgttgttgatatcctccttgaaactgcatctttgggacgaatccttggctttggttgtaaggaataaagggtttaggttggttttgctgttgctgagggtagacttggtcatgagggttggcgatattggtgcttctatatgacagatttgggttgggtctgtaattgttgtaccccttgtcgtagcctccttgattctgaacatagctgtaacacactgatcattgccccctcttgtacttggaatggttcatcttcagagatgaggtgaacatgtttctgctgcacttggaggattttgtctagtttatcattgagagctttcatgtctctacggtgcttgtcatcagagtcagaactggtgcggatcttctgtcataatcttcattataattgccaccgactgagcaaatt

SEQ ID NO: 2543 - DNA, 1230 bp, Arabidopsis thaliana
cacaaaaagaaagtcttattttgacagacacctaagagtccacacacacacataagcaagaaagaattttcaaagtcctaattcttctgtctcttcctcgtttgcttcccctcagctgtaaactcttcccccttatacttgaaaggtttccttccacgtttttccccagattccagagtaggaccaacatgctttctcttcttcttcgatatctgcttcttcttatcctcttcatcggactcatcgctgccatcacctacaaaaatatgtaaccaaacatctaagaactattgtgaaagcatcactacacaaaagttcaacaaaaactcacttagagactcaatagttggaggtgctgggtcacggattccactgtgaataaccaaggccttgctctgagtatcccttggctgataagacagtggcacaaaatcagcagctgaaccaggacgtatatcttcataacgggctttttctgcctctttctcaagctgatctgccacatattcctctattccttgtactctcacacaaatccgcttgatttcgctatccatcacagcaagcttgtccgtgagcttgtcaaatcctctctccatagcttccttgaacgagagaatcgatgtcccagggatttcaggttcaggtacagctggaacatcatcaacagtttcaatacgtctaccatcaatgtctgcttggtagagactacgccaaaaaatcttctttttctctacgataagcctctctctccagctatcaacaattggatcgatatatccaataccatcatcaacatgcttctctacaacgcgtgacaacatttttctctcatccatatcaggttccaagatgcttgaaatatcctgtcaagtaaacatatatttcaaacaccacaaagattataaacatagatttcaagagaacaaagctaaccattatatctccaagtgcttcatttatttcttccaaagtaaatcccttcatgcaactttcactgaacttgtgcttgcacattcttggacgttccttgtctgcaggtacagcttctctaaatctcttcccaagctgcagaatgcactcaaatgccagaatctagacataaaagtaaatgcaagttcacaataacaaaatttagccactcatataatttactcgactacttacctcaagtagagtaataaatccataaaaagcagtctgtgccttgggtttcccacacctttcatg

SEQ ID NO: 2544 - DNA, 537 bp, Arabidopsis thaliana columbia
gtaacgtccgccagtgtgctttaaaggcccccacggcgaagcgccaacacaaggggcgttttcacactgatggcacatcaccggcgcactgatgctgtccagtcgctgtaccttcagccggggtaaaaagacatcggcattcaactcctgttctgaagggtgagcgaccacacaggctacttcacaagtacggcagccaatacagtcagccggattaacgataattaacgatttcatcacgatgccttcgtatcaaacagagttaacatatcgcgcgccgcctgccttcctgcggccattgcagtgacaaccagatccgcgccatgaactgcatcaccaccagcaaagacttttttcagatgcgtctgggtaggtaaatacccgacgtcaccggtttgaatcaggccccatttatcgagtttaattccgctgccctgcaaccacggcatggcatgcgcctggaaaccaaaggccataatcagaacatcggcgggcaattcaaactctgaacccgctaccggacgaggacgacggcga

SEQ ID NO: 2545 - DNA, 1216 bp, Arabidopsis thaliana
catgaaagcttactccattgcacgcaaaagttcaaaaccgacctctactactccgacttcttactttcggacaagggttactacagtgttcttgattatattattgagataatgatgatttgatcgtacaagtatttagaaatacagatataagtgtttttgccttcaaagtcagagcgtttttgtgcgtatcctctttgtttctcctttgaagtagcttaatatagggctctgacgaatcgcctcccgcgatattctcggaagatttctagttatcttagagtcggtgatagagattatctttatccttagagaatttcacgggatcttccatattcggcaatatccttggagattttccaatatcatttccgggtttcaagtcttctcctcggatgaatttgttttggctcggttcgaagtttttcccaagctgggtcaagttggtcctcagatcgtggtcagacggcttgtttcgtgggattacgcctgagccgaatgatgtttgtccgaggcgcttcaagacccgccttaggctggttttttgagatggcattcgaggcgtttcaaggtcgggtcgggttagccctttgccgtgatgcccgagatgtttcgaggccagctcgggatggttctttgaagtgatgcccaagccaacgatcctggccttaggaacttactctagtcggctcggttacctgggtgaaatccgaccccaacactattcttcttagatttatttgtattcacccctgattgcagttttatttacctgttatttgtatcccctgctgattgcattttagttcttaatattgtcacatgttggttctactcgacccaatgatcgagtagggctcttaaattctcgtttttacctgtttgaatcctgacctaggaacctcacattcagcaaataagtaggcctaaaaatctacttcctaatatcaagggatctttcggttcttcatccatgtttagcactacgtagtttgtaggcacctccagatttccaatcttgataggcaaatcttctaataacctttgaggtagtctaacagacctatcagccaagatcaaggagatattgtagtatttatacttgttgaaaccaacctcttagctaccgagagtggtatgagatttactgatgctcatagatcacaaagacatttattgccagtcaatgaacctagggaacatggtagagtgaggg

SEQ ID NO: 2546 - DNA, 997 bp, Arabidopsis thaliana
tcatgacgatgctccatttgtattaagtttgaaatgaaggatctaggcgcacgtaagaagatccttggtatagaaatcatcatagatcgagaagcaggtgttctgtggctgtctcaagagagctacttgaacaaagtactcaagacattcaacatgctggaatcaaaaccagcattgactccactgggagctcacttgaagatgaaatctgcaactgaagagaagctaagcacagaagaagagtatatgaactcagtcccatactcgagcgctgtaggaagcatcatgtatgccatgataggcacccgtcctgacttggcctatcctgtaggcgttgttagcagattcatgagccagcctgcaaaagaacactggttaggggtgaagtgggttctgaggtacattaaaggaactgtggacacaaggttgtgttacaagagaaattcagacttcagtatctgtggttattgtgatgcagactacgcagctgatctagacaagagaagatctatcacgggtctggtgtttactttgggtggcaacactataagttggaagtctggactgcagagagtagttgcacagtcatctacagagtgtgaatacatgtcccttacagaagcagtgaaagaagctatctggttgaaaggtcttctaaaagattttggttatgagcagaagaatgtggagatcttctgtgattcacagagtgctattgcactctccaagaacaatgtgcatcatgaaagaaccaagcacattgatgtcaagtttcactttatccgggaaatcatagctgatggaaaagtggaagtgtcaaagatatctactgagaagaatccagctgatatcttcacgaaagttctacctgtaaacaagttccaaactgcattggactttttacgggtaaagtctgagtagagactcaaggaagctgagactggaatctgggaaactaaatcaggttttgttacactctctaaagtattgtgtgtgt

SEQ ID NO: 2547 - DNA, 1214 bp, Arabidopsis thaliana
  unsure (1)..(1214): unsure at all n locations
ttgttgttgttgttgaatcttgaattgtcgtagaggttatttccgatcatttcagcggctggtgaggaggaggagccagagaggagcatggaggcagcggctgatgtggtggaagccatggtggtggctgagagtggaagagagtggctgtgtgttccttcataggttgtgattagtatagacatgtcatctgcacatctttggacctaaaacatacataatcgaggacaaatagttagatcgtttctttttatttgtacactggtcacaaatgtttcttactttctataataccatggaaacgcaaaggcaaacgcaaaaaataaaataaactgaatgatacatttttatcttaaattatgttgttcagtttaaattgaatgatacattttaacaactaaaatcagatccaactcaaacggaaatgaaaataaaaccagacgaaaaattcaaaccgattttttattccattcttaaatagactatatagaatacgaaatatacctgttttctaacgggacatccaggtgcaaccgtgcagcgataatatgctcgtggacatggatttcctttcgcaatcttttgtccatattttctccattgacaaccatcattcatctatacaacataattaataaacatgtccgaatcaacattagtcacatataaataatcaaatcttttaattaacgttatagatcaacttatttaatgtataatttaaaggacgtaccgttggtgtgtcacatcttgctctaacacaaactctagctctcttaacatggttttgttgaccggcctcaccgtcagcatcgccaccggaggctggtgctggagagcttctcttccccgtaactttacctggcgcccaagcttcttccgagccagaatttgcacgattctccatagataaaccctctttcggttcacctccgttgccattattgatccctaaggtcaagccggccttagtcaactcttcgtcagcgttgacttctgcgctgattgcgtccgttttctcttcctttttggggacgctatcacttggggaagaacttcttctccctagtgaaagcgatacaagctcgcgttcttggtcaaaagaactcaaatccgtcgtcgttggcttgggatgatcaccatgtnttgatttttagttgcggtgtttgaagggtcttgttgaattatgtcgaagaatctgagcttgagagatt

SEQ ID NO: 2548 - DNA, 525 bp, Arabidopsis thaliana columbia
tcgactccccgtaccggccgccagtgtgctctagttcgcgcataaagcgtgagacgccggtgatagtgccggtcgtccccatgctggagacaaaatgagtgatgcgcccgccggtttgctgccagatttccggcccagtggtggtgtaatgcgcataagggttatcgggattattgaacttgatcgagcagctttccttcgccacgattcgccatctccagcgccagatcgcgcgcaccttccatgccctgctctttggtgacaagaatcagttccgcaccataagcacgcatcgccgcacgggttcctggctcatgttgtcgggcatcagcaatttcatgcgatagcgtttcagcgcggcaatcattgccagcgcaatgccggtgttaccactggtggcttcgattaagacatcacccggtttaatttccccgcgcttttccgcctcgacgatcatcgaaagtgccgcacgatctttcaccgaacctgccgggttattgccttccagttttaacacacttcact

SEQ ID NO: 2549 - DNA, 541 bp, Arabidopsis thaliana columbia
catgccaatggtgagagggactgcatttccaatctgcctatgtttgtgttttgtcgtccctgaaaactcatagctatccggaaacccctacattttattatgaaacaacaatttcacttaaaacagttgtatccataaccttaacattacttaacttccaaaacaaaacaaaaatatctacactctattactgatgctagaggattgaagaagaaggaacataagaacttttcttacctgagatcgggcgcattcacggacagtgataattctgtcctgttctggatggaagcacattcccaccttacccatgggctgcggatcggtgatggaaatgggtaagtttccttgccagtccaatctaccatagagtcccttccattcgttgtggtttttagctgtctttgatagagctaaaggacgcagtttttccacgagtccatttgataatgtcacctgtagtattaaaaacattgcatgaaggtgacatatagatcgatttagtaagaattcttgtagtcgataggatgtatcatatata

SEQ ID NO: 2550 - DNA, 589 bp, Arabidopsis thaliana columbia
gacggtgaacataaggaatcaattaggtaagttgctttataaccccctttgctcaactccttgctagaatctttagtattagagtttgggtgggggaacgagttgacctgatttaagacgttcaaggtgacctgatatatccatgttagcttggtagataaaaatataactatccatggatctgcagcagtttctattctcactctctcgttgctctgttacattctgctgtatcatttacttagacctctagtttaaattggtttttgaaaggattttctcgttgtgagcatgaataagtgatgtctttaacacctcatcctctatcagcaacacaacttcattcctccaaggttgtagctgacctctttgtttcttgatttgcttgttttgcagaatcgacaactggaaacgcgaacatctactgcagtatatgcgagagaaggtcaagcctactgcagcaagttagttttacccatgtagagctgaagaggatgatccccctgtcacatttacatatgccaaagcattgcaatctagtagttaaaacacattatgaccgacttatcttacgtttgccaagctattt

SEQ ID NO: 2551 - DNA, 564 bp, Arabidopsis thaliana columbia
cagtcaaataatactgacagaaaataatgcagaatcacttacttaacatatggatccataaaggccatgttcattagaacatatctatgagcaatgtctcgctctttactcgtaagagttacttgtgtagctttctctagtggtttgccttcaagaacaagtgaatcactatcaatatcttcattgcggttaacgacttctggaactgataatgagtcttgtagaaattccaggcaaaatgccatacattctccagctaagtatccctcatccatacaagcttcaggccttgcaaaattcttcacaaaagcctttagagttttcatgtacctgcaagttaataagattagatcaatatccaaattttatataagtaattaactatatagacaaagttatagacaatacctttcaaaggaatacatccatctaaagtggacgggtccactaagcgagcctctctagccaaatgaattggcagatgaaacatgatgtcaaacagagatggaggaaagtcctctccatgtggcacatagtctcaactaattcagactctaatgagat

SEQ ID NO: 2552 - DNA, 705 bp, Arabidopsis thaliana
tgtgtatctcccccacggaaacgtttcacaagcatctagatcatccacaattcgatatataaaagcatcgatgaacccaaactttttcttaggtgtaatgacagtgcttacgaaaaaaaggatcgccatttgtttccgctctccacattctcccatggaatgtagcttctctctcacagctttgatgctgaccactatttttttctcttttacttgttcttagtcttcttcttcttcttctccttcttctttaaaatagcttctcacaaacctttcactccccaaattcttatactttggtggataaatataacagtcaaatccacacaacaggccatgttccctaaatgaataccggacgggaacaccgttgacaacaaaccaacagacactatatatttccataggagccgtgcaaagcaacaacatccacatatgcgtatacttgtggttctcctccctatgcatgtgccaaatatgcttaaattgtagatgtgtgcggaaccaattcttctcatcttctgcaaggatatcatcccactctttcatcgttctgttctcttcagaccttgaagatagcttacaacactctgtataattggtttgcttaaaataaaacatctcaggtggaagtggttgggtatcctccatatctttatcattatcctacaaatccaaacaaaactgtcatgaatagttgtaaca

SEQ ID NO: 2553 - DNA, 530 bp, Arabidopsis thaliana columbia
caggaacccctagtatattattttttaaagacatttttttattttatattaccaaaatttgaattttcaaaaaaaatccttataaggagatatataatgagaattaagaaaagttgaccaaaaaataaattaataaccatataaatgtatattatataaaagtttctttcaaagaaaaaaacaaaaacaataatatatagaagttgtgcaggtaaagagatgtacaacactttttattaaaggtcaagtaacaactcaaacaagtgaaaaaaaaagaaaacaatttcactttttttggaatgtgtgtctctcttccatttccatatattatataaacaccaaatgagatctcatttttctaataaataagaagaaagaagagagaaacaatggcttatcgtcaaattttggccatagttttgtttctttgtgtgttcaattcttggactgcactgttagctccgccgtagaagagaatgggactgtgtttgtgtacggaagagccagccgttggaacaatagatgaagac

SEQ ID NO: 2554 - DNA, 1117 bp, Arabidopsis thaliana
caaaaaatgcagctacagcagttggcggtgcagctgcatcagttggtgctaaagtaacaggtgccaaaccaggcggtgcatcacttgatgttaaagcatcaggagccaaaggagacggcaaaactgatgatagtgcggtatgtaccaaatgtttgttgtatattttatattatatttcgattttgtattgtttaagaaagaatttcacgttgattcatgcatgcatgtataggcatttgcggctgcatggaaagaagcttgtgcagcagggagcacgattacagtgccaaaaggtgagtatttggtagagagcctagagttcaaaggtccatgcaaaggtccagtcactttggaattgaatggcaattttaaggctccggctacggtcaagaccactaagcctcatgccggatggattgatttcgaaaatctcgctgatttcactttgaatggaaacaaagctatttttgacggtcaagggtccctcgcttggaaggccaatgattgtgccaaaactggcaaatgcaactctctccctatcgtaagcacattcaattttacataattacactaaaaacgttattattttcatggaatgacttgatgaatattatgatttttttgtaacagaacatccgattcactggtctaacaaactcaaagattaatagtattacatcaacaaacagcaaacttttccacatgaacatccttaactgcaagaacattactctttcggatattggtattgatgcacctccggagagtctcaacaccgatggtatccacatcggaaggtccaatggagtcaacttaattggggcaaagatcaaaaccggagatgactgcgtttccattggagatggtaccgaaaatctcattgttgagaacgtagaatgtggaccaggacacggaatttccattggaagtcttggaagataccctaatgagcaaccagtaaaaggagtcaccgtgaggaaatgcctcatcaagaacactgacaatggtgttcgcatcaagacatggccaggatctcccccggcatcgctccaacattcttttcgaagatatcacaatggacaatgttagcgttcccgttctcatcgaccaagagtac

SEQ ID NO: 2555 - DNA, 629 bp, Arabidopsis thaliana
tgatacagctcttattgacatgtatggaaagtgcaaggaagtaggtttagcacgtaggatattcgatagtctatctattagaaacaaagttacttggaatgtgatgatattggcacattgtcttcacgggcgtcctgaaggtgggctcgagttatttgaagccatgatcaatggtatgcttagacccgatgaagtgacatttgttggtgttctctgcggttgtgctagagctgggcttgtttctcaaggacaaagttactattctctgatggttgatgagttccagatcaaacccaactttggacaccaatggtgcatggctaatctttactccagcgccgggttccctgaagaagcagaggaagctctgaagaatctgccagatgaagatgtgacaccagaatctacaaagtgggcaaacttgctcagctcgtcgcgttttacaggaaacccgactctaggggagagcattgccaagtccctgatagagacagatcctttgaactacaagtattaccatttgctgatgaatatttacagtgttacgggacggtgggaggatgttaatagagtgagagagatggtgaaggagaggaaaataggacgaatacaccgggtgtggccttgtg

SEQ ID NO: 2556 - DNA, 553 bp, Arabidopsis thaliana
atgaacttaatgaatgttaaagtgattggtcgatcttgacatattgtgcaactgagtgtgaatttggatcataacagagaatggctatagtttttaagtagaagtcgatcacctcgcatcttagaactgttagcttatacattaatcttaattgtcatatctcatgctttgcttgtgagtccccgctttcaaaactcacctctagcttgttcttaattgtttgcttgagggcaagcaaagactaagtttgggggagtagataagtgtgcaatttacacgttttgagcatccatttgtcatcactttgcatgtttaggatagttttgcatgcatattgcatatttgtgttgttttcaggtgatttggagctgctggcgagctaattggaagaggtggacctgatcaaatcaacatactcgaccacgagcttgagtaccatcatcctggagttcctaaaatactcggccacaacttctacagcaaatcactcgaccgcgacactctatccaccactcgaccacgagggcgagtagatgactcaccacttcacaac

SEQ ID NO: 2557 - DNA, 599 bp, Arabidopsis thaliana
agctctttaccaagaaagatcagcctctgcaggtttggttgtggttggatcccttctttatcctgaaccatggcctttacattttcgattgtgtcccagctctcaacttccaaatttattctctttctggtaagggtcttgacgaaaatctgcatcccacaacggaatctagtcaccagatacagagttgatcctttctggatgttgtaatgtgctagggttcgaccaccctcaagcggtttaccagcaaagataagtctatgtaggtccataggaattctttccttgtcttggagcttagctttaacattgtcaatggtgtctgagctctcaacttctaggatgaagttttcaccggtaaaggaattataaggaaggtttttcacaaatatatacatatcaccgcgaagacgaagggcaaggcaaagggttgacctattccggatgccgtaatccgcaagagtacgattatcctcggtgaagagctcttcaccgtgaaagataagcctctggtggtccgggcgtaaaccttccctgtcttgaatcttcgccttgacattttcaatggtgtctgagctctcaacttttagggtgagggt

SEQ ID NO: 2558 - DNA, 879 bp, Arabidopsis thaliana
taacatatcaacaccgtccttagaaattaagctcactattttagcagctacgtgttcaggcatgtggatatcagggaacgggggaggctgacagaaaatgattccaaaagttaacactaaatttggatgattgttcaaatagcgaagattagtagttaaacattacctttaggtgaaattgaaccaaaggttgacgaggaggctggacagcaaattgatttcccctaacaggggcaagggcacttggtggtagccagaaatgtctagtagggccattggtcgagggtggatacatttgcctttctcgcatacgattttgggcattttggattatcgactcggatagtactgaaggtgtagaaatagcgatctaataatgaaaatttaagtaactttgagatcgtgatagaatgggaaccctaataatctgtcacattggagagggtggggtgtggtggtgagatgagttagtggcgacatatgtagtgggtactacaaaataaaaaaaatttagacatgtaaataaggtttctcatgtccaaaataaatcatgtgtggccaaattatgttattcaaagatatatatctctatggtatataatatacagacgtggatgtcttgtaacatgcaatccaacggggactcatttatgggggaagaggttttccataatcaatcaggtaatacatacataaactgtaatcattaaacaccaaccacaaagtaagatggataagccttagcaaatatagaaatgaagattgaatagctaacgagaatataacataaaaaagtcagactagcaaaagcataaatacaaaaaacaagttttagaaaaatataaacatgtatatagacatataatgatggatacacat

SEQ ID NO: 2559 - DNA, 890 bp, Arabidopsis thaliana
accgtagtattacaattgttctgagtacattaccgtcgcttccgtagcttgtgaaggtatcgttcgccgcgtttccactctcgccgtagttagagaaaccggagccgattacattggaggagacgccgtaagaagtgaactcgttaggaactccgtttccgtttttgccgtagcttgtgaatgattgaccgttaccggcgttagcttcgtgtgtgtaggttttgaatgtttgagatcgaccgttacctccgtcggaatacgccgtgaatcgactcgttggattgttcacgttgttttggtagttagtgaaatctccggcgccgccggttccgaatgttccgtatgaattgaatccttcctctaccacgttactgttttcaccgtagacagtgaatttatcgtcgtgacccgccgcgttacggctgtatctccggaacgaatcggttacgacattaccgtctttcgagtagtttttgaacgaatctgctcctccggcacgagcattgccgtagttagtgaagttcttctggtcataaacggagaatttaacgtcgtcgtcgtgtttctcgagactcgctcctaaatcaggaaaacagaagagattcgcggcggagcagaaatcgggaaaacgagtcggcagcgagttcgcggcggcgagttttgagaaagttgctgagtctacggcgttgagtggtgaagcttttgagattaaaaactccgatctgggagattggccacgaatctctttgttccagtaacgaactagagatgcttttggagtaaatggattctcctccgctgagaaaccgccgccgaatgttcttcctccgacgataactacctacattgccaacaaaatccaaattcattcaacaacaacaaaatctagt

SEQ ID NO: 2560 - DNA, 1280 bp, Arabidopsis thaliana
ttattataattttttatttattgaatgttttaagaatatttatttaaaagagagattatatagaatttaacacaacaaaagacttttgattcttccttaattaattgtattaattttttatttaattaatatagaatgacacatgtcattttcttgtatgatgatgtgtcacttatagagagttgaccaactttcatatatatgattttgtctttataactaagaaatattacctcacgaccatacatagtcatgcatttctatctgattttcagagaatcaaatttctttctcgagtcaacgaatttccctgatttcatttagataacctttcttaacaaagagcaggaaatgtcattattattcatagtgacattttatcctcaggatttgataattttactttgaccattttttaatttattacattaatattaaggtatctaataccaacttaccatcattttactttgactattttttaatttattggtattcaacttctatataaatacagtaatatatacatattcaacttttaaaaattatattccttagtttaacaattttccaaccagcgtacagcttatattagtatatatatacaacagtaatcaataaacatcaaacacaaaccacaacaaaaaatctcgagacaaagatacaatggcgagccgaaacagagcactcttctctgtttccactcttttcctctgtttcatcgtctgcatctccgagcaatcgaacaatcagtcttctccagtcttcgcctgtgacgtcaccggaaacccttctcttgccgggcttagattctgcaacgcggggttgagtatcaaagcccgagtcaccgatcttgtcggaagattgacgttggaggagaaaatcgggtttttgaccagcaaagctatcggcgttagccgccttgggattccgtcttacaaatggtggtcggaggcacttcatggcgtctctaacgtcggaggtggtagtcggttcaccggtcaagtccctggcgccactagcttcccacaagttatactcacggccgcttctttcaatgtgtctttgttccaagccattggcaaggtgaaagaactatctccttcttcattttctctatttttgggctacactgtgaaaactcactcattatgcaaaatggaaaattttgtttcttaggacataagtaatgatatatcatattttcttctcaatgctttagacatgagtagtttcttgcatctagttttaatttatttttatccatatattggtttaag

SEQ ID NO: 2561 - DNA, 589 bp, Arabidopsis thaliana
tgtacgtgtgaagttcactcatgtgacacaggacgtgaattggaacaaaggaataatattaccttccttcaatggagttcctaacgcttatttcaaccaaagagaaggttgcaaagttacactataccaagacgctcacgttcttaacgaataccctgatgttaccctcacgggaggacaagttatatacaagcatcatcggtgttgggaagagattttcgatgcgatatgggaagcaaaacatttgatatacatcgctggttggtccgtaaacaccgacgtgacattagttagagatcctaaacggacgagaccgggaggggacctcaagttaggggaattgctgaagaagaaagcagaagaaaacgtgaccgtgctgatgcttgtgtgggacgatagaacgtctcacgaagtttttaagagagacggtttgatgatgactcatgatcaagaaacttacgattacttcaagaacacgaaagtgcgttggcgttctctgtccgcggaatccggataatggtgatagcattgtgcaagggttcgaaggtcgctactatgtttactcatcatcaaaaaacgactgttgtgg

SEQ ID NO: 2562 - DNA, 766 bp, Arabidopsis thaliana
  unsure (1)..(766): unsure at all n locations
aggctgctatcaatctgccgtggagaaacctcggctacaagcggactggnatgacctagaggtgcggtgcaaatcgaaggaggtatcggactttactctaagcaagttagatctcccgcaggtttcagagatttcggtggtacgtctgatggacgtcgacgagcaagggacaccaattggcttggatgagtttgagagcaacaaagacgcgtttccgggaggtctcgcggagggttctggtactgtctttgctacgccagccggagaatcgaggtagtgatcacttttgctccttgtttgttttaggattttgtgttttttcagacttaatgccttggaaggtttttatcctttcgtttattgctttttgaacttggtgcctgggaaggcttttatcctttgttcgtttaagtacttggatgcctgggaaggtttttatcctttttagaaagtattttttgtctttcattcgagtgctgacacttcgttgattttggtgtatgatcacctcgctttgtccatgttccggataataattggacttgtgtgagcccgagttatttcggatgtgatatggtatattcttcgaaagttaaaactttgaggaagtttgagttgttttgtctcgggaacctcttgaagtgaggtcacacaagggacctgccagattttgggagctgggcttgtggtatcgccaagtcgtgaatgaaaccttcgtttcttccttgtttactatgttatgtgttgatacagaataacaaaccac

SEQ ID NO: 2563 - DNA, 807 bp, Arabidopsis thaliana columbia
taggattggtttctgaaatcgaaaccaagacctgtaaaggtaacaaccgttcagtttaagaattgcacgagaatagaatctttccctgctgatttcattttaagtgttaccttgtaaagtgactgaaggaaaagtctctcatcaaagcacaagttagcactgcgtttgcttgaagctagaaagatataaacagccacaaatgaacaaaaagggtttagaaatctaaactagaataagacttaaagaggatctagaccttgtcaaacgtaagaaaattattcatttcaatgctttcacacacctgaaacagaagttgcagaacgggatgatatgctactcatatcagaagcagcagaagcattccgcttgagtcgtggaggctgacttgtaacgtcaaagcccctgacgtattacgtgagagcaattagtgagctagcataaaacatataaagctatattccagatgacaaaacaaacaagatatcaaaaccaacacaatgtaccttgaatgaagatcgttgccacttgtgtgcctacgcaaggtccctaaattttacaagaacgcgaacacttgagatcttttgagggcaatacataaacaaagaccagtgttttgatattgtacctcttgtagcttccttttgggagagcacagagatagaacccatcaaattagacattttgtccattgtcaactcagaaatagacctcttgtgagactatcaaaacattagagatgaaagaaaacataatcatggtcacacacaaaattaagctacacaacataagatcacaagtaacttacag

SEQ ID NO: 2564 - DNA, 887 bp, Arabidopsis thaliana
  unsure (1)..(887): unsure at all n locations
ctaccctcagatgccttcttctaaagttgtctcttcactgtcaagaagaagaagagaacaaaaaaaagaaaggaattttctctgaaacgtcacgaacgtgtgaattgggttaaaaaattcatctcattgatccaaacttgaaaccctaatttcgaatctctttgctgatttggtgagatctcaatttcggaaagaagatgacgaaggatttcgcagttccacctgtagttttcccctccggtggatcttcaggcggtgctaatgtccagcaacgaagattcccagcgacaccgtttcaaccgccgcgtccctcttcttccgcaatccctttcatgtcattcgacattggatccgcagccgcgtcttccgctacacctgccggaccattcggcgggacaatcgcttcctcttcttcttttggtggaggttcagcttcgtttgaagatgaggagccattactcgacgagctcggtatccatccagatcaaatctggaagaagactagatcgattctcaatccttttcggattaaccaagctgttcacaaagattcagatctatctggtccgatctttctgtaccttgcgctttgcttatttcagttgttagctggtaagatccagttcggtgtcatacttggatggatcgtcgtctcctctatctttctatacgtcgtctttaacatgcttgctggtagaaatgggaaccttaatctccatacgtgtacgagcttggtcggatactgtttgcttccggtggtggttttatcggcggtgtcattgttcgttcccagggagcagggccggttcggtttgtgcttgcggctttgtttgtgttgtggtcactagagcngctctacattggtggtactcttgctgatggtggag

SEQ ID NO: 2565 - DNA, 790 bp, Arabidopsis thaliana
tagtaacgtccgccagtgtgctctaaagcgccacacagcctgccgacattgttcggtgacattggcaatatcatggttgatatcaatgcgcacaatatcctgttcatctgcttgtggacgctccagtgcctcaaactgactttttagtaacgctaccggcataaaatgcccagcccgacgctgcattcgcgcgagaatagtttcatagtcgccatctaaccagaggaaatgaacatgggggctacccttgcgtaaaatatcacgatactgtttttttaatgatgaacagacaataaatcctgtttcattctttttataaagactgtatgaagcatcatttaagcgttccagccagggaagtcgatcttcatcagataatggaataccctgcgacattttatctatatttttggctggatgaagatcgtcaccatcaataaatttagcagataataacgcggcaaccttgctaccaattaatgttttaccactccctgaaacgcccatcaaaataaagctttcacccgccatttaaaatctcctgaatcatcttacctgctgcgatactaccgtggcggcataataatttcacgtttttttatttctactgataagaattacaaggcacatcacgttatgcgtaacatagtaatgtaacaattttctgacgtgatcttcatcacaaataatgacagttaaaaccgcttaaatgcttccgaggtgtctacctgaccagtgaggaatttatgcaagtgaaaacacagtcctgcgttgttgcgggcaactttag

SEQ ID NO: 2566 - DNA, 1238 bp, Arabidopsis thaliana
gttcctggtcgaaatcctcaaacatctccacagcaagtttagtccgtaggactgcatgttctcatcacacaagccatcaaaggacttgccaagcgccaagcattcgatgtattttattgagtagatagcacaatcacctgggtcaagattctccgggatcttcgtaatcctcttccactccaactttgagtagctcctcctacgttgctttgacggtataaatgaactcaacatggcaggaatcattgtcatcacaaacatgcactgtatcgccatttctgtatccgtagtcaagctcgggatgctatcataaacattgacccgtttatttgtcaagtcaatatctagagcgacccaatgattcacgttgacaaagaggaaggcatataggtgatccacatcaacaaaccatttcttgtttgtcgctgcgtcacattgagctgtaccattgacttgatcctcataatactccctcaatttgaagcacctataatacggttgaaactgtttatagtcttttgagcattgtggagatcaaatcttgatccaaaatagctattctctggttgggatattttgaaggatcacgattgaatcttcggtgaaacaatgacattgtagctcccatgtgctgcattataatcaaaacaacaattattatagttacatatactttcagccagccaacagtaaatgatttaatcaattgaaagcaaaacttttaaaattgctatacttacatagtctttcagctatccatatttttctgttggccaatcgcttctgggagtcattatcatgagtaatgatagcataaaacatttctatgtgaagaaaaatagacacttacaaatctggttcgggccaatccttcagcctatcaaattggtcatcagaaacaggttgaagatgttcaggtactgaagaagacgatggtacatcaatgattaggcgcttcactgttgaatttcctacatacagatatttctgagaacccgctagctgtggcactcgtctcctcttactagtaacaccgtccagattatctagtccttcttgaagtgctctcaatgcatcagtcattgccttattagccatctgatctagaggattggagaatgtttcttcagaacttgaagccattttcagattgtctgtattaccttgtcagtgacatcccaacatcatcatcaaacgtctttgttgttggactgcactgagtctcttctcaggttttg

SEQ ID NO: 2567 - DNA, 748 bp, Arabidopsis thaliana
tgcgtttccttcatgagtgttagggcttctttttgatccacgcaagtgagaaaagctttggtcgcacttcgcctgtaaagttcgccgcccatcatcatgtagttcgccgctttggtttttagtcggcgagcttcccatcgatctgctggaactatgccgtcggcaatgtacattttgatggggagtcgccaatcggatggttccggattttcttctgtatccggcgcgttggctgcattgccgtccatgtccatggccgttacggggtctacaatcacgcaggtcgacttcagcggttcgatgctcggttgtgctatgctttcgactgggatagttcgccttaagtcggggttggtgcttgaggccagtgcggccaatgcatctgctgccgaattatcgtttcgagggattttgatcagggcgaactgttcgaactggctggaaagtgcgtggaccagtgagagataagcccgcattctttcgttctttgcttcgaatccccgctgaactgactgaccacgagttgagagtcgctgaaagctttgatctgtttagctccgagccccttagcgagtcgaagtcctgcgagaagtgcttcgtattttgcttcgttattcgatgccttaaactggagccgaagtgattgttcaaggatttctccggttggcgaacgaagtagaattccgatgccggagccttgtaacgatgaggagccgtccgagtagagtatccagttttcgtccgggat

SEQ ID NO: 2568 - DNA, 645 bp, Arabidopsis thaliana
gccagtgccgaataactttcgaaaatcagcgtataatgtcgtcaagaaaattcttctcagtatgcatcacatcaatattatgtcgaagattgaggtcattccagtaagacaactcccacaagatgctttccttgtgccaattatgttcctttccatagtctagcatcttcttttcatgaccgtttccaccaacgtccttcgtttttgttggatttacactagccaaccgctcgtaataaacttgctcccctgtcaaagactcgggtggatactcgctagaagagtctcttcccttcagaaagtctttcttgttcctacgggatggatgaccatgaggaagaaatctacgatgacaatcaaaccaacatgtcttccgtccattgggtagataaaaagactttgtactttccatacaaattggacaagacaatttaccatgagtagtccatcttgataacatgctatacgccggaaaatctcttatcgtccacagtagcactgcttttagattaaaattctgactcaatgatacatcgtacgcatcgactccagtagaccacaactcttttagctcctcaataagaagttggaggaagacatcaagactagctcaaggatgatttggcccagaattcaaaattgtaa

SEQ ID NO: 2569 - DNA, 1457 bp, Arabidopsis thaliana
gctcgtctttctcattcttgactactgtaactcctcctttcttaggaactacatgaactggactgacccaactgctatctgaaatcagatagataatccctgcttccaacagcttcataatctctttcttaaccacttctttcggattcggattcaatcttctctaaagttcaactgaagacttagactcatcctcaaggtggttcctatcatgcatacatccggagatatacatgcaatgtcatcaagagaatagccaacagctttacgatgattgcgcacttgctcatcaataaggtgagttctgcgggattaagagaagcattcacaataacaggataagtagaattttcaccaagaaaagcgtacctcagccctgctggaagtgtttttaaatcgattttaggagccttagctggatcccaatcagaattagtagtcggtgttggagtcacagatggaaaatcttcttcaattataagttgcatcgcatgttcggtctcatctagcagcttagtatatgtagaagtttcattgtccaaatctgcactatcttctatggaagagaccaaaactcgctctagtgggtcttctaattccatctctgaaatactatctgaagctgatgaagtgaaagaatctatcaagaaaaaaattcccttctatgattggtttcttgaccaaagtgttcatatcgaactacatagtaagatctccaacattcagccctatccgtccttgccgaacatctataattgctccaactgtgtgcaagaaggatctcccaaggattaatggatcattaggttccttctaataagacaagactacaaagtctgtaggaatcatgctcttcccaatcatcacaagaacatcgctaagaatcccatttggaattcgggtagaacgatctgccaacacaagagtgataaaggtaggctcagtattagaatacccaagacgcatagtaacttaacgaggcatcaaattcacactagaaccaagatcacataaggctcttgggaagaaatcgtggttgatggtgacacttagtacaaaggttccagggtcaagtagctttcttggaattcgttcctgaatgatatcgcttccttgctcagaaatcatcataacactacattctttcgtcaaattcttagtgaccattgtcttgacataccttcttattgtgggagagagatgaatagcttcaactagaggcatctcaacaatcaacttatcaatcattgccttgcatctaacatcatctaaggcttttcttgactttttaggactcttggggaaaggaattcactgatttgctgacttggtttcagctggaatttgcacattgtctgaacgagctgggtgtcgatcgacaggggatgggtgtcgatcgacaccatcgggaataatttattcctcctccacaaaattgtcgattccactcgacaaag

SEQ ID NO: 2570 - DNA, 837 bp, Arabidopsis thaliana columbia
cgtagatatttgattagacgtccttttcaacctcgtggtcatatttttaagtagacacaaatagaaggcttatggagacaatttaatcctgcttggtttgataagtatcctatcttgttagagtatagtgtgaagaaggacacaacgttttgcatttactgttacttgttcagagatagtgccggtaaaggtggaagaaatgatgcatggaccactgacggtttctctagctggaataagtttaagaacatattcgaacatgcaagaggtgttaataattttcataacaatgcagcaatgagatgtgaaaacttgatgagacaagagcagtctatcaaacaagctttgcataaacaagattgttggtgtcatattccgcaccagagtccgggacctaccaaagattgccacgtagataaaaagtaagcccacaaggagtaaggcccgtaagattcctgggagaatggcagattacggacgaagtgatcacaccgcgaagtgggggcaaagtcgaagtcaaggacggattgggctttatcggttaaagggcgaggccatgaaggtcagagtcaattcaaattcgaacgtctaagcaataaatttgaaggccaaaacggacacatttaagaaagaataattatgtgtagttaagaattaaatatcatttgtgagtattagtagtagggccaagagccatgaaagacacacgcatttttgtgcaaacttactatacgcatttttcatcaattcacagcttttggcaatccatagctttttatacttaatttttgtctcaagaataatcttctcactaaataaataaatacttgagtgtgc

SEQ ID NO: 2571 - DNA, 565 bp, Arabidopsis thaliana
actgagattatcgtcactgttgtgcagctgtttgcagcgaaccaaaacaagcctgcggatatagtcaacattctggtggccaacagaagcaagcttctgagattgttggctgatttgaaaccagacaaaggtatgaaactaatcttgttaagtgaaacgcttgtatccgatccttctgctccttaaccttattaaagcattgtttggttcatttggttgacagaggatgagaggtttgaagcagacaaaagtcaggttttgagagaaatcgcagcccttgaacctcgagatcttgcttgaaccaactaatgcaattcatccttccttcccttttaaaacactcgaaaagacatttttgaagcatcttgttgtttttttacattaggtaaccaatcttcctctcactttctcaccacacacacacacacacacacacacacacacacacatacacatacgagatatctattcgatatatgtattcatatgtacactacttcactgtcgatgaaataaaatggtttgtcaaaagctcacatcatgaatgttgtaaaagagcacaaga

SEQ ID NO: 2572 - DNA, 598 bp, Arabidopsis thaliana columbia
aggaagaggattccaagacgctttgatagatcaacaagtcttgtagagtttatcacccttggtcgagtaaatgggtcgagtagaggatcgagcaggaggggcaagtagatcattctgctgcttcatctgaggctgccttgatcgagtaagagggtcgagtaaactgcagccacctctgtagctgcctggatcgagtggatgggtcgagtagagtcctttttatctctttgtgcacctaaaaacacaccaaaacatgcaatgcgtatgcgagatgatcctagatgcctaagtatgcaaaataagctaaaatggtgcaaaatgatatgatacaatgagcaaatgcaaagctaaatgatgataaatacacacctagaatgagtaaaatacagtgttatcaactcccccaaacttatctcttacttgccctcaagcaaacaaaaaatcttaagttgaaggagaggtttgaaggcggggattcaaaaaccgaagcatgcatatagaacgggtaagctcaatgtccaggtagctaattctaggttgcaagatgatagacctttacttaaaaacgttagccatactcgtcacaatgcaacctaac

SEQ ID NO: 2573 - DNA, 489 bp, Arabidopsis thaliana
tatataaaagaaaacaggcaagataaatgaaggattacaggcccatctcttgctgcaatgtgctttacaaagttatctctaagatcaatgcaaacatgcataaactagtgctcccaaaattcataacgggaaatcaatcagcttttgtgaaagacagattgttgatagagaaccttctccttgctactgaactcactaaggactatcataaagaaaccatctcaacacgttgtgctatcaaaatagacatctccaaagcatttgaatcagttcaatggccgtttctcattaatgttctcactgttttgtggttccctcgagattttattcattggattaatctttgcattactacggcctctttttcggttcaagtaaacggtgaacaagctggttattttcagagctctcgaggtcttcggcaaggatgtgcactttctccatacttgtttgttatttttatggatgtgttacaaagatgttggatag

SEQ ID NO: 2574 - DNA, 1273 bp, Arabidopsis thaliana
gccacatccaaacgaatacaccactctgtattcgggtacagtttaacaaaattgcctttagtactcgataggaatctaagaccctggtgcaaaaagagatgcggcggaacgtctttgaggtccacccacaaaggcatggccgactgatctgagggatattgtgcagttgcaggattccaaatactaatgactattgggatgtttgcaatgtgccaatagcgacgcttcaaaacatggtttcagatctgatcgctctctatgaaagcacaattgttgttttgtttaagaactaaacatcaatccttgaggatttttcagtgacaatctgtaacatccccgatccgaactaggatcgaggggaagggctgggacgagacttatagagagtcgggcgagaaaactcgtcccaaggcccggagaagggcggccaaatcgtgtgaacatgaatggccaagagcccgagggaaagaagtgagaataaatagctcggaaagctaagtgggaagctggagcagctcaagggaagctcggggtagctcggacagctcaaagggaagctggaccagctcgggagactgctagctagctccactagctcgacttagctggaaggggatgaggcggttactcggacggttgtcggacggtttccccgacagttaccttgagcggttacccggcggttaccgggccataaggacgcgccacgtgtgtggttaggaaggaagcgccctgaaggatctggaaggacctagaggcgcccgttcgcaagggcggttactcgccccttccttataaataactcgcccttcagccaaggaagtaacagaagtccatataccgaaactctcaccaaaactcagaaaagaaacgtgatctttctaagggtgcgagcgaacggaacaagatggccgagattgagatcatgggcactcccggcaccactaggccgacggaggccgaggaagcgaatggtcgaacgaccaaggtgaggcgtaaccgtaccgaccttaggccgaacggtcttaaagggctcgggaattcggttgatgcgatctatccttctattattctgtcctaacgattgagttatgtgtggggggtgaaacatggggagcatcatagcatatgcatgatcgctaagtgtaaaccacatcatactcatgattcgttaatttcagaatgtgaccaagttcgtgggaaggatatggcttagcggcaaggatggttgtccgggcaagtgggtggtgtttaagttaaagtattggatcga

SEQ ID NO: 2575 - DNA, 556 bp, Arabidopsis thaliana columbia
cctggagattcaaagctttagttgatcattgaaaatgtttcaaagatttggttgccatttttttatatgtttgagaaatgtggtttcagggggatggtccaggaagtgatccacagcaatggcgagagttgtttaaagctgcagaatccaaatgacaaaagaggacttttgagagatgtgtacagaattgttagcgagacattacatatatggtcgattgtgtatacatgtgctttcttttggtctttgacttcatcattactgtaattactttatctataactagaagttctttcttgcaaatcaacttcatagcaagtgctaagaagtccaaaagagtaagtaggttgcagattggattcttcctagccacttatccgaaattcagattcctgttagattttcgacttctcttgagttgtaaccaaatagcgacttgagcaataaacaataaagaaagaacagagaaaatggttttgctgaattttcctttattgtcttaaaattaataaaaggtacaaatgtagcacaacactaagaacaagaagatttatag

SEQ ID NO: 2576 - DNA, 607 bp, Arabidopsis thaliana columbia
  unsure (1)..(607): unsure at all n locations
tggacgcctctgcagcttcaattccagcagaacctgtgcaatagctgttgcgaattgtctgctggcaacatttatatccccattggtgatctttccaccatgatccccaaacacttgtgtgattgttagcatgaacatcttcttcatatttgctctttggaattatcacctcctgtacacaataaacaacacgtattaagcaaacttatctcaagctgttcatatcgcaacagctatcactcgactcaagaaagaaccatcaaaaactatacctgtcccttcataatcctccctgccctgtcatactcaatttgtctttcactttggccaagcaaaagctccatcggaatttcaccttctgtagctgcattcccatacttttccataatggtgtcctttgtctgagttttcagtttttcctttgcaactttaaagttcttatagagcaattcagcttgggatggagccgcttgcatatgcatgtcatgtcccttgtcaaatgcttcacatgaatggatgtttatctgtttgaantccagagcttggccactgtttctatattgattatctccctggatagatgataagaaganaaaaaaagttagta

SEQ ID NO: 2577 - DNA, 500 bp, Arabidopsis thaliana columbia
aacacgagcaatcaaacgttcgatcagattgagccaaggaggtttatttgatccttctttggtatatttctgacctgagaaatttaacatggcacaataatcatttagagaaattattcatgataaatctgaatgaacaatatggataatcaaacacttacttttgatgttgtgagtctgaactttaagcttcaaatctgatttaggatcatttgggacaaagagcagcatcacttcactctgagaacaaaaattggaagatcctttgagaaaaaaaccattgagtaaggaaacaaaaatagaaatcatatagtggcaaagagttaaagtattcttactaattcgagggatccaagagttcctggatccttcacaaagctcttgtatttgactcgcttctccattgatatatgcccaaggttctaaagcatggtaaaattggtggattaagtttgtgagctggaggaggtaaggagtgtcgacggcggaggaaatatttg

SEQ ID NO: 2578 - DNA, 642 bp, Arabidopsis thaliana columbia
ccatgaaacttgcgcgagagggccagacagaaactcaacaggttcacaatccatatgtttcctcttctttgtgcccttcttttgagaatttgggagatcttttttgtttgagccaaaaccaacagattcaactccaccatcatgtatgccacccttctcctcatcagctctatcacgaggctgttttggaacttccacgctcacaagggaatatgtggtaatgacgacatcatatttagctagctcgtgaggatcctttgttctgctgcaaccgtggtataccagcacagagagatgtgcttcaagagtaaccttcttgcgtaattcatcagcccattgtctcatcaaactagtgggacagacaataagagttccggcagctggccttcccctcatcttgcataaactatcttcgacaactttgttttcattgaaaaccacttgagagtgatcagattgattgcatcctccattctttgaatcttcttcacatggtagataaggtgtagaccgttctgtcagtataagcgctattgtggaaactgtttttctaagtccctgcagaaaaagataattacacaaggaaattttataacatatatatttgttgtgctgaacgtatagtaaatggtaatatatata

SEQ ID NO: 2579 - DNA, 606 bp, Arabidopsis thaliana columbia
aattacggctaagctcatttttggcttttgataagtaacctaaacaaagagtcaaaacaagcaaaagtcacataagcacaatttaacggcagtgcataaacggagtggcatagcatcgactaagagttttaccaggaagccaacagcctgcctgatatgccttaactcatcccaagctgagccagcatactttacgaaatgaaacaacaattccaattcaaaagataaaaaaatattcaagcgatctagaggcaaagcgtgacgaaatctcggcttacttcatccgtagcctctatacaccactgctctaattcagccaaaccagctttaacgtactccccattgctgaatgagcaacactcaccacgtagaagaacactgcacaagtttaatgacataattctttctgtcaaccaaggaaaaagtggtttgacaggaaaaaaaaaggaaacaaaagagagattcgaagtgaaacatgcctgtggaagagttgcaagttgatgaaggagaagatttgtgtgaataattggccgactatgaagggtggagcctgtatcatgttaacatatattgtattaatcacatttgccaaaagaagtttaattt

SEQ ID NO: 2580 - DNA, 595 bp, Arabidopsis thaliana
ggttcaagcaaggctctggttaagaaaggccgcgcgaaaaagaagagtcgagcggttgatttccgcacacttctcacactatgcgcacaatctgtttctgcagggataagattacggctgatgatttgctgaggcagataaggaagcaatgttcacctgttggtgatgcatcacagagactagctcatttcttcgccaatgcacttgaggcgcgtcttgaaggtagcacaggaactatgatccagagttattacgattccatttcctccaagaaacgaacagctgcacagattcttaaatcctatagtgtgttcttgtctgcgtctccgtttatgactttgatctatttcttctccaacaagatgattcttgatgctgccaaggatgcttcggttcttcatatagtcgattttgggatcctttatggtttccagtggccgatgtttatacagcacttatcaaagagcaaccccggactacggaaactacggattaccggtatcgagattcctcaacatgggcttcgtccaactgaaagaatacaggatacaggtcgaagatgacagagtattgcacacggtttggtgtccatttg

SEQ ID NO: 2581 - DNA, 937 bp, Arabidopsis thaliana
tggaaaagaaattgagtagactagttgatacatttgagagtttcgggaatcattttatcgtcttattgaattgataattaggcacacaattgtaggattgttgacaactattcattttgaaaggattgtgaaagtttgtttgaagattgtagtaattgaatatgtatttgttgcgatgcagatggttcaaagaaaaatgaaaacgaaaatgctggggacgcgttctcaaatgaatatcaaaatatgttaattcctcttatggccattgctttaatcctttctactttctctcttggttcccgagaacagcaacaggcaagcatgtccaactatactctgtgtatcatgttatctatataactgcagacgtgtgggcctgaggaatgtcaactaattatccgtgttatatttgttggttcagattagtttccaggagttcaaaaacaagctcctcgaggctggtttagtggatcacatagatgtttccaataaagaagtcgcaaaagtctatgtgaggagttcaccaaaaagccaaacaacggaagaagttgttcaaggtcctggtaatggagttcctgctaaaggacgtggtggtcagtataagtactactttaatattggtagtgttgaatcatttgaggagaaactagaagaggcccaagaagctataggcgttaattctcatgactttgttcctgtcacctacgtcagtgaaactatctggtaccaggaactattgagatttgcaccgactttacttctcgtggctacgctaatttttggggcaagacggatgcaaggtggactgggaggtttaggcggacctggtgggaaggctggccgtggaattttcaatatagggaaagctcaaataacgagagcagataaaaactccaagaataaggtcagcatttcaatcagggtggagaagttgaat

SEQ ID NO: 2582 - DNA, 691 bp, Arabidopsis thaliana columbia
tgacctttaaaactatatatatgatctaaaaacgtgatggcccttctttagaaataagagaaagttctgggccaaatttggaaatcttcaaaacatcaataagttgcgtcttcgaattgccgtcaagtattggtgtcgctcgacaccaggggtggtgacgttcaacaccaacgtgcattttagtttccagatttcttcagctgtataaattctctgtattcctccagaatgctccattatctacaaatgaatcccaaacatgtaaagacctgaaaatgacttgaaaacactttagaaataacaaatagactctaaaacctatacctaaatcataattaaaaacattaaaaatagggatatatcaactcccccagacttagcttttgcttgccctcaagcaaaacacaaaagctgaacctgtggaagaggttttaaaacacaggaactcccaacattctctagcttattgccttgatcatcctaaccaaatccatatgtctagcagttctaatcaaatcctaaccaacatgtattaatctgcaagcttacacaacattctagatttcatacctaagttccattactatatctaccaggctttcatcgctgagtctcatcaaacaagctaacattcaagatccttctagactcattcttgtactataccatgataaatagatgattattttta

SEQ ID NO: 2583 - DNA, 499 bp, Arabidopsis thaliana
gtaatgggattgaacccataaacaatttgaaaaggtgaaaatttagtagcataatgcacataatgattatatgcaaactcaacatgaggttaacagtcctcccaagtcttaaattctttttttatcaatgcacgtaggagtgtagacaaagtcctattaactacctcagtttgtccgtcagtttgcgggtgacaagtagtagagaataacaacttagttcctaacttagaccaaagcgtcttccaaaagtaactaaggaacttagtgtctctatttgatactatggttttaggcattccatgtaagcgaacaacttccctaaagaacagattggctatatgcatggcatcatcagttttatgacatggaatgaagtgtgccattttagaaaatctatccacaaccacaaaaatggaatctttacttgtcctagtccttggcaaacctactacaaagtccatagaaatatcattccaaggatgcaaagaaataggaagag

SEQ ID NO: 2584 - DNA, 1072 bp, Arabidopsis thaliana
cagcgttacaaagccatattggttctccattggataacgctcctccggggattctacattagaaagacggaaataccctttatgttttgtatctcaaaatctttatcttaatgggaacaaaagttttctactactttctttgaatagcaaatgtataatgcaattatgcaaatgaagtaaaaacttatttccgttgtgctttcgcatttctatctatgtatgtcttctaagattaaaaagaggtatactttaaaaaaacctacaaacataaaaaaaattaagtaaatataaaggataattgcattgttaataattaaactcgtacatgtcggatttctgaataagctcacatggaagaagaaatgaaggagacaagctaataaagggtgttcttgtctttttttatgagacaaaataaaacatacccttatactttttttttagaattttggtatcgtttacattttcttataatgtctacgaataaaataatactataatttaaaaacgatattcttcataaaagaaatttttctgaaagataggtttttgtttttaaaaaaggtgaaatgaaaggattatgaggaagagacggaattacccttcaccgatgttgaagacgaaagacatgcatactaagtagtaccactcggtgtcggtgaggtcctccggtgagagagcggcggcggaagctcgtctagtgacctgagagctaccggaagctgaggattcagcgagggagagagattcataaagctctctaagctgctcacttctctcaagacctaactggtcaattttgacttctgctgcttgaatcgtcttccttgtctttatgtctccattgtaatatccatctccccactccaacactcttcgtttagagaaaacaaaaaagatagccaagaaaaattggattaatcgagaaaacataacaaaaatcgaaatcttgaagtaaggataaagttttatctgagttttggactaaagtcaagaatgtctcaaacaaaactttattttcaagaaaaggtaatttgaaggataaagattacgagattgtaccatggttgag

SEQ ID NO: 2585 - DNA, 891 bp, Arabidopsis thaliana columbia
ataacttcgcaccaaaatcccgagcaaatgtctcatagattgcgtatgaatatatcttttctaactctctctttattgattttgtttatgctttcttattcatacatgttgtttgtttcatccatcatgtttgagtagtctgcttgttagagttagggtttctcattagagattcatatgatttagtagatcgccccttgctaggttatctataggagtcttcatctttaattgttcttaatgctagttctagagtagctaactagaacttgatatcagataatagatatacccaccatatgtatatgttaccataactactatttgatgagcctggtttatagtgtgtaataagaatcggcctatctactaaggtgaacttatcgaactcgtttagcatgcatgtttaagtatagaatttcacggcacatcaccgggaatcttagctctaggcataatgagtttcattgaatatcaacggttattctgtaactagagtttgagtttaagaacggttcgataacaacctagctatttctatatctactaatcatctgtttcctgtgaatatcctaagcctgacgttttattatcttgtcttataacttccaatctgctatttgcttattttactttcttttatttactcattacctatctagcttaatttcgatactttagcctattgtgtgaacaaaagagctttgtggaattagaccttaagtactatcgatgatctcttatttgagatagtggtcttaaggcaaattgaaccatatcaaatttggcgccgtttccaaagttcttgggaatcccattaggtttagttacagattttgctagatttttttttttgaactccgcgtttcttgtttctctttcagtgttcag

SEQ ID NO: 2586 - DNA, 964 bp, Arabidopsis thaliana
tactcgttcctgtcgtaatcgttcattccatccagttttgtgtgggaggaaaaagtcctgaagcgtttgaaactgtggtcgagtgtgatcaagttggcgcggaggtcggggagggtgtagtgcacgccatggatccacccaaggctgaatcgaagttccatctcctactatgacgcgcattcctttttttaatagatctctgcccttcagtagggattgccatccgaaggagctttgtgagccaattgaagcgactaaaacatttgaattaggaaagtacctcccccgcaacacacgtgccattaagcattcaggattatgaaggattctccaagcttgtttagcgagtagtgcatcattgaatttgccaatatcccgaaatccgagtcctctttcttcttttgaaaatttcattcgctcccaagccacccaatgcattgcgtttccttccggttgagtacaccaccaatactgtgaaatgatgcgttcaatctcctcacatatgtgtttgggaagcttgtaacagttcatcgaatataccggcatagcaagggctatagcttttagcaagacttctttacctccatgagaaaggaatttattcctccatccctttgttttctctctgaccttttcaactatgtactggaacaactcaatcttctttcttccaaattgctcaggcaatcccagatacttgttacatcccccgtcattatgaatgtcaagagttctgcgtatagccgtcttcgtcgtatcttgtaccctttttccaaaatgaagagctgatttactggtattgaccttttgtcccgaagctctttcatactgtgttagaatatccttgatagcaagacacgatttcatgttggcttgacagaaaaacagggagtcatctgcgaatagtagatgacttacttgaggacttttattacttatcttgattcctttgatgagacttgag

SEQ ID NO: 2587 - DNA, 938 bp, Arabidopsis thaliana
cgcttacgcatgtttctctcatggtctgtccctaaccgcaactggcaacggacgagaggttgaagccgtgaacgcgactttctgggatttagtgccatcattcgaagctgcaaacacagtgggggagttggttatgtatcacataagtcgactgcatgctgaaggaactcggttgtggaatcgttcatggaggttcgtggtttcaccagactgcttgggtcgttgcagctacggagcctgctaccgcaattgcttcttctactggtatgctagggagttgtgcatattttattaaggaaaggcgttcgttcagcatctgatttcccattctatgcatcggctataatttcgggtttttgtaaagcatatgttttcctgttatatgcttcggctttaatactttggttgtatgctctactcggtttgttgttatgctttgtatttcctgctcttatttgaatgtttttttatttccttgttttattgtttatgttatgaatggaactaagtttgtttatattatacatagagtacacctatttgaacgtacacaaacataaatgtacgtccatggaaagtcattacaattaggctgtatttgtaataagtaaactgtagcaattaaaaggtaaaactttagcataaatgtagggatatgtttaaatttggttacaaatctgtagttatttagaataaaagaaacaagagataaactaatagacaacgattctgatttcttccacttccggtatatccggattagcaatgactttggagatggggccattggtcacagccttcagtttatggatcccggttagacgccatgatacgagagcgataatcttttgaggaccagttagccgctggaagaatctttgaaattcgaaagcttgatcattttgtgcttcacattgaagaacttcttgctatagaga

SEQ ID NO: 2588 - DNA, 740 bp, Arabidopsis thaliana
tttcaaaattgaaaagcttcttgctttgtatgatttgctattctccatttctctgatcagttttgtaaagcgtgcatagtctgaattcgaaactgtaaagcttcttgccttttttgtgttcctgatgtttcggttaacttaattctctgtttcgttgactttgtttcaataggtaccgagccatcactagtgcgtattaccgaggagctgttggagcgcttcttgtctacgatgtaacccgacactcaacatttgaaaacgttgagacttggctgaaagaactcagaaaccacactgatccaaacattgtagtcatgctcgtgggcaacaaatctgaccttcgccatctcgtggctgttcagactgaagatgctaagtcattcgccgagaaagaatctctctacttcatggaaacctcggctctcgaagccaccaatgttgagaacgctttcgccgaagtcctcactcagattcaccacattgtgagcaagaaggcgatggaagctgcgagcgaatccgctaatgttccatcgaaaggagacaagatcgatatcggtaaagatgtttcagctgtgaagaaaggtggatgctgctcgaactaatcagagagtagaattattgttacaacctaaggatcggtttttgttaacggttctatcgaatatgaagattgcttttaggttgagtaatgccgatttggtgtatttctgttatttatctgatctatcaatgttattgtt

SEQ ID NO: 2589 - DNA, 591 bp, Arabidopsis thaliana columbia
tttcgctatgaattcctgagatctttaaacattgcggccaccacaaacctgcctgcaatactttttgggcggtcttgaaggtgcgaaatgccctccttaggtggagccatggcaatgttccagtatcccttgaacttctccttcagagacacacctcctgaataacccatcacttccctttttatacaaaaaaggctcatcccaatagtaatggtggacatctcataagaactttttatttttatatgcatccaaactcttgggatcataccacttactaaataattgactaaattcgcatacaagggcaacttttcttcttcaactgcatatgcttcgtcgagcatgtcctttgtgtcgatgtttttgttaacaaggttattggggtcggatttcacccaagtaatcgagccgaccagaggaaatgcctaaggccatgttagttggctcgggcatcatttcaaaggaccaccccgagccggcctcaaaacacctcgggtatcatttcaaagagccatcccgagctagccttgaaacgcctcagacatcaccgtggagtcgtcctgagccggccttgaaatggttcgggcg

SEQ ID NO: 2590 - DNA, 987 bp, Arabidopsis thaliana
cagagaatacagagaagagacaagaagacaacgagggacccgccgctgacgcccatgtcttccatgcaagagaccaagagacatggaatctcttcactcccactcgatcaccacgcaaccccaccttcactcgatatcacctccatcactcgaccttgttttctcctccataaccagataaactcgaccccatccttcttaaatcaacgctccctttttcttcttgtactcgacctcgacgccatcaccatccccacacctattaaactcgaccccattccccttattcatcacaaccaacaaacccatcctcatcaaagccacgcactcgaccgcttctcactcgcctcttcaccatcgtctcaagatcactcgaccgcgttgctggccgcagcagaaggagagaggtcgagtttcctcagagcggtgctggccgccacagagctgatgaggtcgagtacccacctgctggagctgatacagaacaaggaggttcgtctatggcctgggagcaatcgcaggcagccattgacgagcaactacgttcattcttcgactgaggtaagcgcctcacttcaccattgtattatactgtctgttgtgatttgtttcttcattttttgtttctgtgattggatttgtcctgagtactctcttccaagtttattcacatagtggactgtgtgatttaagtttgggggagggctcaggaagtgtgtgttgcattgtgtataattttgagcctgcattcatctaaggcatagaaaaaccgaaaaaatttgaaaaatttcagaaaatgatttcacaaaaaaaagagtgttcatgtagttgcatcttatttaggatcgagtctagagtgtttcatttaggattgttgcatatgcataggggatgatgatgagatagccttgtaagcattttgattcaccggataaactcagtgccctcgttgctagttgtctgttgcgtagtcaatgaatttgaaat

SEQ ID NO: 2591 - DNA, 589 bp, Arabidopsis thaliana
ccactggttctcgcaaagcctgagtttggagagcggctatttctttatatttccgtctcagaaaatgcaataagtggcgttttggtgcgagttgagcggagtgatgaacgacctatcttttacgttagtaagtctttctccgatgtagaaacaaggtatccaatgatggagaaattggccttagcggtcgtaaccgcagctcggaagctaagaccatacttccaatctcatccaattgtggttttaacttccctgccacttcggaccatccttcatagtccaaaccagtcgggaagattggcgaagtgggcaatcgagctgagtgagtttaatctcgagttccatgcacgaacaagcttgaagtctcaagttctcgcggatttcctgatcgagctcccgttggctactactgcatctgacgtcccaagtcaaccttgaattcttcatgtggacggtgcctcttcaaaacacgggtccggagccggagttcgctcaaatctccttcaggcaaaattctcgaacagtctttccgactcgctttcaacgcctccaataacgaagcagaatatgagtctttgttagcttgact

SEQ ID NO: 2592 - DNA, 525 bp, Arabidopsis thaliana columbia
tagtaacgtccgccagtgtgctctaaagtatgggcgaaatgaaaaacggcgaacgaagtaattcccgttttattcaatgagggttgcccggcaacctcattgctcattgattcttatctgtgtatcaccgtcatcattctcatccgagaaccaatcgaaattaacaacagccttcttctgtatgcagcaaggcaaaaagttctgtaactccattgttattaactgcactggttactaacacgttgtgcgctccagcttcccgtaaccaacttttcaccaaagatatttgttccatgctggctaaatctgctttggttactactccaatgaccgggtgattcatggcccggtacgctggttttacctctaattcctgcttcagcgctgagattcctgcttgttgccagaaaagcaggcacctgccagtctgaacggtatcgatccggaagcgtatctgcgccatattctgagcatactgccggaatggcctccaaccgtgttgacgaactctgccatggaacgtag

SEQ ID NO: 2593 - DNA, 1323 bp, Arabidopsis thaliana
gctaggtgtagcaactcatggagtccattatattgggctctctccacctttcgctgaatcctctcttgtaatccatctatgaattgagccatgagagcttcgtcagattcctctaactccaaggcgttcatgagcttctcaaactcctcaaagtactcatcgacggtccttgttccttgagacaacattctaaaatatttttgtaagtctttatgataatggtcagggacatacctcaaccttaagaggtacttcatgtctccccaagtgtttatgggaccaaatctttttctcctcctatcagctactgtcctatcccacccagataaagcattttcggtgagctgagcggctgctaaggacaccttccgagattctccataccataacattcgaagatgtactccatccgtcgctcccaatccatgtacacctctggattagattttcctgcaaaagtaggagctgttagtttgatatcttggttctattcacgaggctctactcctcgtgcacggtttctcatcaatggatcttctctccgttggtgttggcgtctcaaagggtcgggaggtggatcatcttcatcatccaagtcaggaaactcctccgcctcctcgcgggcattcctacgagcctggtcttgccccaattcaaccctgggatagggctgttctaagcggcctagccgtttccttaatccccttaactcctccgtcaaagtagccatcatttgcattacggtgttttggggaatttctgctgcctctcccatagtattacctaaaactgacatgtgcttagacaaaaacaacaaagaaatcaacgtaccacaacaatagaaaagaaagatcaaaaccaagaaacctaaaacttgttgaatcactttctgacacacttgctgatgtagtacaaagttaacaatatatatatatatatttttccctgattaatattacgaaactcaaaaacaaatacttaacacgaaataaaatgaaactgaaatacttgttttttgtttttttaatttaaataaaacagaaactagactaatgtagaaactgattcagaaagtaagccaggctataagaaacgatgaaacctggcaaaggaagtgcaactgcgctctgataccaagatgatacaagactcggtggtgagcttgtatctgatagagatggtggcttccaagctggcggtcgcttctctcttgtgaaggaaagatggtcgaagatggagatctaacatgatggcgatcggttctcttgtgtgggatctttagaggggaagtctggcggattgaagtcaccacagagatgtgat

SEQ ID NO: 2594 - DNA, 515 bp, Arabidopsis thaliana
tgtccaattcaattaagaaatattatgtaactcatttgatcatccagagatttcttaccactgtgctaaaaagacagacagttatcgtactcgtgatcatgattgcattcccgcgtacatctgtgtgcccggcccttgtaaactacaatagaaacaagtgttaaatgatgatttgtgtcatttgaagcttcatagagagtatttaaagacattctttttataccttgttgtatgcaagagccatagatacagcacctctcatgagaccagaccaccaaatcacaacctaaagaatgggaaaaaatgatagatataaatagctgaaatccagaagaattattgaatctattagtaccaagtagaatgatacatacctgcatgttaaagttgattttctcgctttgattcttcttggctaagttagatagaaacgataacggaaagacgaacgctgctcttccaaccatgaccagacccattaggattgagctcactgcgatcgatgttcccggtgt

SEQ ID NO: 2595 - DNA, 863 bp, Arabidopsis thaliana
tctcctaaatacaatcttatcctaaatctcttaggatttggttagtttatttctcaagctaacttcaagcttatcaacattcactctcttaagcttgaaatcacattttgacaaatcttgaactccaactagctctctcatttctttgaatttgattcttccaagtgcctttgttagaagatccgtcttctgttcttctccgggaacgtgttccacttctatttggtcattctcaacacactcacgaatgaaatggtacctcttgtgaatgtgtttgctccggccgtgaaatactggattcttggcaagtgctatcgccgatttgttgtcaatgagcacctcaccttcttgcatgcttctcctgttacctctccaagtaattcctgcaaccaaattgcctgcttagctccttcagtggctgccataaactcagcctcacaagacgataaagccacagtttcttgcttttgtgtacaccaagttatcagagagccatcaaggtagaatatatgtccggttgtgctcctcccatcatcctcgtctacattgtgactgctatcactgaaacctattagccccgacttgtctcctcgcttgaaagatagtccataggaagtagtgccacgcaagtatcttagaatctgcttcatagctactccatgaccttctttaggttcttgcatgtatctactcaacacaccaacacagtatgagaggtcaggtcgtgtgtgaagtagataccgaagacatccaatgtttcttctatactcttttggctcaatgttcttctctgtctctgagtcatgacttcatttctctggtcccgcttttgacagcttcaaactggagttcattggaatgtg

SEQ ID NO: 2596 - DNA, 609 bp, Arabidopsis thaliana
gaacagcgtgtagaggatcatcattcagaataaccaccaactgaaaagcaaccagctatagatgaagaacctccaactgaacaccaaccatctatagatactgagagagatgttcccaattcagaagagccagaaggagaggttgaattttctggaggacatgagcagccgcgtaaaagacaaagaggaccaacaaagatgaaaaacctagctaaggatccaacagttagagtgaaagttgattacaatctaatgggagaagctattggtccagggtcagttaaattgtcatcatatgtaggtacattgatgcgggaacacgtccctatcaacattgttaactggaagaaagtgactcgagatctgaaaacagttctgtggaaatctattcaggtaacaagtagtgtttttttttaagttgtctgtaattgatccggttcttctataattatggtgtgattgttcgtgaatgcaggcaaggtttgagcttgatgaagattggcaaaggatatctgtgataaaccagatgggaaatctgtggagagccacaagtcacgcagggtgaaggctattaacttggctgccaataccaagagaggatgaatttga

SEQ ID NO: 2597 - DNA, 823 bp, Arabidopsis thaliana columbia
tcttcacttttcttcttaaccaaacgactccttcccatactaaacggtttcttgtactaggtcgtcgacaagcatcgccgcctatgtgatgagaggcagcggttgggcctcaagaatgaatccgaggttgacgtcaagaacgagggtccacctcgaatcctgaaccagcagtgaaggagcctgttcccgagcctcttccctaaatgtcccccaaaacttgaaagtttttctattttcgtatggacttatttttggccttcggcccatttttatttaaggaagcttccctattttctttgattccacaaatattcgttttggagatattctttgaatgcacggcgatgggagcgacgtgaatgcttccgcgaatcactccggccttgaatggaatcgcatctttgaaagttacgaatccttctataaattgcttctctatgttttgtttattcttcatctaaccttcgtttttccttttgtgtagtaatggcttttaaccttcgatgctcggagtccatgccagactttgccagggttggatgattgatgagcatatcccgaacgtgtcggacaaaggacgcttcccacttcacaacttcagatcccagatctgagccccatgtgcattaatcaaggatctttcaagcagagatccagaaattgcaatggcctttatcaaagctttcgcgtctcaacatcaaaagcgttcatcagaaatgaagaaactttgaaagcaaatcaaccagatgctgcggagagtcaccgtgatatcaagggagctacacaccatcaactctcatatcggggactggatcgaacatgg

SEQ ID NO: 2598 - DNA, 1143 bp, Arabidopsis thaliana
tgagacgacagtttttcttttcacattttacagcaaccttcagtccaatggtttgactggaaagttgcctgcagagctcggtaacttgaagtaccttagagaacttcatattgacaggaataggcttcaaggaagtcttcttgttgctggagcatcgggctatcagtcgaaagtgtaagtttaaatagctcaagaagccaaaaatgaaacactatgtgacttctgtctatgatggcaatgttaatcgggttttgtttattcaatttatttaggtattcttcaaattcaagtgcaaacatcgctggtttgtgcaaatctttaaaagtagctgacttttcatacaactttttcgtgggaaatattccaaaatgtttagaaaaccttccaaggtattctatcatctatgctgtcttttggaactctctaagtcttcaatttagtcttagaaatgctcttttgtggtcactaggacgagctttcaagggaactgcatgcaaaacaaggatcttaagcatagatcttcttcccaatgcggtgtgtaagatagaataattttcactttatcgacatacatgttcaattagtcttggttttctgaatgttatccctgttgcagctaatgcacaactggtcaaaactcatggaagcccgagcgctgctcctaagcaccaatcagctcaaatggtggctaagcaccatagagcatcaaaacctaaatggcttctagctcttgagatagtcacagggtcaatggttggtttgctccttctggttgcacttttctctgcagttcaccgctggaacaatagatcaactctcatcattccttggaagaaatcttcaagtgaaaaggaaaagttcacagtctacgtaggttagaatctttcctaattctttaccttccaatgtagaatccatggagcaaagaactaaaaaaacgtggcatgtttttattttaactacagattctgaaatgctgaaggatgtttcgagattaacaagacaagagctcgaagtggcgtgtgaagactttagcaacatcattggtttatcagcagatagtcagatctataaaggaacgctgaaaggtgggtctgagattgcggtgatcctctttgtgtaaggaagaagattggactggat

SEQ ID NO: 2599 - DNA, 504 bp, Arabidopsis thaliana columbia
attcttggaagtaggatacttaagcctccatgctcgaaccgccgtgtcgactacagcacgagctgcagtatctcgactaggagctgaagccacaatatcaacagcttctttgttcgacaaaacatcccatacctagcattagagacactttagctccaaagatttcgatagtaaccagtgagaagaataagaagagtaatgtgtaccccgtcagtagctagaataatatactgatctctttcagtgagtctatggtagttgatatccgggacagagattagaccataatctttaaggcagaagtccccaaaagctcgagccattgctaaaccaggtgaatcgctgttcggtaaccacacacgcgcaacctcaggctcgtcttgtaaggcaaacactctacctttacatctatggattcttgctgattcacctaaagcaagtacatagagaagataatcagattatgtttccaaagatgatcaatagtgacaacataaagaagag

SEQ ID NO: 2600 - DNA, 476 bp, Arabidopsis thaliana columbia
tgtagcaccgtaataggagaggaatgtcttacatagatttttgccttatttatttaggatggtgtaccagagacgattgagacacttcgaaaagcagggataaacttttggatgctgactggagataagcagaatacagctatacagattgctctttcatgtaattttaatctccccaggtaagttgggatcattttctcttctttgttatttgtgttagaaagctttgcctattactacttatcatactttcctaccataatcatgtttatatcagagcctaaaggccaacttctgatgattgatggaaaaactgaagaagatgtttctagaagtttggagagggttttgcttacaatgcggattacagcttcagaacctaaggttcacctcagctaaatttcttgaactgttacatccttggaacaatttcctctcacctgtatcaaagaataattttgtgggtcgtacaggac

SEQ ID NO: 2601 - DNA, 466 bp, Arabidopsis thaliana columbia
actcactcaatctttcttgtgacatagtcgaccgaagatacgatttgatcaacttcagctttgaaaaacttctttaagcagatgcaaccgaaactggaatcgtcaacattgttcctataaagcaatggtaccttcaatatgagacaaaaattatatattaaatctgctttgaaagcaaagtgaaatttttgtctccaattatagagtaacataactattctaatgagcttttgctatttggatctaatgttatcatattattacctctacaacgttcatccttttctagcgcttgttgttgttcatcttttgcatgcggatcatatatgcgtgtaatctggtcgttgtcaaatttttattaattagcatttcaagccattgccattgtcaacgaatattcagtatttattagagaaatcaacagaaatttaatatctatttagttttgttgaaatttagagatata

SEQ ID NO: 2602 - DNA, 646 bp, Arabidopsis thaliana columbia
gtttcacatctaatcagtattgtttgagctaaaaaaaaaaactttgaatccaacgagtgtagactaatgaaaaatctcttgccacaattatgctgctattcaagaatatcatctaatacttgctatctttttaagagttgtgatcccatttcataagagagattcaagcttactaagaaattgatctcctgtttcaatcttattctcaaaaactttccaaatgcacaacagataaagcagaaaacagaatcaacccaccaaaaagacaacaaatttaaggataatttgcaagaaaacagcaaaaaaatagaggaaaaaagataccctgagaaagcaagctccaacaagaggaatcagcagcgatgcttgaccggagacgagctgaagcaacggcactgtgaagtggaatcatcgtttcaacacttcccaaagcagagagaacccttcacataaaatgtttctgattaaaacgagctgaatattttctctaaatttcctttttccaaagttgagcataagagaaaatgagttaaacttcttgaatcagctgaaaggtgaagtagttcctcgaagcgcgagggatggattgagacattgaagcgaaaggagatgaagtagttgtgggtttaagatgagggcttttgag

SEQ ID NO: 2603 - DNA, 592 bp, Arabidopsis thaliana columbia
tgagaatgagaacagagtgcttgatccaaagaaatcgcagaacattgcaattctcttaagagctctcaatgtaacacgtgaagaggtttccgaagctctcacggatggtaagtcattgtctccaattttatttatttttgaagggaaggttccatttgcatcttaaagcagcattttcatagattgtgcacatttaggttcctctgtttggcacatgactcgtttttaaaaatattgatgccttgatgggctaatggagatcttgcggatagatagagatgcgctcatcagagttaacattggtgaaaatctaaataatactaaaatggcttaggcacaagttataatcattgcaaagaaaattgacatatgaaatgattatctctgctttatattgcttctaacatgacagttcaacttatgaaacataccacatgtaaaggagaaaaaggtccatcctataatattttacaagactatcaaatatgttgtagctgacattcaataagattctctgagcaccattgatttcattacgttctcgttctaagatgcatgagcatttgtggtccctattattttaatttaatag

SEQ ID NO: 2604 - DNA, 536 bp, Arabidopsis thaliana
gtgatccccctaaagtttttgcttgcccggaaaaaaaatgaattacatcaaacaatttatcttggcaatttgcttttatctagtcttaacatgtcaagatcatgttttagcccgcgacaccatcacgagagacatcgtagtcccgaagatttccgagtggcaagttacggttgctaacggtttgaccactggtgaaactcttttcatccattgtaagtctaaggaaaacgatctaggtgatattaacctgaagttcttagatagattttcttggaattttggagaaaatatgcttcactcaactttgttttggtgctatatgagcaaagatgatggtcatatgaatgtaaaagtgttttgggatgatgttattctatttcatagatgtgattggaagaattgtgtttggaccgcaaagaatgatggcctttatctttggaattctgcaatcggtgaagatgtactgtcggagaaatggaaatctggatggtgaaacatatttttgatttgttggtaattttttaactattatatgt

SEQ ID NO: 2605 - DNA, 594 bp, Arabidopsis thaliana columbia
ctttatgccttcgatatacagatcttcaccatgacagtgttcatttgagttttactagtttcaatcttcatcctatcaacttaatactggctcggttttctggcttccgagcatagatcgtttcaaaaactccatcagtatcctcttttgctgctcatcaatgtgtgggaaacttgaacgtagaagctctattggcatttcgcggacaatggcttttgcagcttcttcagatatctcagtggcaaaatgcggtggcaattgcaaactctgcatgatgctatcgtatttgctgatgcagtacctcatcaacatattaaagaactcattaaaggaagcgcgccatagagctatccctgcgttgttgaaattattagcccggataagctcggaagctctgtcgagtattgatttcaatactgtggaagctccgtctccaacaggactgcctaaggggcggacgggtgcctgctcagaagaacaagacaccgctgctagacacgtgcttaccggtcctaactccatgttttgaatgcacaagttgataactgttgcaagcttatttgtggttttgatgatatcggggtcagatgaaag

SEQ ID NO: 2606 - DNA, 486 bp, Arabidopsis thaliana columbia
atcccctgttttctttattgattgcatagacaaaaatacacacatacacaacagaaagaaagatggagacgacgatgaagaagaaagggagagtgaaagcgacaataacgtcacagaaagaagaagaaggaacagtgagaaaaggaccttggactatggaagaagatttcatcctctttaattacatccttaatcatggtgaaggtctttggaactctgtcgccaaagcctctggtatgcttttttgcacgtattcaaatcatgttttgatgatgttttctatgtatataactaaattttgtttttattttgttaataaggtctaaaacgtactggaaaaagttgtcggctccggtggctgaactatctccgaccagatgtgcggcgagggaacataaccgaagaagaacagcttttgatcattcagcttcatgctaagcttggaaacaggtcttatatagtttcactaattagtacatgcatacg

SEQ ID NO: 2607 - DNA, 654 bp, Arabidopsis thaliana
ataaaaagaagtaacaaaaaagttctccctaaagattttgcttgcctgaaaaaagtatgaattgcatcaaacaatttctcttggcaatttgcttttctctggccctaacatgtcaagaccatgtcttagtcggcggcaccaccacgagagacattatagtcccgaagatttctgagtggcaagtcacggttgttaacggtttgacaactggtgaaactcttttcatccattgtaaatctaaagaagatgatctaggtgaaattaatctgaagtttagaaatagattttcttggaacttcggagaaaatatgcttcactcaacttttttttggtgctatatgaacaaagataatggtcatatgaatgtaaacgtgttttgggatgatgttatcttgttccatagatgcggttggaagaattgcatttggactgcaaaaactgatggcctttatctttggaattcagcgagcggtgaagatgtattgtcaagaaaatgggaagttggatggtgaagccatatttttgctttttggtaattttttagtacatgtatcttgttgtttttggcaaaaaaaaaattgaaataataaaaaacatttgttttaactttctctcttatattgtgtatttttcatcaatgatagattttttgtt

SEQ ID NO: 2608 - DNA, 1346 bp, Arabidopsis thaliana
ttgttgtataatggaatttaggtttgctcgagttcatgggattgcaccatcaatttatggaacacaaatgaatctacttcagaaggcgagtcagtatcagtaaagaaaagcaatggacataatcaggccgaggaatctcagtcagaggtaccggataatatgcattcttttgaaacgtactatctactcttcaaatcaaaatagagaaatgtactcccagttgtgtttttctgagttccaagtgtctgatatcaattacgatattgaacttcttacagggagaggcagtgacttctttggttggacacacacagtgtgtatcatcagttgtttggccagagcatgatgtaatttattcctcttcgtgggaccattccgttaggagatgggatgttgagacagggaaagattctttgaacttggtatgccttctctctctccttttctttcgtaaatattagggcacacaccagacatgttgttgccgaaaaatcagtgcttttgaagttgttttcgccggaaacttaaagccggtttgtttctgtgaaattgtagttctgtggaaaagctctcaacacggtagatgttggtggtgaaagttctgcccttatagctgctggtggctcagatccaatccttagagtatgggatcctcgtaagccaggtgatagatccatatgaacacacaccaagtcaatataaccagaccggttttttattacacagttgataaactgtcttcatttactctgtaggaacatccgctcccgtgtttcagttctcttcacactcatcatggatttccgcctgtaagtggcacaaaagctcttggtttcacttgctctccgcttcctacgacggcaaaatcatgctctgggatctcagaaccgctgtaatgacaaagcacacacactcctttccgttataacccacggttttctatctttaaaaactaatcttcttcctccttttgcagtggcctttgtcagtaattgatacacacaatgacaaggtaaagtaaacacaatgttatcttccagcttctactcttttagttcttcttgttactgaaatggtataaaacaacttggttttaaaggttttatctgctgactggtggaaaggagagagtgtagtcagcggaggagcagactctaacttgcgaatttcttccggaatcgcaatttcttaaaaggtatgaaatccgaaatcttttgaccatttcttttcttacatgaaatgtggagcaatgaaacatttactcagttccgtacgatgtctgagaaaattcgattcttttcttactcagaaacacaaaccgatcatgatcctggaatgagactgtt

SEQ ID NO: 2609 - DNA, 811 bp, Arabidopsis thaliana
caaagtaacaagacagaagttgaaatacacccaagagtaattaattcctaagctctcttcatccctatgtaatatattagaagctaaatgaaagctgtttagataaagtaaataaagaaatagaaattctaatgaaaataaggaacattatctaatacgcatctctcctttttcctaatgttttatgttgtgggaagttacagctgtttcctctttttttgatacatttatattgtttaaagtttcgtattgggatctgatgttgtgactctttttgtttatcagtttttctactttgattcagtggagtcactcccctctgaacctgtggactcgagtgactttgcaccaagaaacagccggtatgatgcccaaatatctgtatttggggccaagttccagaagaaacttgaagatgctaaagttttcacagtagggtctggtgctcttggctgtgagttcttgaaaaatttggctctgatgggggtttcttgtggaagccaagggaagctgacagtgacagatgatgatatcattgagaagagtaacctcagtcgtcaatttctgttccgtgactggaacattggacaggctaaatccacagttgctgcttcggctgctgctgttataaatcctcgcttcaacatttgaggccctgcaaaaccgtgttggcgcggagactgagaatgtatttgacgatgccttctgggagaacttaactgttgtcgtcaatgcactggataatgttaatgcgaggctctatgttgattcgaggtgcttgtatttccagaagcctctccttgagtctgga

SEQ ID NO: 2610 - DNA, 617 bp, Arabidopsis thaliana
tatatatcactttgtttcacgagaatataacatccacatatgaccacacaacaatgagatacatgataacgttacagacttacaccgtaagcctaagtagagctctcacgttctttacttggaactttggatattcgaaaacgatgtagtaccatgttcaaacccagccaagacccaaatttaaagaaaacaaaaacacttttatatcctcacgattcaaaacgctgtcgtatttcacttgatcaacgtagagatggcgagacagttactaaccatcttcgtaagcttatcggccacgtaagccaacgggttaggctctcccgattcttcaaaaccgtcgttacacgtgctgtaatctgtcatcgctgcgctcaagtttgtgttaacggtggcaatgtcacttgacttgacggcgttaactgcatcttccaaattcacaactgcatcatcatataactcctgacaatcggaggcgtcgactttttcgacgatggccatggccgccttggtcgcggtgatcgaagcttgaatagcgagaatgaggacggaggaagtgtttggtttcagttgaggcgttaagagaggactaacggaagattcgcataacggagggttat

SEQ ID NO: 2611 - DNA, 1420 bp, Arabidopsis thaliana
tcatcacttctcctgtgttctcatctctgcccgagtatcacatcgcatccttgaacttctcaaacgggaaacagcttctttcacagagacatgtttagggtaacttctttttcaaagttaagatctttgagagatttgcccgacatgaccagcgctgcatacttggcaagagggtgtccaatggcttttgacacaaaagggacagtacgggaagctcggggattgcttccagcaaaaaaacatccccagatgttgtgattgcgtactgacagttcatcagcccacatacatttagcttcttcgccagcttagtggtccatgttcgaatagtttgcaaacaagaagctgggatggtttgtgttggaagcatacaagctgagtcaccagaatgcacaccagcttgttcgatatgctccattattccaccaatcaccacatttccataggaatcagtaagggtatcaacgtcgatctcaatggcatcagaaagatatttatctaccaaaacaggtctctctgggtcaacttgtaccgcattttccaaataggttattagtctactgtcatcataaacgatctccattgctcgtccacctagaacataagaaggtcttaccacaactgggtaccctacctcctttgctatggctaatgcatcacgttcgctctttgcaatgcctcccttgggctgctcaatcttcagctcgtcgagaattgcattgaacctctctctgtcttcagcagcgtcaatggagtcaggtgatgtaccccagatgcgaacaggtgaagctccgctcaagctcatgggcatgtgcttatccaaataatgtttgatcggcagagcaagtttcagaggagtttgaccaccaaattgcactattatgccatcaggtttctccaggtcgataacattgagaacatcctcgattgtgagaggttcaaaatagagcctatcgcttgtatcataatctgtggatactgtttcaggatttgagttcaacattatggtctcatatccagcatcctgcaaataaattaaaaaaagtagataagtaagtttagcataaaaaagttgaaacaatgtttactggcttttgggagagacgcttagattgtctaaagacatacctgtaaggcgaaagatgtgtggcaacaacagtaatcaaattcaatcccttgaccaatgcggtttggccctccacccaaaatcaaaaccttcttcttgttgtttggagctgattcacattcaacatcatatgaagagtacatgtatggtgtatgcgcttcgaactctgcagctcatgtatccactctcttgtaagatggaacaactcctagagaaatccgcttggtacggactgcttcctcggttgtctttgtagcaaaagcgatttgcttgtcactaaaccccgctttttga

SEQ ID NO: 2612 - DNA, 621 bp, Arabidopsis thaliana columbia
gatagctcaacaagtcttgtagagatggtcacccttggtcgagtaaatggatcgagtagtggatcgagtaggaggggcgagtaaactgcagccacctttgtagcatcctggatcgagtaaagaggtcgagtagaatgatgcctcttctatagctacctggatcgagtgaatgaatcgagtagagtccttttaaactccttttgcacctgaaaacacaccaaaacatgcaatgcgaatgcaagataatcctagatgcctaagtatgcaaaacaagctaaaatggttcaaaatgatatgatacaatgaggaaatgcaaagctaaatcatgataaacatacacctaaaatgagtaaaatacagtgttatcagtaagtgtaatgtgtaagtgtctggtttagttgtgtaagtgtcttgtttagttgtgtaagtgtgttagtgtattgtgtaatgtgtaatgttaagtgtcagctttagttgtgtaagtgataagagtataagtgtattgtgatgtcctgcttagtaataagagtccgagtgtattgtttaatgttaagtgttaacttagttgtgtaagttgtgtgagtctatgtgactctagtatgcgtctcgtatgatgtgtga

SEQ ID NO: 2613 - DNA, 473 bp, Arabidopsis thaliana
gaaactgacgactttgtggttttagagatggatgaggaaccaaaagaccctctcattcttgggagactatttttagcaactgcatgcgctctaatcgatttacaaatggggaagatagatttgaaccttggtaagaatctcaatatgagctttgacatctccaagaaaatgaagaagcccaccatagaagggcagcttttcttcattgaagaagaaagaaggattacctaagtcctgcaattgaggaatactttgaggaatctgattcagagaaggagactatactgctgatgaaaaggaggcttactttgaggaaagatccaatgagtactctactctccagctatctagagaaaatgcagagtatgattcagactttgaggattcagcaagtgaagatgaggagttctcaagttcctctcttcaatcgtcttctcgtacctaaaacattctgagagtcacgcttagtgact

SEQ ID NO: 2614 - DNA, 1256 bp, Arabidopsis thaliana
tatctccggtctccaaaaattacatcttcggcggctctgcctccgagtcctccgacgattctagcgaacaattgctgtttagacaccaatgtcgatcttctcccggtaagaaccacgtgagaccacgtgcttgacctctaggaaccaacgtaactttctgaaccggatcatgaccctccgtcaaagtcctaaaccgaagcagaaacggttcaattcgacttaaattgaccaaaccggagacatgaaatataagtaattgaaattgaaccggacttacgcacaaattgcatgtcctacttcatggtacgctacaatcgctttacttttaccgtcgatcatctttgtcccttccattccggcgactatccgatcgatagagtcgtcgatctctgtaagggtaatcttgtcttttcctcttcttccggcgagaatcgctgcttcgttcataagattggccaagtcagctccactaaaacctggagttctcatggcaattacgctcaaagatacatctttgtcgagtttcttgcttctgctgtgaacttttaatatctcctctcttcctcttatatccggtaaaccaacagaaacctgtttaaaacatgttgacattataccaaacctgttcgatttattcggtttaaggattaaccaacatacctgcctatcgaatcttcctggtcggagcaaagcagagtctagaatctctggccggttcgttgcagcgatcacaattactccggtattccccgcaaacccatccatttcggttaatatctggtttagcgtctgctcacgttcgtcgtttcctcctcctataccggttcctctcattctcccaacagcatcaatctcatcaatgaacactatacaaggtgaattagcctttgccttgttaaacaagtctctagctctagatgctcctacaccaacaaacatctctatgaactccgaaccagacaatgaaaaaaaaggaacaccggcttctccggctatagccttggccaagagtgtctttccggttcctggcggtccggtcaacaagacgccttttgggattttagcccccaaagctgagaatttctctggggttttcaaaaattcaacgatctcttcaaagtcttgcttggcttcgtctactcctgctacatcctcgaacgttatccctgtgttaggctccatctgaaacttagctttgcttctgttacaagaaaacatacttgtaaaactcaatcttgggttgatatatattcaaa

SEQ ID NO: 2615 - DNA, 1059 bp, Arabidopsis thaliana
tcactagccagttccacggggaatacgaagctaaagacgagtgcatggaagcgtacctcgaactggtcaaaacattgacccaacagttcgaattgtttgaattaactaggatccccagaggagaaaacatctctgcagacgccttggcagctctcgcttctacgtcagatcctttcgtcaaaataattatccctgtcgaaggaatagaacacccaagcatcgaccttacggtcaaacatgcttggagggaaacctcggcaacttgcaacttcacgcgagtaacccgaagcaccaccgccgcagccagggctctcccaacagatgcggaggcaagtgcaacggaagaggagccagagctcaaaacccccgaacaacctgccccgtacgaacctgaaccgtacaatgactggagaatcccaatcatcgattacattgaacgagagatcacacctcccgacaagtgggaggccagaaaactcaaagcctagagtgcaaggtactgcatcatggaagggagacttatgaaacgtagtgtcacaggtccctatatggtgtgtacctacgggcaacaaacaaaagaactcatgaaacgcatgcacgaaggacaatgtggtagccactgcagtggacgtaccctcgccctcagaatcaaaaagcaaggctacttctagccaacaatgctagccgattgcatagcttactcactcatgtgcgataagtactcactcagacatattccacgtagttctttgggcctaccgaactacacctcgcaaatcaacataagaaaaaccgttctctctcgcctattgtttagaagcagtaatccctgtcaaaaccatagtaccaagcgtgataaggactgccagttcttctaactcagacctgaacacgcaaatgttataggacaacatggacttcatcgatgaacgctgagatcaggcaatgatccgagttcaaaactatcaacaagctgtcgcccgctactataactccaatatcaaaattcggagatttgaagtgggagagctcgttctatgaagcaacacgagagagcta

SEQ ID NO: 2616 - DNA, 858 bp, Arabidopsis thaliana
aagatttcaagatcactttattggtatacaaaacaaaatgtcttatcaacttgatattatgcctcttatgccaccaaatacaagttttgtttttgaggctaaaatccaaatataagttagttggacttttgtatgtttgtaatttaacaatcttatattacgggttgaaaaaaataaatcaaccaccacgttatttcatgaacgttataaaggatctctcaagatatgaaagatcacatgttttgtacacatcagctttcaacgtgtgtaacgtgagtgtttgatcaactactacgttaacatccaacactataaatagtaattttgcgattgcaataagtcacaacactcgacacaaaagcaaaaacaaaaatgggtgagaaagatattccaaggaacttgaaggaagaagaagaagaagaagaagaaaaccaaagtgaagaaaccaaaagtttgatctcttcacttccttcagacatagattgctcagggaccaagttgtacaagtaccaaggatgttggtacgacaaagatattctccaagcaatcctcaatttcaacaaaaactttcagccacaagaaacggatataattgttgcttctttccccaaatcgggtacgacttggctcaaggcactaacattagcactcgcgcaaagatcaaaacacacttcagacaatcatccactgctaactcataatcctcatgagctagtgccgtacctcgagctcgatctttatctcaaaagctcgaaaccggatttgaccaagttgccatcatcatctacgagattgttctcaacccacatgtcctttgatgcgcttaaagtaccgttgaaagagtctcattgcaagatc

SEQ ID NO: 2617 - DNA, 836 bp, Arabidopsis thaliana
atttcaacatccaaggccaagttgactttaatatcttctcgcatctcaagttgctaggaaacctttacctatcccattccaacaccaccactacaattgacttgaatgcagtcttatcatgtttcaagatgctcatttcattggatctctcaggcaaccatgttttagtcacaaacaaaagttcagtttctgaccctcctttgggattgataggctctttgaacttatcaggatgcggtatcaccgagtttccagatatcctaagaacgcaacgccaaatgaggacgctagacatttccaacaacaaaatcaaaggccaagtgcctagctggttactattacagttggagtacatgcatatctccaacaacaatttcatcggtttcgaaagatcaacgaaacttgaaaaaaccgtagtcccaaaaccatctatgaagcacttttttggctccaataacaatttcagtggaaagattccatctttcatatgctcgttgcgctctctaatcattctcgatttatctaacaacaacttcagtggtgcaatccctccttgtgtgggaaaattcaagagtactctttcagatcttaacctacgtcggaatcgtcttagtggaagtcttccaaagactataataaaaagtttaaggtctcttgatgtgagtcataacgaactggagggaaagcttccaagatctttgatccacttctctactcttgaagttttgaatgtagaaagcaacagaatcaacgacacgtttccgttctggttgagttctctaaaaaagctgcaagttcttgtcttacgctccaacgcatttcacggacggatacac

SEQ ID NO: 2618 - DNA, 950 bp, Arabidopsis thaliana
gtccacagcaacactccttcttagattaaaattttgattcaaagacatatcatatgcatcaattccagtagaccataactcttttagctcctcaataagaggttggaggaagacatcgagactatctcgcaggtgatttggcctattattcagaattgtaaataccacatacgactatatggcactttggttcttcgacggtagtcatgatccataggcttccatctttgaccaccacaataaccgacattgatcttccttttcgtcttctttccagaaaagcatacaattgttaatacaaacatcgattgtataataaggaaggcctaaactgcgcatcaatttttctgtcttgtaatgcgaatcagtagcttggtttccttctagtaaaaaatctgtcaacatttgacataccgaatccacacatctttcactcatattatgatccgccttgttctgcatgactcaagctgctaactataattgtgactggccttcacaacaaccgatcgtacaaaggattttgggcaccttctaacaagtcgtagaatttcttagaatggttacgtacctgttcctccacattctgataagtaccatcttgatgatagttatcatcaaaccccacgttataacgaaatgcatcgttcatcatatccacatatggatcttctacaacattacccacactttcataattctctcttagatacgtcctatcaacataattactcgttcctacattcatgttgaaatcttctccatgcttataccaaacataataatcagacataaatccttgactaaacaaatgactactaacttttctacccgagacgatatgttgttattcttgcacacaacacaaggacagtggaatttactcgacaactttgtactataggctgcctattagaaaatgtcaagaactcctccactcatgcgacgta

SEQ ID NO: 2619 - DNA, 1027 bp, Arabidopsis thaliana
tgtcaaagttatcaaagactcaaaattaaattactaaactaataagaggttaggtagcaaacaactacaacacaaaaaaaaattagtcattgataataaaaaataagaaaataaaaagaatataatgaaagtagtacttaatttgtttacataatttttttttttttttttttactttggagaaatcagttaagagtaggattgattatacatttaatttgcttatttaattttattagttttattaatttaaaaaatatcgaatgacatatgtcattttgttgtgtgatgatgtgtcatttatatggagagagttaaccaactttcatatatatgattcgaagtgatctttccaccaattctactaagctaccgatgctgttctattaaccgactatgaggaccatctacaggtttcgaattctctgaaagatcagacacattattcttccctttcaatggacttcttttcctctctggcgtaggtttccttgatacagaggtcgtttcagccttatgcttttgagctatattcgaagaaggtctcaatgttcgatcaccagaagaactactaaccagtctctccttcttactaacagggactgagactgaatcagactgaaacgaaacactgaggattctcatagtggaaggccataagctttcaggcaaacgactagtagatagcctcctagatgaagctggtaagtctatagacaagtcgcgtatcggcgtggagggactagtcggagatggtggtgttgaaggatgcttcctctctgctgaaactgctctttttgcagccacagattgagagcttgaagacactgttggccttgtgacgcttggggaagggcatcgccgtctttaggttggcgtgggtgatctgtatcttgaactgacctccactgttcgaggacggcgggtggcaaaactgcattgtcctctcggatagaagaagaagacgcgccttgtagtttctgttgctacatcattcaagctaacgaaacaaacttgcattgattga

SEQ ID NO: 2620 - DNA, 1007 bp, Arabidopsis thaliana
taagctttataggtttcacaatgactgcacttgagctctgccccgccaaaacaatttgagacatctcttgcccgcttccaagtacaccccaaaaccctacgaaacgtacccaaaaaatagcaccccacagtaactcgaaaaagctagataacccaagaacaaaacccactttgtcttgaaaaaagagaagatgatgagatgagaaagactaacaaccgtagcccttaatttctacttgaaattccggatgaaccaagaatcgtattccccaaactcagaaccactgagtatcactttattagaaatctgattaagaagtttacaactaccttaattggttttacacaagatctaaactactttagcttgtcatttgagatttccctaaacacacaagagcagatcacaagaacacactctttcatctctctagaattccaatcagactaaaccttagtctctaacaatgaaaagcgttgcactagctttttcactcacaatcacggcaaagtctaacaagaaccttagcacctctatttatactatcgaggtctttggtcttctaggttagccttcgagatcttggatcactacaaatcttcgcgtgaatatttcctctccaaactgaactcatcctgttgtgatctccacgtcattcgtttatttggcggcatatccacgttagcatcaattacttgatcttcactttagtcttctaaaacagcttccagcttgttccagcaatcaacactccttctagtttgtcctgacagagggtgcactaacagttcagtcaccgttttagatcatttccggtacaaaagtatcgacggagatttagtaggggtcgtcggagactcatgggttcttaaacctgactctgtttcggtgacgtggcactcaatgaaaggagtcaaaaaagattcgtacaaggagatcatctcggctcttggcaaagacgttaacggtttgaattcctcagctgaggtcactggcggacgttacta

SEQ ID NO: 2621 - DNA, 1582 bp, Arabidopsis thaliana
gtaatgaggttcttcctgatatagttactttaccaaaaccaaataagcagactgagaacaaagtgaacaaaaagtcaaattttgcttttcagcaacttgctaatccaagatcatagtttatctagtgtatatttgttttaagctgaatactgctgaattgcagcagatggttttggagagcaaaagacacaggtcgacccgaaatagataatgtttagaaagagtcaaatccaattcttgtttctggtttaacctaaaccgaggctgacttgtgcaccattcttaattcctgtttgtactctttgactttatgagtttgcaaatgctcatcaaaccagagaaactagcgttctcgatttaccgccaatttcctaaattcaaacctagacaatttgaagaagcacgacgcggcgatctcgagagggactttcttttcctgttgaaaaaatgtatctccgtgaaccaattgcgacagattcaagcccagatgttgttacactccgtcgaaaaaccgaatttactgattcccaaggccgtcgaacttggtgacttcaattactcctcttttctcttctccgtcacggaagaaccaaaccattactctttcaattacatgatccgagggttgaccaacacatggaatgatcacgaagctgctctgtctctgtatcgacggatgaagttttctgggttaaagcctgataagttcacttataattatattttcatcgcttgtgcgaacgttgaggagataggagttggtagatctgtccactcgtcgttgttcaaagttggattggaaagagacgttcatataaatcattctctgattatgatgtatgcgaaatgtggtcaggtgggttatgcccggaagttgttcgatgaaattactgagagagatacggtgtcttggaactcgatgatctctgggtattctgaggcgggttacgctaaagatgctatggatttgtttaggaagatggaggaggaaggatttgaaccagatgagaggacgttggtgagtatgttgggtgcttgctcacatttgggtgatttgagaactggtagattgctggaggagatggccatcaccaagaagatcgggttaagcacgtttctggggtctaagttgatcagtatgtatggaaaatgtggtgatttggattctgccagaagggttttcaatcaaatgattaagaaggatcgtgttgcttggactgctatgatcactgtgtaagtcattgttcgacactgtattcagataaaagtatgattcttaaacccgttaatgaagctaaatttggactgttttggttgttctttatcagatactcacaaaatgggaagtcaagtgaggcttttaaactgttttttgagatggaaaaaaccggagtttcaccagacgcgggcacattgtctacagttctgtctgcttgtggttcagttggagctcttgaattaggcaaacaaattgagacccatgcatcagaactttccttgcaacataatatctatgtggccacaggactagtcgacatgtatggaaagtgcggacgggtagaggaagctctgagagtatttg

SEQ ID NO: 2622 - DNA, 835 bp, Arabidopsis thaliana columbia
agaggctattctccttatctcttttgttcttagggagcaaaaccctatggagactccctttagataagatctttcttactctttctcttgatatattgactatttatttcgtattcagactatgatttgtgtttctttgatcatgtctgagtaatccacctgttaggtttagggtttctcattagggattcatatggtttagtagatcgccccgtgctaggttatctgtagaattcttcatctttaattgtcttaatgctagttctagagtaattaactagaacttgaatccaaacaatagatatacccgccatagatattatagttggatctattatttgatgagcctggtttataggtgtgtaataagaatcagcttatctactaaggtgaacaattgaagtcatttagaatgcatgtctacgtataagatctctcggcttctccagttactcttagctataggcatagggagttttgcggaacaccaccaattgttccaaaattagagttttagtttaagaatggttcgataacaacctaactattattagatctactaaccaatagtaacctaaaaataccctaagcctgacgtttttactttcttgtgttacaacctcacaatctgctattgctttctcttgtttctttttattttcattactattttacttaggttaattcaaaaccttggtctattgggtgatccgagagctttatggaattcgacccttaagtggtacaattgatctcttatttaagagaataggtttaagggaatttgaaccatatcaacaagcagaggagaaaatataaaaacgaaaaaaatcag

SEQ ID NO: 2623 - DNA, 1365 bp, Arabidopsis thaliana
aaccgagcttgctgcaccaacatttgttacttcccgagtgtaccgcacaactcttttacccccaaacaaaaccgagaaacttgggtagttgagctgaccaggatctgagaacttcttcgagcagttaacgctaggtcgcttcacaatcgcaacaatgtgatcgactgtgtagtctagagagcacaaaaacctgatgtattcctcggttgagatgtcgtagaaagacctggtgagagagccttttggggatctacatggcccgagccgtgagcatatgggttagataggctgttgtctgcagcatcatggagaggagcgttggtgttgtcaagaacgtaagctgtagtcatgagagctgatttgatagcactcggactccactcagggtgagctgctttcaaaagacccgctaaaccactgatgtgtgggcatgacattgacgtacctaacaataatcagacactttttcatgtcaaacaaaacaaacccctctctacaatcatagattaatcaataacaaaaatatgtaatcaaaatcaagtttcaaagttgagtacctgacatgatgttgaactgagtcctcctagagtccttgtcaagaccagtaggaccaatagcgtcagaccaaccagccaaaatattaactccaggaccaataacatcaggcttcaagatttcaggagtaacagtattaggacctctcgagctaaaagcagcaaccacaggagacggcttaacgtcaagaaccgttcctttaaaaacaagaagagcggttggtttagaatctgacttaacatactccctaagtaaatcaccagtcttcttccctacagcgatcgcgggaagcaaatgactatccgccacaagctcctctccactcgcagcagtattcgccattatcatccctaaaccaccagcatctctaaccacagctcctttctcaactctagcattaacacctctatcacaaacaacaatcttcccacgaacaatactcgaatcaagcgaaccaggtaaacaaagattactcgaactactattccctttattataaaccaattcaagcggcttcgtccccattcctacaccgctatacagcgaaacaccggtaagtcgtttcccgttaccgagattcgcaaaagccggaacatctctatctaaagtaccagcaccaacagtcattaccccaaggagcaacattggcaacagaagctctagtaggaccactattaccagcagaacaagacacaaaaacacctctctccatagccgaaaacgctccaatcgcaatcgtatcgcgataatacggagcagaaccaccaccaagagataacgaaagcacatcaacaccatcaagtatagctc

SEQ ID NO: 2624 - DNA, 747 bp, Arabidopsis thaliana
ccacgtaaacctgtaattttcccgccaaaaacgtaaacccgtaatttttccgccaaaatcataaacccatgatttccccgccaacaacgtaaacccgagatttttccgcaaaaaacgtaaactcgtaattttcccgccaaaaacgtaaacccgagattttcccgccaaaaacgtaagcccgtaattttcccgccaaaaacatcaacccgtaattttcccgccaaaaacgtaaacctataattttcccgccaaaaacgtaaatccgtgattttcccgccaaaaacgtaaacccgtaaaaagtggaatccgtaaataaccttaatttgatgataatgaattactaatgataattatttattattgtattataataataatgaataaaattatttcttaaaatgggttaatccatttaacaactcaactcatcaaattaaataagttatgggttgacccaacccttttaacaaaatgggttgagttgagttgggttacccattttgacacccctataataagatctataattattaatttataatattaagactaatttttatcgagatttcaaaaaagttattatcttattatcttatcaatttttgttaatttttatattgatctgacttagaaccgacaaaatttattaatttattgtatttattcatttatcaaatattaatttatagaatttttactgtaattgcattaataaaatttcaaagataaaaagaaaagtaatgggtg

SEQ ID NO: 2625 - DNA, 1138 bp, Arabidopsis thaliana columbia
aactttttgagaatatcaaagtgtgtagctctcacttgtactctcgactcgaagccaattcgatcgacagcttctacaaactcaccactagttttctagaaaaactatggagtattcatagagaaaggtgcctctaacgctgacatgtggaaagtgtcccaaactgtgaaagaatcacttcgaagtttcatctggaaattcaaagaggtcgtcaaaattgaggaggataaaaccaacattgcaaaacaaaaggtttcgacaaaaccaccgatcccaccgaaaagacagccgagcacctcaatggaaacatttaaagagtagggaatcaagcacacccctcaagccgacccagttgctcacctacagctgatgttttcctcccaaggctgccaagaccgacttttcaatcccaatgaagctgcaaccaaggggtttaccccgacaaactctttcaacgttgtgtctatgagaatttaggtggtgtcgatcgtgttagacctcaatatttccgttcttaaacttagaaagtaatagaagctgaagttgtcggcagtcgtcggtggaatgagcaacgaatttgtgaaattcacaataagaacgttttgtgtcggaatcgcggtagtacttgttccaaggtttgtgatgttgttgtttgtctcgattgttgatggcgaatgtcgaacctttctttcctttatcgtttctggcgtagtcacgatcatagtgctaacgcggttcatagtgttcgtcgctagctttctcttttggcgtagatgtctttggttggcgttccaccattgcagccttttcttcttcaattttgatttatcggttggcgctgtgcaaggcttcgtccaaagttgatggccgagcggtgataaggtcttttcgaaaccgtgatctgaaactcaacgcgttttgtagatcaccgatagccgcatcgtcaggtatggctatgtttgagacgaccttcttgaatctttcaataaaggttctgagcggttcgcttagacatggtccataagtcatcgtttgtggcctccttaatcatgaaagcctagtggtgctgcaggaataaagacgtaagctctcggtagctatggattgaattaggtttgattcgtgagaaaaatgtttt

SEQ ID NO: 2626 - DNA, 1154 bp, Arabidopsis thaliana columbia
gggtaccgaactattgtaataaaaacaaaaagaaacaaaaggaagcaatagcagattgtgaggttgtaaaacaagaaagtaaaaacgttaggcttagggtattttcaggaaagtattggttagtagatctaataatagctagattgttatcgaaccatttttaaactcaaactctaattatggaataaccggtggcgttccgcgaaattccctatatctatagctaagaataaccggagaagccgagagattattaacctaaatatacattcttaacgagttcgattgttcaccttagtagataggccgattcttattacacacctataaaccaggctcatcaaataatagatccaactacaaatacctatggcgggcatatctattgtctggattcaagatctagttaattactctagatctagcattaagcataattaaagatgaagaattctacagataacctagcaagggggcaatctactaaaccatatgaatccctaatgagaaaccctcttcctaacaagcagattactcagacatattgattgaagtaaacaacatattgagtatgaaaacataaacacaacaaatagattaagggaaagaagggatctcttcactgtattaagatctgaatcaatctctgaaaagaatcgatgaatagcttatgtctctcagtaacagggtttgcaaaaagctttataagaacttgatagaaaactggatgatgaaaacataggtctaaacaatgtatataaaccctataaaacgtccaaggactaataatgcaaatacggaagtcttctggggcaaattcctcttctctaaacttgaaagcgtcttggactttgctgggccgaaactggtgtcgatcgacccaagagtgtgtcgatcgacagtcctcgctgattcctgaatccaaaatcgtccttggcttcctttccttagcttttgctccagaatgtcttctcatctccattgttgtcccactgcatagaatacctgaaaagacactaaaacgactcgggaaataatataaagactcgaaatcctatacctaaaacatagataaaatcagtgaaaacagagatatatcagaagccaagagtttacctcgatatataaagcgtcagaagagcgagaaaaaggaa

SEQ ID NO: 2627 - DNA, 522 bp, Arabidopsis thaliana columbia
tggcttataccaccaacctaaaacaaaaccattgaatttgaatttatgtaagtcacagaagctgacatcatccaccaacattagtttttcattttttaatatgatttctgtttttgtttttctcctataggttcggagactttttaaacatatcaattagttcatcttaatgagatttattgaagcaaaaagattttatgtaccttcttcgtcggcgagttcggcgtctaccaaagaaggtaaaactctgttgtccttgaaatggtagaaattgtcggattctttagttgtgacaatgattcgtttcaaccatttaaccatccggccaccaatgaaaccggggatgatgatccgaaccggaaaaccgtggtctggtgttagatactctccgttttgcatataagccaaaatgatgtctcttgatggatccatggcatattccttcttgatgctcgttcagtatttggaacagcagttccggaccgccggaagatcctccgaccttcgaagcagacgttgaga

SEQ ID NO: 2628 - DNA, 584 bp, Arabidopsis thaliana columbia
gtttaatcttagttcaaatctcaaaatgtgtgggtaagttatagctagaccacaagaagaataaaaaggacaggaaaaatcaagaaaacgtggagtaaagtggtaaaagcaataaaatgtgaaatgcaactcttgggttataaattaagtgtacacatatactcagtcgacattttatctcagtttgtatacctttcgacacatcaatgtcgggactcaggcaattgctttatctctctataaacaattgtgcatgtatcttacatacaaatgttgatcagttcaataattacttgtccatgcagtagattggaaggcaagatcgtaattataacaggcggacgagcgggattggagccgacgccgctagcgtgttcacggaccacggagctaaggtggttatagttgacgtacaagaagaactaggccaaaacgtcgcagttttgatcgggaaagacaaagctagtttttaccgttgcgatgtgacaaatgagacggaagcgaggacgcagttaagttcactgtcgaaaaacacggaaagctagacgttctgtttagcaacgccggagtcttggaacactgga

SEQ ID NO: 2629 - DNA, 656 bp, Arabidopsis thaliana columbia
ctttgttattttttgaaagtgatcacaacgttttctgttgtctggctaatatgagtcttctctgcagaaaatgatcaatggtggaacggtgaataattggatctgcatcaacttttctaggcaagtgcaggacaatctagcgcgtacattttgtcaggaacttgctcaaatgtgttacgtatctggcatggtgagtctttggaagcacaaacttgatcagtttattaacctttcctacactgattccttccctttaattttttatttcttacctgcaggcatttaatccggaaccagtcctcccaccagtcagtgctcgccctgagcaagtagagaaggtcttgaagactagatatcatgatgccacatcaaaactctcccaaggaaaagaaattgatctgcttattgtcattctgcccgataataatggatcattatacggtatgagccatggtctcggatgtttcattgtctacttctgcttaggacacactctcaacttatttccttaataataccattgcaggtgatttgaacgcatatgtgagactgactcggcatagtgctcaatgttgctgacaaacatgctttaagatagcaacaatcatggtaatgtgcctgaagatatgtgaggggtgagagaaccagtcttgtga

SEQ ID NO: 2630 - DNA, 525 bp, Arabidopsis thaliana columbia
cccgttgattatgtattcaggcttataccaccaagctgtaacaaaaacaagtaaataatattagcatcggtaactaaaatgtaaaagaagacaagggtaagttaatagtttaccttcggaatttgccagctcagcatcaacgagagaaggaaggactcgattgtctttatagtgatagtaactgtcagattcttgaggcgtgacgatgattctctttaaccatttaaccatccgaccaccgatgaaacccggtacaatgacccgaaccggaaacccatgatccggcgttaaaagctcgccgttttgcatataagctaagataatatctctagccggatccatcgccatctccttcttaatacttgttccgtatttagatccgccgccgccgggaagatcctccgctccttcgaagcaaacgtttaacgcgcctcctctccggctatagatcccgcatcgacggaggatttcgcttaacggaatacctttccatagagaagtagatactccggcggatcccaattg

SEQ ID NO: 2631 - DNA, 790 bp, Arabidopsis thaliana
gagactatggggaagaacatttccgaccatttatccttgaagcaaaggttaaacatatttatggttcaatgtgagtttttaaacaatgaatataaggaatgtgtttttgacttattcttacagcatcaaggaatgctttgacgagggttatgcagttcaacatgatgactgcattagctcttgaagcttctctgcgaaaacgatcatcatcattcattagaggccataagaacatcttcttatactcttcctcattcagacacacactctcattgtctagtctcttcttattccacaagggctcatttatgtcacacatctttgctaattctcgagcacaagaaactgcaagttccatatcaatcgccttttcttcttccgcaatcaacatattatcgttgttgttcttattagtctccggggtaatctcttgtgaaggagaaggattcctcatggaaacaatgctgcgtaaacgatcaagctgcaacatatgataaccatatgattcagtagataaacaacaacagccaagatttgattcattcgaatatacatacctcttggcggaggcgagcgttttcgaggcggagattgtggccacaagtagagcaaaaaaggcattgaaaattggactgaatattttgactctctgtctttagagtctcattctctgcttttagctttgcattatcgcttctactttgttgtgcctgttaatctcagtattagcaacaacaaaagcttaatttcttaacatgaatggtcttagccagagtttcggggttccgcc

SEQ ID NO: 2632 - DNA, 554 bp, Arabidopsis thaliana
gctcaatctttccgcaatgaccatagttcttatcccctatgctataccaagttttcgtcccactatcccgtacatcctcggcaccatccatgaaataagtgaccggacgctcacaggggtcaggtttcaagggccgagtgttaaacacgaaaggtccatcgctggaagaccgccaagttttgaaggtctgcaacggcgtagtcagctccgtagcagtcaagaagtaagtgtatatctgaatggtgtatccccaagagatggatatagaccattgacgtttgcgatcatgacaattaatctgttggagtattcgattcgggtctaaggtataaggtttcattagggtctgtaacgactcgatcgggtttttgttagggaacattgggtctaagtaaacaaggtgatgcaacgatacaagcggtgccaatggatgcgccgctagaaacccgtatggatctcctcttatgtcaagctgcaatataattattccacacagaacacaaaacaaagaatgaatgtgagtcaaacacgactgtactaccatgttataatga

SEQ ID NO: 2633 - DNA, 692 bp, Arabidopsis thaliana
agcattgtggagtttcacaaatgcagctgtgtatccaacattctctgagatttctggcatttcaggttcatcaagtaccctttcttgctcaggcctggaaacaagcgtcactatgctatcaagcatcttcccccagagtttagcagctgatggatccaggagagccggagtctcacagatgagtctagttgcagcaactgccgttaacttgacctccatactccccatgatcagtttcaggttcggaatccagaaatgctccacgatagcagtgatgatgtttggctgaacagtattcatagtctccactagataagcctgtccatgcttcaccaagaaaagcgacatgaatattactagcgacttctggaacttgactgtctttttgttttgaacgcgtgtgaatagagcactccatacacctttcatgtaaggtgcaatcacactgtagtccagattctcaataatcgtgttaaggatataaaagccttgctcatccgtgctaggagatgcaaccagcttttcaaatatccccagaacttgactcaaccgattctcttgagtaacctcatgaggtgctttctgcagaaaagcttgaagcaggcgcacaagagctggaacattgccacttctcttccatgactcaggcgagaggagcagcaagaagatctgcatgtagtttggtgagagag

SEQ ID NO: 2634 - DNA, 565 bp, Arabidopsis thaliana
agttggaaattaaagatcgcagaagtaaatgattgtagccaattcaaacttggatcaataataatggaccctcagaaaaaaaacagtatttatatgccctaacctaggcatgcctaagtcctaacctgggggaaagggcgcctagttgtcaaccccactaatccatctacacggccttgttttaggcacagtcctctggtgagcaaaatagataaacctagacatgtctattctatacagttaagttatacggggagaaacaacatgctgaaaaaaactaatcctaatctgaaagcattcatgggactctgcatacgaataaagttttacacatacacagtaacctcaacgagccggaaggtgctatcagccccggcaatgcatagaacaagcggatcatttttatcagttctcagaggcagccaatcaagttccagtacaagggtgccaggaatttgaggctggagaagtgattgggctaacggatctggtgaatcctgcagcaattttcaaaagcaagtgtcagaaagagtcattttgagttgacagacaatttcaaacaagt

SEQ ID NO: 2635 - DNA, 541 bp, Arabidopsis thaliana
aactccacttacttccgcagtttggctggcaacttcagtatctgacattgactaggccagatattcagttttcagtaaacttcgtatgtcaaaagatgcacgctccaacaacagctgattacaatctgcttaagaggatccttaggtatgtaaagggaaccataaccatggggttactcttcaacaagaacacagacttcactcttcgaacctacactgacggtgactatagtcaacactcaaagcaaaagaagtctgctacaaataatgatgcagtcttcaagcttcgagccttcagtgatagtgatgagaaacaagacgttctacaggaggattctgtacctttcttggcaacaatatcatctcctggtcgtcgaagaagcaaccaactgtctccaagagctcaacagaagccgagtataaagccttgtcagatacaacttctgaaatcatctggctcaataacatgctcagagatctcacattccaaacctgatccaccggagctctatggagcaacctttcctccatctatcttgct

SEQ ID NO: 2636 - DNA, 562 bp, Arabidopsis thaliana
  unsure (1)..(562): unsure at all n locations
tnnnnnnnnnnnnnnnnnnnnnnnctaaagactaccgacgccaccgtttgttaaacgtgttgatgtgatgaccgcgctggaaatggaagccgccgtgaatgcttctgtacagcagcaaaatatttttatcggctgctggccgtggcgaattatcgcgcactaccgtggccccagagaaaatcaaaaagcaggccacgcagggtgatgaattaacaataaaaatggttaaaaaccccgatatcgtcgcaggcgttgccgcactaaaagaccatcgaccctacgtcgttggatttgccgccgaaacaaataatgtggaagaatacgcccggcaaaaacgtatccgtaaaaaccttgatctgatctgcgcgaacgatgtttccagccaactcaaggatttaacagcgacaacaacgcattacaccttttctggcaggacggagataaagtcttaccgcttgagcgcaaagagctccttggccaattattactcgacgagatcgtgacccgttatgatgaaaaaaatcgacgttaagattctggacccgcgcgttgggaaggaatt

SEQ ID NO: 2637 - DNA, 632 bp, Arabidopsis thaliana columbia
gtaacggccgccagtatgctctatccagaagccacaaaacaaagaccacattatagttattgaacctttttttgtttttgttttggtcgtctgctatattatcttcaaagatattttgaaacaattttattacacatgatgatcgatcacgatttatatatcccaggatacaaccgatcacgaactaatacccaaacacactataactcaagcgaacttaatctacgatatgttttcgaaactactaaaataaaaacttacttttaagaagcaagagagaagcgagactttaaaacttagagtgttttgtgtttgtgagaaataatgagagacttggtctctttatatatagtagagagaggtaggatttgtgagaatattctcaggatatggaatattttgagaatatggagtattttcgtaagattcaacccaacaagcccaataactcacaagcataacggtccacaaacccgacagtcctcgagtcgacgacgtgacaattcgctaacccgcaatcgggctcagccaagttcggttcgatttggttcggtccggtttggtccaagtttcccacttcacacccttatctctcattcaatacaacttcgtttttcacgtatgagtatacc

SEQ ID NO: 2638 - DNA, 624 bp, Arabidopsis thaliana columbia
ctttgaaatttatgaattgttgagcaagtccatatatctttcaacgatctggtcaggtgtatagtccgtataatacccttttcccacaagcagaccttcctctctgccaagcctctcgatcagtccctgtacttcatctccccccacttggcttggattcaacaagttacaggcaacctctatgactccttccccgtgcaccagcgccattgtctgcactgaagccaagccccctcctctctcgctcgtcttcctcgctattctcctcactgccttgagatcgtttgacatgacaggcacgttatagttacttacccacccacacgccccaaccgctacaacccctttggctttgctcacctcttgtggccctgcgtctggcttcagtggcaccatctccaggtcaaacccacctgcccattcatgtccctccctgtttgccttgaagtaccccagctttcttctgatcgaatccagggtgcactgctccttttctgctgctccatagagatatgtaggaactgcaccaaggtgggtcatatatctcagtccagtccacatatcaatatagagattgctacaaagacttcgaagttctatggcctagacgaagatgagatttta

SEQ ID NO: 2639 - DNA, 964 bp, Arabidopsis thaliana
tgcttatgtataacatgtacagatagcagagactcatacatctattctagcatagagcagaatttgcatataaactataaaggaacatcaaacctttccttaatatttctatccgaacttgtagtacaccgttagaattcaaacacaaacaaaaccaaagaccaccctccttaaactaatcccagaactacttcaatacgcttatcatccatagcaactattcaaatccataagtatttgactatggtctcaagctataatgaaagagttaagacactacaccatcctcttcctatatactttcagaaattcaaacacttttaaacatacgttacctaaaaaaggtagagtcagcttcagtggcaacagccttagccaaatacgattttcctgttccaggaggcccatacaacagaaaagctctccaaggccgtctctttcctaagaagtaacaaaacaacagataaagctcacaactttacaaagagaacggtttcaaaacttcaatgaatagctccagattacacaaatttaccagtgaagaactgtggaaacttgacagcaaaatcacagcttcctgcagagcttgttcgcactttcaagcccagcaacatctgaccacttgatattaggtttctctctaacaatcgcagagtttaacccagctcgaagctttgattgttcaggatcttctccatctttaccaccaccttctccatctttaggcttagttttgggcctcgttgcgacggctgcatcaccgttagatcctggacccgatccaccttcatcgagaacagcacggatctcctcagcacgacggagatactcggtgaatttctgggtaatagcttctctgatcttagggttcttctcatacttgagatgagttttgaagtactcaagcgcgttcatgtatagagggaaagctttattgtaattcccagcctacatcatctagagt

SEQ ID NO: 2640 - DNA, 796 bp, Arabidopsis thaliana columbia
atgtttggttgagtggggaatgaggaagatctgaagacgctttgatagatcaacaagtctggtagagttggtcgcccttggtctagtaaatgggttgagtagaggatcgagtaggaggggcgagtagattgatctgctgcttcttctgaggctgccttgatcgagtaagtgggtcgtgtgaattgctgcctcctctgtgggtgcctggatcgagtgaacgggtcgagtagaatgctctgttgcttcccttctggttggatagagtagagggtcgagtagaatccttgtaagctccttctgcacctgaaaacacaccaaaacatgcaatatgtatgcaagatgatcctaaatgcttaagtgtgcaaaataagctaaatgtgatgcaaaatgatatgatacaatgagtgatcactaagctaaatgatgataaatacatgcctaaaatgagtaaaatacaatgttatcacttgccctcaaagaaaacataaaagccgaacccgtggaagaggttttgaaaaacaaaggaactcccaacattctttagtcttttgccatgattattgtaaccaaatccatatgcctagcaagtctaatcaaattctaaccaacatgtacttctccgcaagcttacacaacattctagattccatacctaagtttctcaactatatccacgagatcgcccatcccacttcttaaatcaaagataaagaatacctccgttttgaagagaagaatctcacaaagaatggaatgaatgaagattcaaacctcagacaattagaattttagcgta

SEQ ID NO: 2641 - DNA, 1268 bp, Arabidopsis thaliana
tctgggccaactttgaagacaattttaggatggggattaacaccaattgataatccgtttgaaggaaaggattccttgtatttatatctttgctcatagtacttacacaaaccttaactctttctgatgcgtcgggaaaatgtctcgcaaaagctctagttgcacactgaatcttttttgcagacttggcatggattgaagactgtttcagttgtttcttgtacaggaagcaagatgcataacttcttgatcttatgtcttgtggactcttgggttgatagcggtcatgtgataaggttcaccaatcctattaccacaaaaggccacgtaagatcatgatgctctcaatattgaattattcagagacaggaaccaacagctccctatcaacacaaatgactttgagatcaagaccgggttgttagctcttgtgaaacaaaatcagtttttcggtcttcctctgagaatcctgtttatcatctggatagttttgaagatatttgcgggacaacgagaatgaatggagtgccagatgatcttatcaaatgcatattgtttatattctctttggcagacgaagcccaccgctggtttaaatcgatggattctgcaaatctgagaagttgagaagactacaaagctgcgtttttggggcagtatttcatgcagtccaggacagctctactgaggaataagatcagtagcttccaacaaggaagcacagaatcattccatgaagcttgggagaggtttaaggactactacagggagtgtcctcatcatggttttccacgggctacattgatcaacactttctatcagggagttgacaaggcctacaagatggcattagacactgctagcaatggggacttcatgaccaaaactgagattgaggctacaaagctaattgagaaccttgcagctagcaacatcaaccacaatgttgactatgacaggtcgaatagaggtggaggaggagaattgaaacagcttgctgagttgtcagttaaggttgagcaacttctgaggagagatcaaaaagttatcaatttttgtgaggattccagcaaaggtatggtgcatcaagagtacagtggagattgttctgaagatctacaggcagagatgaactttgtgaatgggtatggaaactatcagaatagagggttcaaccagaactaaaggaaccgtcacaacctttcttacaggagtactaatgttgaaaatcctcaggatcaggtatatccaactcaggcaggctcaca

SEQ ID NO: 2642 - DNA, 926 bp, Arabidopsis thaliana columbia
tcaagaggcaaacgcttgaggcccgaattgcccgtatcgagaggaagataagggccatggacagcgacccttttcaatgggagtggaggaacttcgactgcgtggcaaagatcccgcacatgctccggatgtaccttcgtgctcgaggccaagttcccggtcctgtaaacactccggttcaagtgatcccgtctgacagtgaggacggtgacgacgaggaggaggacagtaacccctggaagcgcttgaagaatgaacccgacgtggacgacaaagacgaggcgtccacttcgaaccccgaaccgacgatgaaggagcctgttcctgagccccttccctaaatgttttccgagactaaaaacatttttttttattttcgcatggacttacctactgggcttcggcccattttatttaaggaaactttacactttccttgattcacaaaatattcgttttggagatattctttaaatgcagggcgaacagggcgacgtgaatgcctccgcgaatcactccggctctaaatggagtcaaatctttgaaagctaagaaaacttcctataaatttcttttctaggtcctctttcattcctcacttacagtacaatattttttttttctttcacagttatggccttcaacctctgatgctcggaatccatgccagacttctcaaagatcgggatgatcgatgaggacattccgaatgtaccagacaaaggacgccccccacttcgcatcttcagatcccagatccgagctccgtgtgcacttatcaaggaccttttgagcagagatcaagacatcgcgatgtccttcatcaaagctctcgcggctcaacacaaaaaacgctcaacggaaaagaagaaacttcgaaagaagataaccaaatgctacgaagagtcactgtgatatcaggggag

SEQ ID NO: 2643 - DNA, 607 bp, Arabidopsis thaliana
tgagacggacatatctaatgttatcgggtttgagtctttactctgtctcctcttttctcattcgtgatcgtgttcatagatgttttagaatcagtaataatttgacatgagttatgacttatgaatgattgtcgaataacgtggttgctattacatataccaatgattctgtaggatttaaacatttttttgtgttctgtcgtaaaccatgtaaaatgctttctcgcttcaacattcatcagccatttaaacgctgtaaatttcgattctttttgcgttccattggaaacccagataccattttggtggaatcatgttcgtcttcctcttgttcatcgccagagccatctctggttcgttccgattacttgactaaaccttctgatcaagaccagatttttccgttgaacaagataatagctaggtgtgtacgttcaggagatatagatggagctcttagagtgtttcacggaatgagagctaagaacaccattacctggaattctctgctcattgggatttctaaagatccaagcagaatgatggaagcacaccaactgttcgacgaaatccctgaaccagatactttctcttataacattatgtt

SEQ ID NO: 2644 - DNA, 870 bp, Arabidopsis thaliana
cagtattttaaaacaatactcaattcttctggataagagcattttggataccgatctctggaatttatctcaagggccgaatgagacacttcgggctttcatcgctaaatttaagaacgtactttcaacgctcccgaggatctcacaacagtcggctctagcggctttgcgaaaaggattatggcatgattcgagattcaaagaagatttgatacttcacaaacctgatactattcaagatgcattattctgagcgaataattggatggaagtcgaagatgaaaaagaaagtttcgcaaagagaaataagcaagcgaaaccagcagctactttttcacccaagaagttcgaacctcgggagaatcaaggaccaaggaagtttggttcacaaccattcaataataacgttgaaaagtaatttcaggggaaaggaaggtcaaatacctgggttcgggatgagagcttgtattgtgatatacaaaaagtcaccgggcatctgaccaaagactgcagtgtttttaaaaggcatctcgcagaattatgggcaagcggagatctttcaaaattaaatatggagaacttcgtcaagcaatatcatgagtcgagagataactcagaagctcaaaactctaagagaccaagaccggctggcgaagaagaaccaagaagttcaaaagataaaatcaacgtaattcttggaggatctaaactttgccgtgattccatcagcgcaatcaaaaagcatagacggaatgttcttctaaagtcaagtttaagtgaagaagtagattttcaaggcgcttcaatatcattcaaggaaaaggagacacagcacctcgaaagacctcacgatgacgctctagtaattac

SEQ ID NO: 2645 - DNA, 663 bp, Arabidopsis thaliana
tctggttgggtacataggatcaccgtacaagaagattcgcatagtcacatttttggttcaatccccaaaaatccttcgggcaagattttaagaagagaacttacaaagctcacaacttcaaaactctagcaggaggctctgtcaccatccttatctcgcacttcacggtatgttaacccgtttgtttggtttaaatgttaagttacttcttccacatatatctctgtcaaaaatgaataatgatatacaaactgaaggtttatagagaatctctgtttctatttatatacaaacagaaaagatttttgtgtataaaaagcgctctccacaaccataaactgttaaaaaactagagactggagcttgctctgatcatgggctgcgttgcaacgaaagagagggaagaaatatgaaaccgatgaagctcccttgcacgacgtgctcatgggggacacatcctggttcatcgtcttcttcacaccatcatcaccaccatcatcatcatggtcagacaaactcttgttcctcaacaacatgaggatgtgatccatcaaacctccgtcgcaaggaacctgtaaagggccacaaatagtggagccaaactcttcctctgccatctccaataagacctgaaagattggacgtttgagatgatccaagggt

SEQ ID NO: 2646 - DNA, 1168 bp, Arabidopsis thaliana columbia
gcagtaactaaagaaaaagtaaaacattggatctttttatctaatattgtgattgcgtgtattgcacgaaattattattttttattgtatacgagaaatccaaattttcaatactaaagatatttattttggttgaataatttaattatatatcatatctagcaaacattagcaatacaagatgtgtatttaaagtaaattcctacgtgcttttaatactgtggttcaaatcctaatatagctaataaaattaagttatcatatcgtatatatatgatgcatgacttgattctgatatccccgcgttcgagatcttaatttttcatgcatggtcattgatatgaaaaagtccacttctcttgatatttcttgaacttttcgcagttgcagttttaagttgacactgttttttctaattaatatctacggaaagactttatgaattgccgaggtcttcgacacttgatgtatacaacaacactaaaccctcgtaaaatggttatatataaaataatttaaaactcggtgtgaatttcaaaacaattgtagtttagtggtttattcatgttgatcaaggtcataatttgattatgattatatgcatctgtcatcagctacatattttaatcaattattctgagttatctcttttaccaaattatccatcacataagaacatactcggtgttgacctagagacatccatacactacaagaaaacagacaaacaacgactacagaaagcgacaacagatgtagtcgttgtttttggcgactacgtcacgaccgttttacgacacatatacgacaacatgaacattagtagtcaaatagtcgttattttacgactaaatatgttagtcggcaaataatcgtatagtaacaaatatttaacgattatattattgaagggagacgtttgtcgttacatagtcgtaaatggacgactacagtttccgactgcggaagttagtcgcccaatcgacgactaaaatacgacacatatctgtaatcgtaaaattgtcgcaactgagtcgcagaatagtcgcattaagttgttggaaaacgttttccgcattgccaagtaggtacacctaatttgtttgttgtagtcgtaaattagtcataaaaattcgtctatataatcaaaattcacgacttctttcac

SEQ ID NO: 2647 - DNA, 1144 bp, Arabidopsis thaliana
taaaagactaattaaatattcttaacaagtaggcttttgttttcattataaaacaaattaaaaagctatactaatataaaaatggagattggtatttccaaagcagcaaagacagaaaaactgcaggttattatctctccatcttcatcttgcagagtggttctttctgggttttctgacttgccttttcatttttttattgatacaattgttaaaccaattattttaaatagtctttgagattaatgaagagagatttgtgaacacaattaataaagagttatactatagtagtagtcttttttactgtatagtattttctccccgcatctgtcttgtctcactgtctttttctcgcaagtctctctattaaaaacctctttccctctactctgtcctttctctctctgcagaagaagctcagatacagaaactgactaccaagaacaaagctttttccttcgagcaaagaaagttcttttttcttttcttttgctcttcgtaacccaaccaacaatactttcataagctattaaatcagaaccctggagacaaaaaaggggaaaaccattatccttaaagtaaccaacacttctctctctctttcttcaatggatttgcaactgaaacaatggagaagccagcagcagcaacaacatcagacagagtcagaagaacaaccttctgcagctaagataccaaaacatgtctttgaccagattcattctcacactgcaacttctactgctcttcctctctttacccctgagcctacttcttctaaactctcctctttgtctcctgattcttcctccaggttccccagtgagtcttttcttcctcttatcttatctttcttgataaagaattagacttttcattcatatagtttgtgtttaattgattttgattcctttttgtagagatggggagcttctttagctgggcacagtggcaagaacttgaactacaagctctgatctacaggtacatgttggctggtgctgctgttcctcaggagctccttttaccaatcaagaaaagccttctccatctatctccttcctactttcttcaccatcctcttcaacacctacctcattaccaacctgcttgtgagtctcgagaacagtcttcatctatc

SEQ ID NO: 2648 - DNA, 1215 bp, Arabidopsis thaliana
tcttattaatttcatcattgatttcttattcaataatgttttgttcttctatgatcatgcttgagtagtcctcttgttgggtttagggattctcattagtgatttggataaattagtagatcgaaaacccttttagggtaatatatttagaattcttcatcttggattattcttaatgctagttttagagtaactaactagaacttgattttaggataataggtatacccaccataggtatctattactgaaactatcttaaatgagcctaatatttagatgtgtgctagcgtccattacttaggtgaacttatcaaacctgattataatgcttgcttagttctagggatttacaagagaattaggatcaatactattaagcatagtgaatttcgcggaacaccaccggttactttgtattagtgatttgtgttctagaatggttcgataataatcctaatttactgctagatctactattatgatatttcctgagaattttcctaaacccgacgtcttaatcatctgaatctacaatctcttttatttcttgtcttgtcttttacttttattacattctctgtttagctttattcgaaactattaatctactgtgtgatccaataactttgtggaattcgatccctaagtgctataacaacctctttatttgagagagtagtcattagggtaatttgactcatatcaaatttggcgcccttgccgaagttctcttcgattcaccattagattaggtgtagaatttagtctaagcttttcttttcttttgttactcacgcgtttttatttcttcttcttcttgtgtttcaggagtttaaggaattcaaacgcaactacaagatgctgatagtaatacctgatactgctggagtgttacgcgatagtgctggtcaggcatacaacgaagagggtcagaaaatagatgaacagggaaacctgataccagaaatcgctgatggtgtcgatctacaccagctgggtgtcgctcgacaccaagaagaaatcaaagcagatggtcgtcggatgactcttggtgactacaacagaccggatctcttctattccaatcgatctgcaatccgaccacctacctttgaaagaagcgattttgagataaccctgcattatatactcttgtgagtatgcaacctttccatggtctttcacaagaacatcctatggatcatattgagc

SEQ ID NO: 2649 - DNA, 835 bp, Arabidopsis thaliana
gtgcttaattaactacaactaaccagatcatgaaccgtactacttaggtagttagtttgaaatagagattttttggagctaattacatagtttagcaattattagcatgtattatgaacatatttttggtatataataatatcaaattctatatgtgactttcgtggaattcgaatggtgaatttagaggtatgcactagatggcttggaataaattgtgtattagcaaattggaaggtggtttaggttttcggagtatagatgattttaattcagctatactatcgaaacagttatggcgtttgataacggttacagattctctttttgcaaaggttttcaaagggagatattatcgaaaatccaattctttggaaaatataaaattatactctccgtcttatggatggagaagtctttgttcagctagatctctggttaataaaggacttattaaaagagttggttcaggggcatctatctcagtttgggaggatccgtggattccggctcaattcctgagaccagcaataagtaatggttcaattattgacccatctttaaaagtccaacatttaatagatagccggtcaaatttttggaatattgatcttttgaatgagctctttgatccggaagatgtccagctaataagtgcattgcacttgggtacgtcaacaaaagaggatactctaggttggcatttcacaaaatccggaaaatatacagttaaatctggttatcatacagcaaggttagaaaaattggaggataattcatctttcattggtcctgaaataaacgttctgcatccgaccaggacgcatcgccgatg

SEQ ID NO: 2650 - DNA, 1266 bp, Arabidopsis thaliana columbia
aatggccatcgcgatatcttggtctctgctcgaaaggtccttggatctgggatctaaagttgcgaagtggggagcgccctctgtctggtacattcgggatgtccttgtcgatcatcccgatcctcgaaaagtctggcatggattccgagcatcggaggttgaaggccataattgcacaagaaaaataaacgatattgttagtgaggtatgaagaaaaacctagagaggtaatttataaggagggttcttagctttcaaagatgcgattccatttaaagccggagtgattcgcggaacattcacgtcgtcttgttcgccctgcattcaaagagtatctccaaaacgaatatttgatgaatcaaggaaagcccaataagtaagtccatacgaaaaaaaaaaagtttaagtctcagggaacatttagggaaggggctcaggaacaggctccttcatcgccggttcagagttcgaggtggacgtctcgttcttagcatccacatcgggtttgttcttcacgcgcttccaggggttgctatcgtcctcttcgtcatcaccgtcctcactgtcagacaggatcacttggaccggagcgtttacaggaccagggacttggcctcgagcacgaaggtacatccggagcatgtgcgggatttttgccatgtagtcgaagttcctccactcccattgataagggtcgctctccatagccctcacctttctttcgatacgggcaattcgggcctcgagcgtttgcctcttgaggcccaaacgctgtctctcatcgcataagcggcgatgcttgtcaacgacctagaatacgaactggttaaatacgaatcaaatttgttctggaaaagagagatgggcgatttaccttatccataaaatcatacgcctcctttttgtctttcgaggggaagtggaagcaggcgtgcggaaagagaacgccggcgggctcaaagccttcgccggacagaaacaatggacttccgggatcgagggggcagacggtggaggctccttcgttttccattctaaaggtgtttaccaagtaaatttctgagatcatattttgagggagttgagagagtttctgctcttatttatagtgatttagggttttactagaaaccacaaagttaataattgtggcgtgccgaatgggtttaccatttttggaatcgaggaaaagacaattattccttagaacgtgacactttcctgattccaaggaaaaatggcaaccgcgcatttagacaagtgggc

SEQ ID NO: 2651 - DNA, 1009 bp, Arabidopsis thaliana
tactccatatcgatgtaggttgatgtgtgagttggggtatgaagaggaactccaacggctattaggatgggcgtgatcactcctccagcacataagcttcctccatagccggattggtggattccggctgcatactccctaaaaccaatcaagtgatcaatcaacaccaccgaaagggatgtatcagccctatccccttccatctctatcccattccttgtgcgccccaaaatgaagcataaggtgagatcaagcaacttcagctctccctcattaacatggccggttgtcttcttcgggaagaaagcacttgcaatgcaaaggtggagatacctaagcactgggctccttatcaacgaactcttggccctagatgacttgtaggggagtggaccggcgattgtcaaccatagatcaaggagctcgtccttgctgaagttttggcggattccatacttggtggggaacttgaaaacagcatccaactgcctaatgggaaccgagtattgaattccaaacaccatgaatgtgatatagccaactcccttatgcagctctctctccctttcttcagcatagaaatgaagcttcaaagtggctaggaattggcagctctcagttttgtacccttcacacttgtaggagaaaaaggtctccagcttggccatctccatgaggtagtcaacatctctacatatccccaaagcttgcatggtaggtctatggggatatcttgtcccctcaaaactcagctccatgagatattggtagtgctcttcaatggtaagttctttctttctcctcatggtgttccttcttctccttgtaggaactatcgagacctcttcatcaacttgcgcatcttcctcagatgcttccttctctatctcaggcacttcttcttctgcaactggttcggactcccagaccctcttgcctcttgctattcctcttgagcagccgcagaacgacccatagaggactccggggccatactcggccattgtac

SEQ ID NO: 2652 - DNA, 908 bp, Arabidopsis thaliana
caaagatacattggaatgcgaggcttatggacaaattgcagtggacttggagaaaaggtttcgagcatttcgcaagaacaatgttgttattgcacttgcttggtggaaggttgttagatattatccaggttgtaactggtttaagattgttagccatgcgccaatatcaaccatgtatcccgaacctgatgttgaggaagttgaagaaatcaaaatggttgtcgactaatggaagatgcttagaactatcaaagtgcttgttgcttacaattgttatctcatcgtcttttctgtttttttcaaatcttatgtttacctccaacaatgttttaatatttttataaatgatattatatattaataaaaagtttttgacttattcaaattttgtccattttatttattgcaacaaaaacttagattaagcagaagattattaatcaagtgtctgaattaagttcacctatggaacattgttgaactgttttaaaactgtagaattacccacatacatgattacaactgtttgtaaaacgtcaaaccataataactttctcaaactgtttaaacatctgtttctgctgttttgttgttatgttaattcttgtttacattttatctacatttctatataagtgaagtcttttcattttaacaattgtttttggtctttaatgacatcggtctatgaatgtaaaacctaatctcttctcatatttacgaaaaactttagaaaaaaaaaaaaaaatacctaaatccccataaataagattcagctaaattggctgtaacaaatcactgtagcacgtctatataatatattgtaaccatgcgtatatatattcatggacgtgagaatatggacatatctactttactatcacgtataattttttggaatatttgta

SEQ ID NO: 2653 - DNA, 573 bp, Arabidopsis thaliana columbia
gaggtcccctatcatacaccaagctgtagttctctctaatccaatactacttagcttttccagcaaaatgtatcttagattcgtcacagggttcccataaacacaagagaaaactagcctttccttccttgagaagctctttaatccaaaagattcttatcctcaaaaagaaattcaatctctatctaatttttccaaaagatcactaaaccaccactcttcccaaccggttctatagtatgaaagtaatgataaccaagccatctaaaaacttttaacagaaactgatcagaattcatggtttccatgaggaataaaatatcagggaaatgctctttcttcattttcttaaggtgccgaattatccaaggattcctcaaaccttggcaattccagcataagatgccatattgatattgcgatggttcactaggaaccaccgtattatcatctctcttaagacatttagaagatttaatttcagagacgtgattctttcgtttgaaggttttataaatcttggtattgaaactaacctctttatcgattggaaccggtgaactcattgcagtc

SEQ ID NO: 2654 - DNA, 1003 bp, Arabidopsis thaliana
tctctggactttgatatcatctgttttactggggttgcttaactcctttctaaagaatgttgggtctgagtattttctcagacacgatccaggaccacctacagcaaatctgcaaggaggaagaaaagcagccacttcagaataaagatccaatgcattttctatatatattaggatgaactaaaagcttgtcccttaccggtcaagcagatgcaaaggaggaggatctctgcattgctcataactttccataacacacagaggcaaatcactctgaacaaaatgactatgtccattccttatacgaggatgccactcagagcctacagcagaaacaaaaacaaaagactaagaatttttttctgtacaaaagctcataaaaaatatgtcacacaaattgtggagactatgtgttcataaaagctttcatccctatacacaagtgaggtgcatgacagtataactacatagagaaccttcaaactagaaaatctaaaataagacctgaagcttatagataagagtaaagccatacctgcagtgtatgcaaaatgtatgtggcttgtctgcgatagaacagccttttcaagaggtgagagcgctgactctatccgtctaacacggcttgtcaacttctgacacctagatgccgttacagttacttcttcttgtaagccgttaaatacttctgcagaaaatctacatgtaagaaatgccacctggttaaagaactctctatcagtttacattcacttgaccatctatgtttcgttccatggaggaatgatacaaaagactaaaaaagaattttgattatgggagattaacgtctgtttgcaaaacgcactatgccaattcactaacctccccgggtaaacaaccaaaacctcataattcctagttaagtaagaaactttagtttctcatcatcaatagattagatgtcccataaattccaatctttacttcatttcagctgatactcaagttacaactatattga

SEQ ID NO: 2655 - DNA, 714 bp, Arabidopsis thaliana
tatatatatatatatatatatatatatatatatatatataactaacattacaaatttcaacaatttttagtttattcatatgtttatgtaaatccctcacaatatttatgttctgcgaggacatataactatgaaatttatatatattcgaatattctaagaacttagacatagatgtgtataaacacgtatatatgtatatatatggactggaaaaaactaagaactttttaaccggggaaaaaaaaaatctggggatgtgtgtggtaagtaaaagtgtggcttgcttggcggggggcttggagggatctttgggggtggtcttctccttgggtgcggcgggaacgtttttggggtcggcggggccttctttgttgggttgggggttgggcgtggggtcggcggtttcgggggggcctctcttgcttccgccgccggtttggcggggctctcggctgcttcggcgccgccggggaggcgaggcggggctccgtggccttgaggttcgtgggttggccggtcgtgttgcttggtgtgggttgggggtgttgtttctctctctgggaaggtaagaggggaagaagacaggagaggcaggggcggtggtggtgtccggcgggaggctggtggtggggtgtgtgtgttcgtgtcgttgcgtgtgcgtgtcttttgctctttttcttcgttggtggggtttgtgcgcgtgggcttggt

SEQ ID NO: 2656 - DNA, 538 bp, Arabidopsis thaliana columbia
taccatataatatatccatcaggaggacattccaaattctgctacataacctcagaggtgtttttcacaacaatataaacgtaatgcgtttcaaaagagccaattcacactaatgttaccaagccagatcaaaagaggaaactgggctaaagcaacaaagatcaagagatagtgatgcctgcttgagtcataactcctagattctgcaaagagaactcgcttcattgtcttcactaagaataccccagtgcataagcaggtccacggaatcaaaacatagtaagagtatccccagattatcttgccaagaacagctagacaaaggcctgtgaaagtatagcctgcatatgccacaatatccaagagaggggcttctcgcttccaagtgaaagcaatgttatcttcagcagcatcacttgcaaaaaccagccaaccattcctttcacaaaaagccagttcagagcttctggagtaacctagaaaattcagaaggatcaaaatgttgaaaaggcactctagaagacttaaaccagaatag

SEQ ID NO: 2657 - DNA, 639 bp, Arabidopsis thaliana columbia
cgactctaccgtacacatgatttaaaatcagataatgtcgtaagaacaactcacacctaaatgcacatatcatttaatcgtaatgtagcggtttgtaccgtgctttgcccaatggtccttcagatcgaccgggtttgaaagatcatgatgcccttctgcagcaagccggcttagaagcttgttgaacgcgcttccgctcattttccgtccaccaactcgagcatgccttttgttgggcagtgcaggtaaaggatacattgatagtgtagttgtgcaacacgatgattgccaacctccatttccccatttgtagcactgtctgagaactcctgtacatgaacatacaggtggtggcatcgttgtctcgtcgtaaaccacttggttcagccccaccatttcttgacttttccagtcagattttgatcctattaagatatgcttacttgaatcttcgtctgtgtagtcatgggtcgtctttacaaacattatcttgtttaagtcgtcctcgctctctttcttaaccttcctctgattttttggcctctcttattagcagcagtttgtgttgtcgctttgggtcactcttttacacgttttggtttggagattcaaggtggatctggcagtggtgatgttggg

SEQ ID NO: 2658 - DNA, 526 bp, Arabidopsis thaliana
ttgtacatcttctgaccagagcatatcgtcgcatctgccttcctctccggttcttgagctcttttcatcttaaaaatttgaaaacaaatcactgcgtaagactgcttaccacgtgtttgtgtttatttcttcaatgagagctaaacaaagaaaagttgtacctgtttccgaggacgttctgtggcagagaaagctgatgatgttacatagattttcttgcattgcttcttctctaaaagatcacatcgattagatctcgagtgtgttgatactggtgtgagcacctttctctgcttgtttcgattattgggtgttggatgaggagagaattttgatttactctctgctttttcccatccgctaataggtcttagtgactgttgattctcttttgaaagggttattaccgttgctggttgctgatattgtcttaacacaaatgcaggattagtgcttgttgtcttctctttctgtgaaatcctgttttgtgctgctcctcctgcccttttcttctcaagcaagtttg

SEQ ID NO: 2659 - DNA, 562 bp, Arabidopsis thaliana columbia
cgtcaaattcaaatattttgacgggctctgacaactggatgaatatatgaattgagtttataaactaaagctcattgcaaaactgtagggagaagttcaggatactagtaccagtttgatctctttctcaatagcatcaacatgcatgctatactgttgtgacttgataccaaatagactctctaatccaggaggaactagacgaacaccatcggatgttttagcctcgttatttcgtagatcttgcaagttacataagaatgtgctttcaacaagcttgaaaatattgtaaagacagagcaaagggaaacaatgtgagaatgaattcaatcaagctaaagaatgaccaaaattcgattagactaaataacgaacctggcaataagtagtagctggatatggcactgttttgggattatcaaccagcaacatgtcatgagcgtgttgtaaagttgggattagacctcaccaagtaactcagagtccaatatttcactaacctaatgaagaagagagacacgcttatggttattccttctgaaaaattaactcaaagtataga

SEQ ID NO: 2660 - DNA, 540 bp, Arabidopsis thaliana
tcgtgcagaagacacaaaccctcgacgctcctctattccatttaaccatgcgttcccctgttgaaagcctatcatgaaccgcaagccaagtacaaaacgagtacttaggagtagcgtgattgaaccatacccctctaagccatggaactatgggagagagagctctgatatggttccatgtatgtttggtagagaaagaagttgtgtacgcatcatttttacctttccacttagctatatcatcaacgtccgttctgttctgcagagagattaacatctccttttcgatttcatttaggtgatctagacgatgtcttcttggttgtcttccagtccaagcctctgccaacgttgcctctttactaattcccatatcaataacacccctctcacctgcaacatccattaatctgccaagagctgaccagtcatcaaaccaaaaagaaattaagcgtccattccccacctccattttactaaacgtttgagccttgtctctgtactttagattttttctcaaatccaagagcctgcatttgt

SEQ ID NO: 2661 - DNA, 777 bp, Arabidopsis thaliana
gtgtagtgttaagtgtgttttgctgcaaaagtgatacataaatcaaatagaatgcgacctttaatcctaaacatttgaccttagaaaggagatatttatttaccttaagaagtctctcaataaaagtgcctagaggttttattcgattctggatcctagtttggtcattacatttatggttttattcatgcagttaattatactagtttgaaacacaatgaaacttcttactgttattacctaccatagaagtcattagttagatgtgtaatatatacctgaatacaagttgtctaaaagtgtttaatgtttctggatctcctagactggtctttactcatctgatatttttaatgctgcttaccctacttttgctatatgatggaactttagagtgttgtgtgtttgatactaaccagttttgtctacctgtgctgcaggaactggtgaaggagtttcagacactcccctgaccctcagtgttaagaagaacaatgtcccagatcttacgatggtcgatcttcccggtataactcgagttccagtgaatggacaaccggagaatatttacgaacagatttctaggatgatcatgaagtacatcgagcctcaagaatcaataatcctcaatgttctgtcagctacggtcgacttcaccacatgcgaatccattcgcatgtcaagacaagttgacaaaactggtgaacggactctggctgttgtgacaaaggctgacatggctcctgaaggtctcctgcactttagagcacactggcg

SEQ ID NO: 2662 - DNA, 488 bp, Arabidopsis thaliana
tgtagctgatattataatgttgaggtttaatttgttaagaaactagatatgtttatatgcagattggaatggcgactgcgttggtaacctgtgcggtcaagcgtttggagctcagcagtatgacatgtttggtgtgtatttgcagcgatctcggagtgttctctgcatatgctccatcttgctccgcccaatgtacatctttgcgactccgagtcataagttcatgggccaacctgacgacattgcagagctctccggtatcatctctgcttgggccattcctacacatttctcattagccttctattcccctatcaaccggttccgccaatgccagcttcagaattcggtatgtagcttatgaattgaccggtcagttggtctccacggtgggggttagtcagatatcttgtgaactagacggctctaggtttgaggtagacagtgttctgccatgatatggatcagtagccgtgtgaaattgatga

SEQ ID NO: 2663 - DNA, 587 bp, Arabidopsis thaliana
tgtttgtctgatcgttgactaaccggagaaacgttttcaggcatattttttcgctggattaaatggaggattcatgacatttgtcatctccatttctatgctactagggtggattgctttctatttgtcagtcaagtcctatggctataattcgatcaagtaagacttctagacagtacctaacttttgtgaagttgatgattagtttaacttgaatattccttttggatcataggacatatctttagccaataagatccttgtttatgataaagttcatttcatccaggtctcccatgttttatgtgatagctcttgttccatgccttctgtattctctctattttggtggtattcttacactattattaattgagaagacgggaatgatgggagcaattccaccaccttatggttagctttactgaactcaattctttccaaaagcatctctggttcagctaaaccgattgagaattttaccattaaaacatttaaatagcttgttgtgattgcaagtctggctttcactgtggagatgtttattgtacattattttggtttgcaggattttatctagcagatgt

SEQ ID NO: 2664 - DNA, 1006 bp, Arabidopsis thaliana
tgaattcccttttgagtaatttgatagcacaacgttttcggtttttcattgagaccatgacaacaaatttaaacttattctttgttttcgttccatcacatttaagtgtaaacattaatgcttgtttaacatctctttcggtgattaacattaatcaatggagtatatacttcgattaacatctctttcagtcataaatcataagtgtgtgtaaacatccccattggtgttcaccatacgtttgtgtaaacattagatctcttaaaaatatccaatttatccaataagttagcacacagaagaaatatgtagacttttcatagctgaaaaacacaacaagtactacaacataacagtaaacacaaacgcatacttttcaggtcatgtgtaattattccaccgccgatataagtataaacagaaatcaaaacgatacattcaatacaatcaccaaaataaagatatttatcaagcaaacaccgtcacatttttagatttctcaccaaacctcgaccatcactttttaccgtccgacggaagtcatcgcttccgtgatggtcaagtgtcctttctgactcctttgtcatcaatcgaaaacataaaatatttacaaacaaacatgtcatatatcatttcacgaccgaactcagcatcacgtctcagcgtccccgggaggtaaaaggttccgttaacgtcaaggtaccaatggacccttgtgatgtcaaaacaccaagtacactctcagatgtctcagaccacattctgaccttctctgctttgactatatcgagtagattatctggaagctgcagatcaccacccaagatctggaccaccttagacatgtctggcctaattgctacagcctggtgctgaacacaacactcccaatttcaaaacaagctcgagctgttctcgtattgtcttcgtgacggattccatcattgactgcctcgagaatatctcggttttcccagcactttaatgtccgattcagctaggacga

SEQ ID NO: 2665 - DNA, 537 bp, Arabidopsis thaliana columbia
aactaacacaccaaaagaagttcggggaactcaagaaattaaaaaacgatatagctttgttatgaacatttttaagttgtttatgaataaataattcaattttaaaatccatctgttatgctgtaatatttttctaatttataaagttgaatataggtaaaaagagaatcaaagatggaatttgagaaattctgtaaagatggtgattagtataaaaatcataatcagcttggttatttgtctctattatgttattatcccctctatctgatacctttatctggaattctggatgctacagggaacttttcaccggtgaagaaccttacgccgacttgcactatggagcgatcatataggtgaaaccttgatccataattcttgtgtgcaggcgtgtatcctttgttttcgattctaaccaaaaagtgaaatcaggtggtatagttagtaatacgctaccgccacaaattcccgacttctgtgacatggactggaaattgctgatggagagatgctggtctgcagaaccatcagaga

SEQ ID NO: 2666 - DNA, 576 bp, Arabidopsis thaliana
tataaccaagcgaaattgggcaagtctgcgatgtcggtatacaagagaatgcacataataggagttaaaccggatgagtttacttttggaagtcttttagcaacctctctggatttagatgtcctggagatggttcaagcgtgtataatcaagtttgggcttagttcaaagattgaaatttccaatgcgttgatatctgcctactcgaagaatggacagatagaaaaagctgacctattatttgaaagatctctgaggaagaatcttatctcatggaatgcgataatctcagggttttaccataacgggtttccttttgaaggtttggaaaggttctcgtgcttgctagagtcagaggtccgaatcctacctgatgcttatactctcagtacccttttgagcatttgcgtaacgactgtcatctttgatgctcggaagccaaactcacgcttacgtccttagacacggccaattcaaggagacattgataggtaatgcctcataaacatgtactctcaatgcgggactatcaaaactctcttgaagtgtcaatcagatgtctgaaaaagatgttgt

SEQ ID NO: 2667 - DNA, 842 bp, Arabidopsis thaliana
agaggatcccccagtctgacggttgatcttttgtttgtgctaagaagggaaccattgttatataacacttggtttgtctcaccttagagatgggagataaatcttgcttttgagtttttgtctaatattgacttgtgggtgcaaatgcgtgggattcctcttctctatatatgtgaagaaactgtggtggaaatagctcaaggtttaggcgagattatctctttggattttcatgatgctactattacttagaaagcctatattagagtgagaatccgatttaatataggttcttccaaagaatcacttttgattctagtgagactacccttatgactacaagaaaacacaccagttgcgagggaagaaaccgtcgctaatccctcgcaaagagcagttaacaagggaattgcgacgaacttcagttccccgcaaaacgcgcgtcgcaaaatcaaatccgtagtaagttcctcgcaaaatttgcgacaaacaaattacctcgcaaagcacacgcaatatgcgaggaacgtaatccgtagcaagttcacggcaaattgtcggtctcgcaagtttctcggtaattgcgacggaccatttgcctcgcgaagagcacgcaatttgcgagggaggtactcggtagcaaattagctgcaaaagaagcctcggtcgttcctcgcaagttgcgagggaaaccttcagtagcaaagtagtcgcaatttcgttgtcccgctcatgcctcgcaaattttgcgattgatttgcgtggcttttctctgtagtcgcaaatccctagcaaagtttgcgatggatttgcggtgaataagcgactctttcatgttttgt

SEQ ID NO: 2668 - DNA, 549 bp, Arabidopsis thaliana
cacactctctccgccgccgacgagttatctcatcatcggtaacggcggcgacggcatttcaaagcttttcttcactccgttgctcacgaatccgttatcgccaactttttactacgttaaattaaaatctgttttcgttaacggtgcgaaattacgaatcgatccttcaatttgggaaatcgatgattcaggtaacggcggaaccgtcgtggattccggcacaaccttagcgtttttagctgaaccggcgtatcgatcggttatcgccgccgtgagacgacgggtaaagctccctatcgctgatgcgctgactccggggtttgatttatgcgttaacgtctccggcgtcacgaaaccggaaaagatattaccgaggttgaaatttgaattctccggtggtgctgtgtttgttccgccgccgaggaattactttattgagacggaggagcagattcagtgtctggcgattcaatcggtggatccgaagttggattttcagtgattgggaccttgatgcacaaggtttcttgtttgattcgatagagatag

SEQ ID NO: 2669 - DNA, 589 bp, Arabidopsis thaliana
gctatggccttcagctgctctttaatctgtttgacatcgttcttaatcgatccaaaccttccttcaaactttgcttcaaccctcgattcgatttgacatccaatcacatccagacgggaggacatttcttttatgctagtatcaacagtgtcaaatcttgagtttaagggagagatcaagttggacaccacatccacgagcgactgctgttctccctgaccatcctgctcacgagaacgaacattctcgtcctcatcagattcgacagctacttccttcttcttattcttcttcttcttcttcttttctgcatctttctcaagagaatcaacatcctcactgtgagagaccttctgcttctttgcgggagattcagacccctccgcttctttatcttttaagagtttcttcttcttctcactcgtcttcacatcccaataacctttaacaagcttaacctcgtgtaagtcttggatcaagttatccagtgctgggtcttctaattggtctggccaaaaatgaaacaactcgcttaactcagccttttcaaccattgtacagacacgcagctacaacacaagagataata

SEQ ID NO: 2670 - DNA, 857 bp, Arabidopsis thaliana
ttaatttacattgaatcaaagaaagtcaagtattaattctgatcaccaatgactagagatgtcaaaatgggtaacccaactcaactcaactcataatcaaatgagtttagggttaaatgagttatgggttgacccaactcatttgatgggttgagttattaaatgagttaacccatttaagtaataatttaattaattataaataaaaaacaataataaacccctactcttcttaactcagtatcatcaaacttaagatatttacggattccactttttatgggtttacggtttttgcgggaaaatcatgggtttacgtttttggcgggaaaattataggtttacgtttttggcgggaaaattatgggtttacgtttttggcgggaaaattacagatttacgtttttggcgggcaaagcacgggtttacgtttttagcgggaaaatcacgggtttacgtttttggcgggaaaatcacgggtttacatttttggcgggaaaatcacgggtttacgtttttggcagaaaaattacgggtttacgtttttggtgggaaaattaagggtttacgtttttggcgggaaaatcacgggtttacgtttttggcgagaaaatcacgggtttatgttttttggtggaaaaattacgaatttattttttctcaatttcatcgcttgtatatttaagaaatttggaaaaatattaattttattaaatttgtttagatgtgttggttaaacttaaattggcattggtttagagattttagttggtttaattcaattttataaaatttgatgggttaattgggtaaaccattgaaaccattaaccattacaacccaactcattttactca

SEQ ID NO: 2671 - DNA, 530 bp, Arabidopsis thaliana columbia
caaacatatcttttaaaacctttaaattccaaaagaacacgcttcgttttagtacattctcatcattcaaataccaaaaatctcacatctttttcctaaaccacaatcacatgttcttaatctaaaccttactataaaaaagttaaaaagctatcacatctcttcaccttcaatgtcagaagtttttccaaaaaattcataactatttcttccggtcaccgtaaaccggggttttaccgcctttcgaatttactcaagacactaaaagtaacatggaaatgatgaattgggagcggaggagtttgctaaacgagctaattcatggactaaaagcggccaagcagcttcagggttcgtcttctccatcgttgtcagcttcttcttcatatttgacgacggagataaaggagaatctcttacataacatagtttcttccttcaaaaaagctattttgatgctcaacggatccaccacacaacacaatccaacgatagagcttgcgcctgatcccctagctcatcccggaaag

SEQ ID NO: 2672 - DNA, 585 bp, Arabidopsis thaliana columbia
gtcgactcatccccatacccatacccatcgccatatgaggcatgtactgttgcatgcccggatacatcattggcatcattccacatcccattgacatcatctgcattaatctcagtcatataaactggagttttcatggtaaagtgtacattttcaagaacttaaaaagggctttcaagacttagaatcctttaaagaaaatgaacctgtatttgaagctgaagagatttcatgtactcaatagcttcatctagcatcgaagctttatctgactgaggatcaaagaaacaacaatcagtaacaaggttaacgtatacaataacttgaagagaaagaaaaaagatcgtcgaagaccttgttgcagcgaggtataagttcttgcaaagctttcattctctcattgatcctatctctccgtttctgttaccaaatccgcgacattcttcagattcattgcgaaatctttatcgaaaaagattacaaaaacataagaaaaaacacaaacgtactctttcagagagattatgacttcagcagcacgagatctcttggtagatgtttgtgatcacgtgcttgttttggttc

SEQ ID NO: 2673 - DNA, 787 bp, Arabidopsis thaliana
tcaaataagggaaaaccctttttgttacaaggtctgcggcggcgcttgcccggggtgaatctgaagtgtaattgctacctatcaagaaacgaaaatcaaggaattcaaacgcgtctgaatccaaaaatgattcaggagaaattcaaagcaaattagtacccaaaaaaaggctagcgacttatttgcagagcctattatctcggttgaagaagtaattccagaggaggggttaaaagcggatcagcctttcgaagaagaatttcttaagccccatgaacatctcgaacctgaaccgcatatatttcacgcagtagaccaaaatttggctagtaagttcttaagccccatgagaatcctttgcacgaaattttgtctagctaagaactcgttatataggcgaggtttcagtgacctttaccttctttgcattttcggatccgaagtcgaaatcatcatgagcgaagttcacgaggggctatgtggaagtcattcgtcaggaagagctgtggatttcaagataaaaagattaggatattattggctaccatgattacagattgtgtgaagtttgcccaaaggtgtaagcgctgtcaacttcaggcacctttaatccatcaaccttcggaattgttttcttccatctccgccctgttcccgtttatgaggtggtcgatggatatcattggaacattgcatagatcataacgaggtgtgcagtcgcttttcgttctgacggattacttctcaaagtagattgaagctgaaggatatgttaatatcaaggatt

SEQ ID NO: 2674 - DNA, 366 bp, Arabidopsis thaliana
ttctctataaggtttcactaaagtgttcggatttctctccgtcgacattattggtggatacatctgatgatgaaaaccgaaaactgccgcgtttgcgtgcacattcagtaacttcctagaaggatctaccgatgatccgttagtaccgttattgtcttcataaagagacattccagtgctatgaaactagaatggcgaagaagatgatttcgacgcctgagaaaactaggtggagccaccaccactgcgtaaagaagcgttaagtgttgagaaattcgccgggatcgtaccagtaccagtagaagcgatgatagctggctcagcttgttggagaagccactcgatggtatctccatcagatttatg

SEQ ID NO: 2675 - DNA, 1244 bp, Arabidopsis thaliana
ttcctcgtctgaagagtgtaatctttagctctcgcagcctgttcagccgctgtgcttcctgtttccttcatatactcggaagctctctgagctttctccgccgcagtctctttagcttcaacagctttctgcagagcatagtcttttgctctcgccgcctgttcagctgtcatatttccagcttcttttcctttctctgttgcatactcggaagctctctgagctttctcactcgtagcactgcccgctttctgagcaccttctcctacactttccttagcttgctgtcctttctcggctaccgtatcttttacgctacgaccaccaacaccacctgctgattctttaccttcacgttctctcatctcctcacctccggcagccaaaagctcagcatgtcgtgctttctccccatgaaagccatgtacaccactctctttttcctcacctccaccaccgccaccaacagccccaacgtgagaaacacggacatcactgtcccgcccttttcccaccatttcttcacctcttcctccacgagcttcttgtccactatggctcaaactctccttagccttgttatacctttcctctgctgcttttatactatccattgacttctgctgagcattggctctatacccatgaatatcctctagcgacgccttctcatgctcctctttctcatccttcttcttccctgttcctgaatcgctgctagtaacgaattttccaacggagtgaggcatctgagtcctcttcatcttcgtctctccctctccttcatcagaaaccggcatgttactccccttgtctgagagagacacgaactgtgtcccaccaccttctgtttgatgcctgtgtgtgtcggaatctttgcctttttcggccatggactcgaaatgactcgtcatctttgggactctgtctttctccacctgaacttctctctccgtcaccttgttttctctccttgcttgctctgacgccattgttaatgctaacgatcacttccaaaaacacagttttactttcaagatgatagtttgataatgcttttttctgttttctttatctttgttgattcttatcgagctgcttaagtcctgctttataatcatagaaccgaaaagacaaaatttgggcggtcatgaagattggagaaaggtgtgtgacgtgttgagttactattgaacgtgtaggagagcacgatgactcacttgtgggaagagacagttcaatat

SEQ ID NO: 2676 - DNA, 516 bp, Arabidopsis thaliana
tgcattatctacaaactaacctttgctagatcggcctggagccattgatactgatcggattcacagtcaaagtcggtgtaagaaccaagcataacagtgtggacaccggctacgtcaaaagagtagtacaggttggaggtagagaagctctcggtgtgaggcatgagcaccgaagcattgtatgacttgaaggttgtgtgttcaatgattgggaagaattcgatttcgtggtttccttcagtaaccatccaaggacgcttgctcgctagtggctccactaggcgaccaaaggagtcccagagtggctggtgagtgtcggcgtaggataggtctccaggaagtagaaacacgtcgtagtcttggctatttatatgagataacgttgctgctgtccattcggtttggcctaggtcgccttcaatatcacatcaaaaatcggtctttcattagtttggcatgaaaatttggtccttaaccggtcaaaccagaaccaacaaatagtatagtggtgtgaaa

SEQ ID NO: 2677 - DNA, 619 bp, Arabidopsis thaliana columbia
ccggttcgacaagatttctgacaagaccatcgtgtggcacgcacaagccgtcaacacaaccaccggtcttgtccctaatggttcgaaggttacattaactgcagatggcggtctggttatcgctgaccctcgaggtcaggagctgtggagagcgttgagtggtggctctgtttctcgagggcgatttactgacgacggaaactttcgtcttttcagagatgggtcagaagattctgacgaggttctatggtcgagctttgaaaatcccaccgacactctgttacctaatcaggtaattaaatctttattatgcgatcatagacaatattgaccaaaataataaaaaattctatgaaatttaaaacaaaattgatgaattaaatgacaaaaagaatatctttgggagataaaatatggaaaatcttcaattatgattttttgtttgttttgacaaaattgcaaacgcggagatgaggtgccagaatgagaaatttctagttttttttttttaatttacactatacgtaatcaatatatgatgaaagtatatacgtattctagtaatttttttttgcatgtaagatatattttatttactagacgcaaatgataatatgtg

SEQ ID NO: 2678 - DNA, 530 bp, Arabidopsis thaliana
taaaaaacagtataaattacagtattaaaatacaatatccagcgcttaaatacagtaattatacggatactctaagaaagctattgttcagcaacccttaaactatcaattattacataatttaaatgctattataaatttaaagtactgctatagttacgcaatttaatagcaaatagtaattgctattgtaaaattaacaataacacacaacaaaacgctatattagttgaaatttttatagcagaacccaaaccgctatataaagtgttcgacctactataacaagcgcatacatagtgtttactacaacgctataatatcttataatattgtttttcctgtgctattgatactcacaattcctgtagtgaattctttgtcgcatagtctcattccgaatctagaacttgactgtcgtttcattgactgcaaaaacatcgatcagacttgttttgtccccaatctccatattttattccaatcatgtgaatgttaccacatgtggagcctttgtattgagaaatttg

SEQ ID NO: 2679 - DNA, 422 bp, Arabidopsis thaliana
caacaattcgcatatgaaatttcaacttagtattttactgaaaaatatacttcatacatcatcagagaagcttacatgatttgcatgatatatttattcaaaaggtttggagtttggtctgatcactgaactcgaactggaacgagcttgagaggtactttcttgactattgtaagagtaccagcttcttcagtctcgatgtctgaatgatgtcacggatcaagtaacagctatttgactgcaacaagttaaatatacgctattggagctggaattatcgaggctgctggcatcagacttgccctccaatggatcctcgttaagggatttagattgtactcattccaattatcagactcgaaagagcccggtattgttatttagtgacactacctcccctgtgtcaggattgggtaatttgc

SEQ ID NO: 2680 - DNA, 559 bp, Arabidopsis thaliana
gttgttgatggaatataagtattagttacgtgagtagagccaagaatgtaaatggctgaataatgacgaccatggatcatcatgtcagcaaccatcgcaagcggaattgtgagagacatgcccagtgtcgctaccagcggagttgtccacaccacagaaagtgccctttggttgcaaaagcaccaaaacagccaagttattttctaaacaagtaattacacacctctttataggatctagcctagcaataaacaagacacttgtagctaaactcaacattgcttgttgggtccactttatcttgtaatagctgaaatcattaaaacataccagaaatagtcagagaggacacttccgatgaaaccgttggctaagacaacttcatcaactttcacagagtgtggtatggtaaactttggttcgatcctaatgctgtcaatggccacactgaaacatacaaccagaagacaaactttttgaataagagtcaacttttccatgtctcatatgttatgtttctcggatgatcacttgtaaaaatgactggaagatactagta

SEQ ID NO: 2681 - DNA, 498 bp, Arabidopsis thaliana
catcttatatgcagatcatctttagggatttcaaatcctctaatatccttcttgatgagaactggaatgcaaaactctcggatttcggactggctcgaatgggtccttcagatggaatcactcacgtttccaccgcggtacgctacgccttacttgttatgtctccattgattgtttgaaacaattgaagtcttaccaaactatgaatctacaggttgtagggaccattggttatgcagcaccggaatacatccaaacaggacacctcacggctaagagcgacgtgtggagctacggaatctttttatatgaactcatcacaggaagacgaccttttgaccgtaaccgcccaagaaacgagcagaacatcttggagtggatcagaccacacttatccgacataaagaagttcaaaatgatcatcgacccaagacttgaaggaaactactacctcaagtcagcattaaagctagctgcagttgctaaccggtgtttgat

SEQ ID NO: 2682 - DNA, 958 bp, Arabidopsis thaliana columbia
catgtacatcacaaataaaatgcatgttactaaacataaaatttcttcaaattgaccactttccaaggccgctggactggtctgtcttccaagtcctttaacctataaacgccgttccggaccacttcggtgacgatgtaaggtccttcccaattaatctcgagcttgcctcctttgtcctcccttgtattgtcgaagatcgtttcaggacataagctcctacaaagaaaggtctgcttttaatcttagcattataatatcgagcttctgcctgctgatagatttggattcgtatcaaagcttgatctgtctttcattgatggtatctagcgaattgatgatatgtttttaaaatcaattatcctaaaacactaatcatgtcgttgtagtattttaggttgtcaattcaaatgggtgtaatgctatcaatcaagatgcaatcagatttcacagagtcaagccaagcaataacaggttttgagtttctaatagtcctaaatgaacatgcacgaaacagaaattcaagcagaaacaatgaaaacactcgaccacctagcaaaccagacagagaatgtaacaggagtactcgattgcacagtctgttgccagacaattgggtggtcaagtgtcagagtgataacaggcgaaaaatgcaaaaactaaacatgaggcaataaaaacaagtaaatgatagcaatttaagcaaagaaatcaaatggaatagaaattcaagagcatggggtaattgagtagctaagtttccttaatctacatgtgattgacatgcacaatacattgtctttacacaacaagttcaataaccaaatctaagtgccaccgcaacaaagatcctcaagttaaactagtcccagactcaatcgccattgacatgtgctacctaacaggcattatgaatcacaagttaaacaaaaatgcccttgtaacaatccttggtcaa

SEQ ID NO: 2683 - DNA, 769 bp, Arabidopsis thaliana
tctagtaacggcgctaggattaacaagagtgatcaagatgaataagaaaatccaagtattttagggtatccatgagttcaaatttgatgcaaacataataattaaagatcagattcaagttcaaattgatagggaatggtctcaaatcatgacagtgtggtcgagtagagcaatctaggcatgattcagttttacttcaatttcattgactacgcaacagacaactagcaacgagggcactgagtttatccggtgaaccaaaatgcttacaaggctatctcatcattatccactatgcatatgcaacaatcctaaatgaaacactctatctcgatcctaaatgtactgcagaaggtgctgctcttgctgctagatcgagtgagtgtggtcctcctctttctcccagattcacgaggctcgaatgatgaatgcctcatagggacatgcggaatctcctgttcactaggctcaggcctgcgccgacttcgctcaggcgcgtcatatctcctcgagggcatgtcacgagggatctgtccctgcggaatagctgtagtggaagaggagcagcttagcttatccttcagaaacttgatagctctgaggcacttggcgagtaacttatcatgtttcttgcaccacttctgcagcttgctgtttttcctatgagcttcgtcaaactcttgctctccttgctggaggtcatgccactgaaatgatcatgctcgtgtaaactccgctcatctatttcatctgtcttataacatcttct

SEQ ID NO: 2684 - DNA, 541 bp, Arabidopsis thaliana
gtaacgtccgccagtgtgctctaaagctttagagaccgggttcgcttcttcgaagataacctgttcccattcggacagattcgcttccgggcagtttaagctgaatcgtttacaaatataatcgtccagcccctgagatttcaacaggcccggaattttatagatggaatcgacgtctttcagagaaataaccgctttttccggaacattacagaacaatgcaatcttcgcacgttcgttcgccggaacagcgcgatctgaacgacaaatcaggatgtcaggctggataccgatggagagcagctcttttacagagtgctgagtcggtttggttttgacttcaccagacgctgccatgtacggcaccagcgtcaggtgcataaacagagtgtgctcacggccaatttcaacagccatctggcgaatcgcttcgaggaacggcaaggattcgatatcacctactgtaccgccgatttctaccagtactacgtcatgaccttcgccaccttccagcacgcgctctttgattgcgttagtgatg

SEQ ID NO: 2685 - DNA, 574 bp, Arabidopsis thaliana
gatccttatgcatgtggaagaagtgtttgaattgtgggtgctccaaaaaccacttcaactcagactctttaagatgagtctccaataatccgactgccttatgaagataacactttgctgtaatcttgaatggctttgtatactcactcggaccgaaggaccattttaagaggttgaagagcttcagtttcctcatcagaatcctgcaatcaacatagatataccttagaaagcaacatagataaattagaaatcaagatagatatacctagattatacatagatataccttttagttttgaaaatttataagttagattcgaatatagatatacctagtttatacatagatatacattttagttttgaaaatttataagttaaattcaagtttagatatacctagtttcaatatagatatacattttagtttcgtataatttaatggtagaaatcagcatagatataccgaatttaaaaatagatatccggtttagtctctaaaatatctaagttatattcgaacatagatatacctagtttaaatatagatatactttttagtttcagataa

SEQ ID NO: 2686 - DNA, 1093 bp, Arabidopsis thaliana
gtaacaaatttcatatttatgcaaaataaattaaaatcagtttctttctctcttctctttctcgagtatccacatcttctgtctagacaacaaatctaaaaagctctctttgtccgaattggctccgtctcaaatatgagattcccaaaaattgttgtgaacatgtgaactagaattccacatgcatgtgtagtccaaacttgggaggagtaagagcatgagaaaatcaagtgatttcttgcctctactccatctccacaaagaacacaacttccgttcgctccaacattccacaagagaaatctatctcctagacaattttgaatatcaatccaagttatgaaaaaatatttaggagtagagttggggaacaaactacctgattagcaatcacattttggatttgcttccacatcaagtgccaattatgttgggacgagaacttgcacttataggagccattttgccttttccacattgagatatcctgaccagtttaaagaactattgcggttagtgtcaagctcatctttgataatgttcaaatcaagccgatgtcgtctacggcggtgagtagcaagcacgtcagccacgtagcttcgagaggcaatttccagatcaatacttcctcgtgggcctagaatatcgaacaagttcccaagtgtgcaccaaacatcatgctgaaaaaggtaccctcacaagatattacttccacctataaagaggtttcgttattggtctatacttcagaattatttatagccacaaccgggaggagttcccacatacggaccatagcgaacgattatgaaacaaagtttatggacccaatcgacccacattgaatcccctgcagagactaatctccatataagcttcaagacactaaccctattagcctcggatagcaatcttatctcagaccaccctcttttgttttggcttacaaatatttttccatacaatctcgcattttttgggtttactcagatcttgaccatataaaaactggatatagacttttaatttctctaatgcacttacttggcaagcggaaagcggagagccaaaaatttataagacttgaaagtat

SEQ ID NO: 2687 - DNA, 468 bp, Arabidopsis thaliana
gcgaaccaaggctgaatctcttcgttcatcgatcaaatcgagttcgtcgaggagcctctgagtattatcagagttgttttcgggagatagactcctacgtaggctcggtactatcatttcggccggaattatgcatttcgttccgtatactaaggcgaaaggggtttctcctgtggctcggcgaggagttgttcgatgcgaccatagaacaccttcgagttcgtcagaccaagagccctttttagcatcgagcagttttctcaatccgtcgaggattgtttagttagcagcctcggcttggccgtttccttggggatatcgtggtgttaacttgctaagtcgaattccccatttatcacagaagccttggaagcgggttgatataaactgccacccgttatccgtaacgatctcataaggtatcccgtggcgacataggatatgtttccaacgaagttctcgacttga

SEQ ID NO: 2688 - DNA, 555 bp, Arabidopsis thaliana
gttcttcaattgcttatgcatcaacacttatgtaaaacatacacagctatttctacattcccaaaatatcaagaggaaaatacaaattaacaatcaagatacgtacgaccaaatgcctttctctccatctgtttctcccatcacatgatgtaggagaacatatccacttcccggagtatggacactggcctgtgaattaatgtgcagatcactacattaatcccccaatatagaacgagtaagatattaagaaagtcaattaccgtagatccaatcacagcatctgttgcaagactcgccttcaggacatcagactacaagcataaggccaacacaaaaacgtgtgtcaatacaacatcagactacttgctaatgctagttgtataaccaatatgtgttaagataagaaaagcacctcaaaccagttgttcaaaacttttgaagctggtgccaataaaagatccataaaagcccttcacaatataaaaacaaagagcatgtaaacaaaacagtgaaagataacaaaacaaatcagcttaattgtttttgaaaaag

SEQ ID NO: 2689 - DNA, 540 bp, Arabidopsis thaliana columbia
gatttgattaaagtcgccaagaacaatccacgacctgccaacaacaaccggagataaggcaagctgaaccaactcattccaaagctcttttctggtaccctcctcatttgaagcgtaaacaatagacaccacaaaccaagaaggagaatcaggaagaagaagctcacatgtgatcatttgcagggacctaccaataacaactaccttcacacttggatcccacaaaacccatatttttcccaaaacagagaattcataattctcaacaaaagaccagccaggcaaaaggttagagatgaacttcttctccttaggctgctttacatgtgtctcaatgagacctccaaaaagtggtttattcaaaagaaaccatttcttaaaaccgcggcggtgactggaaatattaaatccgcgaacattccaacaaaagagcttagtacacatacttaagctttggttttgaggccttgcctcgtagattctcttctgacgcttagacaaaaccttgatgaaacctcttcttcagtgtcagtagataca

SEQ ID NO: 2690 - DNA, 632 bp, Arabidopsis thaliana columbia
cgacacttgccctttgcaggagagatcgattctgtatttgttgcagtatcaagtgtttagaggtcttggagagaccaaacttagacggagaagccttcaatcagcttggcaagaggctactactgtccatgagaaagttgtgtttggatcttggttgaggtatgagaaacaaggagaagaagttatcacagatttgctttcctcttgtggtaaatattctgaagaatttgtgccactagatattgcatcctatttcccagctactactgcttcttcccctgaggcagcatctgtgaagacgaaccgcagtgtatctaaaaatgttgtgtttaagataggagaagagaagatagcttgccaaaggcggaaaattgcgagtctttcagctccatttcatgctatgctttatggtaatttcacggaatcgcttcttgatgagatagatatgtcagaaaaccatgtatcctcatcagcctatgcgggttgttagagatttcagcgttgttggtgtactaatcggagttccaagaaccttcttttggaagttttagttttcgcaaacaagttttgctgcgagcgacttaaagatgcatgcgatagagaattggcatctttgattcctctatggaatg

SEQ ID NO: 2691 - DNA, 636 bp, Arabidopsis thaliana columbia
cctgtgttgtaagttgtaaccaatatatttgagtatttaacatctgactgattttttttctttgaataacgaattcggtcaaaggtttcgagaatcggcgaatgaacgagaattttttttaaaaaaactgtcattgtcagattcttgatttactctgcttttcattgtctttcactctttcatggcttctacttcaataatgctttcttccttcttctccttcttcttcttgactttttttgtcacttatgctcagcaaaacgtcaccgttcacacaatttgctactacgatggaggtaacttcacatccaacacttcatattcccttaatctcaaccgtctgatctcgtctttacctgatctaactccaaccatcaacggcttctacaatatctccatcaatggagaagtcaacgccatagctttatgcagaggagatgtcaagccaaatcaagattgcatcagttgcatcaccaccgccgcaaagcagctcgtagagagctgtccaaacatcatcgaagccaatatttggcttgagaaatggatgtttcgtacacaagtcgaattatcttaggtcaaatggagccggttcgtttttcttatacatcaagtaatgttagtgtgcagacaaggaag

SEQ ID NO: 2692 - DNA, 582 bp, Arabidopsis thaliana
gagacgaatcctgatgcgttgatccaagcagagatcgcagacagagaacgtgaccttaaaaacaccactaagcttcctatcttgcacggtgttccggttcttctcaaggattccatatctaccaaggacaagcttaacaccacggctggctcgtttgccttgcttggttcggtcgtggctcgagacgcgggtgttgttaaaagactgagagaatctggtgctgtgatcttgggcaaagccagtttaagtgaatgggctcattttcgatctttctccatcccagatggttggagcgcacgtggcctccaaggaaaggttactttcttcattcatgacattcatttctctataactatttggtaaaccaaacatcttacaaaaagattctaatgctgcagaatccatatgttttatcagcaaatccgtctgggtcaagtagtggatcagctatatctgtaacagccaatcttgtggcagtgtcactagggactgaaactgatggttccattctgtctccagcaagtcagaactctgtggtcgggattaaaccgagtgtcggactcacgagccgagccggggtag

SEQ ID NO: 2693 - DNA, 857 bp, Arabidopsis thaliana
tgccaataatttcaaatatcaaaagttaattcgttaaggcccggtaaggttttgtgtaacttacacatgtaaaataatgggcctcttcaaatctcaattacctacgcaacgacatcgtctagctcagttggtagagcgcaaggctcttaactttgtggacttgtggtcattggttcgagttacatggtgggcgttttcttttatacacaataatacaaagtttggatcctcaattcatagttacagttacatcaagaagataaatactctcacaaggtaaatttgactacatctctagctagaagatacctcagtgagtactttctatgagtggctatcttgtcctgaaccttgtgaagtttgttcgtcctctgtgttacatgtcagaatctgtgctttcccagcttctttctcccaatctatcctcgcaataaagatgagcaatatcgagagacagagagatataccaacaaataacccgatcaagaacccttgaagcccttgtttagccttgaacgccaaagttgcccctagaggcaaaccaatagatagaatccactaagatttgcatacattccaagagacggtttcgctgttccgcggactatctctccacaaaccattaatgggaagtttacaacttcgataaccgccattatcagcatcatcttcttcacaccgtttaagatgagttggtcatggtgagtatacaaagacccccaaaaacctctaaatgctatcatcactaatgctccaatgcagcctgaaataatcccacaatgagtgtagtgtaagctgctctataagctcccttaggattatttgcgccgagctcattggacactcttgttgcacac

SEQ ID NO: 2694 - DNA, 516 bp, Arabidopsis thaliana columbia
cgcattcctttgcagggtctatcttagaatcaacaggcatagtaaatggcccatcaaagttagatgaagccgccagaagcagaaccgcccagtctgccttttcaacacttagtttcttgccacctaaggaagacacagagccaccgttgctgactctcacttcaagaatcgaagcaaactgcaatcctttgtgatcatcatacggtatatttgtcgcgttgatacttttcttcaagttcacaggaagtcgcttggggcgacaacttccccgcatcaaaatctgattagccttgggatttgtctctgaatgatggtgcaactcgctgtcaaaagacaccttaaaagacaatgatcccggtttgcttgcatagatcttggctattattacttgatccggattagaagcgaaaaactcccttgagaagtccacagccccaaccgagtaacttactttagctacagcagtttccaagtcgagttcacggcgataagaggcttgagtgtacttccgatgcg

SEQ ID NO: 2695 - DNA, 821 bp, Arabidopsis thaliana
gcccattcatcgtcctggtcgagggatgagatcagcaaagttatagagacaatcaagagattaacagcgaatgactgtgtgcaagaagaggatatcggagttataactccttacaggcagcaagtaatgaagatcaaggaggttcttgacaggttagatatgactgaagtcaaagttggtagtgtagagcaattccaaggtcaagagaaacaggtcatcatcatttcaactgtaagatctactatcaaacacaacgagttcgatagagcctattgtctgggcttcctgagcaatccaaggaggtttaatgtcgccataacccgtgcaatctctctgctagtgatcatcggaaacccacatatcatatgcaaggtaccacttacttagttgttctggataaagacataatgcgttgacatcattcccaatctctcaactaataaaacgtattatatgaaacaggacatgaactggaacaagcttttgtggcgatgtgtggataacaatgcttaccaaggatgcggtttaccagagcaggaggagtttgtggagaaccattcaagcaagaaggaagcagcaatgggcctcaataccctccagaagctgagtggaacaacagtggagagctctacaattggtggtgcgaatgagaatggtgaatggtctgatgggtggaacaacaatggcggcacaaaggataaaaatgaatggtctgatggatggaacagcaatggtggtgggacaaagaagaaagatgaatggtctgatgggtgggacaacaatggcggcataaacgggatcaatcaagatggaagcagcaa

SEQ ID NO: 2696 - DNA, 565 bp, Arabidopsis thaliana
gggatccctcgaggtttactaaataacacccatgaatgaaactagtatgaactaaacgttgtagattgtttaagcatatgattccaccattgatgaatcccatgtttattataaaactccgacgcttcagtcttgtttacaatcataaaggccgacggaagaaaatgaagatgatctggtgtagaagacgaggaccaattttctccgtctccgaataacatacgcctaactgagtatccactagccaacctcgaaatctcaccgagtcccgcctccgtcatagtgactacgtgattgaaataaccaatatattctgagcatattacatcagattggttcacaaacaaatgaggtctccaagaagctaagttcttatatcgtggaccctcttgaccctgtaacaattggaggtaagaattgagaataacattttcaatatcgttaaggattctctatttaaagcttttcatgttatgggagatattatttgtgaagtccacaagtataatgaaaagtttctaaaagacgaaaaatagcattggcaaaaagaaaactttatatatac

SEQ ID NO: 2697 - DNA, 560 bp, Arabidopsis thaliana columbia
ataccttgacatctccatctcccatttctttcttctacggaaagcctcttccactggcctcaaattcgtttccggatgaagccccacgatgataaaatgttcaaacagtgacgctggctccttcaattttgtttgatcctagagtatttatcaaatggaaaacattagtcagctaatatgccatgcaagaccagaactttcagacagttaacggggaagaagaactacgtagccaaaaacgtagacatcctagagagattgaataccagagcttttgaagagtggagctggtaccactgtcttttttggtttgctaagacctcaggattgaaagtgggccggttatcctcacgcagattgctgacaccacgccaagccttttgcatctgtgttttcaatctctggaaactgtttgtgcgtctgtgtccaggagtccctatctcactttgggtgcgcctatgtccttgtgtaggtgactgcggtaagactggtccattgaagtatacgttttgatatgtctctccagctactttaactgcatccgcagtacatggcgaaga

SEQ ID NO: 2698 - DNA, 1303 bp, Arabidopsis thaliana
aaaagtgataatgttattgaagaagagggtgtgagttaactgataaaggagacgtcattgtgaactcgtcccctgtagaatcagtgcatgttgatgtggcaaaaccaggggtggttgttgtaggagacgcagagggaagtgaggagttgaagattaatgctgatgctgaaactcttgaagtggctaataagtttgatcaaattggggatgatgatagtggtgaatttgaacctgtgtctgacaaggccattgaggaggtagaagaaaaatttactagcgaatcagactctattgcagactcctctaagttagaatctgtggataccagtgctgtagagccagaggttgtagctgccgagagtgggagtgaaccaaaggatgtggaaaaagccaacggattggagaagggtatgacttatgctgaagtaatcaaggcagctagtgcagtagctgacaatggaaccaaagaggaggagagtgtgctcggtggcatagtcgatgatgcagaagaaggtgttaagttaagcaacaaaggagactttgtggtggactcatctgctattgaagctgtgaatgtagatgtggcaaagccaggggttgttgttgttggagacgtagaggtgagtgaggtgctggaaactgatggcaacatccatgatgtgcataataagtttgatccaattggccaaggtgaaggtggtgaagttgaacttgaatccgataaagccacagaggagggaggaggaaagttggttagtgaaggagactctatggttgactcctctgtggtggactctgttgatgctgatatcaatgttgcagagccaggggttgtggttgtcggggcggctaaggaggctgtaattaaggaagatgataaagatgatgaggttgacaagaccatctcaaatattgaggaacctgatgacctgactgctgcatatgatggaaattttgaattggctgttaaggaaatatcagaggctgccaaagtagagccagacgaaccaaaagtaggtgtggaagtagaagaattgcctgtttctgaaagtttaaaagtgggttcagttgatgcagaagaggattcaattcctgcagctgagtcacagtttgaggttcggaaagttgtcgaaggggacagtgctgaagaggatgaaaacaagctcccagtcgaagacattgtttcttctcgtgagtttagctttggaggcaaggaagtggaccaggaacattctggcgaaggtgttaccagggttgatgggtctgaaagtgaagaagaaactgaagagatgatatttgggag

SEQ ID NO: 2699 - DNA, 493 bp, Arabidopsis thaliana
ttcaaaaactcttcatagaagatttttgattcaaatggtaaaatgaaacaaacctttagtagctcaatgttcacagggttgacaccagcaagagcttgacgtccgaattcattatctcgcagccacgcaaatctgtcccctgaaaacaacacataaaagaggattcaaaatatgtatatggtttaagagaatgatattactctgaatgagagaatctcatagacaaagttacattttataacggctggagtgtcatattttagcagtgtttcagtaacgttgaggatcccattcatgaaaccgccgataaagccgccaaggccagtgtcttttggctcagtatgtcccaagacaatgttgcttttatataaattatcgatatccgagaagcatgtgaagggaatgtctaagtttgacaatgctgctgcaatagatggtacaagattgtggaagagagccttaaatctccctgctctgaaggtatctctcttga

SEQ ID NO: 2700 - DNA, 1183 bp, Arabidopsis thaliana
cgccaatatgaagctcaaggatgctcaatggtttttccctggcatttgaaaatttcaaacttttcatttagtttcttttgttttgaatgaatgtaaaattttagttaatccaataaaaaaacctttttacaactacttgttacttcgagtttgaagttttataattacatgtcttggacaattcttcgatcctttgccttattggttgacgttgtgtactaaaaccactttcgtagcactactcttcatagatcttgtttcctaatttgatagaaggacaaacgattaggcatgttcttgtcaattagtttcacaatttggtcttatgttgagatatgttttcatttagtttcctctatgtgtagtcgaccgtttgtcctttttttgttttttgcctggtcttgttccttttctttttgatctttctcgttctaaatatagaccatgacattgcctgcttaggaaacatgtatgccatagaatctctagcctgctatttctacacttcatacttagtagccacacttcacaccggagccaggacggagactcactcgggtcaaaaatctttttaacaaaaaacaaaaagataaactttatgactccggtgtctcgctcctggattgtcggtctgacgagtggcaccacgtgacctccatgagtctggctcatacttcgccggtggctcacctggtggacgggaagatatatgtgttgggaggctgcaaggacaagaattcctccgactagggagaggcgtttgacccaaagacgcaacttgggctgccctgccagtcatggaggaggaggaggaggaggaggatcaatgaaaacaccacggcctacaatgagtttgatacatgacagtgtggtgatagaggacaaggtttacgtggtggattcatggaacaaaagcttcttctactctccgaaacaatgtaaatggggtagagggaatcatgattcaaagcctaagaataaaagggattggtgtatgattgataacttgttatacagttgtggtcagggcgggtgtaaatatttgtgtgagccacatgaattggataggtgtgatgcagaggggatgaattggacgggagtgagaagttttgatttgcagcgtctcaagtacaggttctatcattcgagggtggtccactttggtgggaagatgtcaagagtg

SEQ ID NO: 2701 - DNA, 496 bp, Arabidopsis thaliana
taacactcaagagcatcatttcgaacaaaaaggttcaagaaaatgttacctgcaactgcaatgtatgaaggagaaagtttctaacaatctccccttctccatcaagcataaacgcatacgccgaagagacaaaatcacgaataaacacttgatcatagttcaaagtctgcgtatcccctggatcattagccgctacagtccccacagggaacccacagtagttcaccacggcaccacgaagcagcttccacgcctccttctcaacctcagtctgactcaaacaccgttctgtttcctttcttacacccacatttccaaaattagcatcttttcctcctcctacattacccctttcccttttcggtatcccttcagttttttccactgtcttaaaaacaagtggcttcacaaacatactctcaaagctcttatcatttacatgagaatccaacgaagaggtcgaatagttcctaaaatctgaagctacatggggaat

SEQ ID NO: 2702 - DNA, 757 bp, Arabidopsis thaliana columbia
atttatactaaaatcccaaaaatcctagattcactagaagaaaagagacttgaggtggtttggatggatgctcgatcttggggatcgagtaaagagggtgctgcaaagtctgtgcctttgcctccatgctccgagtgatcaattggtcgagtagttgcttcttcctctgctattcgtatgctcaaatgtctggttgagtggggaatgaggaggatctggggacgctttgaacgatcaacaagtcttgtagagtaggttgcccttgatcgagtaactggtcgagtagaggatcgagtaggaggtcgagtagagtctgctgcctcgtctatagctggctatatcaagtgaaggggtcgattgaattgccttgctgcttctctcctagtttgatagagtagagggtcgagtagattccttgtaagctccttctgcacctgaaaacataccaaaacatgtcatatgtacgcaagatgatcctaaatgtctaagtgtgcaaaataagctaaatgtgatgcaaaatgatatgatacaatgagtgatcactaagctaaatgatgataaatacatgcctaaaatgagtaaaatacggtgttatcaactcccccaaacttatctcttgcttgctctcaagcaaacaagaaatcttaagttgaagcagaggtttgaaggtggaaatttaaaaaccgaagcatgcatatagagcggttgagatcaatgtccaaggtagctaattctaggttgcaaggtgatggatctt

SEQ ID NO: 2703 - DNA, 596 bp, Arabidopsis thaliana
tctagaggatccccggctgctttctcgtccaaggtggacttagtttgaaagcgagatccagccgaatggtcgagtccaacaactgaaatttcaatctgagtagaaacctccccgtcctgaacatcactgtcctgagtgattgagttggagacatgttgagtaggcagctctcgatcatggcagatattgatagcgtgacgatgggcgtattctttcgggttctgtatgaacttccctggaaatcctttaactttgggagaagaggtcgacgcagtttgtccttccaggtatctgaccttagaggtaagtgcctcaagtttgatgttaagatcgttgaaagtgcaatccaccttgttgtggatttctgccatctttttggcgagatccattactcctgctccttgtccctggagaatctgctgtagcatgttcttcaaatctgaatctggagttgttgaaatcggttcttgttgctgctgtcaaacccatgttgtggaagttgctgctgatagttgccctgatactactgctttggaacatacccctgaccttggttgtatggacaaaggggttgggttgaatatgctgctgtgaag

SEQ ID NO: 2704 - DNA, 567 bp, Arabidopsis thaliana
ccccttttgttgacgtggcaatctttggttggaaccggacgatcggtttgggatccgacaccaacacggatagttttgatcctgaggattctcaacattcgggtttctgtaagaaagactaggactacctctaaagttgttgttgaagttgttgttgtagccgcgattcttaaagcatccttgggctccaacatagttaacttcttcttcttgatcgaatgtgtcatggtacccttggaaggcttatgtgatacccattgtggatgttgaaatccgcaattaaaaatttatggatattaacgaggttcttaagccttgtcagtcgagccaagatcaaatcgaaaaagtgtttaagtaaatcggaattatttcagtataattttttctgcccctctataattacaggctaagttctatttatacaatgaagacaaatctacagaaagtaaatgaatgctcgtatcacgccgcagatctcgcctcattaaatgggctcctgaagcccatctcatcctgaatgggtcgaacttgttattcaccgatctaggacatatcgacggattgcgg

SEQ ID NO: 2705 - DNA, 857 bp, Arabidopsis thaliana
gtatgtgttgatgtagtttagatcatctgatttatctatctactagatcttgacttagaattttaatgttttcggatcttcttctttttgatgttactcttctcttcaacagtttttagatcttctcctttaattttaaatatatggttttttttttcactttaccctttattaatttgctttttcttttatgcttttagttaaagcttctctcagatatctccattatcattttgatcttgatgaaaatccattaatttgttgatagacagtacatatatatgtcaattatgtcttctatacttgtatataggcaaaggtttttgtgctaacgtttggaagagatgtatttttttattttgatgatcaggagattgtagtgaagcccttggaagaaatagtaacaaacacatgcccaaagccgcaaccgcaaccgcttcaaccgcagcagccaccgtcggtgtgtggagagaggaaggcaaggccagaaaaggatcaagctgtaaactgtccgagatgtaactcaaccaacacaaagttttgttactacaacaattatagtttgacgcagccaagatacttctgcaaaggttgtagaaggtattggaccgaagcaggttcgcttaggaacattcctgttggcggtggctcaagaaagaacaagagatctcactcttcttcttctgatattagtaacaatcactcggattctacacaaccagctacaaagaagcatctctctgatcatcaccaccacctcatgagcatgtctcaacaaggtttgaccggtcaaaacctaaattccttgagacgaccaacaagatctcaatttaggtttttcccacatgggatgatta

SEQ ID NO: 2706 - DNA, 553 bp, Arabidopsis thaliana columbia
agatccccttgatcgccagaaccctaagaccgatttcgattgtgcgagtttcgacttccacagtcattactcgagaatagctaaaaggtgaacgcaggaaagctggggggctaactgggaaggtccttacctgattttcagaatcgtccgacccgacgtctacgagctcgccaacatgaatggcaaagcagttacgagatcctgcaacgtcatgcacctaagaaaatactataactaagcccgaaggtatgtatggacttgaactatgaggtggcttgatccctgaaaagggtacgtagacagctcatcttcagatgagttcagctacccccccaatcaaaaaaggagggagtggatctgtatatccatactcccacgtcattttccgagaagtgtttttaagtgtcttttacttggaatttccaaagttgtttcaacaatattcgacttgtcacgttttcaatttgaattacactgcctcggttacagcgcgctatacaaatatttaagattagaatctgatcggaagttctccaagcaggctgtcaattct

SEQ ID NO: 2707 - DNA, 828 bp, Arabidopsis thaliana
gcgcttgaccaggcaaagctgtctttgttttccttgagaaaggttacgagatcctctcatattgttgggtcgaggtcgtgacctatcctaacgcatcgtttaggatctgattcgtctatgcagacctgcgttatcagcgatttttgaggtccacgttgagaagggtcggaggactgactgttttcatttctgcgagtttgtcctctatcattattaccacggggtcggcttttttgatatgctcgtaaccacccatataacattttcgggagctgcgctggctgccgtatacgactgttatcccttgtcggaggggaatttaatgtattggtagtaggtcgatgggacggctttcatggcgtgtagcatggtcttcccagtattgcgttgaaaggagctttcttatcgaccacgaggaagttcgtgagttgtcttactccccgtgcgacggttgggagctggatggttcctagggaaaaggtcgtatctccatcaaacccggtaagtggcgtttttctgccttgcaactcggaatcgaggtgccccatttttttgaaggcgtcgtagaagagtacgtcaactgagcttctcgtgtcgatcattatacgagagagttcgtagttgcctacgtcgattcggatatcaagagcgtcaatgtgaggtttattgaggtcagtggtttcattttcccagaatgtgatctggtgatcgaggccggtttgttttaggagaaaactagatcatggtcgaggaacgaaccaaaatactaagtaggaagaaagagaaagttcaagctaaaccagctaggtgagctggacaagctggatg

SEQ ID NO: 2708 - DNA, 565 bp, Arabidopsis thaliana columbia
caattccatctcccgattgaacctgtacaaaccatggcaacaacgagctccgaccggttaatcgccggtttaacgggtcgatcggctcaatcgaatctcgttacgcaaatccagctcaatccgtttctctaatctgtcgaaatcaaatcaatggcgcaccgctatcgtcttgcggtcctctcgaaggtccaggctgtggttaatcgaggcgattcctccggcaaagtcctggaacggatctaacgatggcgacgaagatatcaagaagtcagacactcgtaattacgcgatcggtggaacggtggtcacgcggtcgccggaaaagatgacagaacgatggagatagtaatagcagcggcgaccacggcggcgcatgggtgtcgggaatcgcgtactgtataagctggctcttattcctctcaagcaatatcccttcttcctcgcgcaactctccacattcgggtaacaaatctctctcttcctcactctctttgtagaaatggctaatattagatttcagttttggttttgagatttcgatttcgatttgtggtctcttttgatg

SEQ ID NO: 2709 - DNA, 608 bp, Arabidopsis thaliana columbia
tacaacaatacaaacattatctacataattactgtaagatgtacgttttattctaaagagataatattttgattaattgaataggcagttgtccctctatgaccgtccatattagctctcttttaagtacggtgtctaattgacaaataaatgattcacgtagctagggtttttacggtttatttatatatattgaatataaccacattcatgtaaaagattaatgaaagtaattatcttggggttttttttgggatctaaacagttaccagtgcctcaccttatagatcaagcgacatcatacatgatccaattgaaagagaatgtaaattatttgaaagagaagaaaaggacattgttacaaggagaactcgggaatctctacgaagggtcgtttcttctacccaaactcagtattcgttcgcgggattcgaccatagaaatgaatctgatcatggatctaaacatgaaaagagtaatgttacacgagcttgtgagtatttttgaagaagaaggagctcaagtaatgagtgctaatcttcagaacttgaatgataggccacttacacaatcatagcccaggtacacatcacacgcatatgtttgta

SEQ ID NO: 2710 - DNA, 490 bp, Arabidopsis thaliana columbia
aacaaattgtgcttcttgttgtactgaatcataagctgagccaactgaggaacataatggcctaaaaatttgcaatttagttaatacattttagcgacgaaaactactgtttttcaaagagaaacagagcaatatttacgtaccagcatagctttcaccagtgatgaagagacttctgttgagatattgagggaatttgaggaaccatttttgcaagaacacaagattgtcttttgctgcaaatttttattcgaaaatggacaaaaaagacaaatattagaatgtttgatatgtgaagacaaacaaaaagaaacaaagatgaagagaataatcctcagatgtgatctgaattctgcaaaaaaggtcgattatttttctctttttgtcagactgagaaagaacaacaaataaaagctgaaatgttttcagggaaacattaatatatatatatattcgtagctcagcgatcaaacaagattcatatcgcatg

SEQ ID NO: 2711 - DNA, 527 bp, Arabidopsis thaliana columbia
cctgattgaatctgaatcagcgacagttcggagagttttgagaagagatctaagaccacggatgcgaaggaaggagaattcagcgcaacagtcgcgtaaaccggtcctgagggatagtgtcagctccctgtaaagtctctgtgtattgagagaagtcaccagctcttcgactaccatcgacgccgcgtctgattcttctccggtctccgattctgatggattctccggcgttgctgaagagacaacacgccatcaacgcaagaaattggcagctaaagctcagtgttaaaagaagacaaagaggtttgcagaactcacgctttttgttttcttgagcagttttttcaatccgaagtatgctttcttcagttcactgtgttccggatcaagacgaagccctttttggtaatgcctgaaacagaaagtttacttaagtatatctgttttggacccaaactctctctgattgaaaataaggttgaagttagccaaacctttgggcgatatcatgatccgcaaatagtagt

SEQ ID NO: 2712 - DNA, 578 bp, Arabidopsis thaliana columbia
taatctaaacccgcttggtccctaacatgaagtcttatgaaactaatgagctaaagggacttgaccaatgactaaaagctatacctgattgacagtatttatatacgtgtaacaatacctctgcttccaggagatggagatcataccaatgtggacacattttaatacaacattcgagaacagaacatggcttcaatcagacaactgcagaagtagtacgcctaaggtcaacatcattcttgaatttctcacttggcggtgttcctttgaagcttccatatctcatgggcttaggcatgtaaagagaactgagtatcttctccaaagctaccacagtgtatctcacatacttgcttgaactcgcgtctttctcaaccaatggcccatagttttgcatatagcttctgtaaaccggcacaatagcctgaactatctgctggcaaactctatcccttaaatctttctctggtaagacccatgatgcttgcttcttatacatctcatcaaacgcatcattgaatgctttcaatctcttcttgacaagatcacgagctgtggcatgtccacccgagaaaagt

SEQ ID NO: 2713 - DNA, 587 bp, Arabidopsis thaliana columbia
catctcctgatttcccgttctttatgaaaagaaacgagagcgcgagagtatgcaatacaatcagattttcgggttcccgccaacgattgagcttggtcataacaatctctctggacctatttgggaggagtttggtaatctgaagaagcttcatgtgtttgatttgaaatggaatgcattatctggatcaatacctagctcgctttctggtatgacgagcttggaagctcttgatctctctaataaccgtctttcgggttcgatcccggtttctctgcaacagctctcgtttctgtcgaagttcagtgttgcttataacaatctctcgggagtaataccttccggtggtcagtttcagacgtttccaaactcgagctttgagagtaaccatctctgcggggaacacagattcccctgttctgaaggtactgagagtgcattgatcaaacggtcaagaagaagcagaggaggtgacattggaatggcgattgggatagcgtttggttcggtttttcttttgactcttctctcgttgattgtgttgcgtgctcgtagacggtcaggagaagttgatctggagatagaag

SEQ ID NO: 2714 - DNA, 628 bp, Arabidopsis thaliana columbia
  unsure (1)..(628): unsure at all n locations
tgctagaatcttaccttacttaacatacggtgagcctgcagcgatggaagcactcatagagcattttagcccttacctgcaaaactggtctgaatttgatcagcttcagcaacgtcatgaggaggaccccaaggatgacagcattgctcagcaagcggcgaacgagaggtttactgtggagaattttgtaagagtgtcagaatctctcaagacaagttcatgtggagagaggttaaaagacatagttttggagaatggtatcatagctgttgctgtcaaacacataaaggaaatttttgcaatcacgggacagactgggttcaaatctagcaaggaatggcttttggctcttaaacttccgtcagtgcctcttattttgtcaatgctaagaggattgtcgatgggtcatttgcctacccaaacatgcatagacgagggaggaattttaaccctacttcatgccttagaaggagtctctggagaaaacgacatcggtgcaagggctgaaaatttgctagatacacttgccgataaagaaggaaaaggagatggatttcttggagagaaagtcagtgcattacgagatgccacaaagatganatgagacgccgtcattaagaagagagag

SEQ ID NO: 2715 - DNA, 557 bp, Arabidopsis thaliana columbia
ccgagacttcatcgaccgagattgacatgttgaatgttcccaatggtgcatacctctgcccggaactcactctccccgcttccaggtctttctaagcgtttcacagccacgaatgtagaagaacccggtaatgttcccttaaacaccgccccaaaaccgccgtgtccgaccttatccgagaacccattggtagctgattgaagctccttgaaagaaaataccttaagattcaacacagcaaacccatcttcgtcttgtttcctagtcttcttcctctttcgactcctcttcaacagaatcaatggcactaacaatgtaaacccaagaactgagattgacccaacaacgctgcacaatataattatagacttagagatgtttccctttgaattcctttctttggttctctgatatacaatacatcttcactaactccagtccacgagctcgaattcttcagattattcggcgactcgagtaaaattttgcagagattagacttctccttatgataaaaaccaacacaagaagagtttcctagcaagttttggcgcaag

SEQ ID NO: 2716 - DNA, 321 bp, Arabidopsis thaliana
ggagctaccatcattctctaaagttgatctgcgcgatttaccgctggtcaccattgatggcgaagacgcccgtgactttgacgatgcagtttactgcgagaaaaaacgcggcggcggctggcgtttatgaagtcgcgattgccgacgtcagctactatgtgcgtccgtcaacgccgctggacagagaagcgcgtaaccgtggcacgtcggtgtacttcccttcgcaggttatcccgatgctgccggaagtgctctctaacggcctgtgttcgctcaacccgcaggtagagcgcctgtgtatggtgtgcgagatgacggttt

SEQ ID NO: 2717 - DNA, 556 bp, Arabidopsis thaliana
  unsure (1)..(556): unsure at all n locations
nnnnnnnnnnnnnnnnnnnnnnctaaaggaatagcgtgatgaacgttttcagcggtccagtcagtaatcgcggccagtttgtcacgaaccacttccagcggctgacgcgctaccggacgcagatgttttttcgcggcgtcggcatcgaactcagcaaaatcttcgtagaaataacggcagctccggtgccatctctttcagcgtcttgcagcgttcgcccagcagtttcaccagatcagccagctgcgggccgttacgggtatcgatattttcctgctcaatgtgccactgtaagtgagtagcaacatactccggcggcacggcgttaatgtagtgatggttcagccacagcagcttgtcggtgttgaacgcactggcagatttgctgacggcattcaaagtgaagtatttgatcatctcttcacgagtgaagatttcctgatcgccgtgggaccagcccagacgcaccagatagttcagcagtgcttctggcaaataactgtcatcacgatactgcattacgctgactgccccgtgacgtttggacagtttttta

SEQ ID NO: 2718 - DNA, 475 bp, Arabidopsis thaliana
gatattgtccgcgccgagaaaggataagaagaagattacgaacaaagaattggtttccgaagctagagtgtttctcaagaaacgggggtatagtcaacgaccaggcttgtattgtcatgaccgttttgttgataaaccatttatatgctactaaaacacaagaagttcatctggaaagttttgtttgatggtgcatttgaagttatttctttttgtgatttaagatttttatgtagattaaaaaaacaaatgggtagatttgaccgtctctcagtgacttgtgattcaagtaatatacagttttattttatataggtaggattaatggaaaaaaataacaacttagtcacaacgattatttcaatactagagatatggaatatatatacagtatgtttataacggtgacgtgctgacctctaattaaataacaactattatgcaagaccacccaaatgttatgtatagttgacat

SEQ ID NO: 2719 - DNA, 556 bp, Arabidopsis thaliana columbia
acgtctgtcgtctgttagtcgtattttcgtcgttaagtttattgggtttgggcttgggcttgggatgttgaaagcccaacaaattaattatacttataaatattcatgaaaattataaggtttctataatatttattcaaataattaaacattaaatgatatattcttaaacaacatttttcaagtaaatagaaaaataaatatacaaataaagcacacatttagtactctttatcatcttcgacttcatcttcgtttgaagacgataaattacatcagaattcatcttctggttcagcatttccgacatcttcgacttcatcttcttctgaagacgataaattacatcagaattcatcttctagttcagcatctctgacatcgtaataccggattgtgtagtattagatcttcaattgtagttagcaacacagcttcatcgctttctgtttgcaaaagagtcggatcattgtttttcatattcttcagaaaagtttcccgaggattcacttttaaaacatttcgctaaatttttttgggtttcttctatatggat

SEQ ID NO: 2720 - DNA, 868 bp, Arabidopsis thaliana
cagagtatctacaaaaccagaaaatgcaaacactaagcctctctctctagtctcgagtaacatacaaagcaacaagctcaagaacgatttagacgttactaaaaactggattgtgagtgaaatggtgaagccaaattatctcagtaaacatctctacacattggaacggttcaagaactcaactttctcaaaaactcgattcaaagagctcaactttcttagaaattggattcaaagaactcaactttctcaaaaactcgattcaaagggatgaacttttttcagaaattggattcaaggaactcaactttcttaagaactagatacaaagaactcaactttattaaaaattggattaagagtgaaatagtaacataccagagacatcaagattagcttcttcttgttgaagataatctcgattatgacaacatcccaaaaaggtatctctaagagaagcttgcaaaggagcaagaggaggaggacgagcttcaaaagccttcagaagcttccgaatccttaaattaagagaagcataatgacaacgatcaccatcaaaagtatgttcagagcaaatcgcaccgttctctagaagcaatcgagcagagtctatgtgaccagcgagacaagcgtagtaaagagcaacagagtcccaacggtcacgtgcgttgacgttgactccggtttcaacaaggtaccggatctatcgacgtcaccggcgcgtgaggcttcgaaaatgtctccgtttgggactttctttaatggtacggatggtttgtagtcttggaggtcgaggtctagatcttctaggtcggattcgagtgtccaagatgaggaattctcaattggagacattttggtcttggag

SEQ ID NO: 2721 - DNA, 920 bp, Arabidopsis thaliana
taactactctagacactgttggttctatcctctcaagttaaagtctgatttctacttgatctttttaaagtttcaagctttggttcagaatcaactacaaagtaaaatctctatctttcaatgtgatggtgggggagaattcaccagcaagatcttcctcaaccatcttcaagaacatgggattcaacaatacatatcatgtccttatactcctcaacaaaatggacttgcagagaggaaacacaggcacattactgaactggtctctctatgttatttcagagcaaagttcctcaaaggcattgggtagaagcatttcatactgcaaattttctcagtaatctgcttcctcatactgctttggacaatgctaagagtccctatgagctactttacaagaataaaccagattatcaagccttaagaacctttggatgtgcttgctttcctactctcagagattatgctcaacaaaagtttgatccaaaatccttgaagtgtgtttttctgggttacaatgagaagtataaagactatagctgtcttcttcccactacaggcagagttttcattagccgtcatgttatctttgatgaccagtccttcctttctcagacacctatcttcatctgcagcctagtggcgttacaccattattttcagtttagcaacaatgctttatgccacgatttgaagcttctcttaatccagtctctctgcaaaatgctgcaggtatgcagccttctcctgtgatcagtatcagaactaacaccactagtgtttctccatcgctgccaccaatgatgaactcatcagtgtcgtctactgttgccagtgaagagagttctgagtgtacgaagagctttgatctcttacctataggcacttcttcacttgacaacaggacggatccactgaca

SEQ ID NO: 2722 - DNA, 846 bp, Arabidopsis thaliana columbia
tatgatatctttatccttaattcaataaatcggctgtaagtactttaaggacatcacgattatagaatcccaggatacaaccgatcacgaactaatacccgagcacacaagtattagactcaagcgaactagatctatgatatactctcaaacctattaaactaagaacttacttttaagaagcaagagagagagaggagagaatttagaatttaaagtgttttgtgtttgagagcttgagaaataatgataggcttgaactctttatataataaaaggggataggatttgtgagaatattttcaggatatgcatggtatattttgagactatcatgagaatattctgagactatcctatcctcagaatattttgagactatcctgagaatatttccataagattcaactcatcaagcccaataactcacaagcatgacggtccacaagcccgacagcccttgagccgatgacgggacgtcccgacaacaggcagcccgactcagcccggtttggttcggttcggtccggtttggcccaagtgtcccactttacacccttatttctcattcaatacaactccgtttttgacgtatgagtataccattttgtattactcgttaccagctttccaatgcactaatgacccaacaattccgtttagccggaattcggccgaaaagtcaccggaaaacaatttatgtcaaaaaagttccaacaatcccccacgatggatagcaataagtctaaacatatgacgattttactaatcctaaggactgacccaactagctagactagacagaccttcgagagtataaacgaagactaactgtatctgagttgg

SEQ ID NO: 2723 - DNA, 951 bp, Arabidopsis thaliana columbia
agaaaccctagattcactagaagacaagagacttgaggcggtttgggcgagtactcgatcttggggatcgagtaaagagggtgctgcaaagtctacgccttagtgtctatgcttcgagtgatcaaatggtcgagtagatgcttcttcctttcctatctgtatgctcaactgtctgattgagtggggaatgaggaggatccgaagacgctttgaatgatcaacaagtcttgtagagtaggtcgcccttgatcgagtaaaggggtcaagtagaggatcgagtaggaggggcaagtagatcgatctgttgcttcctctaaggccgccttgatcgagtagaatctgctgcctcctctgtggctgcctggatcgagtaaactggtcgagtagattgctgcttcctctggttcccctctagggcaatagaatgattgtttctactctggttcccctctagggcaatgagtaactacttctcctctcgttcccctctagggcaatgaataactggtcgagtagctgctctgctgcttcccctctgaggcaatgaataattggtcgagtagctgctcctctggttcccctctggggcaatagggtagagggtcgagtaaactccttgtaaacttattttgcacctgaaaacacaccataacatgcaatatgtatgcaagatgaccctaaatgcctaagtgtgcaaaataagctaaatgtgatgcaaaatgatatgaaacaatgagtgatcactaagctaaatgatgataaatacatgcccaaaatgagtaaattacagtgttatcaactcccccaaacttatctcttgcttgcctcaagcaaacaaaaaatcttaagttgaaggagaggtttgaaggtggggattaaaacccgtagcatgcatatagaacgggtaagctcaatgtccaggtagctaattataggttgcaaaatgataga

SEQ ID NO: 2724 - DNA, 597 bp, Arabidopsis thaliana
ttttttttttttttttaaatatatattgtaaaagagcaaaggttacataggagacaatatttccagattagaatacataagttgaaagaaagaaaccggagattagaaattactgaaaatttgtgaaccatagtgaaagataagtcacatgatcatttgacggaagagttgtgaccttgttatcaagactcgccagtctgcgacgaattaggagctgaatatctttcttcaaatgagtttcagatcgaaaggaagaggagtgtaatcttgagttgcgttcagcccaaatataatagatcaaggcttgaaagagaagcatacaaatcgcatttagtcttctatttgtggtaggagacttaatccagttgagcatgttgtcgaagcttgaaaacgggattggaatgaaagcggcgaagaggtcaaggcagagagatttggagtagttgcattggaagaagagatggtcctagactcctcaccagataagcatagcagacaagaagcaggagctggtatactctactgccttaacctgtctctagtggtaagtcgattttgaacagttagccaagtcaagaaagcatggtttgggatttt

SEQ ID NO: 2725 - DNA, 573 bp, Arabidopsis thaliana
aattcgtggcttttacgccggatttcaagtcggcggcatgaggaaatcgatggtggccgacgaagaagatgaacgtcgaccaaagaagaagaacacgacgacgaagaggagcctccgaactcgattttctttatttagcttttgaatttctttttcatttttttaatcaactcattaagggtacaactggtatatcacattttcggtggcattcagattaactgatggcagtccagatcagttttttcaaaaaagtggcataagtgataaaagttccctggaacccaacttttattaaagaagccgataagggtaaaatcgtccgcgcacgtgtctttcaagctcaattttagttagtagataaattaactctttaaaaaagtaattgttctcttgaccaaaaaaaaaaagaagtaattgttcctgcaatttttgttttcgtcaaatccttttttcacatttacttgctacattaagcagatgaaatgaatcatctttgcacaatttgttattttctccacgtagacaccactttacttgaacagactcattatgacaaaatacaatgtgtga

SEQ ID NO: 2726 - DNA, 558 bp, Arabidopsis thaliana columbia
tgctattctttctatttttgtaatgccgtattgatattaataaaaggatgatcaacaacactggattagaatgaatcctctagctaatgatgttacatacagagcaactcctattgtatgataaacgttacagacaaaacaaagccacatataatccaagtttcctgtgtaataaacttaacaataccttgatgtgtctatattccttttgtatccattctaatctccacatgaacattctccatctttaaagtggtggaaatgctcagcatctcttactgagatttctcttcttactgttttggagatgaactttactgtatcatggcaattttcacacatactgagattctttgttacccaaattggcattcctgggaccgtgttgatcagaccaaatgcaatggcctttctctcgctatgtccacagaatatctcatctctcgaaatctctgtctcatccatagaactcgattctgaaattttagtaagcccaacttcactcattttctcatagaacccctctaaaacagtgttgatctcttttgtttgaggatg

SEQ ID NO: 2727 - DNA, 607 bp, Arabidopsis thaliana columbia
caaaggaagggagagagtttgaaggaaagccgaggcggctttgggctctggactccttaccctggtgaccttgattctgttgagctgccaaaagtagtaagaacttctaaagctggttgagacagtaaacattatacactagtttttaactttcgtttgatcgctgtcttcggttttccgaattttccaatttatcaaacatacacgtcttttgaattctatttgtagatcgaagaatcaaatgtaaaacccaaattgttataaaaaaagaagaagaagctgcattgacattcgtgacagtaataagacaaacaaatgtatgttgttctgaaccagtaatttggtaccccaaaaaaaagatgcaaaatctcataaattatacaagaatttcaatttctcttacaaaaagaataatcaacctggcttgctcagtttcgaagacaataataaagggtctagcgattgggaacaaacaccatttattgggacggacgactcagaggtgtgatccaacgcagaagtaaaaataaagatgcatttggacatatcatcacaccaaggccagtagaactatgttcttcagttggtggtacgcgactgtaaactg

SEQ ID NO: 2728 - DNA, 562 bp, Arabidopsis thaliana columbia
ccagtgtgctcaaaagtgttatatgaagacaacaacaatgttgtaacgccccgactgcctctaccagtgggctccacatctttttcaggtctatgggcccatccctgtccgacgctcggtgagccatgtccggaagactttaaagacttgttaccatccctacaaataagcacatgatcttttctatgctttatcctcacaatggttccgacaattacttcccagaaggtcacccatcctgaaactactccagtctaagcacgcttatctgtggagttctcttgggatgttttaccgaaaatataagtgcatattggtgacgtaggtggccaaatcaattcttttaaacctctccgcatgcatcacgatatttctgaaatcggggtgttacaaatgctctgtgcattattttaattagttttttatatgatgctaaatgattataaaatggtttaatatagttgtggcatgtgggcatggaccgacatagttgaaaaacattattattttgctaaatcaatatattgatacaacatgaaacccacgagggcttcttagagaa

SEQ ID NO: 2729 - DNA, 914 bp, Arabidopsis thaliana
gagagcgaattttttttaggtgtacatgtggtaaaaactctttttttttttttatatgtgcgtgattaacgtggttcagttatttcgtatataatatccctatctcttttattttattttattttaaatagcaataatttcgtatgaaatatcttttacatcaaatatctctataagcctcgtctttaaaaccagacacagaaactcctcactttcgaaaaaaacaagatcattacacaaaaatgggacacctaattcctcaaaccggagatgaagagaccgagcttggtttagctgcggttaggctagctaactgtgcagccttcccaatggttttcaaagctgccatcgagctcggtgtcatcgacactctctacttagctgctcgtgatgacgtcaccggatccagttccttcctcacaccttctgagatagctattaggctccccacaaaacctagtaaccctgaagcaccagctctgttggatcgtattcttcgtttacttgctagctactccatggtcaagtgccaaattatcgatggtaacagagtctacaaagcagagccgatttgtcgatatttcttgaaagataatgttgatgaagaattaggaacacttgcttctcaacttattgtcactctcgataccgtcttcctcaatacatggtaactttcttttcaagattcactctctttcgatttctaatattagatccatatatcaagaatttggagattgatgtttttttgcaggggagaattaaaaaatgtggtactagaaggaggagttgcatttggccgtgccaatggtggtttgaaactctttgactatattagcaaagatgagagattaagcaaactctttaaccggaccggattctctgtcgcggttttgaaaaagatcctacaagtt

SEQ ID NO: 2730 - DNA, 617 bp, Arabidopsis thaliana columbia
tgagaaggctctcatggatactttttgatgataagaatctaagttgagaagacaacctatgttgaagtacgatcgggccgacataaaccggattaaacattaaaaacagccggtatttaataactggacaaaattaaggctcataaacagaggaaactcgggtttctggagcattgagcctgtttaacttattctgttaacttgaaaaaagaagctacaacctaaagccgtatccacagatccatgtttaggagattagtgactttgcagggtcatgatgaagcatggcgatgcagaacatacttgaccacttcgtagaaggaaaccactatccctaccgatggtcctgcacgtgccactcgtggacccattcccatgaacagtcctctcatccctccatccctgtgtgtgcaagtatttcttgttatgttttgttcaaaacaaacatagagcttttaacaaatgaaaaatggaatctttcaaatatgcatatacatacctccaaacctctattagtgtctgtcgtgtcgtcatcatcaatgccctaccagggtccttctgaattaatggaagggagaacatgagatggtgcacaagtatacaacatgttctggagg

SEQ ID NO: 2731 - DNA, 579 bp, Arabidopsis thaliana columbia
tctagaggaacatctatctataccatattgctcatgtactatatctcttatagggtttttgaaagagggacccaattttcaggatttccctgttcttacagtaggtagcctttgtaatagattgtactcccaatcatttccttactgagtaagagcatgaagttgattcccataaatgtttgcatacccaagttaccaaccacagtacgtgagttgaattgtgatgttatgtatccagcagattgcactcactctttcaagcttagtctagcattttgtaccttgagggatagctgaaacttctgttcttccatatctctcaaaatagacagcaggtttgctcgataaacttcacatcgctggcctgtcctctccaactcagctgtcagttcaagtatcgtcctctctttttcaccctggcattgaagtaagtacttattcccaaggaacagaggacatcaatgttaaagaattatcaaataccagtattcgcttacccctggatgattcgttgcatttgctgtttctcgagcttcctcggacgggtaagctccccattgggaagcctagttccaggtg

SEQ ID NO: 2732 - DNA, 1215 bp, Arabidopsis thaliana
tgttgtttagcctctttgttcttcgaatccaatgtcttcgttgttttgtgtaaccatggattctcatctctagatgatttcgatttcgattccaatggtgagattctgtctctgtttcgcgttcgtcatcctcgtatctgcaaatccgaaattaatcaattcgtgggatgagactgcgattagattcgaaccactgtcaccttctccggcgccggagccttccccggatgatgatgattcgtcggtttcatgtgtagatgacctaggaggtgttggctctttagattccacgtgtaagctcgtcgctgatttgaatctcacacgtgacctaaacatcaccggtaaaggtaatctccacgttttgcctggtgttagattggtttgccagtttccgggatgttcgattagtgtcaatatctccggcaatttctcattggctgagaattcttcggttatcgccgggactttccgtctcgcggcggaaaacgctgaatttgggctaagctcggccgttgataccactggattggctggagaacctccgccggatactagcggtacgccggagggagtggaaggtgccggtggtggatacggtggaagaggtgcatgttgtttgtcggatactactacgaagattccggaagatgtgttcggtggtgatgtttatggttggtcgtctttggagaagccggagatttatggcagtagaggtggttcgacgagtaatgaggttgattacggtggaggtggcggcggaacggtggcgatagagatattagggtatattagtttaaacggcagcgttttagctgatggggccagtggtggtgttaaaggtggtggtgggtccggcggcagcatcttcgtaatggctcataaaatgtaacgaaatatttttttctttctctttttgtcattttcactctttcttttcttctctttaattaaatcatctaatggttgccttcttttatgtgagtgagttttggtatatcttaaggctttgcattggtgttctgaagtttggaaataaaataagtgttgactcttctcttcttgttccatatttgatgatggttgttggtcaattaataatggaaaggtcttaggttgtctaggaaattaagttttgtaattcctttgagttgtggcccatgaatgatatccttaattattgcatttagcatcttgcctttttgggggattcatccc

SEQ ID NO: 2733 - DNA, 627 bp, Arabidopsis thaliana columbia
tgtgatctctctagctaattgccaaccagttcgaaaattaaagacttacatcagtagatgtggcacgggatctctttttggagccggtgagagattttgtagtagtcacagagatctcagattgcaacaagctttcctcgtcatcgtggttctccactacggtttccaaaggcataagagtctttccagaagagtatttctcaacgtcacactcacttgtctcctcaccaacaaggtatgagtttgtattgatggtcacatcttccatcccaaagtccattgtctcattttggttctcttcaaccgtgggtggaacaacggtgtaatatccgctgttcccagcgctgtagctgctgctctcttgagagaaacagaagctaccggcttcagacacgaggctaaggtggttgtgatgagaaccaaggttccaatacaagccttggtggtcacactggctgctgcccggagatgagccggtccaggatgatcatagagcgagaactggttcatgaacggcttctcggttcataagtgacattccccgaggttgttgctcattctccatgggttcattttatatgttttgtactaagcgcttaattagagataacttaacttagagatgta

SEQ ID NO: 2734 - DNA, 528 bp, Arabidopsis thaliana
accgtgtacttctgttttcacagactcagcaaatgcttgacatcctcgagagcttcttggttgcaaatgagtatagttaccggagactggatggtcttactccagtgaaacagagaatggctttcattgatgagtttaataattcagaagacatgtttgtcttcgttctgacgacgaaggttggtggtttgggaacacatttgactggtgcgaacagggtcattatctttgacccggattggaacccctcaaatgatatgcaggtacgttttactttgaatgtcacagattcagtgtgcaaaacacccgtcgtggccataaataacaatcaattttctgcttttttgggcaggcaagggaacgtgcatggcgtattgggcagaagaaggatgttaccgtttacagattgatcactcgtggcacaattgaggagaaggtatatcatagacagatttataaacattttctcaccaataagatcttgaagaatccacaacagagaagatttttcaaagctcgggatatgaa

SEQ ID NO: 2735 - DNA, 518 bp, Arabidopsis thaliana
cttcttcacaagcatcagaagcttcaagaagacgaccgagactgatcaaagcggcggatttgttagaccaatacgtcggcgttttggggtcagctgaaatggctctctcgtaaaacacgagagcttgtccaaacctcccacgacaatactcttcgtttcccattttcttcagagtctctggatcgagtctgtgatttaccggtttaccctcccaccgacttttcgtctgtgtcacgtcagttttaacggctggctgtggtttcacgatgatgtttcccataacgccgttaagtgagaatctcttgctctctgttcttgatgagcctgacgaaatcgattttcttgcggaatcagatgattttatggcggatgtcgatgattttcgcgggtgattctcatctggttttggcttttgttggggtttctgggagtcagatttctttggttgagaagaagtatccgtggattttcttgggaggattttagggtttgtaacggttgttgatgacttggaagac

SEQ ID NO: 2736 - DNA, 606 bp, Arabidopsis thaliana columbia
  unsure (1)..(606): unsure at all n locations
tatcggctcaggtaaatgcataaacgtagtagaacattgttcatattgaaaacaaagcttttctaacttcgtagttttcgcagctcctatggtgcagttaatgtttaattcgccaatagcgaaatcaacggctgagaatttcgaagaacacattttgaaagcgtttgaggctgttcttggatctccagtcacgttagagatgagaaccgagtcgaagaaagacctcggtttctcgtcattacaaggtttaagcaacggtgagagattccgtgaaagcggaagaagcgaaatcgttgaagtggctgactctgaatctccaatgactcgagttagaaggaaacacttggaagcaagtcaaaaccaaaaccaaaatcagaaccagagcattgtgagaggaaaagtttcgttggctcaagtgattaaacaagctgaaggaaacagttggtcgaaacacaaagctgtggagattgcaaataagcttgaacaagagaatttgtaagaacaagattaccanaacttgtcctaaaatttttttttcagttttgtntgataattcgttggtttttgcaggaacttgaaccaagatcaagaaggttgatatgttgg

SEQ ID NO: 2737 - DNA, 897 bp, Arabidopsis thaliana
ctctttgtagaaatggtttactccggtagttcatgatatgttcgttgcggctctagtgatcatgactttgttaagcggagttataacatctttgttgcttagaagtcaagaaaagagtttcgcacatataaaaacatcacttgagttatttgacactaccgaggagctacgagtgttgacgtgcgtctatggcgttcgtcatgctcgtggatcgatctctttagtctctgctctaagtggcttttctcctggaacttcttcttcgccgttcacgccttaccttatgcacctcataccgctcccgaagaagcggaaaactgaattgttgtaccacgaattagacgaagatgcaggaaattccaacggcggagacgatgagttcgggactaatgaaggactagagatcaatgactcgatcgattcgtttactagagacagaaaaataatggtccggcaggtgaaacttgtggcgccgatggagaatatgcacgaagagatctgtaacgccactgaagatcttcgtgtatcgatcgtgtttctacctttccataaacaccagaggatcgacgggaaaaccacgaatgacggggaagtttttcgacatatgaaccggaaggttctaaagcaagctcaatgttcgattggtatctttgtggatagaaacataacagggtttcaccagcttcacgggtctgattcggtacaacacgttgctgcattgttcttcggtggtcctgatgatcgtgaggctctgtccttgtgcaagtggcttaccaataactctcagattcacctcactgtcatacagtttgtggcggatgactcaaagacagagaaaattgtcggaacgcggtgaccaaggaaacaacgaagtattcttggagattgttagtgaag

SEQ ID NO: 2738 - DNA, 551 bp, Arabidopsis thaliana
aatattttacgagaagcttgagctaaaattcctgaaaattttgttttatgattatattggtaataatccagcaaaagaagagttattccgaataggttccctggaaaattgggattgaatagatgttggatgactagaatacctcgtctttagaaataaagaaggctgtgaactttttgtacgacgtatgcctacttctttgaaattttgtggttgttttaatacttgcatttggtttttggctcaatttataagtaatcggaagtttttattagtatgtatatttttatgcaagcgataggataaacaaattttagtaaagaataaggataataactcattccatcgtattatacattatatttaaccaccaccaattataaatatatctattataaaaagatcaaattagagtacttataattttttaactttttgatctattaagtattgatgacattctttaaaaatatcaagtaaaactattttcaaatgttctatataatagtacttccaaataatagtataaaagtttagaaaaaaatatatga

SEQ ID NO: 2739 - DNA, 457 bp, Arabidopsis thaliana
ccaagtgtcttgcttatgatcaaattgtgccagagactttgagatatatcaatttgaaagaaaaagaatcaccatcgatgcaaagcaaattacttatttgcgtagaaattatatgtggaaatatctcacaacaaacatatcagtatcgtggctaatcaatgcaacggaatactcgcaaaaaacaaattagtaatgatcatcaagctacttgttcactcttctagtacctatatttccccctgcacttttgggaacaaaatataacttcatcgtacttgaaaactattttgtggggacaacgctccttgcaaatgaagcaaagaggtcgagacatatgatgattgttggccagagcatacatctttttattgttgaagctgatccacgatgaaccaggcttgatgtataaagccgacccaagcatacattcaatatgtagggtgacacaacagtactc

SEQ ID NO: 2740 - DNA, 458 bp, Arabidopsis thaliana
ttcttttttctatacagtaaggaaactgtacaacttacataattttattttatttttatgtaatagtaaaaataaaagacatttgctttgtttgtaataacacagatctggggatttcgtatgcatgggaccaaggcagcagcttctgttgtagaagaacatgtctcgggggcagaacggcaacagtaaactccaatcaaattcaacatttgtccgttcttattcattgttaccatttacaagaaatatgcaagatacaaaatggggaaaaaattagaggaaataaaggaaataaagaatagatgctaaaattgtatacttttagaaaaaatattgcgtgacggaaagcgcttattggtggtggttgacaatgcagctcaagcccgtgatcgtttcgatggagtaaacatattttgtaaaaaacagtgtagtatgtcgttttgttacatcagtaaaaa

SEQ ID NO: 2741 - DNA, 567 bp, Arabidopsis thaliana
tgatttatccactattaacataaaccgttgtaataaatatacaaagaatgggatagaattgtctgttgtcacatatctcatgatgcacgaccaaacaaaaagaaagagtctaactttacacccgaagttagctgtttcaaaacttttttccctttcaaactaaaaacataaatgaatttcgaataggttctgtacctaccatggaccgggacatgcaacggtttgtactagtggcgtagtcgtgtgataactcagtttcatttccgatagtatgcgtgtatgaattgtagacgataactaaagaagatttaatacttaccgttagcaagatcaagcacgaaatcagccgggttaacgaaactggatccgggttgatacccaatcgaaccaaaatattccatgacccgacccgaatctccactataaataggacacccttccgataaaaccaacactttatcgaacatccgataaagcctactcgacggctgatgaatcgtcgtcaccatcgtccgaccaccacgtgctagcgatctcaaggtggcgactatacgagccgccgtggta

SEQ ID NO: 2742 - DNA, 618 bp, Arabidopsis thaliana
catggtgttcttccaaacttgtatacttacagtgcaatgattgatggttactgcaagaccggtaacgtgagacaagcttacggattgtataaggagattcttgttgctgaattgctgccaaatgttgttgttttcggtacattggtcgatggattttgcaaagctcgcgaattggtaactgcgaggagccttttcgtgcatatggtgaagtttggggttgatcctaatttatatgtttataactgtttaattcatggacattgcaaatcagggaacatgttggaagcagtgggattactttctgagatggaaagtttgaatctttcgcctgatgtattcacttacactatacttatcaacgggctatgtattgaagatcaggtagcagaagcaaatcgattatttcagaagatgaagaatgagagaatttttccgagctctgcgacttacaactcgctgattcatgggtattgtaaagaatacaatatggagcaagctctggatttgtgctctgagatgacagcaagtggtgtagacccaacatcataaccttttctactttgatcgatggttactcaatgtgagagcataaaactgcaatgggcttgtcttcgagat

SEQ ID NO: 2743 - DNA, 881 bp, Arabidopsis thaliana
gtatcataagagaagtgggatctagctagtagtgaactccataatccctatataagtgaagtattgaacgaattaccaacttcactactcatccccttttccacttcttacttcctcctctttagcccatcagcaaatatcatgaatcttacagaatattcccatattttgtttctttcactatgcaccctcaacttctgcttgtactccataaactccgacgacaacggaggctgggagagaggccatgctaccttctatggtggagctgatgcatccggcacaatgggtacttcaaacatacctttttcttcattgcacacacataattaaatcataacaaatggatatacttttaacagtcaagtattgatgtttttttaggtggtgcttgtgggtacggtaacttacacagccaaggctatgggctacaaaccgcggctttgagcacggctttgttcaatagtgggcagaaatgtggggcctgctttgagctacagtgtgaggatgatcctgagtggtgcatccctggttccatcatcgtctcggctacaaacttctgtcctccaaactttgccttagctaatgataatggtggttggtgcaatcctcctcttaagcactttgacttggccgagcctgccttcctccagatcgctcagtaccgagctgggatcgttcctgtcgcattcagaaggtaaaaacaattctatatacggttccttagttgtcttttttagtatacgtttttttaaagactctaacgtaccattttctgtcctctaataatgatagggttccatgtgagaaaggtggagggataaggtttacgataaacgggaatccatatttcgacctcgtgctaatcacgaatgtgggtg

SEQ ID NO: 2744 - DNA, 454 bp, Arabidopsis thaliana columbia
atccttacggatcgtggactcagagtggcgctcgctttattaaaaccggaaaaacttgatcgtagaagccggacctagaacagtcgctaaaatatcgttcggaccacgggcgtcaagagtccatacttacagactttgcttacaaagacaacgtgaagaggaatagatccgcgtcaactaggaaaagccaggaacagggcgtaggtgcagaattgggcacgattccccgggatgcaatgtggctgcgaatcacacctcgtcgatgcggtgttcgattggctccatgaagatctcaaaattagtgtctacgttcagtgggcgatctggagcagctgactgagggtaacatatcgccgctggcgacgctgattgtatgaccggtacatgagtatgatgagattgttgatgcttgtgaagctaatggtgttcagattatggatggtactatgtgggt

SEQ ID NO: 2745 - DNA, 862 bp, Arabidopsis thaliana
tcaagatttttcaattgtttctccaagagagctttgtacttctatatcatgaccttcttgaatcgaccaggaaatggaagtgggggcttgtaaggtgggggaacgaagacgttgtctttggttttggcggcactcggttttttaacaagaggggatgctgcaggagctagtggtcgagtaggttggtcgagtataggctcttctattgctttttcagcagaatcttcattctgacagaaatcctccccatctcactccacactgtcctcagtgttctgtttcagactcttttttgtgggtaattctttaccgcttctaagcgtgatagcatgagcatactcctttgaatttggcattgattttccggaaggtcctgtaaatttgggtgctgaggtcgacccattttggccttctatgtatctaatcttagatgtcagtgcttcaaccttgatattgatatcattgtaactacagtcaacctttttatgaatttctgccatccttttggacaaatccattgctcctgttgcttgcccttggagaatctgctataacatgttcttcaagtctgaatctggagttgttgaaacaagttgttggtgcttctgtgcaaactcaggtggtggaagttgctgctgatagttgccctggtactgctgcttaggaacatacccctgaccttggttgtatggaacaaaggacttgggttgattctgctgctgtgaagggtagacttggtcctgcgggtttgcaacatttgtacttttatcagacagattgggatgcttctgcttgaagtttttgaaacctttattgtaacctctttggttctgcacatagctggcctcgtctgactgcagag

SEQ ID NO: 2746 - DNA, 722 bp, Arabidopsis thaliana
ataaatacacatacattacccacattatacatttatctcgtattatcctattcaattttgacaacacaaaacaaatgatatcaacaacgtacatgcacttccttgtgtatatatataaactccaaaccccatctcttcataaagcaacaaaaacttaacccattgcttcttctttttttgtttctctctcacaaacacaacaaatatggaatacagctgtgtagacgacagtagtacaacgtcagaatctctctccatctctactactccaaagccgacaacgacgacggagaagaaactctcttctccgccggcgacgtcgatgcgtctctacagaatgggaagcggcggaagcagcgtcgttttggattcagagaacggcgtcgagaccgagtcacgtaagcttccttcgtcgaaatataaaggcgttgtgcctcagcctaacggaagatggggagctcagatttacgagaagcatcagcgagtttggctcggtactttcaacgaggaagaagaagctgcgtcttcttacgacatcgccgtgaggagattccgcggccgcgacgccgtcactaacttcaaatctcaagttgatggaaacgacgccgaatcggcttttcttgacgctcattctaaagctgagatcgtggatatgttgaggaacacacttacgccgatgagtttgagcagagtagacggaagtttgttaacggcgacggaaa

SEQ ID NO: 2747 - DNA, 509 bp, Arabidopsis thaliana
  unsure (1)..(509): unsure at all n locations
tnnnnnnnnnnnnnnnnnnnnnnnctaaagattccggcaccgctgctggatcgtatggaagtgattcgcctctccggttataccgaagatgaaaaactgaacatcgccaaacgtcacctgctgccgaagcagattgaacgtaatgcactgaaaaaaggtgagctgaccgtcgacgatagcgccattatcggcattattcgttactacacccgtgaggcgggcgtgcgtggtctggagcgtgaaatctccaaactgtgtcgcaaagcggttaagcagttactgctcgataagtcattaaaacatatcgaaattaacggcgataacctgcatgactatctcggtgttcagcgtttcgactatggtcgcgcggataacgaaaaccgtgtcggtcaggtaaccggtctggcgtggacggaagtgggcggtgacttgctgaccattgaaaccgcatgtgttccgggtaaaggcaaactgacctataccggttcgctcggcgaagtgatgcagga

SEQ ID NO: 2748 - DNA, 688 bp, Arabidopsis thaliana columbia
tcgctaatcccttctcgttattatctgatccaggcgaacagcgaactcaacgacatgattgagtactatgaaaggctactgcttgacaaggaaaaagatgttatggcgtggagagataagtcttcatcccttgagtccgatctccgctcttcaaatgatgctaggctgaaattggaggatcagttggataacctctccatcgaactcatgaagtccaacggcaagctgcagtagcagtaccaaaggtacgacaaggtccaagaagaactctcaacttcccgggacaaactttcaaaatccgaatctagtgcgtaagagttgtccaaccagctctccaaattgcagcttaagtacatagggtggccaactatcgggatgctgagttggcgaagtcgacgtcaaaggccaggaaagaggtgaaaggtcgcgggatggaattgatccaaggggcaattgtcttcatccaaaccgagaaggctggagcggagctggaatctgacgttagggagtacgagagtaatctcctcctttttgaccaaactcatgaatatgatttttctgaagaacgagagagggacgagttgaaagccgtcctggaagagaagcaaaatcgtttagctgcctttccttcctcatcgttcaacccccagcagttcgaggagttcttcaccgaatcgcctcctttgag

SEQ ID NO: 2749 - DNA, 563 bp, Arabidopsis thaliana columbia
tgcagtgggacaacaatggagatgatgagacattttggagcaaaagctaaggaaaaggaagctaaggacgatctcggattccagattcagagagagtgtcgatcgacacaatcctggtgtcgatcgacacccatttcggcccagcaaagtcaatgacgctttcaaatttatagaagtggaaatttgccccagaagacttccctatttccattattagtccatggacgttttataggtcttatgtatagttttagaggtcaccttacaactccttctgggtgtctactagtgtcctaggcaccttaatagcttattcaaacaaaagaaatgaattgataaaggaagatgattctcctgcgtaggagagcccatgcctaccattggattcagtttagacctaagttccttttatcaagttctttgcaatcccttttttcagagacataagctattcatccattgttttcaaagattcattcagttttcaatacagtgaagagatattttcttactctcatcttatttgctgtgtttatgctttctaactctattatgttgtttgt

SEQ ID NO: 2750 - DNA, 958 bp, Arabidopsis thaliana columbia
gaaataattttgtagtgaattggaagtaatctttcatttgttgcttcaattctaatcgaatccttgtttgttcttttatcttttgtagtgttcttgtttgttcaatcgaaacaaaaaagctaagatcttactatgaatctgtgatcgcttctaggccagcggtcgaggttgtgaaattgagaacgaataagcagagagattgagaattttgggtttgttatagttaacccaacaacttcttccttttcaatttcataccatgagcctgctgttgagaagataattcatgttttctggtctcgcctagattttcacctcctagtttcacttattaagtctcttgaaaaggaaagttgagagtcaagagaaagcatgttcaaacattgctccttttgataataacttcaagatcgaatgaaccttattttttgcaatctttattcaccattctacatgatgtatcctatttttaccggttttaactatgttttaggtataggttttagagtatattagttatttatagagtcttttctagtctttttcatattattacatgtttgggattcatttggagataatggagcattctagaggaaaacagagaacttatgctgcagaagaaatctggggactaaaaaccgcgtagatgtcgagcgacaccaataccggacggcatcttatagacgcaacttattgaagttttgaagatttcccaattcggcccagaacctttccttatttataaagaaggcccatcacgtttttagttcatatatatagattttaaaagttattgtttagacctaagtttggagaggctattccccttatctcttttgttcttgggagcaaaaccccgttctttctcatgatatattgactattgatttcctattcagattatgatttgtgtatctttgatcatgtttgagtaatccacttgttaggtttaggg

SEQ ID NO: 2751 - DNA, 559 bp, Arabidopsis thaliana
cccatcagaaggcagagaagattgctctggcgtatgagcagaatgtgagagagttgtctgaactagaggcggctgcttcttctgtgtctgatggctcttcacgtcctcgggatctcacactagatgagtatgcagccatatttctcgaggtaagatgttctttgtctttttcagagtcttagagacatttaggatctgtcactaattatcttcctctttatttcttgcagtccacagaaaaggatgcaagaggcaatccttatgaacttggctgtcttaaagaaactctaggcagtgccaaccgccaactccccggagactcaacctttaaagccttagaagaacggctgcaggaagctcagcggcaaattgaagaacaggctgcatataacgaaaagcgagatgctgagattgctgcccgagaagccgagacagcccgagtcacagctaagcaaaaggacaagctcgagcacttgtccttagtcgagaagtatctccgccaaaccgatccgcagttcttggacttcattgccacacactcttccacatccacagagcg

SEQ ID NO: 2752 - DNA, 654 bp, Arabidopsis thaliana
tggtcgagtgaatttagtaattctgataatgtttctgttttctgcatgttcgcttaggactgttagaaaccccaaaactgttattgcttggcttgacttcgtgacttctgatcacatctcatttgtttgcatcacacccatttggattgacacctaaaatactacaaccacatgatagtgatttaggtttaattgatcttaaaaacctattatcacttttgttcagtacaaccaaagttatgtccctaaacaacaggtcaatggaggctaccaatggcataatccaccaccatggttcactcaacaaccacaacaagccccagcagctcaagatcctgaaattaagcaactcattcaatgagtcattcaaggacaagctactggcgctatggcttttgacaagaagatagctgaattacacaacaagattgtttgttcttacaagttatttgaacgaccttcgagatttttccaagttattcagattctgcatttgatttcatctatcatcttgtttctctactctttatctctttacttatgcaatattatcatttacctgcgtttatgtctttgagcatgttgtctgagtagtgacatagagttcttaaggatgggatagagtagttgtggaatccgtagtctgtagaatgg

SEQ ID NO: 2753 - DNA, 501 bp, Arabidopsis thaliana columbia
cacacaaatgaaaactgagaaagaagattaaaatcctctgttttttcttttctcaaaaacttatttcttttgctttgtgtggaatttgattcctgttttagctttttgcacgagtgcaatcatatcaaacaattggaaagaacattcataattgaattaaaaaatctgaatgggtacacacttattcacattggcttatagtagtacatgttgttgtgtgtaatcacaatttctcaaaataagtttttttacaaagactaataagcctcaagagcagaaccatgtctaagtgcttctttagcttcagcttccatctctagcctgaagagacaagccgcttgtaagtaaagaggaattggccattccggtgaagctacttgcgcttgcatcgcatcgcctagagactcgctgaacatttcagtcattaggtaacaaagacaccttcttgccaatactgttggtgataccgtagagctccagtcatgaactgcaaaaaataat

SEQ ID NO: 2754 - DNA, 772 bp, Arabidopsis thaliana columbia
ggcattggtgtactagtaatttatacaattttgtttggattagattgatgcacgtgcttttactctaacttgtaatagcttatctggcaaaaattacggttaagtagtgtatctgagatatagtaatgtagaacaatatgggcctatgataacctcctttgttgttttattgtcggtattataattctcgtcatatatatcatgactactaactttctgttgtgtggagcttgatattgatgtattgagtgttaattttctttctgttccacttttcttgttatagttcatgtttcttcgtgtgtaacctatagcatcaaaattttgcgaatcttatggattatctctagttagtatatattggaaatttgccattttgataatttttttgtctagtgaattgaatggcaatgatgcatgtcctgatggttgtccagtgatccagttatgatatatttcaatcttccatttcacagccaacatcgatgattctgagcggcttcgtccagaagaactgaaccagcagaatatagaagctttagtagctgaaacaacctggtacatcctgcaaccttctttccttatgattgtgttattatcgtcaacccctgtagaactttgccacagaatgatatagacttgggtagttccaaatgggcatgagtacactatgggatgatcattctattttcttccgcagaaaatggagatccttccagttaacgatctggatgttgctcttcacaattttgtgaacaaggatgataaacta

SEQ ID NO: 2755 - DNA, 747 bp, Arabidopsis thaliana
ctcggctggatagtatagccgagccgtgattttacgtttttcgcgagaaaacatgattttacggttttggcgagaaaacgtgatttttgcggttttggcgggaaaacgtgattttgtggttttgacgataaaacgtgattttgcggttttgacggaaaaacatgattttgcggttttggcggaaaaacagaattttacggttttggcgggaaaacatgattttacggttttcgaggaaaacggaattttacgttttaacggaaaaattcgacattgcggttttagcaaaaaaaattttataaaaaaataataattttaaaataagatttaagtttatttgtttttttttatctaaaaatacatctaaataatcaattgaaataattatggtatttttgtcatttgttgtttttgactgaatcatctccatccaaatgatccaatttagttcagccaattgagtttcaaaattaagcctaaattttcaaactcctccaaatgaatcatttggatggattatctgaatgaaccgtttttggcaccaaacgaacatcaaaactcataccagatgatccatctgactgatgaaacgaacatggccttaattgtttttgcaacctcaacaacataattcgtatcatttatagtttatgaagcctaaactaaaccagaattgatccttctgtttaaactagtcacaatgaaaatcaaatgcatcatcttttttttagttaataatcagtaaaa

SEQ ID NO: 2756 - DNA, 529 bp, Arabidopsis thaliana columbia
ccctttaaggtgaacatgccaaagaggctcgacctattggaaacaatatcgtgtgtgcgcgactctgaagtatcgagattgctgatgaacaactcgtaaagtcccaatccaaagactaacatcacagttcctaggagatatatatctacaaataatcgtatataccatcagtatcagcatcacatcaataaaagttgtgagcatataatgttcttaatctgaaacatagataaaactctctaacctatggcctcaaccaaaaggaatatcactttcccacgattcaccgaatactgcaaaaacgagtctacaacatacatacatccctgcaccaaaagaaacgttaaaagagacagcaaaaatagtataatgtgtttcttatgtgagttgcaaaacttttaggacattatctgcttttacaagacaggatactagcttatgcatattccacactgattcatctagttgtagcttaaacaagaaagagcaatgagataatctgtagtggctttaccttgatgaaacagag

SEQ ID NO: 2757 - DNA, 938 bp, Arabidopsis thaliana
tttcctaagcagagctataaaccgacgacgtttcttcaaacccaaatctctcctgtacttacccaaacccctaagagacatcatcctatcaggttgactcacaagaatcttcctaatgttcaacactaacttaagtttcttatccctttgaacaacgctatcgaaagtaagctctttccttctcttcacagcagctctcacaggctcaacaacaacacgagttttcctagaagtactccaaaacccatacttgttccccaaaatcaaaccttcccccataaactgagacctcgcagctcgaattgtggacatgggcaaaccggatttgaccgaaagcttggttttttcattgaatggagagttacaagagacaaacaaaggtttatgtgcagaaagcagaagcttgggctccatttctgagactccaagcctgtaaattgataactcctaataagtattctccgacgaaaaattgattccaggaaataaaaaaatcttaccttatcccttcggttcaatctagtaagaggttctgcagaagaatctgtttctggtcgcgaagatttggattggggtttaacgataaaagtcataaaaccctcttcttttttccagaatgatgtgtccatctctctgatatcctcttattggtctttaacgtaatatttgaccagaagcaggggtaaatatggaattaacatcattccaaaaatctcctagttctaacgatgatgtttcgttctctgtttcactggtgagaaactcgatggcgaggaggcgacgttcatcggcggcggagagtttgaaacggcggaacgacggatacgagtcactgtgtcaagtcgtacaacaagattcagatcggagactcatcaccattttcgtaatcttcttcattgtgattcccgccgtttcgattgctgtgtacgggtagagtc

SEQ ID NO: 2758 - DNA, 1615 bp, Arabidopsis thaliana
ttctaaagcgtttttgagtaaaagcaaaagcaatgtgttgttatatctcacttgtgtctggtttgactccaatagtggaatctgtttaagagtttctcactctcacttagtggcgcgtggcttaccagttcatatatctgctttattctgaggaatgttttcgttttcatcagatcattaacctttggagagtcagcaactttgcataaatcagaatgccaaaaccaaggttagggttttacttcaattcttgatgaaaaatgtgatttagatttttcttgttgttagtctctatgatctgatatgtgtcttctttgatctgtgagtagtattagaggttcagagttgcctcagaggcaatctcctaggctaaggacatcactgttgtccacttcctctgatccgcatcacctcagccgtccgattacagaccggagtccaaagctcggccttgaccgtagatctccaaggagtggtgggcctcatacagatccgctgagtcagaagaagcttggaagtcgcatctctggcttggagtcacagctaggacaagcccaagaagagttgagattgctcaaacagcagttggctaaagccgaggctgccaagaaacgtgctcaagaagagcttcataggaagaaatccaagaaaccgaacactcctgctccggagagagatgacattcctggagatggacatcaagagacagatgtgttcgaggttcttgatgagaaagcaaaagaaagtgagaagacgaagaatgatgaattggcttctaaggaagaccaaatcaatgtattgaaagctagattatatgacttggagaaagaaagggtatcacttagcgaggagaatgagaccttgaaggatcagttgaagaagacggatacggaaatgtcctgcgcaaaggcgaaagaggatgagatagcttcaaaggtgagtcagattggggaagaattggaagaaagcaatgagaccacagcgaagctaaagaagaagctcgaatccgtggaagaagcaaaagagactctagaagctgagatgaagaagctgaaggtccaaacagagcagtggaggaaagcagcagatgctgcagctgcggttttatctggaggggttgagatgaatggtcggttctcagagcagtgtgggtcaatggagaagcattttgcaggcaggtttgtcggatcaccgggaatggctgatgattcggatgacgggtctgggaagaggaaaagttctgggaagaagatgttcggtgacttatggaagaagaaagggcagaaatgaagtgatataataaataaaaagtagcgtgtatttcaagaaagcagtgtgctctttaacttcggatgatctaagtgtgtgtgtcgacgaaatgatggctcatcatgtccatagattcttagtaatgaaacatttagacaatgattgtgtgctgcttcacagaagctaatttatcaaattcctattcaactgcaaaatctgctcacttgtctgtaatttatttcattgatcagttacatcttctttatgaggattgaattaggtgtcattgttaacgtaattgccattggaaccggtttaggattctgaacaagttgggacttgggac

SEQ ID NO: 2759 - DNA, 553 bp, Arabidopsis thaliana
gatcgagtagatgatgatcaaatggaatattgagtactgtactatttatatcattcaatcatcaaaactaaatttaatgtccaatcatataatatatagtgtcttaaaagcggtaagagtttttaccagtaaaaaatatcggcgcgataagtagttacaaaatattaatagtgcaaaaccgtaagaaagagtggtaagcggaaacataaaaaacaaatggcactttggaggaaactaagcacaaaatctgttccaaaaaagtaaataattttttttcactgacaaaaccaatagagaaagttgatcaaaccttgagatgaacttcgccgaatgcgttgcggcggacgtggtggttggtgttgttagtggcggcgtgacgcttattcctagagatcatacgtgtggactcctctccgatcactcttgatcctttctcagtctcatggataacaacgatcttatcaggtcccttgattttataatatgaaagcactccatcttgcaaaacaaaccatcttggtctccatcctttcccatagttcaccatttgtac

SEQ ID NO: 2760 - DNA, 557 bp, Arabidopsis thaliana columbia
agaagagagttcatatgcaaaaggtcttgcatcagcagctgcagttgagctcaaggcattatccgaagaagttgcaaagcttatgaatcagaacgagagactagcagctgagctggcaacacagaagagcccaatcgcacaacgaaataagacaggaacaacaacaaatgtaaggaacaatggaagaagagagagtcttgcaaagaggcaagaacatgacagcccatcaatggagctgaagagagaactgaggatgagtaaggaacgtgagctatcgtatgaagctgcacttggtgaaaaagaacaaagagaagctgagcttgaaaggatattagaagaaacaaaacagagagaagcatatctggagaatgagcttgctaatatgtgggttcttgtttctaagctgagaagatctcaaggagcagattcagaaatctctgattctatatcagagacgcgacaaacggaacaaacggaaggttcattttgagatttgagagaaaagaagacaacataagtaggatatgtttgtgcagtgattccagagagtttgtgtt

SEQ ID NO: 2761 - DNA, 812 bp, Arabidopsis thaliana
caagcaaatagctagaaatggaaggctcatcaagcttcactacaaccaacgcaaagaaagaaaaacagagagcgttcacccaatttccccgtgatttcattatatactatcatcgtaatcaagaactctgctttgagactctgctttagggtttggtaagaatctgatgtttctcctttttgtttgacgaattgagccgtgtattttctgaaacatcttgattttgggaattgtagtcataatgttaaagagagttattatagtgtaatttatctttgagaaatttctgccatctaaactgtttctgacaattacaggtgagagagagaagagataaatgatccgtcacagtcacgacaaacgatccacggcaacctttggcggtgatagcgggcttgttgcgccggggtatcatcttggacttccagttgactactcgccgtgatgttcagggttagtttcatcaatgctcttcttatatgtctctctcagtcgttactctgttaaaagccatataataaatcgtagacttggtgagttatttggtcggattttatagattaactctctcattcatccatatgtagctcgtgtatttatgatttttatgattttttgtcattgcatattttcaaacttgttagtaattttggaatgttgatttgataaaactgattccaactccacgaatcctggtttatcaaaactgtgattgtatcatcgtacacacatcaaataaaaacttttactttgaacattttcaaatgctaactttttccgacaaattaattacatggtttgtgaaagattcc

SEQ ID NO: 2762 - DNA, 978 bp, Arabidopsis thaliana
tccccggacaacaattacatcaatggtgatatcttctctgtctttgcttgatctccgagaaaaccaccggcgaagaggaaacattcgatttcgagatttgttttgtaccttttaaagttatttttgattcgtaataaccttactttgatgaatcaacaaaaacatcagtttgattgcaatgaaaaaaatcgccttagcggtttgttctttctctcttgtgtcaaaacaacatcacaaaatagcttttaacagaaatcaagaaatgttggcatttcttaaagacttggaagtaacaagaccagaagatgtccgcatcaaatgctccttaagcattgaaacaccagacgcatctgtcttcaaaagtggttgcaccaattcccacatcttcttcttttgaacctgaaacaacaaagaaaacacagaacttgaatatgccatgacttaagtcttgcagtactgaaatgattagtgctttgcaggctaaatgaccttattaggaggtgcaggttcaggaagctgctcgagatcttcttcgttaccaaaccaaactctatctccaggaacagagccttctggtggaacaagaagctcaacattttcatgagctgcgtcagatgcagctaaaagcataccacatgacttaacccctctcatattcctcggcttcagattagccagcaccaccactgatgcaccctgcacagaaccaaagtctcggaaaattgagccaatggtcaaaatctaatggggaaagttccgtacgcttatcacacaaaccgatcccagttctcaggattggaactatagataggaacaatgaagctaacctgaaggagatcaagaggaacatatttgacgagaccactgcagatgattctgggctcagcttcaccgatgtcgacttcttcaacatacagagaatcagcttcttcgtgttgccaagctttcacaattcgtcctacttttatatctaacaga

SEQ ID NO: 2763 - DNA, 507 bp, Arabidopsis thaliana
ctagcttgagaactatctcagacctctaggtctattcatcgtaataccctggagtatcggcttaatcgtatatcggaactgaccgggcttgatttgggcaattgtgatgacaggttgctgcagtatgtggcgttacaactggatgaagagcggcacgttatgcgttaaggttgatgcggcgctggctcattcgcctcagcccgaagttagtacgtgaatgcccggattagccgtcagctctgagataatctacgcgttaggcaccccagatctgcgcgaactcgcaggtctgactcgtcacgactgactcccagtgtcgaacttcgcgaacgatcggggtcttcagaacacattggcgaggtccggactcttaccaagtaatcacactcaacctcgagagacgagctcgtgtaaagttgggcactcgtcaacgagctgccgctcagtcagtgtagaaacacttgcgtagaattggggattgtgttatttggagtgattcaggggagg

SEQ ID NO: 2764 - DNA, 534 bp, Arabidopsis thaliana
ctcgtctttcctcctgctggttcgtcttacccattcacaaaaccccaccgcaacgtccctctccttcttggtaaaattatactaaaaaatcataattaacaaattcagtgtgatcatagttaataaataggtgattttgattctgataatttatgattctttaaggtgagatggtgggacgcaaatccggttgatgtgttgagagaatctatacgaaccggaggagctccgaataactcagacgcttacaccatcaatggtcaacctggcgatctctataaatgctcttctcaaggttttactctttttcttcaaattaattttaattttatcaactgtccaaaaacttgtcccatatattttaccctgttttctcccaactgtcataactgactttggtatcttttagtcaaaataaaacacatcagcccaaaagactcaaataagtatattaactagacttttttataatcttttggttacagatacgacagtagtaccaataaatgttggtgagactatactactacgagt

SEQ ID NO: 2765 - DNA, 475 bp, Arabidopsis thaliana
  unsure (1)..(475): unsure at all n locations
nnnnnnnnnnnnctaaaggtatgcgccgaaaaacagcgttaacgggtggtgaaccagatagataaacagcgatgcgttaacaaaataagtcacccgcgctgactggaagttaagcaaacggtggccaaaggagaagaccacattcaccatccacagaccgaggaccatggtgatcaccgactcggtttcgtacatccaggcatcgccactgccatagcgctggttgagtaaataagcgacaaacgccaatgctgctgcaagggtacagccacgagacggcgtggtaaacaaggctttaagatgagggaaaatgaaagccagtgcgccgaggataaagaacggcaaatacaacagcgtttgcatgacaataaaactgaacatgccattactcagaatgggcggatacacaataaaaatcgttcttcttattaccgcataaccgatgccgaggcataaccaaatcaccgatagtttt

SEQ ID NO: 2766 - DNA, 589 bp, Arabidopsis thaliana
tgataatatgaaaagcaatcaacgagatactcttagaaaaatccatcaacgttctgattcacaagtaacagaggaaagcttggagacccatttgttgataagagatcttctccttgtatcccacatggttctcttttgtttaccaccattattgttgtcaacaaaacctttaacacggtccatagcaacctccatcgtttggtccgacatattcgcgaaacaaactctaaaccaaccaggttcatcgcaatgacacgatgagcctggagagatgttaagaccaacttcacacacaatctttgtccataaagaatgctcggcctcaaaagtgttggatttcaagaggtgtcttaagtcaacccaacagaacaaacctgcgttactcttcaaacaactgatacccgcttcctttagacccgaaaccagcctatcctttctctctctcagcctcttcttgttctcttccaaatagttggtcgtgaatctttcatcagacagcaaattggctagcaaatgttgagtttgggaagaaatgagccaaaactcgacattttagtcgcggctgacacactttctcattgtttgagta

SEQ ID NO: 2767 - DNA, 384 bp, Arabidopsis thaliana columbia
ccctctatatctaccattcaaaatctataaatacaggaaaaaaaccggtccaatcaaacccgagaatctccggccgaacaactctcgctcaactctcactctctcctccgaataacgccccaagtacggttcaagggattcgaaaaccgcggaaaagaattaaagcgcgttcattacccggttagcaaaaacgacccggtttaagctcacttcgtattcatccgagaatgacgaccctcgggttcaacgatttgacgagccgtagtgcggtgtcaactatcgtcggcatctcgtcgagtaatttgtagagctggagcatgaatttcacggccagtacttcatccgggtcgacccgggaactatgcccgttaagttcatgtttgg

SEQ ID NO: 2768 - DNA, 530 bp, Arabidopsis thaliana columbia
tgcactacaagtcacataaactttgcttcatattcacaatgacatgcttctgctttaagctttactttacattacattgacatgaacagaacttctctttctctctaagatttcaagacaaaacaacaatcaaaattacatttcctaggaaatgttgatgaatgataattagacaaaatgttatttcctgcttctattccacaggacaaaacaagagtatttacatggttattcttcttgctggttttccaagaaactcctaaatgcacaccaactttacagtgtcgttcacgcagccttaccacactacaacaaaaaccatcgacaccgataactcacactcctttaccgcaaccgaggaaactcaatgatggtatttcctttataagagtatccgctacttgagcagccgaaggtcttagagatagcttgctactgatacagaccgcagcaacactcaacattgtcttgacctcatcgatatcaagactatcccttaacaacctcgggtccaagaactgtctgacctt

SEQ ID NO: 2769 - DNA, 516 bp, Arabidopsis thaliana
cctcgtaagtcgcccctgcgttcttcagagcaaagggcatgactatgtagcaatagattttgcgatctttgataaaagtcatcttctcgcagtcgtctttatgcatcacgatctgattgtatcctgagaaggcgtccatgaaagacagaagctcgttgtcgacggtcgccttgactaggcgatctatgtgtggaagaggataactgtcttttgggcaggctcgattcagatcggtgtagtcgacgcaaaccctccacttaccgtttttctttttgacttcaactggattagctagccactcaggatattgaacttctttgatcagaccggcctttagcagtctttcgacctcgtattggacggccatagcacgatcggtccccatacgcctgcgcttctgacaaactggcttaaaggtcggatctgtgttgaactcgtggcaggtcactccagtgggattcccgtcatatcctttgtggaccaggcgaaagtggatgtctcgatttcaagaaggtg

SEQ ID NO: 2770 - DNA, 636 bp, Arabidopsis thaliana
gagaaggagctaggtgaatttttcactgaacaactgtttgccctaccttcggccaaagtattagctatgggtgattctttatttgcagctcttgaacaaatggctgtgcgcaatggtacagcttacaggcttacatggaatggggcccatcctccatgtgtatcaatccacaacatatataatagatgcgaagagtgctacattttcttttgttcaaaagaattctgtcggcgatgttagatggtacaagctgcacccaacgttggaaatctcgtaaccagaagggaagcatcctttaaaataatatgctgttattgtatattaacccgcatatcatctataaatcacattctgtttgtaaaaagtacatattttatgtctaatgtgttcgtggttatgataacggtgccaaataacgctattacattaaaatggcatgatatgtacctatattacatgttttatattgactttttgatcatgttaatctgtctaaggtgtataatccaaaatatttataatattattattattgcaatctttacaaccgggtaagtcctaaatatcaactaagccacagttagaatgcatctatatttaaacgaatcatgaggtaaatataaaacgcacggtaca

SEQ ID NO: 2771 - DNA, 574 bp, Arabidopsis thaliana
aggatccccgatctattttcatggttcttattattcatgttgcataagcttcccgtgttggcaggaagcaaagcaagcaattcaactgatgtacaaatgggaaatgatagatgtatgtgatgctttggagctattgtctcctctatttgagagtgaagaggtactacgagtgtccaatttacttttcttctgctcttctaattcgccactcgatctgcttggctgtcatcttggtatatttaaatgtaggctcattcttcactacacttactgataggttcgagcttatgctgtgagtgtcctggaaagagctgatgatgaagagcttcagtgttacttgcttcaactggttcaggctcttcgttttgaacgctctgatagatcttgcctttctcaattccttgtccagaggggtatgtgctgaacatctagacatgaaatcatgttgagatttctatgtaaaactggtttatgtacttgttacattgcttgacttccgttacatttctgcatattttttagcattacagaatagtgagttggccagttttctcggtggtatgtagctgtggac

SEQ ID NO: 2772 - DNA, 632 bp, Arabidopsis thaliana
atccccgtagcatttgacacttgatttatcgtatcttgattttaggtgtcctttcccacgacctcttgatcgagttttcacctctttcggtttgtgttgtcttcatgtggcctccaaccacgtccatttccatatccaccacgacctcgtcctcgtacttgaccaccacctcttctttggtaactttggccgttttcttcttttgtaatttgcattttgaagacttgttcgacgatatcttctttcttcttcttcttttcttcataagcttgtaatgacccaagaagttgctctattgtcatagcttctaaatcttttgtttcttcaatgacggtgacaatatgttcaaattttagatccaatgatctaagaactttctccatgattctcacatcatctagcttctctccgtttcttttaaggttattagtaaccgtcaacactcttgagaagtaatcggagacgagttcaccttccttcatttgtagtgcttcaaattctcctcttagagtttgaagacgtactttcttgacttgatcggcacctttgtaagaggttcgaagcttctcccatgcttctttcgccgacgtagcttcaacgaccttctcgaacgtatcttcatctaatccttg

SEQ ID NO: 2773 - DNA, 556 bp, Arabidopsis thaliana
gactcacttgtgaaagttactaaaggaaatggcggtcctactacatccgtcctgcttatccccatcctttccaaagtgcttagaaatattagatctaccaaactaccggtatcgacgaggattcttgaaacctcaaagttagctacatccagcgtaattactagagcatcatcgtgaggtctttcgaggtgctgcgtttccttttcttcgaatgatattgaagcgccttgaaaatctacctcttcacttaaacttgactttagaggaacattccgtttatgctttttgattgcgctgatggaatcacggcaaagtttggaacctccaagtacgttgattttaccttttgaacttcttggttcttcttcgctagtcggttttggtctcttagagttttgagcttcggaattatcccttgattcatggtattgcttgacgaaatcctccatgttgaattttgaaagacctctgcttgcccatagttctgcgagatgccttttgagtacactgcagtctttggtcagatgcccggtgactctatgtatatcacaataca

SEQ ID NO: 2774 - DNA, 762 bp, Arabidopsis thaliana
tgctcgcttacttccttccagacaggttagtctagagactatatagtagtggtaccaatcaatgttttagctattgatctgctgccttactttgctgttcctattatggtttaattggatgtttagtgtcattactttgccttactttatctctcaatgttacaacttcattgaacacttctctatgtgcagtttggtttcattgttctgacgacctcagcgggaatcatggatcatgaagaagctaggagaaagaacgttggtggcaaagttcttgggttcttttactgaagcagggtctcgagatctatcttatcgggttatagtttggttctctgtaagtcgattgacctcactgtcaaagtagtagttttatatgttgtggtcactcggatacgtaaaaacttggagatgagtagactaattaatttcagtttttgaattcgttagacttgcgatttatgaaatcaaaatcatctttcttgacttatcgttatatgtggcatttactcattttagtctcgtgctcttcttgtttgttttcttaaaacattttaatatgtttttcatttacaatgttcatcaaaatacaaacaaatctctgagggaactgtgaaaattcgaaaaagattttagaaatactgacaaaataagttaaaattctaagaaacaaaatttaatagttttccttccaacaaggtttctatgctacataggtataattttaggtattcttcgttaataaatttgaaggaaataact

SEQ ID NO: 2775 - DNA, 613 bp, Arabidopsis thaliana
attcacttttgtctttgccttagcacattggtctggagtcacttccaacttgtattctcttaagatctcagcaaccatctcatgtttagtgagttttggattcactctcaacctttcttcaaacaaaaacccaatagatgacacctttaacatcttcgaatgtcctgacctcacacaagtatgctcattgtaataagttcgtatttgcatcttatgttttctcttctcataagagcaacggactctccacggacattcaacaccctcatcactaacatacacacacttagcagcaacaaccatagcttcagatttataaagtttaatgtcataccttgtctttagggaagacatcaaaagagcaagcttgaaatcttcaggagagttataagtcttctccaatgctagtaaaatctcaggatcaccaagatcatttcgagctgcctctactctatcatcatcttcatcgtcagaggacaaaggatctggaatcttgtcttcatcccatatatcatctccgctgtcattgtcactagcttcttcttctccattagcctctggaaaatctctttccatgtctaagttaccatcttcttcgacacctaatccagca

SEQ ID NO: 2776 - DNA, 580 bp, Arabidopsis thaliana
tgtaatagaccaacaagctgaggagaatcctttagtgactgataaggatgggctgaatgaggaagaggcgataggtgagattgaattgtcagaaggaactgagcctccggtaagcataagagacaaagggaccaacaaagatgaagaacatcgccaaggatccaactgttagagaaagagttgagtacactattatgggagatcctgttggtccaggttcagttaaactggcatcatatgtaggcacattggtacgtgaacatgttcctatcacaattgaaacttggaaggatgttagtcaggatacgagaacggtgctctggaaatctgtgcaggtaaattcttcttttcagtctctttttctgtgtgttagttgtgtaaaggtttatttccatactttgtgtgatggtaaatgattgcaagtaaggtttgagcttgatgaacagtttcaaagggttgccgatcgaaaacaaatgggcagtctgtggaggtcatacaagtccggacatgcaaagatattaatctggccctaataacagcaaaggatgaatatgagcccatgaatatttcccaacaaaat

SEQ ID NO: 2777 - DNA, 932 bp, Arabidopsis thaliana
gaatacgtctctcacttgcaacaatgcttcgacgtcctgaacaaatacaacatgaagttgaacccagccaaatgcactttcggagtgacttctagagaattcctcggataccttgtcacccaacggggaatagaagcgaacccaaaacagatctctgcgctaatcaatcttccctccccaaggaacactcgcgaagtacaacggctcactggacggatcgctgcattaaatcgttttatctcccgttcaaccgacaaatgccttccgttctaccaacttttgcggacaacaaacgttttgagtgggacgataagtgtgaagcagctttcaaacatgcagtcagcggactacctctcaactccaccgattttggccaaacctgagcagggcgaagtactgtatctttatattgccgtctcaagttctgcggtcagcggagttctgatcagagaagatcgcggtgaacagcaccccattttctacgttagcaaaactctcgacggtgccgaactgcggtaccctacgctagagaagcttgcttatgccgtagtgatctaggctcacaaactttgaccatacttccaatctcacgcaatcgaagtcttgactaaccagcctctacggacgatcttgcacagtccaagccagtctggccgattagcaaaatgggcggtcgagctaggcgaatatgatcttacgtacaaaaaccgaacatgcgcgaaatcacaagtactcgctgattttataatcgagctcccacccaatctcatcgagggcgcccctccatccgagaaatggatattgcacgttgatggcgcttcttcccgacacgaatccggagttggcgtacgattggattctcctacgggagaagtgctggagcaatctttcacactcgctttcccagcctccaataacgaagctgaatacga

SEQ ID NO: 2778 - DNA, 1296 bp, Arabidopsis thaliana
taaagtgtcgccgcttcaaagcccatggttgaaacggtttcgtttggcgcggcaatgtggcgttcgcggataccggtacgagtgacaatccactcgtcagaggtgtccaccattttttccaaatcggcgtttgtccgcacttgttcgggcagatagctgccagtaccaataatcttcgtatacatgtacgctcagtcacttttcggttatataccgtcacttgcaaactgcgagttcgctggcagcgtcctgctaccgcagagttccgcttttgccaccgtccagcagctcagaaccagctgggtatacagattccaggcgagcggcaattcgctgaggaacttgtcgctgcaccgcctgcactgcctgttcaatcgcgaccgcaaaagctcgctgattggctgcaccatgactttttatcaccgtgccgcgcaatcctaacagacaggcgccgttatactggtcggggttgaggtgactgaatcgcctcgtcaggctcttttgtagccaacgctttaataacagtagcgacacgaccgttttttcccttcaccctgagatttcagcagagaaaggaacatcctgacaacaccttccatcgtctttaatgtgacatttcctgtaaagccgtcacaaaccagcacatctgtcttgccagttaacaactcattggcttcaagatagccgatataattgatagaagggattgttttaagcaccgctgaggcatcccgaatactgtcgagaccctttacttcttcttcaccaatattgagcaacgccacgcgacggattgggaatttccaccacctcttcagccagaactgagcccataatggcaaattgcaccagcattgtgctgtcacaatcgacgttggcccctaagtcaaggaccaccgttttgcccttttgctgatgtggtaataccgtcaccagcgccggacgctcaatcccctccaggggcttgagtaataattttgccagccccatcagcgccccggtattaccggcactgacacaggcttgcgctcgaccttctttcaccagctccagggccacgcgcattgaactcccacgactggcgcggatagcttgcgaaggccgggcatcactggcgataactgactgcgcaggaataatctgcagacgcgaacgttgttcaaagtcagctttagcaagtaatggcgtgatggcgtcggaattgccgactagaagaagagtgagttgcgaattagaattcagtgcgtgcaatgctgcaggcactgtcacggaagggccaaaatccctcccatgaca

SEQ ID NO: 2779 - DNA, 549 bp, Arabidopsis thaliana
tattctcgtggggtattgaatatatttgatgagctaatggtgaatctagttgacaaggaaaagattgatccttctatgcatttggataaagttgaatttgatcaagagggtgaacaaatcattgtttacaacaatgggagaggaatttcggttgaaacatacatgagggaaattgtagataacatgatttattattcttttgcaactttgtaatttaagaaagttatgtagtattttgtaattacataaatttctagaaagttttagaacaattttatagagtattaactaataagtgctcatgtctaatgaatttgatactgtatttcgctccaataaaaaaattacttgcatatgaaagtttggagaacccaaaacctctattaaaaaaaaaattctatattttgtctctaaatcatgtgtttaagatgatgatgcatgtatgatctacactcaaacgcctaaatcatatattcttagaagataatgatacaagaaaatcaaatctttgtcaaagcccatttgggatgttaacgaagaatttgtttt

SEQ ID NO: 2780 - DNA, 849 bp, Arabidopsis thaliana
tgaaaatctgtagaacttcaataactagaagaagtgtcactttgttggttgtgttcaaagttggaagatttaataagattgtagtgcgaccatttgtggttttgaatgtatatgtaaacacattcactatcagcattcagcaatcggataactaaacaaaaacaatttgatgatttggagatttggaaatttacagagctaaaagtgaaaaatgccagtgattaataaaagaaaagataattaaggtcggttagtaaaaagacgtaaatataaataaaaggcttgtttttttatttttcactttgttctctctctctctcgtaacacgcctgagagttctcgtcgtccttatctcgatcttggttgattcgctctccgatcggaaattagggcttttgttttctgaagatgacgactgcagcacgaccaacctgggctccagctaagggaggtaacgagcaaggtggtgctcggatctttggtccatctcagaagtattcgtcccgtgatgtcgccgctcacacaactttaaagccaaggtaagatttcgaaactggttctcttcctttaatccgacgcgaattagactacctgtgaattcgatcgaaactttagctgagattgatgatattgtccagaatctagggttaattgcaatagcgtgctagggattttgacatacggtgattcagaaaaggcctgtgtacgttgtctttaggttgctgaaatcggtagtattgtggcctgtttatttcttaccggttttcttgttgtagtttttgaggatcaatagtttctagggacttatttgtgcttgatatttgaaagatactggtttctatttaagca

SEQ ID NO: 2781 - DNA, 962 bp, Arabidopsis thaliana
  unsure (1)..(962): unsure at all n locations
ggtgtcgatcccaatatttggacttacaacgtcttgttacatggtctatgttataatgggaagctagagaaagccttgatggtattcgaggatatgcgaaagagagagatggatattggaattattacatataccatcatcattcaagggatgtgcaaggctggtaaagtgaaaaatgctgttaatttattttgtagccttccttcaaaaggagtgaagcctaatgttgtaacatatactacaatgatatcaggattgtttagggaagggttaaagcatgaagctcatgtgttgtttaggaaaatgaaagaagatggggtttcataattaggtgacaccatagcataactgatcatagtgttgaggattctctgatgatgcttcttcaacttacagagaatgatggtgtagtagcagtttacacggtctttgcgaacggagggtttcgtgaagctgtgaggttgttttgttagtgaaaatgaagaatgactaattgaatagtgtttattccagacagtgtattgaacaaaaagacttcgtaaagaatgtgcagagaagcaaatgagttggtagaccacaatttgtaagttacaaattcataagttattgaacagtataggttcctttagacagtgcacaaagattgaactgtattacgtaacgacaaatttaagtatattttggagacatgcaaccgagaaatattactcaatgtcaatctttagagcttttttagtagagtttaataaatcattcggcctgagcttctcgtgctctttgtactttcaagtcatcaagatagttctggtagatataaaacgtgaatcctgtgaaggcgatgggcatcgcgaccatcttaacctcagtcagcttgtcatggaacaccgcaatggccgcgagaggcgtaacaatgagtgagacngtactaataaggtttgaaaacagcgaagcaccagaaatat

SEQ ID NO: 2782 - DNA, 613 bp, Arabidopsis thaliana
tacgcagaccacaaaaggatttggcttggaactttcaaatccgctgatgaagccgccacgcttacgatagtgcatctatcaaactccgaagctttgacgctaactcgcaccggaacttcccttggtctacaatcactctcaacgaaccagactttcaaaattgctacacaacagagactgtgttgaacatgatcagagacggttcgtaccaacacaaattcagagattttctcagaatcagatctcagattgttgcgagtatcaacatcgggggaccaaaacaagcccgaggagaagtgaatcaagaatcagacaagtgtttttcttgcacacagctttttcagaaggaattgacaccgagcgatgtagggaaactaaataggcttgtgatacctaaaaagtatgcagtgaagtatatgcctttcataagcgctgatcaaagcgagaaagaagagggtgaaatagtaggatctgtggaagatgtggaggttgtgttttcgacagagcaatgagacaatggaagtttaggtattgttactggaaaagtagccagagctttgtcttcaccagaggatggaatagtttcgtgaaggagaagaactcaaggagaagg

SEQ ID NO: 2783 - DNA, 603 bp, Arabidopsis thaliana
cacgaaacgcatgaaacctactgaggttacgaccaccacaaaacctgccttgtccaacacgacgaaattcaaaggagttgttcagcaacagaacggtcattggggtgctcagatttacgcagaccatcgaaggatttggcttggaactttcaaatccgctcatgaagccgctgctgcttacgatagcgcatcgattaagcttcgaagctttgatgctaactcgcaccggaacttcccttggtctgattttaccctccatgaaccggactttcaagagtgctacacgacagaagctgtgttgaacatgatcagagacggttcttatcaacacaagttcagagattttctcagaatccggtctcagattgttgcgaatatcaacatcgtgggatcaaaacaagtcttaggaggaggagaaggtggtcaagaatcgaacaagtgtttctcgtgcacgcagctttttcagaaagaactgacaccgagcgatgtagggaaactgaataggcttgtgatacgtaagaagtatgcagtgaagtatatgcctttcataagcgatgatcaaagcgagaaagagacgagtgaaggagtagaagatgtggaggt

SEQ ID NO: 2784 - DNA, 1116 bp, Arabidopsis thaliana
tacattatttttctaccaaagaaataaagaatacagagaagtgattctcttaatatttctctgttctttctcttttctgttaggcaaattacaatgtcgtttatcttggaccagacaactccatagcatgaagattatcagtcgaatcaaggatccagtcagaggtggggtgagaagagagctccacttcttgcctgagaacttccactttctgccactcgtcccatttctccgctaaaccgtcaccttcaagcattcgaacaacctcagacatcttaggtcgttccataggtgagctctgtgtgcagagaagagccacttgtatgagctgttctacttctgcttctgtgtaattgctttgcaggtcaggatccacaagcatctccagcttcttctccttcaaaagccctttcacctgagaagaccaaatgaacagataaatcagctttttgagagatagccagatatgtgctaaaagatctgtgttatacccaatctaggagcataacgtcatcgtcattcgccagtcttgcaagatcaaaagctctctgacctgtaatcagttccaaaagcatgatcccgtagccaaaaacatcagttttctctgaagattttccagttgagagatactcaggagcaatgtgtccaatagtcccacgcacagccgttgtgacatgagtatctttatagtccataagtctagctaacccgaaatcacctaccaccgcctcaaattcctcgtccaacagaatattagcagctttcacatcacggtgaataattttggggtcgcaatgatcatgaagataagacaaacccctcgctgatcctagcgcgatttgctgtcttattgaccaggctagaggcaactgtgatggtggacgttctgtaatcatttcaagaaagctcactcaattgtattggaaagttttaaaaatggataagatcaaaaacaacacttatacatcattgtgggagtctttctactttatgatacaaacagttaaaattccaaggttacctctcaaacaggaagcgacacttccattagccatgtaaggataaacaagcaatctctcggtaggggtcatacagaaaccgcgtacgctgaggaga

SEQ ID NO: 2785 - DNA, 940 bp, Arabidopsis thaliana
tcaccttaaagagagaaagaaaccttaggaagaagagtgtcgtcttcatcaagaaggtaagctaaccctcctgtcataccagcagcaacgtttcttcccaccctgtttcaatggaaaacatttcaaaatttcatcattagatatagattttctcgtccagcggtttttggattatcgcagtgtacttacttttccaagcacgactacacagccaccagtcatgtactcacagcaatggtctccagtgccttcaactactgcttcagcgagtgagtttctcactgcaaatctctctccagctttgcctctagcgaatatctgaccacctgttgcaccatacaagcaagtgttcccgactatcgttgcttcctcaggcacaaacccgattttttccacaggagttactactatttcaccaccagccattcccttcataaagatcaaccattgcagaagatttcataacaagtaacagttgatgcaaaaattgatttcaatgtatatggatgctagttttacctttccaacgtagtcatttgactctcctatgagccggatgttcataccgggaatcaaaaagcacccaaacgactgtcccgcgctccctaagaaactgcagacaaggaaagagtaaagcttggttttagctataacctgaactgaaacatatagatatctacaaagcttcagtgtttatttctcacgttaggttcacttgtcctgcaaaaccagtgtctccatacttctttgcaataacaccagcaacacgaccacaagccgcacggtctacgttgcatattttgacggttttctcaaccactttttcgttctctattgcatcaatcacctagagatattaaaactgttagcaactttacagttcagcagaaccaggtggaaaacagcagtgaaagacttctgttaccaatggatctgcaag

SEQ ID NO: 2786 - DNA, 507 bp, Arabidopsis thaliana columbia
tacatggagaaatacctccaacaaaaattggtatccaaaccagacaaatagaatggaaggaaatagctcgaaagcatatatcaacatacgtagtgagacaatgatttgcttaaatcctgtctgtttcaaacataggatattatgaaacacaaaactgtcaagaatttatccattgcagacatcatcagatctcaaaagtgatgcaaattattttcaaaatgaaacacaagaccagtcacaatctgctaaaagggaaaacaaagtgcatgagaatgagaggtctctccataaaaggtcttcctggtgacaatgaaactcattgtgtactctccacaggcgtctgcaaaaaaaactatgtataagggaaggacccgaagcctctaggcaatggaagaagagcaagagctgaagagcaagagtaagtacctctttttttccccagtggcgagcttgtatccctgtagaaaagtaaccccagccagacagagaaataagcacaaactgcag

SEQ ID NO: 2787 - DNA, 441 bp, Arabidopsis thaliana
tatgctctggtcagggacctgtgaatactgggaatgagttgcctctccgagcgtaccatgctggatatggctttgttcaaagctgcttgtaactgctttatcctagagcgagagttcatattagatttgtgtttcagatatgccatttcttgtctgcaagtccgcacttggtccatgatttgttccctctggcctacgatctccttgttccatccgtttttgacatggttcttgaagtttggtatgtcaagtaatctcttatcgaatctgaaaggtctttgttttggggtttctgttttttctaatgtcagaagtaagggtttatggtctaaacctgtgtaaccgagaaactccagttcaggaaatggaaagttagccgctccttcatagtatgacgatgtcgttctccacccaactaaacctatcaccggttgattgtat

SEQ ID NO: 2788 - DNA, 453 bp, Arabidopsis thaliana columbia
tgaatccgggatcactttctagagcaataaagaagatgaagagccagtccgagtcatctttactttctggtgttcgatcaaaaggagaaaagattcttgagctcgatggtacagttactacccaaccagttcttgaacatattggaatatctacatggccaggtatgtttttctctgcacaagcaaagtgtgaaaattctcctctctatttggttgattgaatttagtattgttaaatgcaggtcgcttgattcttactgatcattcactatattttgaggctataaaggttgtatccttcgacacaccaaagcgttatagcctatctgatgatctgaaacaagtcattaaacccgagttaaccggtccttgggggactcggctttttgataaggccgtctcttacaagtctatttccctgtaaggaatgatgttattatgacttgttttgta

SEQ ID NO: 2789 - DNA, 866 bp, Arabidopsis thaliana
actagaaaagatgctcaagaatcttccaagtcagattcagggggtgcttggggtataaagacaaaggatgctgatgcagatacaacaccaaactgggaaacaagtccagctccgaaggactccattgtcccagaaaataatgagccgacttctgacgtttggggacacaaatctgtttcagacaaatcgtgggacaaaaagaactggggaactgaatcagctcctgctgcatggggttctacagatgctgctgtttggggttctagtgataaaaagaactcggaaacagaatcagatgctgctgcttggggttccagggacaaaaataattctgacgttgggtcaggtgctggtgttttaggtccctggaacaagaagagctcggaaactgagtcaaatggtgctacttggggttctagtgacaaaaccaaatcaggtgctgctgcatggaattcttgggacaaaaagaacatagaaactgactcagaacctgctgcttggggttctcagggaaaaaagaattctgaaactgagtcaggtcctgctgcttggggtgcttgggacaaaaagaaatcggaaactgaaccaggtcctgctggttggggtatgggggacaaaaagaattctgaaactgaattaggccctgctgctatgggtaattgggacaaaaagaaatcggatacgaaatcaggtccagctgcttggggatctacagatgctgctgcttggggttctagtgacaaaaacaactcggaaactgaatcagatgctgctgcttggggttctaggaacaaaaagacttctgaaattgaatcaggtctggcgcttggggttcgtggggacagccaagtcccactgcagaagac

SEQ ID NO: 2790 - DNA, 572 bp, Arabidopsis thaliana
caatcttttcttcgggagaaatccttggccgtcgaagatcaagaactcgccgtcggaactctcgaggactcccacgcagcgaaaccagagaccaacgctgcgattgagcttcccaacaaatccaagcctgagaaatccgcggtcgagaaggaccgtgaggattttcgggaagcagtggtcaaaactctcgatcggcttttgttcgtccataaatctttcgatatctaccatggcgtcgctggactttacgatttcggtcctcatggtcgtactgttgaacttaatatacttagcctctggcgtaaggtgaggattcattcattcattcacatatatctctggcacaattcggtagacaagagctgattttgaattttctttgatatacagtgttttgttgatgaagaggacatgatggaggttgcttgtacagctttgacaccagaggctgttttcacgcatcctggcatgtaaaaaagttcactgatcttatggtcaaggatgaggtagatggagcatttcaccgtgcggaccacttggtcaaaagttattgtgaaacctgaaagaaagat

SEQ ID NO: 2791 - DNA, 1668 bp, Arabidopsis thaliana
tgattttctgccggagagctgcatcggtcaacacaagatataatttctaaccatgtgcttatgcgattagaaaggcaatcattttcgtctctcgaaggtttcaaacaagaagcaaatgagatggcaaatgcattgctcgataaatagtcaatgtcaaaacatcactacaatgccgctagactttataactaaaccggtcactgaaaccctaaacctgattttaggacaaacgatctgaaactagagaactgcatttacacattgttttgcacttcacatcagagtcttttaatgataaaaaccgccattctctccactctttatgtacatcaaaacaaaacagtggagactgaatggtttacctaaacgaaccaaatcttctttggttctcaagagtttatgtctgcgtctgggacggagactgagatgatggagactgagcctgagcctgagtctgagacggagactgagtctgagtctgggatggagactgagactgagactgagactgagactgagactgagactgagactgagactgagactgagactgagactgagactgagactgagactgagactgagactgcgtctgagatggagactgagcctgagcctgagatggagactgagcccgagtctgagatggagactgagactgagtctgtgtctgaaagtcgtcacctccattacctatagactgattcggaggctgagactgttcttccccaggtggtgtggcatcttggttgttcctgtctctgtttccgctaggccgaggtttcgtaaagtacttgtcaatgaattcttcagcacggtcagggtatttcttcatcaaatagttgttgagggattttcggtatgaaaagtcctgtttggccccatcagttgagacaacaaagaagcacctgctgtctgagaagatggtgtgcttatcaacctacatcgttgttcaaccaagaatttcacatcaggcataaggctaagtaagctttagaagagaagctaagtttgttaaggagaaatgttgtttaccgtgatgaagtcaacgccagaaccaagctttgtctctttttggggatggaagttcaaaatcttctccaggacaaacgtcttgtcatcatcagaaattgggtctccatcagggtaccttcatcgaaagaagatagttttagatagatgaagcataacaagtatatggcatgtgaaacagcataattaattatacatagaactggaaattgtataaacagagcgtaagaactagaaaggcatacgcagacggatgcataattttcctgagagtcctcatgactggctcaacatctgagagcagctcttgctcctcagaggtgaatgagtccaagcgctgtctcgttgctgtaaacatgggagccaaattatcctcagatctaggtggcctaggagtatggttcctatttcctttccagtctgcaccaccaccattggaccagtcaccactagatggaaatttcttggctggatttcccactggcttctctctttatcatccttctctctacttttggtcgccttcaaggagaaccacggatttctatcatcctcattggtaccgttgtcttctgcagtgggacttggctgtcccacgaacccaagcgcagacctgattaatttcagagctttttg

SEQ ID NO: 2792 - DNA, 582 bp, Arabidopsis thaliana
tactaaacgagatgtcatgaaataaaacaatgggaaatttgattttaaacttaaaagatgtcaactgatgatgcataatcagtataaacaacaatgggacttctcacgttatgtgttccatctgaccagattaggtttgcagacgagggcaattttgggttgagatcgttgcctgaaacactcaccgtgaaagactgcttctcgttcactgacttcatggatagaacactaggcgagaccttgactttgagcttagatccgtgatttatcacaacttttgatttgtatgttgagttggaggtacctacgttggttacggttctgttgaaagtcacggtgaaggagcttttagatttcgacaatttagctgacattgaaggatagtttaggtttcttggtaaggtcttgccagtgcaagtgacagcttcaccggcgatgagttttagggtagtcgcattgtaattcaagccacagagaaaggcaatgtggtctgatttgcctaattcatacacgagtcctggatttatagctgctattgggtcgatatgtccagatccataggcaactcggttgatactgcgt

SEQ ID NO: 2793 - DNA, 534 bp, Arabidopsis thaliana
atccagtagagggaaacacgtacttaaatcttgaaacttgaattagtctgagaaatatattctaaaatataaaatattgttattttcttctttaacaagaaatatatatatatatatatacaccccaaaacaactattttcaactcattctcataattgtaatgaagttttttaaaaaaaatcgtcaccaaccacagagagccagtgtacacagtgaacagagaagaatcaaatgaccaaactttcaaagaatatgctttttcaaatgaacacccgcaccataattatatgagaaaacctatcattgtttctggtaaaactatatagaaaattctggatccaagaaaaaaatatacttgttttgagaattgtgaagtttttttttacttacctgaatcagtgatatcactagttggtgaatcatcttcaacgtcttctacatctccgtttacgtcattctccgttactttctcgccgttaaaacactctttcttcacttcctcttcctccgtcgccaccacctctttcagatct

SEQ ID NO: 2794 - DNA, 1157 bp, Arabidopsis thaliana
cacttgcaaacaccaaaaccttacaaatccaacatctattccacaaaattcattgttgatctgctagaaaggtgagattttgcctacttcgaccatacatacatacagaggcgtaatcccgaatccatctttgatgagaatatgactcccctttggcgcataatcattgacaaaacttgatgctcaaatgatactgagacagagaaacaaacacgcatcactgcactaatagagataaagagattcacagactaacaacacagcataagctaatttgagttaagtaaatcattagaatagagaaccagatcttgaatcattagaacaaaaaataacaaatttgattaaagtttcagtcttttcttcactaaaccctatcaagtttcgacaacacacacaatcgatccaaaagaaggttaactttaatcaaaaattaagctattgaatagccaaatgagaaaaaaaaaaaaaacggaagaacctctgcgagaagaatctatgtaatggtccgttgtccgtttgtcgagctcagctcagacatgatcttccacgcggtgccgccatctctttgggcccataaagaaaaagggcctgtcagagaacccatttcaacagatagcccatttcttcttcacaaaagaatatagcccatatagcacattttggcatattctctcactccaaataaaattgcactttgcgtttgcggtctagcaataacaacaaatattcaggcatttaagaaaactactagaagagatagaaaaacagaacaatatgtatattgggttcatgggggctcctcaacacagactacgtcaacaggttagatgcgaacaaagattcgaataataggaccaaatacatcatacactagtcgagaaatagtttttttttgctaaactgcaaatatcatataaatgaaaagatagatttacatgggtttgaaccttgaaaattgatttggcaaaaagttttaaaacaagcaagcaatatagatcagtctgggttgagcccattttagtgcaaccaaagagtcataagccgcctgaaacgcttcttcagtcttcttgcagtaatggaatttttaatctctctgtcaatggtcttgaatatcaccgatggaagaatatactcatgattgtgatgcaaattat

SEQ ID NO: 2795 - DNA, 483 bp, Arabidopsis thaliana
tagtaagtaacgccagtgtgctctaaagtatcgcttgcggaaaacgcgcttcaggtgaaagggtgtaatcaataccaatcaccgtacattggctgtagcttgccagcaggcgcatgatgcgatcgtgggtatcgagattgccgagaataaaaccgcctccatgcaaataaaatagcgtcgctgggctatctggctgcggacaaaagagacgtgtttccacctgcccatattttgttggaaccatgtaagctctggttgccatttctggagcgcccgcattccagaatcggcgctcaagcgtgtaatactgtcgttgctcagcaatcgttcccgttgcgggccagggcggtaaatccggctgaagagtattcacaacggtcttcatttcagcagaaataaggtccagaacaggtagtttgttttccggcttcatacaaaaactcctttcaaattacgtcattgtaaggaaccactgccatgaaa

SEQ ID NO: 2796 - DNA, 448 bp, Arabidopsis thaliana
ggagagcaaaagagaaggttgtggaagaggtgtttggtactaatgatgacgcatacaagtccctagaagcgtatttgtatgttttaaaacttacaaatcctagtacaattacagatatcaaaacagagactgaagaaaatggtgtcgcaggttcttgtatatgtttttggcatttggggcatctattgaggggtttctatatcttcgtagggttattgtagttgatggtacgcatttgaatggtaaatacaaagagtgttattcactgatatttcaatgatattgattcacaaataagcatgaagaacagtgattgtgctgcatatcatgagaggttgaaaacagggcattagacaagggtctatttctaaggtgaacaatataatctagtgacaagcaacattttcgaaactctgaacaatgccttaaggaaaggtcgaggatccct

SEQ ID NO: 2797 - DNA, 529 bp, Arabidopsis thaliana
  unsure (1)..(529): unsure at all n locations
gttttgagcacttaaacaagattgaatcagtgattgaagaggtacgacaaaagggactcacacaagagaaagacactgccctatggaaaggtgcaaaggagaattacaaaaacagattcagtacttgtgaaacatgggaagcaatccgggaggctaagccacacatggaggggtatattccccatgctacacctaaatactcttttatagcatggcttgcaatgaggaaccgattagcaaccggcgattgagttttcacttggcaaatgggctcaaatctgtcatgcgtcttctgcgacgaaccaatggagagtagagaccatctattcttcgattgtggttacgcaaaagagatttggtctggtcagaccaggaagatcatcagaaacaagttcactacaacatggagtgctatccaagctacactcttagatgcctcattgggacgaacaaacctcttcttgataaggtactcttttcagctggccatctacacaatatggagagagncaacaacaagagacatgga

SEQ ID NO: 2798 - DNA, 438 bp, Arabidopsis thaliana
tgaagttgtagacatttgtcaagttatagtcaaaacgctccatcaagtattcaggaactgtatcgaccacccgcacatcatttgctaaggtatcgataaagtactcttcatcatagatgtccccaaatttactgcaaggaaaaccttttttcagaaagtagttgaaacagggatggctttgcttaaatttataacaccaggagaagataagaaaacaaatatccggaacctcggatctttccatatgctgtgatagtgaaagttgggaattacaagggtcgcattaaggtagcctgccacagcaaccgcattgcatatctaagtaaaacatggaatagacaagtcaacagcttcacctttgacaagtttgccagacaatagcaagaaaggcttgtgtgaaaaaaatcaatttgatgtaagatgattaactaccgaagt

SEQ ID NO: 2799 - DNA, 1094 bp, Arabidopsis thaliana
gagtagaactagtgccagtagtgatgaatatgaagatttctttggggatagtgaggaagaggtcaaagatggagaaaatgtagatgaagttgctccgacaggttttgataccgaattttggggtcactttttggatgatgagttagctggttctgatgcatctgagatcatgtgtagtccacgagtgcctagaactcaagaagataaagattgcaatgatggcagaggtagtagtactgactccgaaaccatgccaaatggaggacagagaaatcgacagacaaggaaacttgatgatattgaagatgaggagttgtatattcctccgctttttgatgatattgaatatgaaagggacgaaatcccggatcttggtattgaagatgatgagaaaggtatctacaaaggaagggtatatgcaagtaaacaagattgccaaataagcttagctatccacgctataaaggagcaattttactttaagcagtctcgtaccaagcgacattactttttgataacttgtgctgatgaaactgtcagtggagaataatgtcccatgagatgaagacgtgtggttactactagataaggaagggtgatttagagcacacatgcaacattgaaacaaggagacagtacatgaagatggcgacttcaagagttatagcatcaatctataaagccaagtacagtaagttctctgaagggactgtacctttggatatgcaacaaatggtacatcgtatgggacgtgttggaaagcaaaagagaaggctgtggaaaaggtgtttggtactgatgatgactcatacaagtcccttgcagcgtatttgtatgttttaaaagtttcaaatcctagtacacttatagatatcaaaacagagactgaagaaaatggatttcgcaggttcttgtatatgtttttggcatttggtgcatctattgatgggtttcgatatcttcgtagggttattgtagttgatggtacgcatttgactggtaaatataaagaagtgttattgacagccagtggataagatgcccactttcaggttttcgtcttgcatttgctgtagttgatagtgagaatgatg

SEQ ID NO: 2800 - DNA, 505 bp, Arabidopsis thaliana
caaaggtacatgcccttgagagaacttactgaacttgcctttatagacagatgcaataactctagaagtcgccatcttcatgtactgtcccatgttgcatgtgtgctctaaatcagccttccttatctggtagtaaccacatgtcttcatctcatgggacattattctccactgacagttttcatcaacacaagtcattaccaagtaatgtcgctttgtacgagactgcttaaagtaaaattgctccttgatagcgtggatagctaagcttatttggcaatcttgtttacttgcatataccctttctttgtagatacctttcttatcatcttcaatatcaagatccgggatctcgtccctttcatattcagtatcatcaaacagtggaggaatataaaactcttcatcaatatcatctagtttctttgtctctcgatttctccgtcctccattaggcatggtttaagagtcaatactacttcctttgccatcattgcaaacttta

SEQ ID NO: 2801 - DNA, 569 bp, Arabidopsis thaliana columbia
attatatatacacaatcaaattcatgattcatcgatatactgatcactgaatattttacatgagcgttggtaagtcgctgtatttaactttcagaagtacgagctgactcaaagagacaacagattcatgtgttgttcccatggcaagcgcgcttcctatagttccaaaaacagcaaataaccgcagaacgaatccaagaaccgatattcctttgtttataaccaactttggctcaaaagtaatcaatttcctagatgatcttgaagtttccccagcttcaatctgttttgcttccctagcttcaatcccttgtgcttcctcagcttcattatgctttgcttcttccatttttgctctgtgactgtttactaaacaaaaagggtctgcagtttatataaatctccacagtgaaacacttcaagaagtggttaagactttgaagtagctgattataatgaagaatacaagataaaaaaaatgttagagcataattaattgtggaatcacatatgaagacagagaatttaggtttattgctgaggacatataatgagcaaagatttatttg

SEQ ID NO: 2802 - DNA, 946 bp, Arabidopsis thaliana
acacagcaaatctctgtcagtaatttctgaccgacacccatctatctacgtagctaagatgaatgtttttcctctagctcaccatggggcatgcatagtacacatagcaatgaatgttaatgctacatgccatcacatggggcttgctaatctggtatagaacgcacgctatacctatactgttaagcagttcaatgatatttattcacagataagcatgaaaaacagtgagtgtgcttcatatcttgagaggttgaaaacagggcattggacaagggtctatttccaaggtgaacgatataatctaatgacaagcaacatttcagaaactctgaacagtgtattaaggaaaggtcgtggatcccctatactggaattgttaaggttcataagggctatgttaacaagatggtttagttcaagaagaaagaagtctatagagcatacaggtttagtaactccagaagtagataaagttttgacgaaaaaccttgccaaagtgagaggaagcaaaattggaaaggttagcacttggagttataaaattgttgggatgttcaatggaaagcatcaagtatgtcttgatcgtagacaatgcacctgcaaggagtacaataagttaaaaattccatgtgggcatgctatgttggcagctacaagtgttggtcagtcatatggatcattaatcgcagatttttacaagacaacagcttggagagcaacttacaagggtgttataaactctgaactcaacttggaagatgttgacgttccaaatgaaattggaagtcaaactatcttcccaccaaggacaagaaggccgtttgggaggccaaaaatgctacgtatcaaatccattggcgaatatccggttcgtatttgtaggagtccattttttttacttaatctttattccgtatttaatttttaattttatgttgtttac

SEQ ID NO: 2803 - DNA, 521 bp, Arabidopsis thaliana columbia
tcttcatgtgctttgatttcgatttctatgatttcactactttctggtaaaattctgttcaaattcttattcaattttgatttttgggttttgggttcgaattgatgaatctgatcatcgaaaggagtgaactttggatatgggtttgtttaatcaatacctaatttgttgaaaagtttgaattttgatcaaatatgaaaataggggttttgatcaataaaacgttttgagaatagggttttgctcaagtcaatgttttttgtttgtaatcaaaaagtcactcttgaggatagggttttggttggtttcatgataactgattcataaggactgattttgatctctctgtgtctatctgttgtttagctatttagcgatggtgatggcaattgtaactccatggagcattttacttgccttgacagacacatactctgtcttagtgaaactccttcctcaagaattaagagttctttccatcgttttcgccggtgatttcgtaagcaacatgcaacaaagag

SEQ ID NO: 2804 - DNA, 1070 bp, Arabidopsis thaliana
gagggagttatgtgcatcgaaatcgaacccatggcttcttcttatctctctatctttctcttcactctgcttcctcaacctcacagaattttcgtaattcagcagtagcagcaaaagatagccattgattttgtttctgattcagcaaaaaaaaaagaaaaaaaaatgagatgggcttagtctgttacaatttaaggcccaaacccaacaaagactaaagacgcgtaaccgacaaaaaccgtcattaaatgtgcaagagggaaggtcaatttcgtcaactaccggtttacaagacccggttaggcctaccatataatcaattttctcggtgtctttgattttttttccgatctttttctattttaattctcgaggataataattattcgcgatagacgacgcctttcctcttagctcggcgttatcagactcaccgagtcgactcgctccgccgttgccgtctccgttaccaccgtctgcgcaatacgtaattcatagcccggatttctctatggagatttccccggccgattcgttgtccatctctggcgcggctgcttctgaggtcgtctccgagccttccgtatcttcttcttcttcctcttcctcgccgaatcaggcatcacccaatcctttctcaaacatggatcctgcagtttcgacggcgacaggatcgaggtacgttgatgatgacgaagatgaagaggacgtttgcaggatctgcagaaatcctggtgatgcagacaatccgcttcggtatccgtgtgcctgtagcggaagtatcaaatttgttcaccaggattgtctccttcagtggcttaatcacagcaacgctcgtcaatgcgaggttttgtttcttttcctctttattatttgattgttgagattttgaagattcgtattctaattaagatctggattcgtgttgatttgaatgccttttaggaattttgatatgggtaaatgaatgggcaattgcatatttctgtgtgctcatattcaacgttgacagtttaaagtcttctcttttaatatgtgtttcttaagtaggagttccactatagaagaga

SEQ ID NO: 2805 - DNA, 670 bp, Arabidopsis thaliana columbia
gtatctctcatagaaggatagggccagatacaaaatctggaggtgagacgcttttcccacttgaccatggctgagatgacgtattttgcggtgactgcaaaattgcgttctgcaggccaggagatccaaaaaaagctgctgtactctttgactccacattggcctgcaaatgcatagaattggactgcgcaaatatgtctttttgaagcttttcggaaacagggagagcaggaccgaatcctgcaaatttgttggtgtcatatcctaaggacatgggtagttgcccaaaacttgttccggacaacctaggaatcatgctttgttgagcatcttcaacttgtaacggtttttcagcatacggttcttgcttcttgttgttgtccccagacactgagcttttcacagactcgaattccttgctaaaaatgttttcatttggcaacctttgttcagtagagaacttctctgtgttgaggtgtttctgatcattttgtactgcaatattcaactgttgatgtttttcagaagattgtttagaaaggtcatcttcaatcaaaggggtataagcatcttctatatcagaagaagaggcccaatcagtatcagatgaagctggccgtcctgcaacacatgtcggggaaaacaaattaatgttttttaagtaatgttg

SEQ ID NO: 2806 - DNA, 496 bp, Arabidopsis thaliana columbia
ctgcctgctttatccgaaatcgtgagaagcacatccactcactggagcacagcaagccagaatagtttcagttccatcaagaagaagattcaggaggcaacatctgaaatcaggaacaactcaggatggtagaatcagtgtttttagatacttttgtactaccccaactcaatgaacatctgtcctcttatgaccgaacacatccccattttccgtccgggacagcgcaatggcttgcctatgcaatggggatcagtaacagtttcttgcatattcaacaatgcctctgaatcggcaagtgtttttcattttccgagttcaagccacgacccattatggttaccggagttattctcctccattggctctgccttaacatcagaactttgttctccctcttgggcagcagcttctcgtctatcatcatcttcttcctctgcagcacccaattcttcttctcttctagctcgcttgaccccaatagaaaccccaaaca

SEQ ID NO: 2807 - DNA, 469 bp, Arabidopsis thaliana
caagaacccgacgggatctctccggtgaagtgattgcagctgagatttagagagatcgcaagagacgggatccgtcctaactcgttagggatttctccggtgaagccattgtcgccgaggttgagaagctgaagactccgacaggaagatatctctcgagggatttcgccggagaaacgattcttcgcgagattgagcttcgtgagttcggttaacgatccgattccggttggtagagaaccggttaatgaattatcggataaatcaatgaattgtaagctcttcggaagtgtaccgggtaaaccaccggttaaaccgcttgaatgtagatcgacgaattcgagacttgtacaaccggagatctccggaggaatgtttccgatgagacgattctcacttatatcgatgaagttgagatttttcagatcccaatctccgccggaatattcccgcgagtctgtaccgttga

SEQ ID NO: 2808 - DNA, 556 bp, Arabidopsis thaliana
atttgcgaggagtggttttgcacagccctattctctctgggatgagagttttgtatccggttaaacgtacctattggtttgacatttacaaggtaatttagcaaacattcagctatgtttgttctggttttcatgtgttcatgcttacacgcacaattctttgtttcagaatattgacaagatcggtgcagttacctgtcctgtcttagtaatccatgtgagtaaatgattattcctctttcattattgtctctttcactttgcctttgatcttctcattattggtggaatcttgttgtcatttattgcctccacagattcttgtaatgaattaaaacttgtaggttaactggaccatttgacaagaaaatgtttggtgaaactcaagttgttgaaatttatgagatatttattgggtagcaacttgagtatttcccaataagaatcattgtcttgtgccttaaaaacagattagtgacattagtctaaatttaaatcacttaagaaggtttttactctcttgtttggtctggtaggggactgcagatgaagtggt

SEQ ID NO: 2809 - DNA, 589 bp, Arabidopsis thaliana
tagtacggccgccagtgtgctctaaaggcatcttgcatatgctaacaaggacaagttgcatctaagttttttgagcattttattttgataagcgacgctatgacgttcagatctggaggaaaagagagttctttatggaacgaagaagacgggtatgccacaagagtcagtttccatacatagtatatctaacaaatatagattctattacgatgctatctcatacggcgagccgtggacacagcaacttccggtgcggtcacttgtcggtctcataccactatatgcggtatcaacgctggaaccagaattgatcaacaaattcccatcattcaagcgcagacttgaatggtttgtggaaaatcgccaagatgtcgcggagagagtcttgccagtatgaaaagtcgtggaaagggcgaccgactactcctgtccttggttagtaaagaccgactagagaagatactgaaacgcatgctcgacgagaccgaattcctctcagatcacggaattcggtcaatgtcaaaataccatgagaagcatccttactcgatggatgtcaacgggcagacattccgggttagctatg

SEQ ID NO: 2810 - DNA, 1063 bp, Arabidopsis thaliana
gctcctctcgtttcgcaagggccttcttgacatcaaactcggccaagtctaaatcagacaactccatgtacgcttgcgctctccggtataaggccttcacattggtgctttctagctctaacacctaaataccaaaaccaccatctccatcagttttgttcagctaggctttaaaactgacataaaggacttgtggtcttaacaaccaattattattacctttgtgcatagtttttcggcctgcttgtaatctttcaatttgagtttgcaggctgcatcgtttagattgcatgccaccttcaatgcttttgcttgcttcttctcttcctcactgaaggatgtgtcgtattcaatgaatttgacagcctgagaagaaacttaaccatgtaagatgttgttcgacttataactcataaagcaataagtagttcgtatcatataccttctcatatctcttggaagccagggaatatttgcctcctttaaacttggaattccttcttccttcttcttactagcagcttcaatcttctcctcagtgtcatgtccacgattccctttcctaaaaagccaatgacaaacaagtgttggactcttatacttccatattgactgaattgtgagcggcataagcatccaaaatacttcactaaccttgtcgaaagtcaataggtcaacctcataagtaacagttgagtttggcggcaccacagccaattcctgttgtgactcattagaaccaaaggcatactcagggtctatggtcaccaatgccacttcaccctttttcatcttcatgacagctctatcaagtccatcgacaacttgctctgtttaagcatccagtaaatgagttaccatgactaagtaagccatggaaaatccagcacatccaactatccaaaggaaagttatcagaaaaatactaggaactgtgtagttaccttcatctgttttgaactcaaacggttcctcattctcaccatgacctttcttcaaaaatacagtaccatcttgaagtttccctatcaatttcactgccagaaagaaacaaatgaaaccc

SEQ ID NO: 2811 - DNA, 459 bp, Arabidopsis thaliana
gagaatcactgaatctgactgatttgaattttggtggtgtttctagagtttgttgagcaatgaagggagcgactctcgttgctctcgccgccacaatcggcaatttcttacaaggatgggacaatgccaccattgctggtttgtttcttttttcactcttgttggtgcaattgtgttttgtttggatcaattatcatctgagatttgaaaaatgttacaatgatgttgtattggatttgattgcaggagctatggtttatatcaacaaagacttgcatctaccaacctctgttcaaggtcttgtcgttgctatgtcattgatcggtgcaacggtcatcacgacttgctcaggaccgatatctgattggctcggcagacgcccatgctcattttagcatcagttatgtatatcgtctgcggagtgataatgttgtgggacccaatgtctatggtctgtgc

SEQ ID NO: 2812 - DNA, 528 bp, Arabidopsis thaliana
cataattgacataattgtgtacattaaaatataagtattatttaatcacattaagaaatatgcacagaaactttttatcataattatatgtatgtacatgcattagtgcatatatacatacacaaatgagtgtataaaagcttgaacccatcgaacaagcttcatcacaaaaacccaaaacctttgatatttgtctaattttacaaagatgggtttcaaactcatctctctcctccttctttttcttccacttctaacagtcacaatcttgtcgggagtcgagcaggcctttgcttccgacaaggcactcctcgtgaccggccgcaacatcacggctgacggtggaaggtcgtcactgagagggaagaagcagaggagagcatcaggatgtaacttgttccaaggccgatgggtgttcgatgcttcttaccctttctatgactcgtccaagtgtcctttcatcgacggcgagtttgactgtctcaagttcggccgaccagacaaacagttcctcaagtactcttggca

SEQ ID NO: 2813 - DNA, 1224 bp, Arabidopsis thaliana
gacgatcaacagattcaacaccatcaccaccggaaatgggttggtccctcaggccacaaagtcatcaccgtctcacttaacggccacgctcagtttcgctccgtccaagacgctgtggattccataccaaagaacaataacaagagcatcacaatcaagattgctcccggattttacaggttgatatatatataaatccctaatgaatatttttcctttttgttttagttctctcctttatttgttacatttttttttgtcttgttcatgcatacatgcaaacttaattaaggttaaaacttaacttttcataaatacattttccagagagaaagtggtggttccagctacaaaaccgtacataacgttcaaaggagctggtagggatgtgaccgctatagagtggcacgaccgtgcgtccgaccttggcgctaacggtcaacagttacgtacctatcaaaccgcttccgtcaccgtctacgctaattatttcaccgctagaaacattagcttcacggtactctattcaattctaacgcaattatatatatagggaaactttcacaaaaatgcgagtctttctttattttattttaaattgtgaagaatactgcgccggctccattgccggggatgcaagggtggcaagcggtggcgtttaggatctccggcgacaaagctttcttttccggctgcgggttttacggtgcacaagacactttatgcgacgatgctggccgtcattacttctaggagtgttacattgaaggctctatcgactttatctttggtaatggccgctccatgtataaagtaaggaaggactcctaaataatacttactatatagcattaattatgaatatagtaacaaaaacaaaagttgaatatattactttttgtgtaaccagaatatccgaggaggaatagaccaagtattgggacttgttaaataaacttgttaatgtgtgttacttgttggtgaaggattgtgagttgcattcgatagcgtcaagattcgggtcgatagcggcgcatggtaggacattcccggaagagaaaacgggtttcgcggtcgtgggttgtcgggtaacaggtacgggtccattgtatgtgggccgggcatgggacaatactcacgtatcgtttacgcctacacttactttgatgctctcgtcgctcacggtggttgggacgattgggaccacaaatcaacaaaagcaag

SEQ ID NO: 2814 - DNA, 572 bp, Arabidopsis thaliana
cacccctagtgaattcacaatctcagatttcattttaagacaacctatttacaagttaacaagtgttaaaagaactcaaaaggacctgcttttatggcatcagcaacagcttcctcaggtgacttggtatatccttggtacgcaaaaatagttgccacagcatcacagtctgatgtaatgtacctgcacagatacaagataaagactccccggtaaatctttcattggccgaaccaaagcatcacaaacaaaaatcaggtttttctctccttccctgttgaagattcacttacccttcaaatccccactcaactcgagctttttgtaataagtctccttgcgcacaagcagggaccccattaactgcattatatgaacacatcaagcagctagctttaccatctcttatacaagtctcaaatgggggctgatatgtgtcttccatgtcctgttctgtgacctactaatacagagtaagctagactcagtgttcgacacagaaccatggagataatgcaaaagccagaagcaatataactagttaaattctgtttcatgaacaccaaagaaag

SEQ ID NO: 2815 - DNA, 560 bp, Arabidopsis thaliana
ctaaagaccattcacttgctcggagctaccactttcgtctccgaagtcaccggaccaacccttgctatcatgactcccttgctcgagcgtggtcttaaggccgagcaggcaacgcgcatcaagcgtaaggctgccgtcatcgtcgacaacatgtgcaaacttgtggaggaccctcagattgtcgctcccttcttgcccctgctgttgccccagatcctgaagctctctggagaatccccagaccccaaggagaatggtctggctgatcctgaggcccgaggcaagtgtaagcaggctttggacaccctcactcgtgtcggtaacgttgtggatggcaagatccctgaaatctctactgctggcgacatcagcaccgtcagtgctattctgaaggacatccttgccgctaagttcaagtcccaggctgagaaggctgaggctgtcatcaactacgtcgctgcttattgccggtcaacttgtcgacgagaagattgctgagtcagctgactggaccctcaatgttcttccttatattgctgctattgtcggtgaggctgatg

SEQ ID NO: 2816 - DNA, 577 bp, Arabidopsis thaliana
tgtacctgaagattaagtaaaattatcaagattagtgaattgttgtggtgtttgtgaaaatcaagaggttaatgtggaggagatatttatacttgtaagggccattgtctacgaggttatccgagtcaacagctaagtcaaagagtagccataagtacttcacctgaaatatttttgaaacaaaaacaagtcaaggctttaaggtaagcaagtaaatgcatattgagaaacagagcttttcatgtattttaccgtttctgcgaggaagaagctctccatgtgatcttcttgtttatgcagttctacatctgtgatgtgacaataaccgcaaggacattttgccccgtattgcaaactagccacaaagtcacgtcctgcatcaagatacctgtcgacgagtaatttgcattgtgcaattcagtagtgtgatcatctttggatgaagaattgaaaaaaatataactaattaatttggtgacctgggatctctggtagctttgtcaaccagtatgtctctcgattaattccggcttaagggatactcttttgccatactgtaaggaaatgaagatagata

SEQ ID NO: 2817 - DNA, 867 bp, Arabidopsis thaliana columbia
aagggtataaagcttagagccatcacgccttacataatcataatgcaatgtagcatgaactatatttattagtgcttcaatttgcttgcatactatacagatttctcttatgcgtagttttctaacttaatttcattttgatttttgttggtataggcataacttgtttaccaattgattgatactctactctttttgtgcaggacaacttcagagacaacaaatcaatccgagaaagctccatatcgaactgccgagacatcttccaatgtggaagaagacccgtttgtagtcttggaggagtctgaatcaacccctagagaaccctcccgtactgatccattggacgatattggtaaattcaacagcagaaaaactgatcattcatctgtccacggaggagtatttgttgatattgaccctcttgataatctaggaaaaccagggccggatatgaatagtaaagggaagagtcatttaagaccaccaggaaacatcagtggctcccagtcaccaccagtagaaagccctgggagttaccattctaagaaagtttcatttgaagattttttagagccacataatatgagtactccaccacctaccaattcaaatggaagtttcgagtcgtctgatgatgtgtggcttactgtatccgagatccccctctttacgcaacctacgagtgctccgccacctacgagacctccaccaccaagacctacacgtcctattaaaaagaaggttaatgagccttctataccgacgtctgcttaccactcacacgttcctagctcaggaagagcttctgtaaatagcccgacagcatctcaaatggatgaactcgacgatttttctattggcaga

SEQ ID NO: 2818 - DNA, 539 bp, Arabidopsis thaliana
tgtcctcgctgtgaatcaaccaacaccaagttctgttactacaacaactacaacttctcacaacctcgtcatttctgcaagtcttgtcgccgttactggactcatggaggtactctccgtgacattcccgtcggtggtgtttcccgtaaaagctcaaaacgttcccggacttattcctctgccgctaccacctccgttgtcggaagccggaactttcccttacaagctacgcctgttcttttccctcagtcgtcttccaacggcggtatcacgacggcgaagggaagtgcttcgtcgttctatggcggtttcagctctttgatcaactacaacgccgccgtgagcagaaatgggcctggtggcgggtttaatgggccagatgcttttggtcttgggcttggtcacgggtcgtattatgaggacgtcagatatgggcaaggaataacggtctggccgttttcaagtggcgctactgatgctgcaactactacaagccacattgctcaaataccgccacgtggcagtttgaaggtcaagag

SEQ ID NO: 2819 - DNA, 546 bp, Arabidopsis thaliana
cacggccgaaacgaaggagcatgagtggcccgtgggcgcgctgagggaagagagagcacggtgcgggtggagactgagctgatggaggtttccaatgaccggaagacgccatggagacggaggtaagttagagttgggtcgtttgaggagtgatttgaagaagagtagaatagttaggaaagtggttaagcacagtgagattaatatcatcatttccattttaggatttttggataaattttgagctcaatctctctcactgtgttgaagtgttttgtgaatattagtgatttgattttgggtgtatcgtcatgtgtctcttggctgtgaattttaaagggaagatggtcaatcatcattctaataatctgaaaataaaagtatatatgatgtggcgtgcttataataattatactattattaatgaacttgttcaaataactactatttacaatgaactagtagttgacccacgctacgcacgggcctttaatgttatttatattaatagaatcgttctttcacatggaagaggaagacatgggg

SEQ ID NO: 2820 - DNA, 562 bp, Arabidopsis thaliana columbia
ttcgaattgaaagaagaaggaaatatagagtcagtgccaacttctctttcttcctccttgatcgtgtcgagtaccttcgccgttcttcgccgcatcaccgtgacaaattgcggtggcgcaacttccgttatgaatcttgcaagtcttgaggtcgccatgatcttgaaaatttagggattagagattggttatgagtgatgttgatgatgagagatgatggaccgagtttgagaggatttttatagtcggtgactttgtaaaatgaaattgttttagtgatttttaacaattattttgtatggtggatactcatcgtagacaagataattttatatttttcttattgttattgggtttttaaaaggaccaagacttcataatcataacacgtgtgtttttagtttttacgtattaaggagtaaacaatatagaagaaacaattatggttggttctaggggaggttatttgtttggactttggagtacaaatcctatcactaagctattacaatggaacaatggctgaattctctatatgcacaagaaagaagaagagaggtta

SEQ ID NO: 2821 - DNA, 480 bp, Arabidopsis thaliana columbia
gaggatcccctatacacttttgccaatctgagtctctgtagtttcctatggttactcagttggcaatttatatacacttttttgatatggttacataatttgcaattggttcacattgatgattcttaaacactaaatctaataactgaatgtatgagatttaagggcaaaagaatcaaaacctcctagacattcccatgaagcaatgaaccaaaacaccaccaccagattgaatagcttggtcgatgaagctataacactcatcgaaatatactgtcaaatcggtctcggatctatcaaccactacacgatgaagaacaagtttataaaatctctaaacgaaaaatttcaaaaacaggctaaggattgaagagaaaaaacccaaccttcaatgactttgtagacaaaatcatcaggataaggaggagccaaggccacagcaacggttaagacatgagtgatattagagcttttgagaaa

SEQ ID NO: 2822 - DNA, 1134 bp, Arabidopsis thaliana
actaaaacatcggggcaaaaatgaaaatcccatggcatgctcagcaaactcacccctcacgtgacacattgcctctatcacgtgatagacgagtaccatttctagatacaactaagattcatatagatcctttaggatttatttttttacagtgttgtatgtttaaattgaacacatttatgccgttgacaaaatttaaaagtaaatatgaggttgacttttgatttataacagattcgtagtatagaatatttacaattgattgaccaacaaaaatgagcaaagatgttaccgtgggtcgattctttacctgggaacttaaatttggtaaaaattagcggcagcttttcttttttaattatgcctactactacatcagaggggtattatagggaactagagtaaaacctaaggacatttccgaccaatgaaaaaaacatggaaaatataagaagggctgagaaaagcaaacaaaaaaaaagttttaataaaccagagaaaaaaaagaaccctcctatcgagttctgtgagatctgcttcaaaagaaaaaaaaactggtggagaagaagaggtgaatcgagttataagcttacgtggtgatgtaaaatatttatatattgagcattttatacatcttcttcttacttgtgtttggtttcttttgggccaaagtattgttttgggtaaaaaatgaggattcggaagaacacgaaactgtcatcggttcttttatcgacagcaggttgcggcggagagagaccggacacgtatgtgtgtcacttaaaccagtctccatgggatgtgattcctgtttcttcctccggcgattgcgagttaactaacctagtcgactcgtcgtggttcctccctttatcgtcttcgtcttcttcttcttctccgcctctcattcacaaggtaattcaattcatttcattatgtgattacatttcgatttcgcttccatgattattgcccagcattatcctccgcctcttattagggtttgcttctttatttttttttggttggtgctcgggggagctttaaagaaccctaaaattatggattttgagatcctgggtcgtttaatctatcgattagggttaatgggtcgtcattattttgctctgttga

SEQ ID NO: 2823 - DNA, 2249 bp, Arabidopsis thaliana
cccagagctcgcgggtttccctccttccgcgcgccctcaccttcccacgtcactatctatagtcagcccaatcctctaaaatccaggataagcatgatgattgaacaaaaaaattacagatcctctacactccaggattaagtatggtgtataaacaaaaggaaaaaaacaatgagacagtatcgaaaggtggcgcaatttcttattctaaaggctgcaaaaggccccagaccaaagtctctgaacaaagcaacatggtctgagatgtgcacaacagaggaaggaaaaggagaaaccacatgtaaaagtttcaagctgaatcacgtggtaaggaaacttacatctttctcagcttgttctctttgtacttgaagatcacgttcatttttctcagcaagtgcttttgcctgatggaaaaaagaattcatgttataaaacatactggcaaatctggtgtcaatgtcagataaaaaaaaacccatcaaataaaactctaatgatacatacagcccgctcctgtgtcctctggtgacgttccagcctggcacgtcgtctctcttcagtttctccatcaacatcttgaaacccaccagattgggaagctggagctttacaattcaggaggtttcagtatgtgaccaaggtaaaaagacatgaaaataaagtgcgtagcgacagaatattatggtcacatcatgaacctcagaaattgcactacctccaaatattgaactgagatcatcaacaatgtttgttgctgaagaggcctttctcaagttctctgtagggccagaaggcactcgcgaagatggcctgctagattcaaaagatcctcctttgttccatgaatcctggaaaggatcctgtaacaaacccagagttatagaagtagacaaatcaccggtaaaggacttaaagcggaacagaagtagataatccatcttaccggagggttggttctctgtcttggaacactgcttggtctagaaaccgagttaaagaaggagtcaagatcattattattctcttgctgctgcttagctttagcttgagcagctgcccttccacgtgcctcagcagctgccctttcaacagcagctcgttctgccctaacctttgcttccttttcccgcacttcagcattcgccctttctctagcttctgctgcagctttctcagccttttctcttgccccagcagctgccctttcacgtgcttcagcatgggctctttgaactgctgctctttcggcgcgctctcgggcatcagtaaccttcccaacagcagctctttgaactttcgcatgagcttcagtggctgctctttcgcgtgcttcccttgtagccctctctaccgcctgtctagccaacagtctttccctttctctttcaattcttttctgctctctttctctctcctctctctccctcgcctgggttttttccatctctgcctccctctctgccctttcacggtccaatctcacttgcttttctctaagttccctttcacgagaatcataattttccgtgtgatcgccttctctacttctacttgccttcaaactttctttctccctcctttccttagcatgcctaaactttgcttctgctttatccatggcatccttcatggcagcagctgatgcagctgcagtagaaaaaacatctgaatcttcaccagaggaaggatcaggatatccattcgcagctgtctgatttctgccaatagaaaaatcgtcgagttcatccatttgagatgctgtcgggctatttacagaagctcttcctgagctaggaacgtgtgagtggtaagcagacgtcggtatagaaggctcattaaccttctttttaataggacgtgtaggtcttggtggtggaggtctcgtaggtggtggagcactcgtaggttgcgtaaagagggggatctcagatacagtaagccacacatcatcagatgattcaaaacttccatctgaattggtaggtggtggagtactcgtattctgcggctctacaacatcatcaaatgaaacattcttagaatggtaaagcccagaactttctactggtgactgggagccactgatgtttcctggtggccttaaatgactcttgcctctactattcatatctggccctgattttccaagactatcgagaggatcagtatcaacaaatactcctccgtggacagatgaatgatcagtttttctgctgttgaatttaccaatttcctccaatggatca

SEQ ID NO: 2824 - DNA, 566 bp, Arabidopsis thaliana
tgctttcggttacgacaaacaacaacaagaaccgtaaccacaaattcttgaggaagtttttggatgatgatgaatacaacaaaagcagtaaaataaattttccttccaagttcgagatatattattttaactctgattcatggagagttcttgatgtcaatcccgactgtgatttagaaagagatgtgtctttgaagggacatacttattattatgctcgacaaaaagaggtcggagagccagtttcaaatcgtattggttttttactctgttttgattttagtgatgaagagactgtgactctatatatcttgtatcagagacgagcagctcgctgtgttatatcaaccctacgacttatgtttggacttggtcatggagatttagataacgactaaaattgagtccaatgcagtatcatgcatggaccaagttcttcacaatggaaaggacatcgctctctggtttttcgagtaaagagcttctttatcgacgaggagaagaaagttgctgtggttccaaatctcgtaagtatagaccgaacgagaactgtggatacgaaagag

SEQ ID NO: 2825 - DNA, 555 bp, Arabidopsis thaliana
tatgaataatgcattgcttataaagtgatggcaaaatttaaaaagaatcggaccttggtgtttctgaagacaccgtctagatcatgtagcgtgagcaaccagttcgccatcctgggactttccatccctttgatatggatccgagtgtaaccactggtacgatcgacgagaattttcccataggaacaaaagggttactaccaaagagtgtccatctaaaaacctcgtcagaaaccaccataatcttgagttccttagccagttcagccagctgcggttcaaaaattatacaagaaacaaacaaggtaagtaagttaatgctttcactagtagccaagactaaagaatctatataattatgtaatacctgtttgagatgagcctcggagtaggtgttccattggggttgtgggggttgattataaatatggcaaatgtgttctcgtccacgagcgctcggacgctatcaaagtcgatttcaaagttcttttctggaaggaaattatagtggcggcctcaaggttcttgtagatggagcggactaggtccatggga

SEQ ID NO: 2826 - DNA, 609 bp, Arabidopsis thaliana
tacacgaaatgcagcggatgttttgaaatggagaaagagaaagataaatgggtcaagaacagtagtttgttagttgattttatgattgaagatgttctgagagtgaagccaagtgagatcaggattggattggattatggtgttgggacaggaacatttgcagcaagaatgagagagaagaatgtgactattgtcacaacagctttgaatttgggagctcctttcaatgagatgattgctttgagaggtttgatcccattgtacatatctttgaaccagaggctaccgttcttcgataatacaatggatatgattcacactaccgggttaatggatggttggatcgatcttcttctgatggatttcgtgttatatgattgggaccgagtgctgagaccgggagggttactgtggattgatagattcttctgtaaaaagaaggatcttgatgattacatgtacatgttcctgcagtttaggtacaagaaacacaagtgggctatttcacctaaatccaaggatgaggtttatctctctgcattgcttgagaaacctcctcgtgcaatttaaggattacaatatgaagtttaagcttcaatgtttgtaatt

SEQ ID NO: 2827 - DNA, 700 bp, Arabidopsis thaliana
ttccatgaataagttttcagggcaggttccagactccataggcaaccttctagcactgaaagttctcaacttttctgggaatgggcttattggtagcttgccggtctcaacagccaactgtatcaacctcttggccttagatttaagtgggaattcactaactggaaagcttcccatgtggctatttcaagatggttctcgtgatgtgtctgcattaaagaatgataactctactggaggtatcaagaagatccaggttttggatctctcccacaatgcattctctggcgagattggagctggtctaggagatcttagagacctggagggattgcatctgtccagaaactctcttaccggccccatccccagtaccattggggaactaaagcacttgagcgtccttgatgtgagtcacaatcagctcaatggaatgattcctcgagaaacaggtggagctgtttctttggaggagttgagacttgaaaataacttgttggagggaaatattccatcttccatcaagaattgcagttcccttcggtctttgtaagtctcttttgctttaggttgcattctgttaagattttcccattgaagattatgtcttaactgtgttctgtttcatgcttctttctacaggatcctgtcacataacaagctgctaggctcaattccaccagagctcgctaaacttaca

SEQ ID NO: 2828 - DNA, 458 bp, Arabidopsis thaliana columbia
gatgaaaagccattttgatgatgatgagtctcaggagaagaatcaactgagaggtggtggtggttgacggagattctggctttccggggacggcggagacgacggcggaggaaagcaatgaggttcaacatactaaaaaaagggcgatcgcatttattaagtctaaaactagtaaaagtatatacttttgagttttgacaatgagagagagagatgatatagatttccttttatacgaagaaatgagagagagagagttgtggaatgtggagtttgctgcacaaaaaagaaggtcatatgagcttcttgggaaaatggtatttggcttacgtggcattatcaactcatcatcgatgttaataaatgtaccaaatccttttcttttttgtgtgtcttaattgtattttattactattattttagaaaagcccaccaatcatttggtttcagtcttttat

SEQ ID NO: 2829 - DNA, 1883 bp, Arabidopsis thaliana
tagatttggtatcatttatggcatataagttagctgagagaagtgcattaatggtggtgatatctaactgaggagtggtatcattttgagtgataaagcctatctgtatctcctgtttttctttatctttaatcagtttatatcagatatgtttggcgtatttaaaatccaattgaccaatatcaatgtaaaaacaaagaaaagaaaatgatgataacatgaatgcttttggttcaatcgatatcaatgttcttgagatattcagtttctctgtagtaatttttatttattttaaatttttaatcgatcgttaaaatctccatacgatttatagccgtccgatgattagaaaatcatggtcaacatgtttaacacgtggaaatagacgattgtaccctcacgagtcggttacccatttcgtacgcattttcaaaatcaccgaaagacttcataattattgttaaaattatcccaaaacatacttattcactaactttcatgacttaactttttattacaagtaacgacaatcatcaattaacgcttaagcataaaccacaaaaagtctaaaatgtcgaaactacccctaatctgccattaacaccgacacaaaaaacctccatctctttcacagttcactctctcttgcctctccactcactcacagactacacaacacagacctaaaaaaatgtcttctctgcgtttgcgtttatgtcttcttctactcttacctatcacaattagctgcgtcacagtcactctcactgacctccccgcgtttcgtgaagctccggcgtttcgaaacggcagagaatgctccaaaacgacatggataccttcggatcacgaacacaacccatcaatcatccacatcgctatgactctcgacgcaatttacctccgtggctcagtcgccggcgtcttctccgttctccaacacgcttcttgtcctgaaaacatcgttttccacttcatcgccactcaccgtcgcagcgccgatctccgccgcataatctcctcaacattcccatacctaacctaccacatttaccattttgaccctaacctcgtccgcagcaaaatatcttcctctattcgtcgtgctttagaccaaccgttaaactacgctcggatctacctcgccgatctcctcccaatcgccgtccgccgcgtaatctacttcgactccgatctcgtagtcgtcgatgacgtggctaaactctggagaatcgatctacgtcggcacgtcgtcggagctccggagtactgtcacgcgaatttcactaactacttcacttcaagattctggtcgagtcaaggttacaaatcggcgttgaaagataggaaaccgtgttatttcaacaccggagtgatggtgattgatctcggaaaatggagagaaaggagagtcacggtgaagctagagacatggatgaggattcaaaaacgacatcgtatttacgaattgggatctttgcctccgtttctgctcgttttcgccggagatgttgagccggtggagcataggtggaatcagcatggtcttggtggtgataacttggaaggactttgccggaatttgcatccaggtccggtgagtttgttgcattggagcgggaaagggaaaccatggctaaggcttgactcgagacgaccgtgtccgttggattcgttatgggctccttatgatttgtttcgttattcaccgttgatctctgatagctgattgtaacatcggacggtggaggaaggcacgaccgtgttttgctgacgtggaataaagctattttgatcggtcgtaataaatacgttggtcaagccacgtgccagatgattgaagaggtggtaggttttgatcggacggtgtataaccattcatg

SEQ ID NO: 2830 - DNA, 565 bp, Arabidopsis thaliana
tcatcagtggcgatgataaattaatcatttttcttaaaattaatgtgtaccaaagcttcgaggtcacaaagaggtccctcctttcaaggccagcgtgcatcgccctctttattccttgaccgaccttaaaaaagagtaagacttgtttacctctaaactcaaaactttcagacaaaacaagtagtagtagtagtaagtaacaaagagagatagagaaagaaacctctctctgatcaccatactcccaagctgtatctatgtgcctatagccaccctgcaaattcaatgggagagtaattactggtcaataacaagtaaagctctgtgttaatgaaagctgaaaacaaaattgagccaaaaaatgaaccaaaactatggtttgaaggaatcaggaaaaagaaatactgattcttgtaaagacgaatcacctcgacgattgcagtgacaacggcgtgggcggcttgagacccagatcgccacgtgccgagtccaacggctgggattttgtggcactcaagagtcgaacgactccatattctgcccttccgacgtaaacgtggcatgt

SEQ ID NO: 2831 - DNA, 608 bp, Arabidopsis thaliana
gagtcattaaaaggagatgatgataggtgggtgacggataaggtggagctggaagctatggctttaacatattataagcggctgtactcgttggaagatgttagtgaagtccgaaatatgttgccaactggtggctttgcatccatatcagaggcggagaaggcagcgttgctccaagcttttacgaaggctgaagtggttagtgcggtgaagagtatgggacggtttaaggcaccaggacccgacggctatcaaccagtcttctaccaacagtgttgggagacagtgggaccctcagtgacgagatttgtgttggaattcttcgagacaggggttttaccagcttccacgaatgatgctctgcttgtgttaatagctaaagtggccaagccggaacgcattcagcagtttagaccggtgagcttatgtaatgttttattcaaaataattacgaaaatgatggtgacccggttgaagaatgtcatctctaagctaattgggccggcccaagcgagtttcaccctgggcgtttgagcattgataacattgtgttagtacaagaggcagtccactctatgaggaggaagaaggggcggaaagggtggatg

SEQ ID NO: 2832 - DNA, 629 bp, Arabidopsis thaliana
catatttgtttccttccatgttcagtaaatcatggcacatagcatcatatgtccactcatgtataacaggggcaatctagacattcaaaacaagcaaatgctgctaatcatataacacttgtagaggaggaagcatgagctccataagtagatgtatgcaattgcgattaataaacgaaacaaatattaggcgcatcaaatgtaaacaaatgttataaacctggtctatggatctgtcaaggatgagtagctcgcatgtttcagtttgaggaaaattttcaatcgactgcttatgttttgccagacaattccagattccagctgcaagctttgttggaattaaatcgcgcaaagttgtcattgtcgatgcatcaagtgactttgcagctcggtatcgtactgctgggaattcctgtaacgtccagaatgattcagaagagtcatcagcataatatagtcatgttaatcgtgagaataatgattggtacatgcaacgaagcaaagactgtagcaattcgagaagccatcacattcaagcacgcatcgccttttcgagaagtttcatcatcaccaaatctatattaacaaaaaaatattgtcgacggttggatttacattctcggggatcc

SEQ ID NO: 2833 - DNA, 571 bp, Arabidopsis thaliana
ggagaaggaatcttaaccgttgattttgagttgtgggaggagatgaggaagtcaaatcacgccctattccacaatcaagatttcatcgagctctcagtaagtagcaataaaagtaagttaaaagaaggtcttgttccttttcttgataatgctgctcagaaaaacattatcatagaattacaagatgtgttccagagattcatgtttgatacttcttcaattttgatgactggttacgatccaatgtcactatccatcgaaatgctggaagttgagttcggtgaagctgcggatattggcgaagaagcaatctattatagacatttcaaaccggtgatcttgtggaggcttcaaaactggattggtattgggcttgagaggaagatgagaacagctttggccactgtcaatcgtatgtttgcgaagatcatatcttcaagaagaagagaggagataagtcgcgccaaaacggagccatattccaaggacgcgttgacgtattatatgaatgtggacacgagcaaatataagctcttgaaacctaataaagataagtttataagagatggta

SEQ ID NO: 2834 - DNA, 630 bp, Arabidopsis thaliana columbia
tgaaagagttttgctttattagctacattgtggaaaattgaaatcctaatgtacgtttattagctacatttagccaatgaagctttcgttattttaaaatcttaaaagtcctcctaaaaattattcataacagaacaccgcggttaataggcccattaataggcccgataagaatcagataaagaaacattccttcgatttacgtttattgacaaatgacgaacacggcggcgacaacggaggcgaagatggcgacagagccaccaaagatagtgtggaacgaaggcaaaaggcgattcgagacggaggatcacgaagctttcatagaatacaagatgagaaacaacggtaaagtgatggatctggttcatacttacgttccttcattcaaacgaggattaggtttagcttctcatctctgcgtcgccgctttcgaacacgcctcttctcactccatctccatcatcccttcttgctcctacgtttcggtacgaatttcttttaaaaatctactcgaaattctggatcttgaaattgaattcgtgagctttgtgtattttgcaggatacgtttcttcctcgaaacccatcatggaagcctctgattcattcagagtattcaagtctagca

SEQ ID NO: 2835 - DNA, 790 bp, Arabidopsis thaliana columbia
tccatcatccgattgtccgtgagctcgaacgcgttgaagaagagaatatccatatgccgcctcctaggaagcgttctcctcgcgctatcaaacggaaaccaaaaacaccaaccactttagtcgaagagtttctcgacgagaattcacagattcgacatctttttttccctgatatgaaatcagcttttggtcctaccaaggaagatactaatgacacatcgcattactacttcccggggagaatttggacagacacggaagggaatccgattcaagcacacggtggtggcattttgtttgatgacatatcaaaggtttactattggtatggtgaatataaagatggaccaacttatctttctcacaagaaaggtgctgctagagtaagttttaaccgtttcttgctttccattaatgtctcactcttggactttagaattagaatgtgaaaacagcttcttggatttgtttcaggttgatataatcggtgttggatgttactcgtcgaaagatttatggacatggaaaaacgaaggtgttgtattagcagccgaagaaacagatgagacacatgacttacacaaatccaatgttcttgagcgtcctaaagtgatatacaattcagatacaggtaagtacgtgatgtggatgcatatcgacgatgcaaactacactaaagcttcggttggtgtaccattagcgatacccaacaggtccattcgattacttatacagcagatcgccacacgggtttgatagtagagacatgacagtcgtacaagacgatgat

SEQ ID NO: 2836 - DNA, 598 bp, Arabidopsis thaliana
caacgagatggtttcttgaaagattcaagtaattcaagatcttcatacctgtgagttcattaggaatatcacctgagagctcattacggctaagatcaacaaacgttagcagcttacaacgactgatctccggtgcgatccgaccggagaacagattgtggctaaaatccaacttagatagctgctgaagcctcccaatctcgggaggaatcgaaccagagaacttgttaccatcaagaagtagtttttgaacaccggacaagtttccaatagctgcaggtaatgaaccagagagctggttattagaaagactaatctgaccaaggtcaccagagactcctcctccgcttattggcaactctccggtaaggtaattgtcttggagctccacttgagataatttaggtaacccgaagagctcctttggaatcgacccgttaaggaaattctcacccatccggatccgggtcagagactcacatttaccaagcgaatccggtattgaccaaacaagaagttgccaagagtgattaacgtcattaaccggttacagaacacatattcggcggcagagttccggtgagtttgtcgaagagag

SEQ ID NO: 2837 - DNA, 1153 bp, Arabidopsis thaliana columbia
gaaaagacagaaaagtatgtgatgtggatgcatatcgacgatgcaaactacactaaagcttcagttggtgtggccattagcaatagcccgacaggtcctttcgagtatctatacagtaaacgtccacacgggttcgatagtcgggacatgactgtcttcaaagacgacgatggtgttgcttacctgatatattcgtctgaagtcaatagtgtgcttcatattggacccttgacggaagattacctcgatgtgacaccggttatgaagagagtaatggtgggacaacacagggaagctccagctatcttcaagcatcagaatatttattacatggtcacttcctggtgcactggttgggcaccaaatgaagccttggctcatgcggctgaatctataatgggtccatgggagaaattggggaacccgtgtatcggtggtaacaaagttttccggttaacaacattctttgcgcagagcacttatgtgattcctttacctggtgttcccggtgcgtttatattcatggcagataggtggaacccggctgatttgcgggattccagatacgtgtggttaccgttagttataggtggacctgctgaccagcctttggagttcaacttcgggttcccatcgtggtccagagtgtccatctactggcacagtaaatggcggctgccttaaagacatacaaataaccaaatatgttcttacgatccgtcagtgctgatcattgttgttgtcttgttgatttgttttgtagattaggcattcatacacaccactgtaaggattatacttaataaatctttttactgaagatacagcctcagctcttggacatcaaaggttcaatgttatacaaatgcgtttgtgacttgggctgttatacaaatgcttttgtgacttttgggctccatcaaaactagtcaactttattacacagctccagattttggacatcaaaggctcagtgttgtcatacaaatgcttttgtgacttggtctctatcaaaactagtcaacggttttacaaagtaggtagagaatgttttcaattaccagctagagaaatctttaaacagtgtggaggctgacgcagtagtttttcttttcttagacactccgactggttgaaatatctgagtctaggg

SEQ ID NO: 2838 - DNA, 810 bp, Arabidopsis thaliana columbia
tatcacgttgtctggaaaaggtgaagacttcacagttaacgaccaaagactaaagaaatatatgacagaccaaacaattccagaaggaacttctgttccactggaagagccacccaacccccaataagcgtgaggagtcaagctagagactctaaacaagctcacttgggaggaaattccatgactatctttgtatataatttaaactttcttattgttttctaactcactttggtggtgttttaatcttaggaaagtaagtgacaaaatcaattacaggatgaatagtgatctacagggtgaatagtgatctacaaggtgaatagtgaattacaaggtgaatagtggagtcactcaatcacgaagtcaagacgattttcaaacttttcgatcgagtgatttatttccagggaagtaacagttcgaaaattttgataacgggtcactgcacgttttcggtcaagtccaaggtgtgattgagtacgtggagtgggcgaaatcaggccatcacttcccaatgacaaaaccggtgaagcccaccttgtcccccatgacaaaaatgtcaacaattctatagttcttaccacccacctctcatcacgtttttgccaagggaagagctctcctcacctacgtacctcacctacgtaaggagcgcatctacctcctgctattcctataaataccaatctcctcatccaatgttaatcacacacaacaacatctctctctctctcatactcaatcgcaagcttctctgtctttaagcgatgcctcactcgatcgcaagcctctccacccttggaagtt

SEQ ID NO: 2839 - DNA, 854 bp, Arabidopsis thaliana
cggagctgaacgaaggaacgaaaacgtgcggtgacccgtttaaatccaacgcgtgatcgagtacatggagtgggcgaaatcaggccatcacttcccaatgacaaaaccggtgaagcccaccttgtcccccatgacaaaaatgtcaacaaaccaatagttctcaccacccacctctcatcacgtttttgccaagggaagagctctcctcacctacctaaggggtgcaactacctcctcctctccctataaataccaagctcctcatccaatgttaatcacacctcacaacaacatctccttctctctcatactcgatcgcaagcttctctctctttaagagttgccttcactcgatcacaagtctctccacccttggaagcctacttcactagaccgcaagctcccgacgcctcgtctttcactcgatctcaagccatcctcatcaagtccactcgatcgcaagctcccgagaaacggctcttgcctctttcactcgatcgcaagctcccgagacgtctccacgtttgtttctctccctcacttactcgatcataaccactccgagttcctgtcaacctcttttactcgatcgcagtattgttgaagttcaagaagtcactactctcacttctcccccttagatttgataactaacatactaaagtttagttgtgagttttgatcaattccaggaacaatgacctcatacagttacgattcatcaatggatgtcgatgttaacattgacgaggcggagtcatggtcaacaagaccagagagagaagcggaggaataccaacgtttccgagaagaaacagagcgagcagtcgccaatgacaggagaagagaagaga

SEQ ID NO: 2840 - DNA, 605 bp, Arabidopsis thaliana
tgcttgcatattggggaacaggatgtgttgtgaaaggtgactgggaaaggtatccttactacttacaattgcttgatgagatcagaatcagggaagaatttcagcttaggacttttggaaccaaaagggaagatgatgttaggtattgttgggatttctcctgaaagaacagctttatttttagattgagattggtcgcagtcactaatgttgtttactttggaatgatacttgacacaggtacaaggtgggagacatgggtgtgaaacatgctgaaccacggttaatgcctaagaagcataggagagagtcaaggaagaaaacgaaacagacaatgatcagtgagctggatgagttcgaagatgaagacagtgatttgtacatagagaacgacccaatcgtccaagccattgagaatgagaataaaagacaatgagagaactcaagtttccactataactaagtcacatgatgtaaaagattgtacagatctttttaagttctcagctcttttgtttgtctgaattattgactaatcgaactatcgaactaaccaaaacttgcagaaccatgatcactgatttcataagtcatagaacgagaat

SEQ ID NO: 2841 - DNA, 502 bp, Arabidopsis thaliana
caacagcataactattagggttagactgaagcatgtcacgagcaagatcaatagctatgattccagccgaacatcccatccctccaaggttgtaactaagtatgttccctctcatcttgtaatggtttatcaccattgcggacaacgacggtgtcgggttgaaaatgctacagttaaccacaaggacaccaacgtctttaggttttacacgtgtcttctcgaagagttcgtctagtgctccaaagatcactgtagaggcttcttcacgaccttctttcatcgttgttatgttttctgatgaagagatggatcttgggacgtatgtctcgtcgcctatgcctgaggcttgtaagatcctcttcttgaaaccgagtgtctcttcgtcgaacttccctgattttctcgctagttctatgaactcttcttttgtcacctaacacaatccaatgcaaaaagagattaacccgagagaacggaattacatgaacttttgtttggtttg

SEQ ID NO: 2842 - DNA, 584 bp, Arabidopsis thaliana columbia
ccaagatacagatttacatattctagatagaaattaaacccgcaaatagcataatgagctcttctaggtcttgttcttcctctctaaacttacatcaaacttaatagtgaaaaaaggcattggtacaagagtgaagtacctttccgagagatctctaatgaatctcttcttcttatggagagttgaacattacttgtgttgctatgtagaaggaacattgaagtggaagagccatgagataacaaatgcaaagaccatacaagctaaaaggaaattcaagaaccggtgaccttgccagaagcttctaccttccaccaatcgtggaccagatgttctcagagttagattctctacaccatttgcttcattccggctttcctcagactccacctcaacacttccaacaacattacccgcaatcgacccacaaacttcacagattctgcaaagcaaaaccaaaccatgaatctcatcacaaagaaagaaaaagctaagctttgcgtctctcatctgacaacaaatggcctcaaaactgaaacttctcaaaaagacagtcaaaagaaagctgttcaataaccaaaagt

SEQ ID NO: 2843 - DNA, 872 bp, Arabidopsis thaliana
agatatcatacaagaagaaacaatggtggaaggaggaattgcgaaacaggacaaaacagagttcacagagtgttggagaacaacatggaagacaccttacatcatgcgacttgctctctccgccggaatcggaggtcttctcttcggttacgataccggagtcatttccggagctcttcttttcatcaaagaagattttgatgaagttgataagaaaacatggcttcagtcaactattgttagtatggcagtggctggagccatcgtcggagcagcagtcggaggttggatcaatgataagtttggtaggaggatgtcgattcttatcgccgatgttcttttcttgatcggtgcgattgtgatggcatttgctccggctccttgggttatcatcgttggaagaatctttgttgggtttggtgttggtatggcttcgatgacgtctccgttgtatatctctgaagcttctccggcgaggattagaggtgcacttgttagtaccaatggtcttctcatcactggtggacaattcttctcgtacctcatcaatcttgcttttgtccatgtaagtgaaaatgatttagtttcaagttcttgtgtattataaccaattcaagaatgtctctaaatttgattgaaaatgttgttgaatagactccgggaacatggagatggatgttgggtgttgcgggagttcgagctattgttcagtttgtgcttatgttgtcgctacctgagtctccaaggtggttatatagaaaggacaggattgcggaatccagagcgattcttgaggggatttacggggctgacgaagtggaggcggagatggaagctttgaaacggtcagtggaggcagagaaagcgggggg

SEQ ID NO: 2844 - DNA, 528 bp, Arabidopsis thaliana
ttttaagttagagtaactctaaaatatagtagagtttttttttttttcaatgtaccactctatttttctttaaaagtgcaaaaaatagagttagtctaaatgtaaagcaaacatatattttactctattttagaatgaagttgtaaagaattttgctatgtaataaagtttaggaaaaaaagtagagtagacttggagatatacccttgataaaaaatatcaatcctatatcccaacgaaagtgaaagacatgtggttcatggaatgttcctagtccgttattagtatgcatggtcttatatataaatcgacaaggaaataaaagaggtaaaaataccattatgtcgtggcttagctgcaatgtgtgtaatgttagcttctttaatccaggtgaattctgtagtaacgttgatataccagggattacagatcgaacgaactccgttttaacagtcaaagtttggaccttgagcgttgggaaaggacaccgcggacgtcggcgagagatagaatctgcaaaacgagatg

SEQ ID NO: 2845 - DNA, 527 bp, Arabidopsis thaliana
taacagcgtcataggatgaaaattagccttgatatctaaaacactaataaggcatttactctaaaacactattaaggcatgaaaagaatcgaaaacattaactctaaaactctatttaaggcatgaaaaattagccatcatatctgtgcatatccaaccgcaaacgtagtagtacatgaaactaaactttcaatcaatgaatatctaaagttcattcttagcagatcctgaggtctggtaaaagaaaaaagacataataacttagtttaactaagagagagagagaacctatcgacgatgtaactgaggagagaatcgctcacgaagtgttcaatgttaatctctagcaagccaccttggctgagatcaacaatgtgacggcacatgctctcgaaatcgaactcgtacatgaggcagtctcgcaagttgattttccgcacatggaagggtctttacagatacgtcgccacgctctgcacagtttccgagcgttatccagtatatcagtcacgctaagtcggagcagg

SEQ ID NO: 2846 - DNA, 814 bp, Arabidopsis thaliana
tgctctaaagaaaagccgcgaaagaattagctcaggaatacatggcagcggtgatcctcacactcaccccattaatgaccaaaacacaaagccagaaaaaactgcagtcgctactaacggcggggaaaaacaaacgttattacaccgcgacagaaggtgcactgcgttatgctgtagcggagaacggcgacaagcatctgaacttcgctgttgaaccgattaagctggcgctatctgaatcgcttgaaggtttgaataaatgacaaaaagcaaagcctttgtgccgatgaatctctatactgtttcacagacctgctgccctgcgggcggccatcttcctttattcgcttataagcgtggagaattaaaatgcgacatcctttagtgatgggtaactggaaactgaacggcagccgccacatggttcacgagctggtttctaacctgcgtaaagagctggcaggtgttgctggctgtgcggttgcaatcgcaccaccggaaatgtatatcgatatggcgaacgcgaacgtgaaggcagccacatcatgctgggtgcgcaaaacgtggacctgaacctgtccggcgcattcaccggtgaaacctctgctgctatgctgaaagacatcggcgcacagtacatcatcatcggtcactctgaacgtcgtacttaccacaaagaatctgacgaactgatcgcgaaaaaattcgcggtgctgaaagagcagggcctgactccggttctgtgcatcggtgaaaccgaagctgaaaatgaagcgggcaaaactgaagaagtttgcgcacgtcagatcgacgc

SEQ ID NO: 2847 - DNA, 876 bp, Arabidopsis thaliana
ctaaaggcaaagaccagcacgagatccgcccaaccatcgacacacaaaagtgcgttactacgtggtgcgtttcccaggctgacttctcgcgcaaactggataccttccagaccgcgcctttgcagttgatcctcgacgggcgtaactccaacagtgctcaaattgccgccaactacatgcaacagatcgtcaaaaattatcagcagtgagctgctggaaggaaaaccgaaaccatatcaacagcgagctggtggtacgcaactggtataacccggatctcgactacaaatggtttgtggtgccgtcactgatcgccatgatcaccactatcggcgtaatgatcgtcacttcactttccgtcgcccgcgaacgtgaacaaggtacgctcgatcagctactggtttcgccgctcaccacctggcagatcttcatcggcaaagccgtaccggcgttaattgtcgccaccttccaggccaccattgtgctggcgattggtatctgggcgtatcaaatccccttcgccggatcgctggcgctgttctactttacgatggtgatttatggtttatcgctggtgggattcggtctgttgatttcatcactctgttcaacacaacagcaggcgtttatcggcgtgtttgtctttatgatgcccgccattctcctttccggttacgtttctccggtggaaaacatgccggtatggctgcaaaacctgacgtggattaacctattcgccactttacggacattaccaagcagatttatttgaaggatgcgagtctggatattgtgtggaatagtttgtggccgctactggtgatacgagcacgacagggtcagcggcgtaccggatgtttagccgtaaggtgatgt

SEQ ID NO: 2848 - DNA, 658 bp, Arabidopsis thaliana
ctttcttcatgatttctattccaaacagtttttctgtaagtttttctaatgtttttagccgtggatcttgtttaaaaatgttctggaacaaatatattatctctctgtagttatggaagagccaagcagaggtacgctagaggcagggacgatgagaaactcagccctgctctccaccttgcttctgctgctgaagcaggggccttggtgagtctaacaggcgccataaacatctcatttctcctatgttttttcgatctcagtatcaagggaatgatgctttcaggtctgtttatgcacaaatcctatttggcttgtcaaaacaaggttacagcttcagacacctcttcatcaaactcaaccatactcagggctattaggtttgcaatatgctgcacacacaaaattcagttttcattgtttctagtgtttcattctaaatgtgtattttgtgatcttaagatgcctttagaaccatagtgaaagaggaaggacccagggcgctctacaagggtattgtcctggtcttgtactggttagtaactatcctgatctatctcttgtaacgttcgttcgtaaaactaccacaagatccacagttttggaactataaaagatgactattagttgcgaaagaggaggcttacagattgaatgg

SEQ ID NO: 2849 - DNA, 721 bp, Arabidopsis thaliana
atttcgcatttcacgtgccaatttaaccggattattctattcatacagttttttattctattgacgaaaatcgaaccaaaccgtaccaatcagatcctaaccgaagcagagttagtcaagttctaagttctgaccaacaacaacaaaccccatgatgcatagtcaaaaacttggtagtttttttgttaaacaaaacaaagactaatagtaacacacatgaacccccacacgtctctcaaaaacgtaagaagcttcttcatcatcgaataataacaaatttacagaagaatatgtaaatttgaagaacgaaaaatacatttacatcaccaatactagtcaccataagagggaagagcaagaagaagttttttggttaagtttctatatatctttctcctcaaggtttactaagatcatggctgcttctctcagtcggagaaccagggacaaagggaacgaatccgcgaccaccaaacacaggacgcatgaaggcatcatcaaactgtctccagtaatagtggacagtccgtgtggggcgcatgaggaaacctcgaaggctgtttggtcgtggcacgtcctggtggctcccaggtaactcaaatgaatctagctgttcaccatcgaggagcggaatgtggattgatttcggagtgctatcgtccgataacatactcgtggtactggtggtcgctttttggtgtggcattaggtatctaatcag

SEQ ID NO: 2850 - DNA, 581 bp, Arabidopsis thaliana
gcatcatattatatgcatacatagctctattctctacgcgtcatgagtattgaatgcttccatacatattctttactcttttttttggtaccttttcgtagaaaacaattgaacgtgcggggaagcatctttgctctgtggtttatggttcgttgcctccagagactcgcacggcacaggtttgagttccttactgtcttggctataggcttaactggatgctctaagaattatctttttttgtttccaaatgctttaaaatctgcaggcaacaaggtttaacgatgagaccaatgactttgatgtgcttgtctgccagcgatgcgattggcatgggtcttaatttgaatatttcaaggattatcttctcgacccttcaaaaatatgatggttccgagaccagagacctaacagtatctgagattaaacaaattgcaggtaaattttcaacaaaaagcaccaaataatacatcaagagtattggtatgcctctctaatgttctgatgatcctgttgtagggagagctggcaggtttcaatcaaagttccctattggcgaagtaacttgtttgccaaagagg

SEQ ID NO: 2851 - DNA, 784 bp, Arabidopsis thaliana
gctgtttaaagagcgtttctctcctcgcaacgggactggtgtgattgttatttgccccacaagggaacttgctatccaggtaattttcgtttttattaacttaaggcattttcaacttggtagcaacaaccatgctgtcatttcgagtagatatgtcctgtaattgttgtaatgcgctaggtagatcagatctgtaaggttctcgtttttcttctagctgaatcattgatattgctttgtgtttgtaaagtatgagcatcgttgtatgttattgcggcctcccattctggttttcactttactattttgatattttagactaaaaatgtggcggaggagttactcaagcatcattcacagacagtcagcatggttattggtggcaataacagaaggtcggaagcacaacgcattgccagtggttcaaacttggtgatagcaactcctggtcgtcttcttgaccatcttcagaatacaaaggctttcatttataaacacttgaaggtactgtcctttccattgttacatttggcgtgttgtctagtcttctttgtgtgatgtaaatgcaaaacgctttactgttgagccacatggccataatttccagtaaacaaacaatattatgtaaaggagcccatagataaatatttgacctgttgacaacagcttatgctatattacttctgttgcatcaatgttagacttacaaatggaatactgccgatgtgatcacacatattccgtggtttgtttaggtttgtagcttgggctgtagcaatactaa

SEQ ID NO: 2852 - DNA, 734 bp, Arabidopsis thaliana
cctaatgtgccaggcaattgctctccttcacgatctgggtccgatgcaagaatcagattttcagctctgaggaataaggtaaacataatgagatagataagcacaataagaaaaaccataggaaagaagtagttcatatcatacaagtttgaacaagccacatatctcaatagctgtacagcactttgacacccggaaagtattctagaattaaggaatatagataatagcaacaatagatttttaaagtagtgattaggcaagaaaccgtacccatttaatgcaaccttaatgctcttaatatgagtccaggcggaagatggaacctcccaaaccatgctaaaatcgtcatctggcctcactgaaccagaccttgtggccaggtccctgatatgaccataacttggcaaaacctcatacatgtcaccaagataaccctgaataatctttgcttttgtcattgactcaacgacaataacagattttccacttggcggataaagcggtttagatgcattttgacctcgatgttctatgctgtttttcatgtgttgaggaaccagcttttgttttggtgccttacttgctttagttgacttcaaatgctgttgttccgacttggaatttgatggagcaggacttttgggctcttccacagggtgattttttgccactccttctgagaattgtactgttactctgttaggtaaaataagcaagggtaagactattac

SEQ ID NO: 2853 - DNA, 1257 bp, Arabidopsis thaliana
ccttcattcaacaatctcgaagagatggacactgcaaaactggtggtgggagatgatgggaagatcatagtgatcaaattcgacgtggactctgttaagttgttgctactcttagctcagattcacacaaggaaaagtataaacccaaacttagagaattatgatcgaaagagagattcaaattgattatcaaagcaataaccaaatcaaattcgaatatcaaagatcgctcgctaaatgtttgctcacgatctacaagtaatcaacatagactactcactggaacatctccaggattattcgccctctctcaacaactcagataaaagacataatgaaagagaaggccaccaacgactatttaagcatcttcagtcgtaacagcaaagcctccctctggaatagagtctttctcttccttctcttcttcagcaaagactctaattccttcagtgtctttctcatctgttgactggatccaacgtggcattgaccgcttcctgtagtaagtctgatgaaccgtatcaatactctctttgtcgaaaatcagcttgtcctcaagcttgaaagttggaaacgcgagaacaaagtctttggataacatccaagagttgtcagtctccggatgatcctgccattgaaccaaaaattcacggctcccagtggcggtataacgaacctgtaaaacacgttcaggaaacagaaaaacatcctctacagactcggaagctctgtaatctgaatctgttgatgaggtcccagtactgccttgagttgagacacatggaaaacatcatgaattttagatccccctggtaattgtaaactatagaccactgcttcaatcttctcaataacacggaatggaccaaagaatttagctacgagtttgtgacagctgcgacgcatcaccgtgttctgacgataaggctgaagctttaagtaaacctagtcgtctacttgaaacaccacatcacggtgtttcttatccgcattcttcttcatcttcctgagcacgaaaaagatttccccgaatacgtgataacattaaatctctttcccttagttgaacttccaaatcccaattgttattggagccagcttcaaaaggaacgactgcggtggctccttaccatacaccatcataaacggagtagtcttgatggctgaatgataagatgagttgtaagaaaactcagcccaggccaagaatcggtaccaagtcttcgggtggctagaggcaaaacaacgcagata

SEQ ID NO: 2854 - DNA, 606 bp, Arabidopsis thaliana columbia
cagcctcatgaccagtaagaaaatcccgtataagggatctcagctcctcaagattgggagattgtgacacagtcagaaacaaaactcggttcgcaaaatggcctgtattaaagcttttttagcatcaaaggaacagtctctccgactcttaacagattctaatatcaagaactcaactatacgactcatcaacagttcaccggagatgaacatgacacaatggaacatacagagataaatgcatgatcatccaaataaaccagtaaacatgccactgagcaacaacataaactgctcaaaagacttcaaagatggcccaagcatattaacaatggatagtttcagacataacaaagggcaaaactgattacctcggacctcctcgtcccgcgcaacgtccttggcaagaatggttttccctgaaccgatcatccctgagatcccaataattcttgcctcatcgttcaaattaaaaagcatctccttcaccttcctcttgcctaaatccagttcccgaagtcagaaaatatgacacagtcagaaacaaaactcggatcccaaagtctttttagcatcaaatgaaggacttctagcatcagagacaca

SEQ ID NO: 2855 - DNA, 999 bp, Arabidopsis thaliana
tatgcagataaagagtctttggctgtaggaactgatttgcttgtgtttggttgggaagtgagttcttacgtaatctatagatacagtcttttgactaactcttggtctactgcgaagagtatgaacatgcctagatgtttgtttggctctgctagttacggagagattgcggttttagcgggtggttgcgattcgagcggtaggattcttgatactgcggagttgtataactacgaggatcagacttggttggtgttacccgggatgaacaagaggaggaaaatgtgttccggtgtgtttatggatgggaagttttatgtcattggtgggattggtgttggggaagagaatgagccaaaggttttgacttgtggggaagagtttgatttgaagactaggaaatggacagagatccctgagatgtcaccaccgcggtctaaccaggggaacggaatgtctgcagctgcgatggctccaccgcttgtagcggttgtgaatgaccagctttatgcagctgatcatgctggtatggcggttagaaggtatgataaagagaaacgtgtttggaataaagttgggaacttgcctgagcaagcgggttcgatgaacggttggggtttagcttttagagcttgtggggatcggattatagtgattggtggaccaaaggctccaggtgaaggattcattgagcttaactcatgggtaccaagtgttacaacaccggaatggcatttactaggcaagaaacagtcggttaatttcgtgtataattgcgccgtgatgagttgttgaataagtgaaataaaactgcaaaagagtgattttagaaaataaatatatatttctctgacaaaaaaattatacaattaattacgaattttgtaaatatattattataacttgtaagaatataatcatttttcttaaaaaacatatacttcatagttaacgagatacaattgatacctaatattgtaaggaaattatcaaattagt

SEQ ID NO: 2856 - DNA, 618 bp, Arabidopsis thaliana
tgagttaaaaatcctcccgtggatggatgcgccaagacttgggcttgtggagcccaaaaagggatcacaaaacctctttttttagtccgctctaaaaatcccggtggtaaaaatgtcaatggatctgtttggctatgtgaatcaaaatacgacgaattagcgatcccactaggacttcgtatgacccaaagaaaccgttgctcactatctgcaagaccaagagcaagctcattgagctgctcacatgtgagggtaccgccactaccaaaggacacatataaaaccgaaccgagcggctggttatccaaccactttaaacattcagactcttcggtttgcttagcctcttgcttaccaatgttaaccaacggtccaaccggataaaccggtggtttatcaagacccggttcttgcaaggcctttatagcatttggctctagctcaaagaaggtattcacaagaataccttcggcttctttgtacctcttggtgttatggagaagccatttgtatgcatcgtctttccggtcttgggccgggtcaaggaaatctttcccggcaaccggtacacatccaggaagcataagcggttcggttaatccctgaactcacacgaca

SEQ ID NO: 2857 - DNA, 507 bp, Arabidopsis thaliana
caatcctaagtcactggtgaaaaccatggtgaagatttatcctcacctggcgtttccggtggatatggacgtcgtacaagacaagattttgccctacttaacgacggagcaagagagtttcacgatttggatgagatctcttgtgtttcatagcaaaggctgcacagtttttgattccaaaggaaacttaatctatcgagtggataattatgattccaagagttgtagtgaagtttaccttatggacttatacggcaaaatcttgtttacattacgtcaaaaggtaaacaataaaacatatcatcttatgttcttatagttttcttagaagtattttgttctaactcttttattttcttggttatagaaattgggattattcaaatcttggaaaggatataactcaaccgggacaagatttcaactaagaaaaaacttcaagatattgccaaagggttcaccttcatcatacaaagttgtaatgggatcgcgtatagttgatggtga

SEQ ID NO: 2858 - DNA, 571 bp, Arabidopsis thaliana
tgcagcatggaactttgttttcagagccaaaaaagttggagagtgtacagagtaatattactatgccacctacagagactatattcgaaaacagttacgaggatcttagtctttcgaggttccggtacgatagttcctcagttgggtctcatggggatatggatgacttttctgttcccaaggattcatttagccatctctctgagctagaaacagatatccctgttgaaacttcaaactgcattgtcttatccaacgccgatatggttgaacatgtccttctggactggaccctttgggtaacatcccctgtttccatccagattgctttacttggtttcctggaaaatttggtttcaatgcattggtacaggaatcacaatcttacaattctgcgcagaatcaatctggtagaacatttgttagtgacacttcagagaggtgatgtggaagttccggtcctagaaaaattagttgttctgctaggatgcatcttagaagacggattcctgacttctgagcttgaaaatgtcgttaggtttgtgattatgacatttacccacctgaagtg

SEQ ID NO: 2859 - DNA, 542 bp, Arabidopsis thaliana
aaatgtgtgataatgtcaacaagtgtatctgcctgcaaagtgcggtgaaaggaaagtcttaccttgacgttttggtcatcgtacatgatccactgatcgtgctcatgactatatgcaaaacagtgataatgctgtccataataacaaacctggagttgcagagataccaaacaaaaaaaaaacattttagggtgaaagcaaacaatgaaaacacaaagtacaggcagtttcaagttcgacaccatttgtcttgtactgtcatagggaagaagaagaagaaatgcgtaccacggaaactaagctatatgtgttcttagggtccacaccacggtacatgatgctgatgtctatctctgtattcaaagctgcaagagtagcggctatgtcttctacagtctcacatgtgttttgccaccctaaaactgcaagtcccaaaatatcagtgatcagaaaaggtttgcagtcatcagaatcctagaaaaggtttacctatagtaaaaacatgtggtggagtggtgagaatatggtggatatggttgcgt

SEQ ID NO: 2860 - DNA, 926 bp, Arabidopsis thaliana
cctaataggtacatgcgctgaaattcatttgatgacttcttaaccttgcgagatgaaccatcaactagcctgtgatcccgaaaccggtgggtgtgggaactcaaccatatccaccatattctcactactccaccacatgtatttactacaggtaaaacttatttttaggattttgatgaatggaaattttttcagactgctgatatttgtgtcttgtcactaattattttggggctggcagttttagggtggcaaaacacatgtgagactgtagaagacatagcagctactcttgcagccttgaataccgagatagacatcagcatcatgtaccgtggtctggaccctaagagcacatatagcttagtttctgtggtacgcatttcttcctcttcttccctatgatattatcagaagagtcgttaaaacaccagctatgtgctgtgttttccttgtgtgctttcaccctaaaaacctcaaggtaacaaattgttcttttgctatttctgcaactccaggtttgttattatggacagcattatcattgttttgcacatagtcgtgagcacgatcagtggatcatgtacgatgacaaaaccgtcaaggtaagattatcaatgcaatgggttttgcgggcagatgatacactcgtggacattatcagccagtttttgtaatatctttcaggtgatcgggtagctggatcgctgttctttcaatgtgtggagagaggacacttgcagccacaggttcttctctacgagagacgttataatagataagaagcaaaacaaatgcagaccaagtagagttcggttgctacaatttaggagatctcgtaagtacatactacgaaggaagtaagtacgtttttttgacaagcagaagtatactcgagaggaaagattgtgattttacactcatct

SEQ ID NO: 2861 - DNA, 537 bp, Arabidopsis thaliana
actctgtgtaaatttcaatatgaaacttcttcagttggatctcatggggatatggatgatttttcggggcgaaaagattcttttagtcatttatctgagcttgaaatgggagataatcctgttgaaacttcaaactgcattgtcttatccaatgcagatatggtggaacatgtcctcctggactggactctctgggtgacagcccctgtttccatccaaatcgcctcacttggttttctagagaatctcatctcaatactctggtacaggagtcacaatcttgcaattctgcgtcaaatcaatctggtgaaacatttgttagtaacacttcaacgaggggatgtggaagttcttgtcctagaaaaattagttattcttcttagatgcatcttagaaaacgggttccttactcctgagcttgaagatgtggttaggtttgcgattatgacatttaatccacctgaaataaagtcacaaaactcatcaatgcgcgagtcaatgcggaagcatgtaattgtgagaaatttggtattggaa

SEQ ID NO: 2862 - DNA, 636 bp, Arabidopsis thaliana columbia
ccgagacaaaccgtttcatttcgagcaagtcttgaacaaattagtttcagagtgctgctattcgtttttggtattcggacaaattaaacttgaaccgatggttagctacttagccaattaaaccgaaactatccaacatcttcataacgtgtctcatttgacagataggggcatttacgtcatttcggagtctccgccacatgtcagatttgttttataaacgaaaaaaattcggtatatttaatttgaagatatccgccggaaaattcgtaaatttgacccttcgtcttcggaaatggcggctatttctccggcgaatgaaccaccgctgcttcactctccctgcctcaatttagctcaacttcttcctcgttatcttcttcttcgtctccatcgtttcttaatttcaaaactgcttcagtcagtaatcgctgcatcaagtgcggagtcagaagcttagagaaccactctggtcaccggagcctcgatttcttatccaatggggatccgatcagcctaattaatccgaattcatcgtctcctataaccatggccgcggcgacgtcggaatccggttcgaagagctctaagcgcgtctgtctcttcacagcgacgagactagagatctcgcgagag

SEQ ID NO: 2863 - DNA, 745 bp, Arabidopsis thaliana columbia
acacacaataatagcgagatccttctatttttgtttattcttcttattcatttcttcaacatcaaagctaaccacaagctatcctctctccacaaagtcacgatggatcgtggacgagaaaggtcaaagggtgaagctagcatgcgtgaactggccggctcatctccagcccacggtggctgaagggctaagcaaacaaccattagactctatctccaagaagattgtgtcaatgggatttaactgcgttaggcttacttggcctcttgatttggtgactaatgacacattggctcttaaagttaccgttaaacagtctttcgaaagcttgaagttgtttgaagatgttcttgggattcaaactcacaatcccaaattacttcatcttccccttttcaatgcattccaggtaaatttaatgatagagcatcggtttgttcgatctgaattgtgccaaactaaaccgggttatgttcattagatggactaatatctaaacgtgatctaattcgaaacaacaacaaattaaccaaaattgatcgcaaaagaacctagtctagctaagggacaatataaaccaaaatcaaaccaattcccatttgctaaatttaacaaacaaataagtgacatatcatcaattcattgtcaaatggttttgatgtgaactgatatatggttactgttattatatgttgtcaggaagtggtgtcgacttaggagaaacggagtaatggtgatctagata

SEQ ID NO: 2864 - DNA, 832 bp, Arabidopsis thaliana columbia
cattcaacaagccaacctcgctaacgtcttaggcgatacaagggacgcagagatagccgagttgaggtgtgcagtcttggagatgtgctcgaagatccacctgctacaagcacggttcccaaactcgaccacgtcctcaaagagacgctacaaactcctttacccgaaggataacatacgtatcggttcgagggtatcaaaagatcaaattggaaagctacaacgataaaggagacccgaaagaatttctgacgtcgttcaatgtcgacataaatcgagtcgaacttaacatcgaaaacttcaaagcagggcaatgccaaatattcatcgaacatctctccggagcggcctcagctaattgaaccgcggtcggctgcctcttcttctccttctgagaagttggactcagaggcctcgaactcccacccatatgaaaatgccgacctcccttgtccagaagactattcctcagcacctccttcatcatccactcctcagatcatgtcggcttcgggccagagtctcagattggaataatccggatcgaactccaattgtattttcccatcactgtgcgatctggtacaaggacgcatattatgacgctacaccataaaaagggagatatgaaagaaacattaacctaatcgacaacgtacctttctttgggagattttgcgtaaattttctaaagaaacgtctaatagctttcacgaatctctaccaaatatatgtgctttgatcacgaatcttctcgagatcatccttgagctggtcgggaaatggtaccagaaactttggatagcaattttacacaaaaaaacacactagt

SEQ ID NO: 2865 - DNA, 1129 bp, Arabidopsis thaliana
gaaaaaaggaagcaaagggtttgagtaagacgactgatgacacaatgatgataaaggtgtcaaagcagacaaagatggagaagaaaccatctaaacagacaagagatagaagcggtaagagaaaccgtgcagagtatcaagctgaattgcagcggttgagacagagagttgagaggcttgagcgaggaaagagtaacacagagcctgaaactagtggagtgattaagcaagaagagattagtctactgaaggaagtgaaggaagagctaagttctgtgcaatcatctgacgtaaagaagagcttgaatacaatggagaatttacaaccttgggtcgacccaaccattatttctgttcaagaggtatatgcattcagatttttgacttgtaaaatttagttagtatttgattactactaacaaatatttttgcatgtttactgaaacaggcaatgctttacttctggctatgagacaaagaaaaaagaatggtacaagcaaatttttggtgtttgttttgagtgtatattatcattgtgttctgtttctgtttggctaaagtagaaacttgtaaatctttgtataaaactcacaattgtacgtagattgtcttatgagtggcaattagcaaaaatatcgtcttgtggattccttgtttgtgtgtgtattatatctattgaagagaaatacaaaagactcactgttgatcagattgtttttcttggttaacaatttataaagacgagaactagaggttgatttgtgtgattaggtttctgaagggagatttggatttataaagtgaaagtaaaacgcgtagaggaaggtgaagagattagcgaagaagtttcgttattcaccttatatggctacacgacgagtactaatgtttcttcttcttcaaaggtttgtttcggtttcaaaacgttttgaacttttgagactttgagttatgctattaaggaacgttcacgtacgtatacgcatcagagaaaggttggaacttggaagacgagtgaaagagcaatgaagatgatgaatgtttataataccagtaagcttttctttgaagacaaaaaaagagcaatgacctttacttccctaagatagaggggagattaactgtgatg

SEQ ID NO: 2866 - DNA, 563 bp, Arabidopsis thaliana
caagcttctagctagatacaactgcaaacatatatgatggctttgtctaataagaagacgacgacttgggcaccgctttgaccagtcaatacaccaaatctgtatgtatcatttatataaatattatctttccacagttgttgaagaatcacatagacagcacacacggattccatggagactaaacagagtatccctctcctcatgccctataagatgggacccttcaatctttctcacaggtactcctttctccatgtctcagtctctgttatagttgccccctgaatcttccatttagtccgtttggatttgaatatgtgttttgactcttatgcatacacatagtgtttgatagaatccccaactcaaccttttaacttttaagcaccattctgggtttcttcaaaatcttttcttttgcttatggaaggtacgaagcttgaatgttgtctttgaattgtgatcagggttgttttggcgccattgactagatcgagatcgtatggtaacattcctcagcctaatgccaaattatattcactcagagacaacacctggtg

SEQ ID NO: 2867 - DNA, 912 bp, Arabidopsis thaliana columbia
ctgtgaaatacattgagacgtctatgactaggatctgcattggttcttatctctgaaccaacctaaagtagcagctaactttggaatgaaacgaacattgaaagcctataaaacttgaaacaaaatctccttctaattaataccttcttctacgaaacatattcaaaggaaactatacatagagatcgattgttcaattcgaaatgttaattctactctaagcaactgttaatccagatccaatttacagtcaaaacatgactctaaagatttaccggtgaagaaacaccgttacctgagctataacaccagaaaatcctccgacgagagcctttgtggcgagaggaagagactcgctattgttagtttcagatctgacgatgagtcctttcaaattctcgtatccaatgattctgataggcgtgtagaacaggtgtctgataatcgccggagatagacctttgtagagaccaatcactccttcctttctcgcaatctccgatacgactccgaaagcgccaatccgatgcgcaccagaagcggatcccgaaccatggagctgcattctagtctttgtgagatcaatcggaaacgtaactgactctgcaaccatcgcagagagtgaagcaagcaggatcctggttccggtcggtgcttctctggtcactcggctccgctccattttcaccggatttgattaccactaacacaatgtccatcacagagaacacaacttgattctatttcgtagtcaacgacatcgtttcggtcatcagagtgtatttgacgacgtcgtttccataatattgggctttaaagtcttatgggcccatgttcacaaattctaaaatacaaaactttagagataacagccgacgtggcaaaacatgaaagaccgagtagacattatag

SEQ ID NO: 2868 - DNA, 653 bp, Arabidopsis thaliana
gctctccttgcaaagctctcttggcgactgctacagaacccttcatgcctgctagctaagctcctactagggaagtactgcaaacactcaacccttttggactgtaaggtttcaaattcagcttcccatggttggagaagcatctgtctaggcagagatgtcctcagtttacagcttggacgtcttattggcaatggtctaaccacacctatttggcgagctccttggctgtctcttaccaaatcttaagcgcctatgggtcctccaactgaagcgtctcatcttttagttgtctctgacctcttaatcgcagggaccacaaactggaataaagaactcatccgtcaacttttgccagtttatgagaaggatatcctgctcctcaaaccaagccttcttggtgcagcagatcgctgggcttggttgcctacaagctctggcctttatgcagctaattctgggtattttgaagccctcaaggagactgcctccttggaaaaccctcctaaccatgatttagtgaaaaatttcaattggagatctaacatttggggacttcaaacttcaccgaaaactaagcttctcttatggaaagcgggtcacgaagctttacctgtgggttccaaccttctccttaggcatatctctgacac

SEQ ID NO: 2869 - DNA, 541 bp, Arabidopsis thaliana columbia
cgtgctaggagtgatgtttgatctttcttaaaccagcctctactaagctctaataaggcctcttcctcttacttctttctctaatcaatctaatgaaacatatgggtttgtgtatgtgtgtttgccaaggaagacttcataattcatatgtataaaagttttggtagtgtgtaaaccggatgtggttttcattgttatatatgttttggatgcaaactttactatagaaaatagtttttctagttcatgagtttccatgaaatgaagttataatgatcctttgatagagcttatatcattcaaacaaaagacttcaaaaacaagggtttattactagacatgtacaacgggtttacaagacgcacaacacttactagcgttttcacatcttcatactaaacatatatatctatactactaaagaacctaagcctcagattcctttctttatgacttctatgtacaaaacgaaagtgaagacacccacaaaggcttaccgggatgacagagtcctccgatatacttccttatgtctcagttt

SEQ ID NO: 2870 - DNA, 507 bp, Arabidopsis thaliana
gaaagacgatgatgagcgttgcaatacaaggaatggaagcgtttcagggtcacttagtcttcacatatttagaccatgtagaaaacgtgaagcttctgcataacatgttttaattagtacttttgtttcttaagatatttgtaacagaattagtctggctcttggttcctatcacatgactatgggatcttatgttatacacttattactgttcttttcttcttattggatgactatgactattttcaaatggataaaaaatctactttttatgagtaagaaaaattacaatatcgcaaaattgctggtatcataaaacttcttcagtcactaaactgacaaacagggagataataagtatcaagctgccaatacttttgcttgacaccttcccaaacttcatccccaagacaatccttaaccggcaatggaatcaactgagtgctaaaccctaaattctcaatctccaaagtcaccaaattgcaatacacaacatgaaaaaacgcg

SEQ ID NO: 2871 - DNA, 917 bp, Arabidopsis thaliana
ctcaggatgtttggactactctagctctgcactttaacaaggtatcttcgtctcgtctctttgagctgcaaagaaaactgcaagttatagagaagttagataaatcgatggatgattatcttaaggagattaaaagaatctgtgaacaacttactgctattggtagtcctgttagtgagaaaatgaagatttttgctgcattacatggtcttggcagagactatgagccaataaaaacttcaatcgaagggtctatggatcttgaacctcagcctacctttgaatctattatccctcggttaactggttttgcggataggcttgctagctacaacacatgcatggaagtttcaccacatatggccttttatgcaaactattcaggcaaaggaagaggaagcttcaatgggaaacctggtggtaatcaaggcaaaggagggcaatactcaaccaaaggcagaggctttccacagcaaatcacttcaggctcaagttctccggttccaacaacacagaaaacagaatcatgtgtcaaatttgtggaaaccaggtcatccagctttgaagtgttggcatcgttttaataacagctatcagtatgaggaactccctgctaccttgactgcaatgagaattactgatgtgactgaccacaatggaaatgaatgggtaggagacagcggtgcaacagctcacattacaagctctcatcaaaacctgcaacagtcacaaccatatggaggatcagatgcagtcatggtgggaaatggagattttctgcctatcactcacactggatcaactaccctaccaggaagctcaggtatattacctcttaaagatgttttggtttgtcctaacattggaaaatctctattgtctgtttcgaaacttagcaagggattatccatgctcca

SEQ ID NO: 2872 - DNA, 823 bp, Arabidopsis thaliana
ccactttacttgattgatattacatgaatactcgaatatgaacctactcctccaagttaattataaagttacttttgctgatatatgtatatatagatcgatggagagatgatagcgcagagtgatccacagaagtggggaaatggtgagaacggggtaataccatggctcatattcgatcaagtagatggacttgcaatcgtagggcgcggcttgttggacggccaaggcaaatcatggtgggatattcattgtagagaccatcccggacccgtaagtttccttttttttaactttttatttttcttgggttataatgtatcctaacaaaccatctctatgtgataatacattttgtaacctataacgtgtcacagaattgcatctgccttgcaccaacggtaagtttgctatttacaaaaggaagtacgtagtatgtatataataacttggacgtctctataactatagatatatttctcgcagatgatgacatttagcaactgcggaaatgtaacattaaagagtttgagatttagaaatagtgcacaaacacatgttcttgtgatgggaagccaaaatgtgtatatcgatgatatcaaaataacatcaccggaggctagccctaacaccgacggtattcacatcacatcttccaccggccgtttctatcaatcattctgacatcgccactggtatatttccttcctaaccatataaaagataaacaaaagtttaatttgtttatttatcgcacaattaattaacaggtgatgattgtgtgtcgacggagacaagtgaatatttgaatgttactttatga

SEQ ID NO: 2873 - DNA, 516 bp, Arabidopsis thaliana
gtttgtccggtggtattgaatagcctgttcctgaatacaccacatcctgctgttccgatcgtgtgtcctcctgtttaaattgtaattgatttagtatatgttgctattattcaaatactgaaaactgataaaacaataaaattattttaatatttttaacagaaattttaggcgggaaaaaatggagaattgttacgaatttaaaatatatatttaaaaattagcgattaagaggtttaggtgccagacgttatcaagtgtccaacgaacaaaattagttttttaatgttaatgttttggaataatggtggtttaattatatatagttcttgaatggcttcttaaattgtgtaaagtatagactactgaccgacgaggacgacgagatcacgagtattgagtcccaaggcggagaatttctgttgttgaacggcaacggagtcacggggaccagggagattgttagcattcgaagccaaagaaactctaccatctctacgtcccgttggtacttgc

SEQ ID NO: 2874 - DNA, 552 bp, Arabidopsis thaliana
cgccagtgtgcttgcaagcggaacggaagacttcgttttttgagatagacgcgggattggttttggtcaggataataatcagcgccccggtcagcagcataaacatctgaataaccagtaccatcgacagcggtttgccgccgaaggatggacgcaggtccgaatcagcaccaagaagggcgactacagcgattgccccgaggaaaatccacattgccagccagttgcttttcggcagttttttatccagcagcgtcgcggtatcaccgtaaacatactcacggttttccggtacggagatgaatttctggaactcttcgtctttatccagatctttaccgcggaaccagctgaagataccgatcgccaggataccgattaacgtcgatggaatggtgattgccagcagatcgaggaactcaagatggcgaccatcaaaggtgacattacccagcatcgcaaccagagacacgaccgcaaccgacaccggactggcgataatcccatctgtgcacgatagaacttgccgcatcgacgttcggacggatgttg

SEQ ID NO: 2875 - DNA, 663 bp, Arabidopsis thaliana
taggattcatttctctttagtttttttttggtttatgatgatagagattatattcttttactttaattatgagaaagaatttccacgtacgaattggcgtatttctcatctacttgcttcgggtctactagatcggatatcttgtgtgttttaactcggttattacaaaatttaaacttgaaaaagcataaaaagtcaataattaataactacataagttagtggattctacacttgattttatcatgagttattgatttctaaatagtaattataaccttttaatgatttcattggtttttaataaattatttatttatttcacattggattttaacagatctttcaatgtatatattaaattaaagataaataaatcaaaaagttaaataccaaagttattttgaatagatttgttatatgtgccttgtgaatagctagacgtacgctaatctcttgcaaatattttgatgtgacagggagattatgatggagtactcaaagcaactaatgactttaggtgaatttctctttgagcttctatctgaggctttgggattaaaccctaatcacctcaaggacatgggctgtgccaagtctcatatcatgtttggccaatactatccaccttgccctcagcctgaccttactttaggcataagc

SEQ ID NO: 2876 - DNA, 852 bp, Arabidopsis thaliana
cacttgggagaataatgtacgtccaagtacttcaatatatatgataatgtacttttgatttttgataagtcacatagggaagaaaaaaaaataagtgggctaatagtcattcaaactaaaaccctactatttttgggtttgtcggagtcagatactaatcatatatggcttacaacataatggcggttgcggttacagcggtgctgtttctagcggttgtgatcgctcctcagtggacagagacaaaaaaaccaccacgaccgtcggatacatcggatacatcgggtacatcgggtagagacagacgtacaatgtgcccgttatcaatccctggaatcgtccaaaattgctacgcaacgttaaatgcgtttccatcaaaagaatgctgcaaggatctcaaaacggcaagcaagagagaggtgacttgtctctgcaacaatgtcattgcacatccagatcctctttacaccaacaccaaccaagtcaacaaggcatgtggcgttcttgacaaatacgcatgcgacggtactttttctttggttttccttttggatcttttgtggtttatcagaagttatagttttaatcttgtgattgatttttgcatgttgttatgtagttgcacctacttttactattgtttacactaattatgacatgatcatcatcgctgttatacaagatccataaaaagtaaattaaattaaaaatccattaatatattccgcggttttgcaaatatcttaaaaaatagtacagtatcttaccgtaccatattaattagtgcaatcttttgtcaaagataattagctaactagtgcagttttaaacaagacttatttatggtatcta

SEQ ID NO: 2877 - DNA, 1023 bp, Arabidopsis thaliana
ggacagacatttgattggttttatcttctttgtggcactaaccgtcgccaatattattcatcacgacggattcttccccgtggtaagtgtcctttaatcaacacgtttatttttgtttttgtttaataatcgcaagtttagcccgaatttcaatttattccctcgagatccacatgcaaccactatattaacttcaaattagtcaagtgaatgtgtcaagtaattagatatatacctaattggttttgattaacttatcttaattttctaatgaattgttcgttgctatacctggattttgttatgatgattttgaataagatatcaaagatatatagacatgaatcgaaatgatgaataaaatctttgacaatattacattgactataatttgttttctgtagtatattctaaacaactcaataaaatgtaattgttttaaggattatatatcagctcaaatctattatttaatcacatatctagacaactgaagaaaatgtatttcttaactagattagaaatcaactcaaatatgttatttgatcatatatcgagtatatgtttttttagtatctcaaactagtcaataaaaatgtaaagctaatggtggtatcaatgttgatgattgtaggatgcatagagtccagggaatgtgacaagatggccctacttcgttttcataggaggctcaatgtactgcctactcggaagcagcatttgtcaactcttctgttgccactcaaaagagcttaatgtcttccttctccgaatagactatgccggtatcaccgccatgatcatcacttccttcttcccaccaatcttctacatcttccagtgcactcctcggtggtacttcatctacctcgcaggcatcacatccatgggaatcttctacaatcatcacacttttcgacccatcactttccgctcccaagtaccgagctttccgcgctttgctctttgcctccatggggctgtttgggattgtccagctgccacgcgctagtggtcaattgg

SEQ ID NO: 2878 - DNA, 935 bp, Arabidopsis thaliana
tcaaatatgaaatgatgtttcttatttgtgttgtatgtccagaatggaatctgcgtatagattgtcggtttaaagagaagagagacggtcgagtatccgttgaatcagacgagctctgcaaagaactccaagctgctttgagcactgctaaatggcaggtatgaaacaatcaatggtcctttgatcattccctttttttttcatggttactcatgagtgtgttagtgatattggttatattgttgtgacttgaatcagttggaagagtttgagagggcagtgagcttaagccatggaaattgtcgagatgacactaccttaactaggcataaacagtttgttaccgctattgaaaaccagatttatcaagtggaatctactctgctagagtcgttaagcgagaatgggaaacaacctttgcgttgggtggatcttaacaaagaagagcgtgatgatctcgccatgtttctatctggatcttctcagacgtcagagagtttaaacagtgatagcatcaacttgagagattcctcaacgagttctgtagctgagaatccacgtgggatcaatggcagaagagagggtagatgttatggcgacagtcctgattgtgtgatagacattgacgacataggaagtccggaaagtgcagataaaaaaggcggtacaagaagaacatggagttcaccaaatgtaccaaatatcagtgcgttgaggattaatgtccctgttaatgcaaaagaagaagagagggagaagttcctatcacatattgaagacactcctaaagagaaaggagctaaacctatgttttggctgcagagatgtcgtgattataaccaggtaagcttctgcagtttggatcatctctacactattagaaaggatcataagtcttagttgtttacattttgcagctctttgacagagcaagg

SEQ ID NO: 2879 - DNA, 628 bp, Arabidopsis thaliana
ctaaagtcgccttgcagaacagggcgcacagggcgtcatttttggctgcacagaaattggtttactggtgccagaagagcgcagtgttttgcctgtgtttgataccgcggcgatccatgccgaggatgctgtcgcttttatgctgtcgtagctgacgacaaaatagcgtcaagagaagtgaccagtttcggtaaccccgcttgtaaatgcccactaaacgcctgaaccagcgctgatgacgggcggtgcagggggcggatcaggctgacggtgaacggaaccgcaatactgaaccgccgcaccactaaaccgcttgccgcataatctagtgcggtgagcgggttaaccaccgaaatacctacccccgcccgtaccattgcgcagactgacgcggcgctgtgggtttctacgatcatgcgtcgtttaacctgatgttcagtaaatagctgatccagcaactggcgatactgtcagtacgggaaaggctgatgtagttctcacctgaaaatcatccggcgttaataccttttttaccgccagcggatgacccggaggtaacacacacacttcatctaaagagagtaattcggtacgttctgttcccgcaggggtatggagcgtttcagtg

SEQ ID NO: 2880 - DNA, 509 bp, Arabidopsis thaliana
cacaaaagttattttagcagaagaaaacgtcatctttcactgattcataagaatatacacaacgttagcgaaaaggtcagttttctaataattgtctctacatgtgacataggacctgcggcacctctaacactctcaagcaatcttaaacataatagtatgtttttgctcaactaacatctgttgcatacgaaattggattgtttatcatcagccttacatggagtttcttttgccctcaatcaagattacaattaaaggggaaactctaacaatctaggatttcaaactctaagaatcaaggaaagagccaagtcatctgaaacgatgtgggaggtagaaagagatacctgatgagcatcattgatcggaatatgaattgtactgttggcaaagattggaaattcgattggttcccagggaaatttccatgtgtttcagcgagatacagagtaccactgcctttaggacaacaaaaacctcttcacaggagtgcctgtgaattggtg

SEQ ID NO: 2881 - DNA, 702 bp, Arabidopsis thaliana
gagtttgaataatgtgaaacatacagacatatagactttgatattttttaaaagttcaaatcatattttgttgttttagaaataaaagtgaaaaacaagagaaacaaatttggggtaattttatactctagtatttttggtctataggatgataaaaacttgactatcagaaacaagggtaccccagaaacaataactttgtatttaaaagtccctcgaccaatcactcaatcaccggttagttatgttcatacttcttaatacaaataaactataaattttaggctatatatgtatgtgtaaaaatcgtatatccaccaacaaaaggatagacaactccaacattataagacattaatttaagcgtcaaccttgatcaaattttaggtacttctgaataaccgatgctacatatagttgaaaaaaactaactccatattggctatggttgttgatacaggtctgttcgatctgtctgtgtccgctgaatatctcagtcaggaaatcatcaattgccttgttcttgcggaagatggactacatgctgtggtgttagttctgtcggtgaggactcggatttcgcaagaagaagaagccacacttaataccttacaagttatttttgggagtcaaatcattgactatttagtagtatattcactggtggtgatgagttggaagcaacaatatgacattggatga

SEQ ID NO: 2882 - DNA, 928 bp, Arabidopsis thaliana
tcaaaagttttgagttttttttttgtttgtactcgtagtcatgcaccttgaaagtttctattcactgcgaaggctgcaaaagaaaagtcaaaaaaatacttaccagcattgaaggtacataacataaaaaaattcacttatatttttttggttataagtaaaaatgttttgccataattcgttttgttttgtggttataggtgtttttaaagtggacattgatgtgaaacagcataaagtaacggtgataggaatcatctcgccggagattctgttaaagaagcttaacaaagctggtaaaaacgctgaacaactgccggagatacccgacccggttgacaacaaacccaaacccgtcgacccgaaagagaagaacaagaagaagaagaaagaagagaaagtgcaaataaccaatgaagctacttcttccggtatagataatccggaaaaacccggttctggagagtgtgataaaccggaatctgaaaaacccgtcgacgaaaagtgtctttccggtgacggcggtgaaacttccggtcctgtgaaagaggaaaaaaaggacgttcttaaggagaaagattctgggaaggaagaatctccgtcaccaccggcggattcttcggctccggcggcggagaagaaagctgaagacaccggtggagctgtccctgataatggcaaagttggtaaaaagaagaaaaagaaagggcaaagtttggctactactaacaatcctaccgatggacctgcccgtactcaatcacttcctccgcccactgcaacagattatgaccgtccaattaatcagatcaacgaccaccatataacaaccactaataatccgccacgtcacgatctgtatccttatcctgcacaaggctattatgcgccgcaagtcatgtatggcgtaagttataacgttgctcaa

SEQ ID NO: 2883 - DNA, 543 bp, Arabidopsis thaliana
gaaatactaaatactttcacacatctaccattattcgaaggagaaggaatcgtgttgagatgttgaagagtgatagtggtgtatggatctcagacccgcaggagctggagaaattggcgactgcttattataaaagattatattccatggaggatgttgatcaagaggtggaaatgctaccaccgggaggttttgctaggcttacagagagagaagtagcagagcttaccaaaccgttctcggcagttgaggtggaagcttcagtccggagtatggggaagttgaaagctccggggccagatggataccaaccaatcttttaccaagactgttgggaggtggtgggacagtcaatagcccgctttgtgttggatttctttgtaacagggatcttacctgaaggaaccaatgatgtgttgatggtgcttatccctaagctagctaagccgagtaaaattatgcaattcagaccaatcaatttatgtaatgttttgtttaaacaattacaaaaaccatgatgcggcgtttacagaatgtgatgag

SEQ ID NO: 2884 - DNA, 579 bp, Arabidopsis thaliana
ttcgaataatggtagatgtgtgaaagtatttagtatttcgatctccgtctaacacccatttctcccgtgacttttggaaccaaatgacttcctcctgctccatgacaacatctaactctttaatcagctcttcttctttgcgtaacagagcatcagtttgaacaacatcgagcaagtcttgtaccgatttgatttccgtggttaatcgatccttacgttgattaatatcaccaaacacctcccgattccactttttcagcctaatttgcaacccattaagagcttcaggcgttgatagactgttattccaagagagttgaagaagctccttaaacccgtcatgtagtaaccaagctgcctcgaaccggaatggtcttcgtttcgggtcacctcggaatgcaggcgaaagttgcagataaagaggcgcatgatctgaggcaacaacggggaggtgagttactgtcgcctcttgacatctcaagcagtgctggggacagcaaagaatccggtccaagcgcttagcaataaaattctcttcaatctacctcttctcaagtatactgaatcctttaaaaccat

SEQ ID NO: 2885 - DNA, 895 bp, Arabidopsis thaliana
atttgtcatgaaaacattgcaaaataggtatggtaatgttaatcaggaacaacaaaatttaacaagtattaccagaattatgacatatgcattcaattttatacaagaatgtaaaatactgaatacgccaaacttggttcagcacaagaacctaaagcctctatgtttcttctatgatcaatttaatcataagctatggcaaataataagaataaaattgataatagtaacgcacaaagaccaaaaaccaattaatcagaagttttggcacaaaacacagacaaatttaaagtttctcaaagacaacaaacatcattttattcgtattcaacaacattgcttttgcttttaaaagcaaaaaacgcatcactgaacattgaacttttgctttgcgaatgaacgacctcttcgacggttggcatgtagggcttaacagcttcatgggccctaaacctctcggcccatttgatcaacccaggtgttgtctcttgccggagaaacttgacgccggaaaacgcctcgatcacagagatcggacctaaaagagccgaacaagcaatgtcaaggtagccgatggtctctcctccaaagaaccctaatcctttgctgctcttctgaaacgtttcttcaagtatcgccaaacactccatcagctttcccaccgccgccattttcccttcgtcgtcttttgctccgaccaccgcatccaccgccgcaaaacactgtttcataaacataaaacaaaacccttgagatgactaatctagagacttctgcgttgagtgtataaatcggatctcaagctacacagatctatcaagaacagagtattttttgtttagctccatctaaaaagtttcaaactttagcaagcaaacacagattaatcaaaata

SEQ ID NO: 2886 - DNA, 1715 bp, Arabidopsis thaliana
taactccaaaataaatatgaaatacattataagtaaaatagaaagattgatttggtgcaaaactctatacactctttaatcccggcatcaaattctaatacagtatagagagaataaacaaaataatagtattaaatgaccacaaaacattagagtacagtaaaaacaaattaattattcttgacgtaatgattacgggtagaagaagacatcgccggcgagctacacgggaccacgaccccttcactatgacttcccgatccttcgtccacaataatcgacggtctataattggaatggctaggccattgtggaggtggcggtgcggccatggttccatagatgccggtggttgtggtggtactgctggtggtggctcctccggtagtcttgcccgtagagtagtccgattgtggtaccataaacgacgacgactacgaaatgttgcgtttgagagtttccgttgttagggactgtttggcgtggccttcttgtatgcagtctatatttctataattattgcatagcatagattttaagttaggaaaaaaaaaaaaaaaaacaacttaagatgaacatcttatttgcatgtgcttaatatagacatatagttacctgtaaatggcttttaacttcatcattggttaacccatcaaccttcataaactccctgatttgctttggcgtagctactgcaaaattcatttactaaaaatcaatatactaaccaaaatctcaaaaaccctatataacaacaacaaatttattcaaatagtttgaaaacaatgtaaatcatataaataaattcaaaacgcaccatgaggtccacctaagtgttgaagagcgttcaagaagcgtctatgcaattgcgacgaccaacaccttctttgctttctccctcctcctccgtctttctccgcctctctcttcctcccttcgccaccgttcaccatcggatcttttctcatactctcatctcttgtcatcgtctcctgctgcaacctttcctgaaacgcaaatcacaaatattagagcgttttctttgagacttttttttttattaaccaataattttggagaggagttaagaacataataacatgttaaaaattagccactatagcattgcatactcataattaagattcgtctgagctttgatcttaattatttaatgtattacctcttttggaagaagtgggtggtcgggttgattccagagttgaacagacttaagccaatcagatttcgtgttcttgtcctcggaatcattgtctggatcgtgatttccatgctcatcgtcgaattcttcatcttcttcttcgttggatgtcgatgaatctttaatagttagaaactgctccaagaccggcccacattctccggtcgtctgctccgagcactctggttgtccgtacatattctccgtcgtcatctccggtaactccctcttacatgcctcgatcgcttaagaaataatatggaaatggtaaaatgtacgttactatacatactagaattttcataaatatattgtaatttttatttaatttagaaaaaaatagatcacaaattttacatttgatgtagcaaatatatgtttttatagataaatatatttcattgtatatttatacataccttgagttacaaggtctaagcaaagaggaagttcacgttgaaatacatgaatcttgcgacgtgtctcttcgagg

SEQ ID NO: 2887 - DNA, 729 bp, Arabidopsis thaliana columbia
tagaggagggtcgcgaggatttgtcgttacgctttcactgtgaactcttcttttcattctccaaaccggacaccggttttagtaaactgtaagtacaacaaaccggattagagattaattcagataagcagttacgccagttagtgaaattagatagtgaagcaacttactttggtctctgtgctaaaactggtccggtataacctccatccggttcgctcgccgacggatttcccgcatattgaaccgaaacaaaaccaccattggctttgccggcgactactaagtgagatttcccggagctaccggctgctctcggtgacaatcctgaaaaaatccaataaaacacacacacataagatttaaccaaaactggtaaaatcaccaaaacgcaaacgcaatcgtggaatcaaatcataccttggaaaacgaggacaaagaagaaaatagcggtgaaaagagtggccaatacattgcctaaagaagaagcggcagacgcagctttagccgctcttgatttcttcaaagctctcatacgttcgattctcgcgcgtttcaacatcgccaattcagcgatctctctaataagtttctgatccgccgctctagcgacggtccacgcggcggtcgaggaggcttcgacgcagatttcttccgtttctccttccgatcgcttctcccccatcccggtttattgattccacattgaaccggacttgtatcattctc

SEQ ID NO: 2888 - DNA, 1125 bp, Arabidopsis thaliana
ccaattcctcatacaaagacaaagaagcatctttactattgaatcaggataaatagaattactgagagttggataacacactgataaatgaaggcgtacatcaaaataagcatttaagtatcgacattacaaattcagtaaataaaaagagagaactttgaacagaaactactcaaagacttttatacattgatgctcaatatgcatcacaatccgacaggaaggtattaagacgcatctgcctttatcctagttagtcaacaaacattcagataacgaagttgcagtatacaaaatccaacaaaaaaagcttaagctaagattcattcacaaaccaagaatttacattattctctatgataaacagttatagtcaatacgacacaaatagtcaatatgcaaaagctcaaacttttctatacttccatgaagcatttcagtaaccacataatcaataaggtcataataatcgtttcgtacctgagtaacggggacagatgatgatgctgacgatgatgatggtacatcaccgagactttttaacgaatcagaagaagacttgttggaaggagctttggtggtctcagaaagagcaggccacgaagaagctcccatgacaggtccaacctcagaagccccattagacggccttttccaaactggtttctttccagcattgtcctgaccaccagatgcttccgatttctcatcaccagccgccgcctccaccgtcaaaacagcagcagttggagcagcaacggatacagaagcaatcggctcgatcggagccctggattgaggagaggaaggaccggctacagcggcggcggcggcgatcggctctgattcgccgcggacgatttgagtccacggagaagaaacctgccgagaaggacggcgaggtgattgtgctacggaagcggtggggctgccgtgattcccgctgatacgacgaggagacatagaagaagaagcagggttattggaagtggcggaacgatgatgagaggaccaaaaaattagggtttgttaagagagagtcgattagctccgatcgacagtatctaatagaataacgattaatcgatttaacccaaaatacaaagttacgaattgatgatgaag

SEQ ID NO: 2889 - DNA, 908 bp, Arabidopsis thaliana
aaacataaatgttacacataattgtttgaaaatataatattataaaatctatatttttttcaaatatatgttatgtaagttcttaagtatcaacgtttagtttgtaaacacaaaaccaaagaaatgaagaaacgtaatctttgtattttggcgtatatataccttgtaaaattagttaatataaaacaaaaaattgtgttgcctttgttaatcctctttacttactcatatctaaatacaaacacaaaatattggcatttaaaacaatcaagacatagttctttgcttatatatgatatattgattgttgtataattagtatatatataaacttacgagagaaaccgaatcacgagccgctaaggccaagatatcagcacaagagacaacaccaggacatgctgcctcgagctgcctcttggcatcgtcaatgacctcaaaaccatggaggttaacgtttgcgccagcggttctttcagagttaggtcccgataaaagcaccgaaccatcacaaccttggacaaagcaatcatggttgtgcattctcagtaacccgggtgcaacctttggatctgaaccaaagtgagatgccacagtggtccgaacaattgtctcggcattagggcacgtagtcgagtagaacccgatcctcgtaccttggccataaacggcgatgagacaactaaggaagactatgaccaaagcaaatgatcggaccaagcccattttttctttttgttggtttgtgttttagataagaccgcaagtgtgtttcgagttagtagatagagtttgttttagatgcatggaaagtgatacgagaacgtgagtaacttatagagggattgagaagtcaaatggtgatgttgaagtcagcgaaaggggctagagtgttgaggtaatttgac

SEQ ID NO: 2890 - DNA, 615 bp, Arabidopsis thaliana
tcgtcttctgcattgtcttcaacgtcgtctaggtcatcggagatctcgatccgtcgcttcgttgcttcggcgatccggacaaatccgtgaaaattcataaaaagaaggaggccaacaagtagaatcagcgaagaagaacgaacgatcttctccatcgtttaacaaatttattcaggaatcagaaacagaggaagagagactgcatcggcaacggcatttctatatcagtaaagcttctacaaactcgcacacaagtcacaaaaccataataatgtgactttttacttgtttcgggaaaaaaaactattaacgacataaactgaacctgctggttcaaaactgttcgccgtttttctatcttaaaatagaactgcgtgccaactattgacgtaaagatggcaagcatatcaaggctgaaagatgaaaacgacacgaggttgcaccgtaaataaaacaagggtaattgtatgattctctctaatctactactgcactacagaaggtaactaaacagataagcctgaaaacagcaaggaatgcataattctcagtgtgaagtaagtttaaaaaaaacaccaacaagcaactatggaaggtcaaatcaaaccctagaga

SEQ ID NO: 2891 - DNA, 792 bp, Arabidopsis thaliana
ggtgggggataaccttcgagcagacaaacgagctggcttacggtttggagctgactggccacagatttgtttgggtagtcagaccaccggctgaagacgacccatcggcatcaatgttcgacaagaccaagaatgagacagaacctctcgatttcttacccaacgcgtttctagaccgaaccaaagacatcggtttggtggtccgtacatgggcaccacaagaagagattctggcacacaagtcaacaggagggtttgtgactcactgcggatggaactcagttttggagagtattgtgaatggtgtgccaatggtagcttggccgttgtactcagagcagaagatgaacgcgaggatggtttctggggagctaaagattgcgttgcagattaatgttgcagatgggattgtaaagaaggaggtgatagctgaaatggtgaagagagtgatggatgaagaagaaggaaaagagatgagaaagaatgttaaggaactgaagaagacagcagaagaagctctcaacatgactcacattccatctgcttacttcacctaaaactaattagcaaaaagttgacaatttaataatatcaaaacgataaacataatgttctctttatggttcaacaactgagaatctgctatgaataaagacatgtggtccagaaacatgaactttgaatgcaaaactaaagaaaataatctgtgtatgacttgaatgtttttggtttactagtgagagaagtgaaggagccattgataaacatctatttaagagaaatctgggaggg

SEQ ID NO: 2892 - DNA, 550 bp, Arabidopsis thaliana
cctctggatccttagaccaatggccaacatagaaactcccattatcccatttgaaggtcccattccctctggggaacccttcatcccaaaacccgtcgtatctatttccatttgtccaaacaaaactccctttgccacagatcgtaccattcttccattcgccgatgtaataactcccatcgctccattggtactttccttgaccttcttgcaaacctctcctccattcaccatcataggcatctccatttgcaaaactcttgacgccatgtccatgcttcaggttcatcacccactgacctttataagcatctccactcggacccgtgtatgtcccaataccatccatgtaaccacttttaaactctccttcgtatgtggcaccagatggccacccaaactttccattccccatggttttcccattgtaccagtcaccgatgtacatgcagccgtctgtccagaggtatttccatggccatgaggaaaactatcataccattgccccgtgtagtagtcccattgggaagcactctctcggcatggtaga

SEQ ID NO: 2893 - DNA, 1075 bp, Arabidopsis thaliana
cgaatacatttgcactaaaataaaagtgtgcagggaaatttgaaaatttctattgaccttggcatgacactgattgtaacccaacagttgtttttgatatttatgcatatgcaatgtgaatagcaccactgaccaaacaattagtgtttttacatgcagctgcaatattaaaagacctttattccaatggttgataacttctacactagttatcaggttttcctgaagaaattggaagttttactatacaagagtagttatcctcaaggttttatacattgcatgtgtttcaggtagttaaatctgcgaagttgtaaaccaaaccccaacattttgtaatgggagctttggtgagtaggcaatttatgatatgtcctaaactgataccgaacaaataaaaatgtctctcttcattcacgtttttccacccattctatgtttacttcagaagggactgtcaacaaatttcaaaatccgtacaatatttttagtttcatgtaagattctctaaattcacgttaaaggggtaaatcaaaaagttctcagcttcgggttggcatctaacggggctttgtataactgtttcctgcaaaattaacctctctttactttacaacaaagtatactctcccgccatcactgcgcttgatcccacaacccccagacctcattgaacatctagcttctcttcccagatacagctgcatttcagcaagtggtgaccagagaaaataagtttctacctcttgtctcacttcacgattaaagtctacaaattctttaatgctttcttaccttttgattgcgctatagatgtcactattctttgccaaaagctgttccctgaagaggcatgtccacctgcgattctctcggccgcaggactcatgtcatgaacatacttcacggattcagataatcggtggagaagattcatcagcgcaatcacttcgttcctttgcaattcgagctgaaacaaaacaacaaagattgctacatcactaaaatgccgtcccaatagacgctttaagaaaatacacggtgcaaatggacaatgcgtctctaggtgtgttag

SEQ ID NO: 2894 - DNA, 538 bp, Arabidopsis thaliana
tggatgaatcgaagaaacaaagcctcccactgccttatgggccagtatttctacctgaggagaccaaccacatatcattccacgtccatcgacacggtcaaggaacccctctggcaaatcatcctttgtcacctcttctttacggagtgaccagaggaatctatattgacatagctcaagtccatgagctatttccttcactagagaacctcttaaccttgccatactcccaaaacaaaggaatacaaccgatgcctcgggttgatcatcaagccatttcatcaactcgtcacgacgggttaggtcctgctctggatgaggctgggctttcaagtcaaatatggggccaacagcataaacagaaggataattctgttcttgaagaaaatgattcacagagtaaggctcaatatcaaaggagctattcactaggattccattggcctttgtaaacaatatggccagcttaacgtaagcatcataaccatcttcaacaaacagagctgacggcagaacattggctgggacagggtttcaa

SEQ ID NO: 2895 - DNA, 931 bp, Arabidopsis thaliana
tgggtcctcctgatactttgtagtgcgtttctttttccctattcatgaatttgtcttttgcttatttcaattgtgcattgatttggtttcaatttgttatggcattggctaaagcttgattctttatgattggttctgttgtgctactttgctccactcattgggataaaacattaatgacttgttttcctcgtctgctgtttattcatagtgatgaatttgttatggtaccaatatttacattgcattgaaacttttatctctctgattgcagtgaaggtggcttttttaatgcaattatgtcgtttccggagaattatccagtttcaccaccaactgtgacgtttacctcggagatgtggcatcctaatggtgactgatttttctggaaaatatatctctttctcgagcttttaggatttagtcttctgatgatttatactcttttgactgcagtttattctgatggaaaagtttgcatttctattcttcatcctcctggtgatgatcctcatggatacgagcttgcctctgaacgttggacccctgtccatacggtatgttttttcttttaccgtttagcttcagtactctggtaatttgtttgcagggttgagttatctatggcttcgaatatcttggggtctgctttatagcctaacattcttcgaatacagctagctttctcttgtgtagatagcttgtagaaacagacatgttttgttcgatattgagcttatacagtgattgcttttcaaatgttcgtggaatttataagtcaggacttaggaatactctggaggatagtgcaacttagattgaacctctgtcgttagggtgcttgagtggaatatgattcactttctgatttatctgccatgtacacgtcttaatcgatagtgttctattagatcatgaggaaagaactaga

SEQ ID NO: 2896 - DNA, 734 bp, Arabidopsis thaliana
  unsure (1)..(734): unsure at all n locations
taagatgagaacaaatttgcacccaactttaaagattagatcatcatcaaaacaagtctagatttgcatgaagcaaggttagtgtttacctaagctgaacatagccattccaagaccagcatctgagagtatggagatggattgttgtaatattttggcatagccacatgccacctgcttccaaaaacaacccatactcattattagttcccactacaattattccatgcatagatgattatattatttccttttcttattataacatttatccataaaatctgtaagtaagaaaatgattggactcactgaccggtaagcaacaagagcccatatgagaccgattagactggagtacgtgtttgggtttctgatcagctttctccacaccattatcaatatcagtcgtgtcatcacacttgtcggcggcatatgtgttccgttgttgccgccgccatctccaccagccgcctctagctccgccgtggaattagaccccattttattcagccctgctgtagctttctctatctctctttctccctctccactatcaagaccgccgatatcatcaccaccacctgagaaaaccaaaaatcatgaatacatacaaaaataatagtattcgaataataataaaattaaaccaacaaacctctagcatattatttatgtaaacaattttccgcaattttagctaaataatatttgactgcaanaaaaaaaaaaaaaaa

SEQ ID NO: 2897 - DNA, 1317 bp, Arabidopsis thaliana
tttattgttttgtgcataaatctgcacagcccttatatatattaagtcatctcatcgccgactatttcccaaaatcatcaattattgttaccaagaataagaaaagtaaaatgagagagcttgcttgcgccattaaatcaacataaagttcaattatagtttgaaatctttatgaatctccattaattaatgtatccatgtcactaaccttgaaatctttgttgaatcccacaagtaatcctttaaccccttttggtacttttcattacatatcgtcatcacaataacctctcaccaatgtatctataatccctatataaacactttctctttagtcctgattaccatcaacaaactcaatcacaatcacaagtaaatacaaaaatcaccatagaaaaatatgaagcgatttattgttcttgcgctttgcatgcttatggttcttgaaaccacaaagggtttagatttccataacaaagatgtggaatcagagaatagcttgtgggagctatacgaacggtggaggagtcaccacactgttgctaggagccttgaagagaaagctaagaggttcaacgtgttcaagcacaacgtgaagcacatccatgagaccaacaagaaggataaatcttacaagctcaagctaaacaagtttggtgacatgactagtgaagaatttaggagaacatacgctggttcaaacatcaaacatcataggatgtttcaaggcgaaaaaaaggccacaaagagcttcatgtatgcaaatgtaaatactctcccaacctccgttgattggagaaagaatggagccgtcactcctgtcaaaaaccaaggccaatgcggtaaaactcttcttttcattgatccttcaatctaaaagatatatggaaaatgagaattaacacagatttggtttgtggttattacagggagttgttgggcgttttcaacagttgttgcggtggaagggatcaaccaaataagaactaaaaagctgacatcactctcagagcaagagctagtagattgtgatacaaaccagaaccaaggatgcaatggaggtctaatggaccttgcttttgagttcatcaaggagaaaggaggactcacaagtgagctagtgtacccttacaaggcttctgatgaaacttgtgacacaaacaaagaaaatgctccggtagtttcaatcgatggacacgaagatgttcctaagaacagcgaggatgatctaatgaaagctgttgctaatcagcctgtttctgttgctattgatgctggaggctcagactttcaattctactccgaggtaagaactca

SEQ ID NO: 2898 - DNA, 1601 bp, Arabidopsis thaliana
gttaagcatgaagacgaacgacgcgttactgacggaacctatgtcgggcccggagactactccagaacatcctcgaccacttaagtcgacaggaggccagaacggaagcacgattcgccaccctagccgctgcacaagcacattcgatggacgaaatcaatcgtctacaaaccagccgaacttcagtccataggccagtgtttgaaagcatcgagcatcgtcctcaagtccgtatcgccggtcccaccaacgatgtcgcaagagacgcagaagtcgccgacctcagacgcactatatctgaaatgagctccaagatccaccgcgcaacaagcacggcgcccgagctcgaccgcgttctggaggagactcagcaaaccccctttactcgacgaataactaacgtctcgatcagaggagcccaaaaaatcaagctggaaagttacaacggtagaaacgacccgaaagagttcctaacatcgttcaacgtcgccataaaccgggccgagctcacgatcgacaactttgatgccgggaggtgtcaaatattcatcgaacatctgaccggaccagctcacaactggttttcacgtctaaaacccaattccatcgacagcttccatcagctcacctcgtccttcctcaaacattacgcgcctctaattgaaaatcaaacatcgaacgccgacctatggtccatctctcagggagctaaagaatcacttcgatctttcgttgatcgtttcaaactggtagtcacaaatatcactgtgcccgacgaagctgcaatagttgcgctacgaaatgcagtatggtacgactccagattccgggatgacataacattacacgctccgagcaccctagaggacgccctgcatcgggcatccaggttcatcgaacttgaagaggagaagctcattctggcaagaaaacacaactcgaccaaaacccccgcatgtaaagacgcagtggttattaaggtcggacctgacgactcaaacgagccgcgacacacctcgatcgcaatcccagtgcgggccgaaaaccaacttcattcttagtaagcaccgaaactcccgacgctaaaccttggaacaaatatattcgcgacgccgattccccagcagcagggccgatgtactgcgaataccacaaaagcagagcgcattcgaccgagaattgccgtttcctgcagggcctcctgatggccaagtataagagcggcggaataacaatcgaatgcgaccgacccccgataaataacaaaaatcaacgacgtaacgaaactacggcccgacaatatttgaacgatcaaaccaaaccaccgaccccagcagaacaagggataattacctcggctgacgatccggcagccaaaagacagcgaaacggaaaggctatcgccgcggaaccagtcgtggttagacaagttcacgtgataatggggggacccagaattgcagcgattcagtgcgctcaattaagcaataccgaaagaaagccgagatggtggtagcttggccctcatccacaagcacgacaagaaatctgaaccaaagcgctccgatctcattcaccgacgtcgacctagaaggtttgga

SEQ ID NO: 2899 - DNA, 886 bp, Arabidopsis thaliana
cctaaaacaaaccaagagttaaaaatgcttaaacattcttcttcgactttttcctcgcatacctcgtctgtataggactccgatacaccggcttagcatccgtcctcgactttgccaccttctttaccacctttggctttttaacgcacccttcactaggatcatctccatcatcgtgtgactttcctcgcttcttacttggctcagccaccttacctccatccatctcatcatcttgaggcacctctttgtccttctcactttcagccaccccaatctcactttcagccacctccttatcactgtcacattgaaccacctctttgtctatctcagtctctgtttctccaacctctctctccttatcaccttgagccacctctttgtctatctcagtctctgcatcactcccttcctccagctcgttttctttatcatcaatctcctttgaaccacaagcgtcttcagttctaatgcctgattgaattgatttgattgcagcttccaacagtttcagtcttttatcttgctcttcatacttcttactgaaatctttcatcctcttgttcatggacttaaatccattctccatcaaattcttcatttcgtttacaacctcagtcaaaccttcatcacttggactagtcaaaccttcatcacttggactagtcagagctgcagcagcctttcccttgcctttcttttccactgcggcttttcttggagcttttaccacagtagacggagctttattagccacaaagctccggtgtgctacatcttcattgaacaacggttcaaaacatatagtcctctcctcatcaactagacgtttcttccaaacatcagctattagatcatcgacatcattcactccacactcttt

SEQ ID NO: 2900 - DNA, 738 bp, Arabidopsis thaliana
cccagtggaacatacctacaccacgaccttccctgatttccatagtcatggatctggagacaacatctcttgatgcaagatccttggctgtaggagcatatcgttccataaaacgttcaccttcactgtttctaaggataccaccttcacctcgagatcctgcaattgtttaaacaccaaattttttttgtgaaaacacattaaattttatattgcaaacaaattcgagtatgtgagaacatgatactaaccttcggtgatgagacatccggccccatatataccagttggatggaattgaacaaactccaagtcctgcataaatttattaaatataagattattagcatacaaattacagacaaatacatcatacacaattttgaataaaaacgaaacaggtggaaaacctgcagtggaagaccggcccgtgcaaccattgcatttccatcccctgtgcatgtatgtgctgaggttgcagagaagtatgctctgccgtacccctggaaaaacattagccaccaggtgagcatattctcggtatttccaaaaattcgtatcatatagaaactagctcaccccagttgccaaaattgtttgagaagaacggaaacgatgcaatgttccatcttccatgtttagtgcaattacaccctggcaactgcctgcatatcagatagaaatgttgcattaacttcaaagtcgctttcccttaaatcgatcaataagatccatcca

SEQ ID NO: 2901 - DNA, 563 bp, Arabidopsis thaliana
gaggcatccgtgtagatatcatatggtttatttggctttggcaatgctagatttggggcggttgttaattccgttttcaacttaacaaaggcttcctcaacatccttactccatatgaagggtacacctttaccagtaagtcgggtcaaaggcttagtaatggatgaaaatcccttgacaaacttacgataatagcctgccaatcctaagaagctccgtacttctgtaacggatgtaggttgcggccattgctatattacagtaatcttttctggatccgccgtaactccttgtcctgaaattcggtagccaagaaatccaatttctcgttgccggaacttacacttgctaaacttagcgaacaaccgttgttccctaagtctatccaacactttccccaaatgttcacgatgcacttccgcactctgtgaatataccaagatatcatcgataaatatgataacgaagctatccagataatcgtgtaatacctcgttcataagtctcatgaaggctgcgggcgcatttgtaagtccaaatggcatgactacaaatttatattg

SEQ ID NO: 2902 - DNA, 291 bp, Arabidopsis thaliana
gatgaattaagaggtggatgaaaataagaatgatgtggatggtgataatagggagatggagaaggacaaagaggtggctggaagtgagattggggtgtgcagtggtaataaggagatggagaagggcaaagaggtggctgaaagtgagattgaggtgtgcggtggtaatatggagatggagaaagacaaagaggtgcctcaagatgatgagatggatggaggtaaggctgctgagccaagtaagatgtgaggaaagtcacatgatgatggaagggacgttaaaaaccccaa

SEQ ID NO: 2903 - DNA, 873 bp, Arabidopsis thaliana
ccaatgatattatccaaagataacatgtagcatagccttttcattctctggtgtcagatgtcctggccgtgcgaaccttattcagaagaagctatctctgtaatgagacgtaggatcatgcagagagatgttgaggtaaaccgaatgcacatctaagaattaatctcagtttcctattgctttaaaatgggtttcgcatactctattataatcacacagatctgaagttgaaaccgatggatggaaccgggtagagtgtatcgatgtccagctgcctgtactccatatgtagtcaacaagactgatgtctgtgacctacaagatgaaaaaaaacaattgtcactaacaacactaagaatctgacatactaacgccaaaacggagatccaatcattcagggagcaaaatgaaaaacaaatcgcaaaacagtgaaatttagcagaagctaaatgttccataaattaagctgtagaactataacaaataaatctaactaccaccaaaacaagcgtataaggttatgccaagcaatgtaagatatgtatcccaatgacaaacgctaaagtaaaacaatacatctaaagagaaagctaccaaatcttctacactaatctaagatggaaaatgattctcacagatgaaacataagctagaggatcaaagcgagaccaaaattaagagagtgaaagcttaataatttaccgtaacgtcgtcataggtccagcggttgaagagcttgacttcgttagtgagcgcctgctgaatctcagcgtcaacatctgcggcggtggccatggctgtggtgagagaaacagagcgtgagctcaaatacacaagtacgaaatcagagttatgagagaggatttggagagg

SEQ ID NO: 2904 - DNA, 772 bp, Arabidopsis thaliana
acaagttgagccacgcctttccgctcaagatgtatcgaatggcaaacttgaaaacgtccaatgggaagtatgtgacaatactgtatagccagatcacaccagcccatccccatccaatacccctaatctttgcaaattcccagttggcgaaaccgcaatcaaagtagcaatctgcatttggaagaatgaatggatttaacgggtgcttctttgagaacctttttaccaaacaagaattcccttaaaatgttgatttgatgaacttaccagttgtgcaatgaggaaagcaatcatcagcaatgctccaggacgttcaacaaaagaccaactccttgatcttgtgacgaagatcagagcttgactaatgatactaacttgtaagtacaccgcacccattagctcgtggttattgtccctaatggacctcacaccgaatgtgtcctgtgaatccaatgtgaaatttactttacaactctgaacaagaacctaagaaaaaacttctgtaaaagagaaattaattagctcaattgtatgtaccgagaaaaagtcagtcttgtgcgccgcccagaagaaaataacagtcatgatggcctggtagcctcctagaacgactccagtagcaaaaatttctttaagtttccagctatcaggtgtgggagatggcttaactctgtcctttgagattgtcatgatggtacctataagatcaagatagcaacacaataccaaaagatataagtaaacattgtagaaaaagtaacaaattttgagg

SEQ ID NO: 2905 - DNA, 592 bp, Arabidopsis thaliana
ccatccaaccagaaattgccggacgtaagggttgagaacgttcattcgctcttttaaaagaggtatgaattcctcaatactgcaaaccaaatcccaaaaaatcgagagtcgagtaaagctaatactaacagatttattttcataaacagacaaaaaaagccaactgaacacacctgaactgatcactttccgtcacaatatcctgctttacaaggtattaaatctattcagcatatgttttaaattaaaataccactcaagtttaagaaacaaaaatgtccacaccttaacaaggcgatccaaaagatgagcagcactttggacattggcatcagaatctgctgagagtttgcataaggcatcaaatatcttattgaagaaaataatgaaatcgcctcgcacaacctgtagcaaaccagaaaagaaggcgtggcgcatcaatacctgtataatactacaagtatacaggtataatactacaagtctttacctttgcaatgttatagagagcttcacatgcatagtaccgaactcggctatcttgatcagaaaaggaattaatcacaggtggcactatttgcttcacatgtca

SEQ ID NO: 2906 - DNA, 1701 bp, Arabidopsis thaliana
tcgatttgtggtaactgcaaaaataaagaacaagaagatcgtctcgtttcgtactcctaaatagaaaatttcttttgaagtctataaccaaaaaaattgataaattaaaagaagaaaaaagataagaaaaaaaaaaaaagagttctaaacgttacaaaaagtttgagcaaacatcatctcgcttctttaactcatttaaagagaaacgatggattctctcttcctcctcatgatgtctttttggaccataaagttttcaccggtgtgaaacttacccgcgacccggtttcctgactggaacattgtcctcatcatcagattggatatctccgtactcccagattccggtcctagatttgcgagcttcgtcttggaacttctcaagagcatcaagagcggcttgcttgtctttcggttcccatctcctgcgtttctccatcctggctattccttcctgtgatcataacaacacatttcactctcaggtttcagacaatactcttaactcttaagttttggaggagttgaagagaaggcgacgactgacctgaagcattgctgcattgacagagatctcatcatcgacagcgatgagagttacaacgagctcagttccagtaccttggcccttcactttgcctcctgaagtatctctatcctctaccactgccctgaactctttaccactttcgagtgttacggtatgcaaatactctccggcgtcacgaccaaagtcctcttccttgcctggaacttttatgtaggcaagtctgcagagctgtgctagccctggtgctgaggatactgaagggtccacagggcgtattgcgctgtacggaactatttcttggtttccataatcgatgtagaacacttcaaattcctcctctggagattgaactgctcctcgaggtccattaacaatcttaacacaaatacgaaatacaataaacaaccataagtgatagtaaaaaaagaagaaatcatggttggcatatttagaaactttataatttaccattgcgcggttccaggagttatcgaggctaaattgtgcaaggacgatgtcacccttcttaggattaaacgatccaataatgggagcgtctttaagactcagagctgcaagctggttttgaatcgaagctactttttgatcgccaaccgtctgaacatagaaacgaccgcctccaagtacttccgtaacaacaacctgaagtgttaagcaattaagagtgaattgaggttttggttttagtttagacgaagacaaaggagacattccggtcaatgacttgtagaacgaataatacggctaaattcacctttagtgtttccttctgcctggtttctactttagaactaccgtttactacttcctctccttcaacatagttttcccaaatctgtgacatcatgcggtttagcaagtacagtttttttaacaagatgcatttctttagtaaaatatatcatgtattgatgtttaccttcagtttctgatttttagcagatcgttctgccatttcaagaatatgagcttcgggaatcctgtctgcaccaaagccagtctgcatttttgccaggccagcttcaagaagatatgttcctgcgttcgtctttgagtttttctcccacattgatcccaagaaagtaccggttctatccacattttcaactacaatctatgtgattataaga

SEQ ID NO: 2907 - DNA, 993 bp, Arabidopsis thaliana
gaatttaaggaggtttagtctcggtacggctattggatttcggattcgacgaggtgttttgacaaatatagcggctattcttgtttttgttgctcggaaagttcacaagcaatggcttaatcctcttcagtgtttacctacagccttggaggtgagatatctcttgcctatgatactttacttataatcgtttgcttgtgcttgaaagagtatattggaacttttagtaatgtaggtactacagcatggaacctattatagaaaactttactaatgccgcctatttatgttgccttctggaatcctttttttacttcatagtatcttgctttgatagggtcctggaggagtttggtgtgatgtagatgttgttgagtttcaatattatggtgcacctgcgcaaacacctaaagagcaggtgtatacagagcttgttgatgatctgagaggcagtggttcgtccataggatctggttcacaggtaatttgtgtactaaacttgcatatacgcttgtattatcgacaatattacaataatcatctggccatgcctctcatcttgtaggtggctagccaagagacatatggaaccttaggtgcaattgtaaagagtaaaactggtatcagacaggttggtttcctaacaaaccggcatgttgcagttgatttagactacccaagccagaagatgtttcatccattgccacctagcctcggacccggagtctacttaggtgcagtggaaagagcaacttcattcattaccgatgacctttggtatggcattttcgctggaactaacccaggtagcctagtaacaatgtatagagttaactctgatgtataatggcgtacgacgattttaattatcggtttctctctttctgcagaaacatttgttcgagctgatggagccttcattccatttgccgaggacttcaatacgaacaatgtaccacaactgtcaaagggattggtgagattggtgatacc

SEQ ID NO: 2908 - DNA, 788 bp, Arabidopsis thaliana
tgtccatattacctcgacatctctctgcatgatcttacgtctcattaaagcaatagcttcttccgaatagggttcgccacggccaggacatctgacaccagagaatgcaaaggcaatgctgcacgattcttttggaatgtatagcttgaaccgatgtccacttagcacatattccacaacggcagatatctggttgattctctgcagggatggcaggaaatctttagccttcttggccgaggcacagtcaggtctgcaatgtgtagggctggagaatcctttgcagaatggatattcttcttcccagcaatagcacgagcttcagcagccaggagagcgtcataatggttcgacctctcttcaaagtcacgatgtcgaaccacagtccctaagccacgggaaataatgagttcagcaatattcgctccaggagttgctgcagctgctacagctgtatcacccttggtaggagatggaaggaacactgagccgaaatccatgaccctatcaccagctccagaagtagtaacaccatctcctgggctaatcttccttgagtattccatttgaacaataacctgaaccgggaaaatggatgtcagtgatcgtgacctgtgtggcacaccgagatgatttaagtaagaaggcacaacgcaatagatacctccattccgataagcttttgtctcagaaactccttggcttcgcgcgcataaggggcaggtttctcctctctgcgtgggttacccattttaggagacctgatactggaaagacaaactctgcgc

SEQ ID NO: 2909 - DNA, 542 bp, Arabidopsis thaliana
atcagaagtcgtgaacacaacaccgacttctccaaactcaacctcagtctcatcttcctccaacgaagctgcaaatgataacaacagtggtaaagaagttactgttaaagatcaagaagaaggagatcaacaacaagagcaaaagggtactaagccacagtaagttattcattaaccctctattttaatattatttggtgttggatttttattaattattgtgagttttctttttaaaggttgaaggcaaagaagaagaatcaaaagaaagctagagaagctaggtttgcgtttctgacgaagagcgatattgataatcttgacgacggttataggtggagaaaatacggccaaaaagctgtcaaaaacagtccttatcccaggtataaatacatataactctgtatatacatatatattgcagccctagctagatccatttagaccatcagaccatgctcactatatatgcatgtgttacatatactttatatgtaaagatatttatatgcatatctactttatatgcacatgtaagtata

SEQ ID NO: 2910 - DNA, 1317 bp, Arabidopsis thaliana
catagtcctctaagatagtgtttgaatctatttaaaagcttgaatctcagtttgaatatgttggaatacatttctcttccctttacgatctctgaatctatatagtatcagagcctgaaatttcaatctaaactctgtttttcttgttttcgacggcaaaccaacccaacccgacaacgataccagcagccacggaggtccgacgaacgatttctccgtacgatttgactgctgccgacaacccaggagtcgtgatctcgcatcctctgctccagggaacgaactatgatgagtgggcatgcggaatgaagacgtctctccttacacgaaagaagtttggattccttgacggatctatagctcgaccggctgaaggatcaccagaccttgaagactggtggacgattcaggcactcctcgtgtcatggatcaagatgtcgattgattcgaatctgaaatcgaacatctcccatcgagatgtagctaaggacttgtgggatcatctcaaaaagcgtttttctgtcatgaatgggccaaagatctaacaaatcaaggcagaattggcgtgttgcaagcacagaggacttgcaattgaagcgtacttcggaaagcttactcgcatttgggatagtatggcagcttatcgaccattgagagtatgcaagtgtggtaaatgtgaatgcaatcttggtgagttgcatgagaaagactgtgaagatgacaaagagcatcaattcctctttggacttgatgacaatgtttttcgaacagtgaggtctaccttggtgtcatgagtaccgattcagcccatggaggaggtttataacattgtgagacaagaggagaatttagtgaggaattgtacaaagggcgtcgacgaaagccaagacgtgaatgctttttgcggtccaaacaactcaacaatttcataaggaagacaaaccaacaatgttttgtaaacattgtaatcacgccagtcattcgagtgaaagcaactacggagtgatagggtaccccgagtggtgaggagacaggccaagatcttgcacatcatcgagtcacggacgttgccacggaggacataatagagcggctgggagaggtcgtaacaatgtctcatatgctaatgatgtccaagtgcatgagcctgtgagctacgaaagctcaaactatgtggtaacggacagagacacagatggtgtgagcggattcagtgactcacaatggaaggtgataaagactcttctcaatgctggaaaggtcaacgaatctgaaaattgactggtacgtaaacttttggataatggatacaggtgc

SEQ ID NO: 2911 - DNA, 584 bp, Arabidopsis thaliana
gccagtgtgctttaaagatttaaaatactcgctctcaccagcctgcaacgccagctggcgggggcgaaaagcagttcaccatccaccggtcgggtgcgcaattcactgctgcccgggctatcaatagcactgatggcaatacggtatatccgtgcgcttttgttgttattcactacacgtttgctgacaaagtcagtctcggacggcagcgaaaatgtcagattgccgaccgaaatcgcctgtgtcaaaggtgccgccagcatacagaccgctgtcagcagggccttagttaatgttacgccacgtcgcctgaacatgaatctctcctgaagcgctgacttcgccaaaccagccgttatcatctaccgtacgcagcgaaatggcgttatccattggaatcgaaaatttgactgtggtcttatccatctgccccacttcgccagagatatcagtccacggtgtggtcaaccacagcgcatcggtcatatcccgccagctatcatcgcacccggcatcgtaggtttttgtagctccgttgcgggtaataaaggaaagtgtcgccgggaactttagagcacactggc

SEQ ID NO: 2912 - DNA, 517 bp, Arabidopsis thaliana
taacggccgccagtgtgctctaaagctttagagtgagttggcaatcaatccatcaatggcctatcgttactttggtatatcggcggacgtaacgggaaaattggctacagggtatctttcaatgatagatatctgtttggcctctggagcatcggtgatctcaattatactgtccagtttgatatgcaaagcctggaaaggtgtattaacgccgacttcatctgggcggcaagaagactcccttgctgggacgagaatgatgcttcagcgcgagacgcgtttgcaaagtttttcgcgacatggggcacacatgttaccacaggttgttgtcttggagcgcgataccagctccaagtcacaaggcctgacgcatctgacgaatcgaaaaagaacttccacgaacatattgaaacagagtatagctctgtcctcggcattaatggtgggacaagagacacagctcaatacagagaatacttaggccgacgtgagagcaaatgctctgtcatgggtgggc

SEQ ID NO: 2913 - DNA, 544 bp, Arabidopsis thaliana
ggtcttgtgtgaccaaagaagtagaccaatgtaaagtccgaagaaacgaaatgtcaaagctaagaaacattcaacttaatgattcgcaatataggaatcatcatgtacaaatcccgcgaaatgttatgctctttgtgcgttccaccacttccgtagtgaaagctcttgtatccgtaaagcaaaaagtcaacccttttgagtttttgtcatggcaatttctgcacatttttcattgcagccttgccatggagacaccatgtgttcccaagcttcagcgggcaagacgtccgtagaacctttctcagtcaccttctgaaggaattccggaacaagggaatacgcacgttcatggataatgatatcgagagaggccaaatgatcagtcccgagctcatacaagcaatccgagaatctaggtttgcggttgtagtgttgtcgaagacatatgcatcttcaaagtagtgtttggatgagttggtatattctttatacccagtatcatgattcatataggtaaagaaacagagttacacataaatgcgta

SEQ ID NO: 2914 - DNA, 1496 bp, Arabidopsis thaliana
tataaccatgcaagctataacacaataatttcgttttgttatctccttaaccaaaaaaatagtattagtcattatgtgaaatttaattaaattagttttacttacgtaggccaccggaaggaagtggaggaccaccaactttgatcggaatagcttcggcgaaaacagctttaacgaatgaaccaccggctaaaccagccgccacgagtccaatcactgaccggcgactactttctggtactgacacgttctgctgagccctgatcacaagtccggttctctgagacccaaccgagactcttgagatgttcaaacggtttgagccgttgatctgtaaacttccttcaaggacagcctgagatgctccacgtaagccagccatcgaagtcactgcttgagccattttttttttatctgctttgaataattgattagtgaagtgttgagttataatttttggtgtttggttatgtgacaaagaataccttatctgattcacgttgttacttagattactcggatatggttttaactactaatatgttgacacgtggtttcttgattctcagttttgccacataggattgagatcgagtgttcccagaatgcgattgtcacgtggctgaatgacgtggaaattgaccaattcggttaaacctagtcaaagttaattgaaaaccggtttcgataatatctaagcaaattgtaacttaaatccaatccaacttgacaaataaatgaaatcccttattgttaaaaaaaagtacaaattgaaaaatagataattttggcctcaatttcaattttggattttgtacatagccattaagaataatttggtcaattcaatctattaaagtttatatgatccacatttttaatttcgggtgggttaggaataatagtcacttattcacgaattcaaatacctaatcatgtttagcatccaaagtagacaatcttaaccgttcaacaatattggtatcactacttcattttggtatctaaatatgagcatatttcattccaaaaagaattataatcacaaaaataataataataaaaaaacttataatcacaaaaaaaattacaccgtttttactattttacatttttgttactactttacttatatttaaattacatacacacattaaaacacattattttaatcactaaataacaactaaccaataaaaatctcaatcattatttataaaaatttaaaataaaagaaatattttataaatttataatacccccccaatgggatacttaattaagaaccatataagattgaccgactgaaagaggatggatcaaatgcaactttgatggctcattcgttaatggagatgtagaaagtaaagcaggttgggttgttcgggatagtaatggaagttatctactggcgggtcaggctataggaagaaaggtggacaatgctctggagagtgaaattcaagcgctaatcatttcaatgcagcactgttgga

SEQ ID NO: 2915 - DNA, 1016 bp, Arabidopsis thaliana columbia
gaatttttgttcataattttttttattgtatcaagggatgacttggaaaccgaagatgcttatattatcccatgatctaatctcaccagaaaaatacatcatgtaagttcattttcgaatttctttctctcttacttgcatgtttattccaatatgaggtgtaaattttaagtggttttggttttgtttgagtttaggggtgaagatgatatcgtggagctcttagggaagagcagccaagtagttacaagtagccagacacaaacaccctcttgcgatcctcctctcattctccggggcagcggaagcgggactggagaaggaaatggtcctctaccgcagcctccgcctcccctgtaccatcagcagagtctctttatccaagaagacgaaatggcgtcttgggttcaccagcctaatcgccaagattgtctctactcccaacggctggactccggagtagcctcgactcacccgcaaagtttggcctccctagaaccaccaccaccacctagggctcagtacattctggcggcggatagaccgaccggtcatattttggccgagagaagggcggagaattttatgaatatctcgaggcaaagagggaacatatttcttggcggtgttgaagctgtaccgtcgaactcgaccctgttgtcttcagccactgaatcaataccagcgactcacggcaccgagagtcgagcaacagtcactggcggagtatctcgtacttttgcagttcctggtcttggtccgaggggaaaggcggtggcgattgagacggcgggaacacaatcttgggggttgtgcaaggccgaaacagagccggttcagagacaaccagcgacggagacggatatcaccgatgaacggaagagaaaaacgagagaggaaacaaatgtcgaaaaccaggtgagtcagagctcccatatataggttaactttacgcaaacatgtcagcgcgtgttagtccttgactcgtgcagtttagcagttgaagcttaatttgt

SEQ ID NO: 2916 - DNA, 1399 bp, Arabidopsis thaliana
ccatgtcttccctttgttcacggtgagattattattatctcacaacagattcaagggactataatttgaatgaatgaaccctaagtgttgttatttttggtttcagttgttatttctgagaatactcggaatcatgctacccatctacgttgtcaccaaagcagtcgccacctgccgccgccattctcggaccttagacacctctccctccgatgattcatctgatgaagaaacagattcatggcgcttgcctcaaacgcaatcttacattataggcgtacgatgatcactcattcttttctttcacacacacacacaaagtcaaatgacactgtaaatataacttctggcttatacatgtaaaatgttggattggtttaacagattgaaacaaaaaaaagtatctcattaggaaagctctcttctcaagtgttttcccagctgtgcaatgcagatagatagacaaagaagactcatcttgaattcttacacaacaactctaaccatatgatccaatacaaatttataaaccactataaagattcctataaagatcccaacattcacaagtgtctctctgtgtttgtatcccaaaatatcaagacaagaatctggactatctttcaaaatcagagacaaaagttacaaggaaaggacctgcaggaagcgactttggtatatcaactccaaacaagagcctttgtgtttgttgtctgtaagttatgagaacatcaagaccttcttgtagtttagtttcaccttctcctcggcctgaaaataaacgatggcccacgaatggtaagaaaacaggagttggtagctaccactagatttaaatagatagatggaagtaatacttgcggttcttctgctgtgtcctccagtaacaagcaagcgccccaaatgcacagctggcgatggctattgcaatgcagctccaatcggcacaaccagagcattggtggccactgttaagtcttcagtggctgagacggtctcttccttgctccggctgacactcttttccttgtaaagagatacgagcttaggcccatagtagttcttcaagaacttgtagacatgttcatggtcccactctatgcttttctgattacttgaaagataacacaatgggcaaagctcctttggtggccatataatcttggggaacttggggtcacctgtaccaagggaagcttcgtccttcaagagtctctcgttgaccttgttgtgtgtgctccacacccacaatacgaaatcacgtgcctttttgaaaggggttttgacgctgtccatgaaacacatgcatatgaggttcagttgagcaaataccacgataaatcgaactgtgagttattattattatttttacctcaagcacatgtcattgaaatgcagg

SEQ ID NO: 2917 - DNA, 1027 bp, Arabidopsis thaliana
tgttggcgattctaaacgatgaatgctcgaaccatgtcaaactccaagaattcacatcggcgcaaatgatccaagtccatcatcctcggtgctaaccctggttccttgagcggtactcctctctatcaaatctgggtttggttctctttccactagggaaaccaaacagttcttccaacttcttgatcgaaagctgataccgctgttcatccactgcgaacgccaagaaccctaaccccatggtatccagctcaaagtctgtgagtccctcatacatctccacttgcagcgtggaaagaaactcgattgtctcctccttatagacagcgtaagggtaagacatgagtgtctccagatgacacttctcgaacagatgctgcacgtcctccagtaacccgagctgggctaaagtctcataataaagatacctcgttccctagaagtcattcatctcaaagaatctgatatactcctccactgtaacctcatcgggtttgttcaacagcctcgtttccttgcgccatgactctggctcatactcagtttcgatatccttatcagtcagctcatatctactcgacatcgccctcttttctctggcgatttcagctcttctctgattacgtcgagctgcggagcgttcaaattcatccctaaagctctcgtaaacatgttgctccctcggtctagcggaacaggactcagcttcatccacattataatcagggtccatagaagattctccactgtagttactcatgatgaaacctgaaaacagatgaaactcaaagataaacgttaatgcgttagtaacagcaaaaccaaaagcacaaccaaaaccactgtaccggtcgagtgttgaatgtgtagaaggaaacaaggtcgagtggcgttgatggagcttcactcctcttctctttgactcggcaatcgagtgatattttaaatggcgatggtggagcgagacgcacggtggtcgagtatggtaggtgatgaagatggtgaagagagatcgagtgattgtcag

SEQ ID NO: 2918 - DNA, 1216 bp, Arabidopsis thaliana
tgataacaaggcatggctaacgtttttgagtaaaatttaatcatatcgcatcttagaactaccaacttggacattgattttatttgctctacctgatgctttggttctgagtccccaccttcaaacctctccttcaactatgtcttcttatttgcttgagggcaagcaaagactaagttttggggagttgatatgtctataatttgcatgttttcagtgtccattcatcatcatttcgagtcaagttttgtatcattcatcactgttttatatcatttctcatcattcttgcatactttgcatgattaggatagctttgcatacatattgcatttctgagttgttttcaggtgatttggagctgtttgcgagcaaattagaagaaacgagccagaaccagaagatatactcgaccaccatgtcgtgtgcatccagcgccatactcgaccccctggtcgagtgactttggagccattcttcccatctactggacccccagatcgagtaacctcagctcaggccactcgatgacgccactcgaccccctggtcgagtatcacttcgccaaaccacctgaccacactcggccgttcactctaccacgttactcgaccagtgggtcgagtatcatcactcaccaccaacaccactactcgaccgggcactcgatcacatcttcttagtctactcaaatccgcactcaaccagactagtggacacaaggaagagaagaggagaagacaaagtgtttggaagcggcctggacctccatcggatcacgaagcccatctcggcccattatcactctatgggccgggcgattaggttattggcccgtctactatcattttatttcgttttgcataaatagatgttttagggttctgtcctgagacatctagtcgacattgggtttttgcttcagttttatttttagttttactctgctgcgccgcttttgcttctacaacctgtagttcgcgatttttccaagttattgagattccgcgtttgatttcattagtcatcttgtttctctactctttatctctttacttatgcaatattatcgtttatctgcgtttatgtctttgagcatgttgtctgagtagtgacttagaattcttagggatgggatagagtagttgtggaatctgtagtctgtagaatggttaagtttcagaattgattgaacactttaggactagttgcgttt

SEQ ID NO: 2919 - DNA, 908 bp, Arabidopsis thaliana columbia
cgaagaaaatgctccccttccacttccacttctacaacctccacgtcccctgcatcatcagaatctcttcattcgggaagaagaaatgtcttcttggcttcactattcttacactggtgtcacgtccacaccggctactcatccgcaaagttctgtttccctgccaccaccaccacccattgctccgtacatttccgttctttttcctttcattctcttactctttgcaatttgacgagtctgatattttagggtttggattttggtttgaaattaggagtgaagatgatgtggtggaactcttatggaaaagcggccaagtcgttcaaagcatccagacacagagacccattcctcctcccattttccgcggcagcacgcttgggggaggtgaagaaactgttctgcctctgcctcccctgcatccgtctcatcaaaatatcttcatccaggaagacgaaatggcctcttggctttaccatcccctccgtcaagattatttttcctctggcgtcgcctctacttcagctactcgcccgcaaagttccgcctctctagcaccaacaccaccaccacccagtgttccctacggtcagattcccgttgagagaaggacagagaattttatgaacttcttgaggctaagagggaacatattttccggcggtagagttgaagctggtccggtggttatagaatcgacgcagataggctcaagcgcgaccccgtcgtcttcagccgctgaatcctgtgtaataccagcgactcacggcaccgagagtagagcggcggccattaccggagtatcccgtacttttgcagttcctggtcttggtcggaggggaaaggaggtggcaaccgagacggccggaacatcatattcaggggtaaacaaggccgaaacagag

SEQ ID NO: 2920 - DNA, 776 bp, Arabidopsis thaliana
agattcatcacctaaggtatacacagtcttgcttgttaattagttgctctgtatatataatcagttgtgttataaaagatgttttgatgaagaacctggtgttgaagagagaagagatggccaacagagccatagacaggatcacgaatccttgccatggcctcgtaacagagcgtgacgactgcatcaagtctcttgtgcagaggcaatctcagtaacatcttagaggcattgctggccccaaatactttgtgaactgctgcaaatctcgcagttccttgctctgcatcgaaataaggagcgaaaacgcaccctttcacacactttcttctcaagaacttgcaagccccgcatggtccttctcctcctcttccaccgccgttcaagtttccggtcatcatcttcaagtaaagagagagagcaagagagggagagatgtattgagagaaggaggaggtttgtttatttacatcaggctaactcagtgaactaatttcaacacttataataaatgaaaagtgtttgggttttgactgtcaatgtaagtttctgtatgctattgactgatcggccgcttatttattaatttcatactatcttttttatgtattgggctttacgtgaatactactcatgtatataattcgtatgaacaattaatatgggtccaaaattcgatgttataaatgatcttctgctaacatgttctatatatttagtgtggaaattaaaccgatacaaagcctaggaaagccaattattcccaagattgtata

SEQ ID NO: 2921 - DNA, 1125 bp, Arabidopsis thaliana
ccacatcaaaacaaattccagaccaatgaaccaactaaacttgatcagcctccagattcacttgccttctactcgatcgagcaaagccaagttttgaagaaagaaaagctaatgttgtagcaaagaataaagaatttgctctgtcaccctacaaactgacaatgcctttccctggaacatttaagaaggaattaacagaaaaatacaaagccactttttgataggcagctaaaggagattgaactaaaaatgccattaatggatgctttcatgctcattccaccctcccacaagtacctacaagatctgattatggagagaatcaaagaagtacaaggaatggaagttcatagccaagagtgcaatcctattatacacaaggagagtgtccaagaaaagctagaagagcttgctgttaaagatctactccaaacttctttaactaagagagttgaagctaaatatctccctagtgagaccttgatctctaagaagtcattagcctcccacaagatagtaacatgggcatatgtcattataggtgtgattaggtcaaaagaggcatgttcaactcaagctcgaccatcaaactcgaccagtaggtcatgttcaaacctctactcactccaaatgctcaagctcaacgtctaaagtcgacctgcatgttaagcaaaacactctagcttctgataattggttaaagcttcaaagaagatctaaatggcaggagaaagccataagggagctaacacaaacagtgaaagaactcaaggatcaaattaaggacctcagtgggaaatccaaccaagtaccattcagcatcaaagacaaaccccctgatggaaccaccaccttaattagcaaagccgaagctgaactcaaagtgaatgggcagagagtcaatccttgtatggctgagcagatcattcaagagtagtgctcatttcctctcctctcatcatcctttgcctaaaaacagtatgaaagtcaagctaaagactttacactagctcacttgggaggaagtccatgtctaccatgtatataagtttatattttgcttgttatttttgatgtttttgtttaagtgtttcaggtttgttttaattaccctgaggaagttac

SEQ ID NO: 2922 - DNA, 1096 bp, Arabidopsis thaliana columbia
attgtgggtgacttcttcaacctgtccatgtcaagaggcataaccacatcacactcattcaaagcaattggactctctatagatacagagttatcgagtacacaactgcctagatcgggcatgatggtattaactattgtagagatatgtgttgccagcttgtctttcatcgtctatggagcatcatacatcagaagtgcaatgatttcagcgttaagcaagctcgcgtccttagcactaatacctttcgatagcatctcccatatataatcataaagtacatactccaggttcatgaagtctacataaggtaactctgatagaagctgtttacaaagcgtgaaacagctgttacatctatgttcaaggataatctgctcagtttattcaaccggtggaatcttaacatattatggtgttgtccttgcccattgttcatcgacactatcatttgttgttgacacttcggtatcaagcccgctcgatttcgctccgttaaacgctgaagcattgtctgttccagaagagtgtcgatcgacatcgaggtcatgtcgatcgacactgtgacttagtgtcgattggttctgcaaatcattgtggcaagcagtcgtgagtggttcctttaaggtctggtgctgaattctactctctgactgaactacactaacatcctctctattgatccgagcattcaagtcctaaacttcatcgtacagactatcaatccgttgattcgtcatcacttggcccttaagaatctattctagcatgtattccatcctaatcgtagaagtgggtggagggtgggcttggtgactagaatagctggaatgactagcatagaacatatcaggcgtggtgtagtcatctagttaaatagcacgcccttctgcaatagctgcagctctgtattcgccttggtgtcgagcgacacccaggtggtctcgatcgtcacaatcggcaaaatcatgtatcaggtttcctactcatcgattttccgaccatcctcgttgtatgcttggccagctctctcccttaacactcctacagaaacaggtattactatcaacatctttgtgttgcaattgaatttttg

SEQ ID NO: 2923 - DNA, 1038 bp, Arabidopsis thaliana
aagggattggtcagctaaacttgatgggactttatgggcctatagaaccgcatacaaaacgcccattagaagaaccccgttccaaatgctatataggaaatcttgtcatctaccattggaagagccatttgggcaaccaaacttttgaacttgaaaatcaagggagctcaaagaaaaaagagcagtcaacctgcatgcactggaagagattaggctagaagcatatgaaagttcgaaaatctacaaagaaagaacaaaagcctttcatgacaaaaacatcttaccaaaagatttcaacattggagaccaagttctgctattcaactccaggctcaagttgtttccaggaaagctaaaatccaggtggtccggacctttcaccatcaaggaagtattgccatatggggcaattactattaccgggaagggaagttatgaatttactgtgaatgagcagagggtcaagcgttacatggcagattgccctattcctgaaggaactacagttcacctccaggagcccatcagaccctaaaatagtaaaaagtctagcttaagactttaaactagctcacttgggaggaaatctcatgcctatctctatacatatttgattattatattttgatatgctttttagtgtttttcaaattcaggaaataaatcacgatttgtagagttatgaagtctgtgatcaagaaatatctgctacagaagcaattctactctatcaattggtcgagtaaatttgcatcatcattttactctatcaattggtcgagtatagtgactagacgatcaagcatggtgatcgagtggcccagttgtttctccatcactctattactcggtggacaaagcctttacccatcatgctcaaatactattcggtcaaactttcttatcccatcaaagcatgggagaccattctcctccactcattcaaatcgaaaccaaagataagatatcactctctctcactttcttctttgtgcgcacctaactatcatctttgtcgagtactctttgaaaagagtg

SEQ ID NO: 2924 - DNA, 1229 bp, Arabidopsis thaliana
cacatatgcataaaaaataaactatattgatcagatttcagttgttaaccaaattaatcttatttgtttaaatttttctttcatttttttcatttcgtttggaatattccattccattttcagatatacaaaacaaacaatcaatataggtcatttggttttaaataataacagtgatatataagtcttgctaactggcaatttgaacagataaaagtatcatgatatcagtagtttggtcttaagcgtttttcagagcaacataattgtaaagttttatttgatcgaattaaccaaatttagaagttttcttttaccattacagcaccattttattttgctttttcgaacttttccaaaagccggactcgccggattattctgatattaggttttagagtttacgatatatataggaattgctatatttaacagaaacatataatattaggctgtagatttacttcatgtttctgattcatatatagttaagttgcaataatggaagctagttcagtttgcagtttgtttatgaattcttggttagtaaacataaacaaatatatatttttcacagttgatcgagatttttgagtgtttactaacgcattttcaataattgtatgtgtatagggtggaagcatggagaatgtttcagagataagtgcctgctgatattagaacattcaaaatgacaatacatcactgatcaattagcaactagcaaaccaatgccctcatttattaattattaggttattatagttcttgtagtagcttcctttaagattttctgcttgtctcactggatactgtaaaaaaaagaaaaagaaaaaggaattagtggtttagatttttctacaagatcagtaatcacaaagagagagagtgagatgtactctttacctgtcgcagtcagtggaagggctgaacttgtaagggagatcgacaccacatttagaaggcaattccaaagcattttggatggttctaggagagagagtgagtcctccaatagcagatttgatgcaacgacagaccccctgacggtccacagaagtttgagcctgactcttgagtgttgtgagaccgttgcagcagagggttgggaccggtccgccctgagtcacgtaggataagcaagggtaaagatccgcaatcaccgtgttgcaagacacggctgcttcaccgcagtgtaaagcaagaaccaggcacacggctaataagag

SEQ ID NO: 2925 - DNA, 477 bp, Arabidopsis thaliana
taaacatccactcagacttgttacgtgtatcgatcttacgaaaaatcgtaagattttcttccctggtgttacctctcaaagagatcttgacatagccagaatcttccccacgcttaacatatgctccaacactagtagctctcccaagaagctgaggctcaccaccaagacagagtgcaatggcacagacaagagaactcttacctgatccgttaggtccaataacaaggttcaaacgtgatccaggtttgcataccaagtgattgaatgtcatgaagttgtgaagctcgatttcgattatattcccaggcaaaaagtcatcttctcctctggagattttaggacgcttagcacgacgttcagacatctttgtcgtttctcagcggttcagagatttttactgagttaacctgaaaaaaattgaaactttcgtatgaaatccacagggaaacaatgtagaatcgaaaattagaaact

SEQ ID NO: 2926 - DNA, 1064 bp, Arabidopsis thaliana
tagcctatatctagagtcaatctaatccattggttcaaaactaaggaacaccatttctcgacaaatacaatttctgaaaattcactaccacagaagcataaatctcagctatagcaacgaaaacctcaatttcaaaatcctaacagaatagggagctcgttaattaagaaactgaaaaaaagtataaattcgagtaccatagtgacaactccgcgtttaggcttggaactggaaaaatttaacggattaagcgattccgcacgaagcttagcgccgcataagtcactagagatgcttcctccggtatacggcgaaagaaagccattcgaaagagaagctctgagagatgaagatgaagaaaatctcggtttagatctcagattacgtgtagaagacgggataatcgctgacgtacgagctcgaagcgttgtgaagctcgtcgcagtcgctgctgctacctccatttcttctttgttgcagagagagagaaagagtgaaagtccctgtgaccccgaaacgatagcgatatgtctcaaatcgggcttcataacattatgtatgggctcaacaaataggcccaatagttgtagttttttttctctgaaaatattccggtttcgactataatagtaaccaaatcaaaccgaagtaaaaccgggaatttctcatttttcgaaaacgtataatttaatatgaggctaccaaataaataatctactggccactgcagagaatcatctgtcgtgttctgtttgttctcacttctcacttctcagatttttataaacatgaatgaaacctgaattgttccactaactctcagcaaaaatgcgatcactttacttaatcgtcttcatcgttattagtaagtacgaatcttttagattcttctcaagttcttttgagtatactgtgaaactaatcagaactttcttatttgttatcaaaggtcttgttaaagcttcgaaaagcgatgatgggttttgttcagcgccttcgattgttgaatcggatgagaagacgaaccccatttattggaaagccacgaatccaacactctctcc

SEQ ID NO: 2927 - DNA, 447 bp, Arabidopsis thaliana
tggtttcagtatttagaatgtaggttttttttttttctttttttccaacaaacagaatttatttatatgagtaaatctttacaaagagagtttttgagccaaagtggctgataaccagaattcgattgaaacttgtaacacgaataaagtggagaagctaagacgtgagcagtattattacagagtctatttgtgaaagtgaaaaccacagtagaaaatcttgatgcccaaaaatccacatctcggagaagactggttatttcacatctagaaattgcaccattaattgccttgataaggatctcacaatcacctgcggactgaacacacttataccctcgtacccatgcttgttgcattgcgattaataacgcttttgtctcagcttccaaagcagtggtaccattgtagactattgatgaccccaagccttcgctaatcctgcat

SEQ ID NO: 2928 - DNA, 745 bp, Arabidopsis thaliana
actattcttttacagtaagtagtaactaacttacagaagtaatagctagatagaatacaattttagttatatcttattcaatcatattctttagtccatttattcatctaagtttcaactattaaagccttggtataaacgaaaatgaaactaggaaacatccaccaatatatataagatgcagagcaaaggccaattacgtcctcgatcaatctacacatagacatgttcacacacccaatacatagagctatgcccattatcatcatgtacataaacatacacatatccatatacatgcaaatgctgatcaacagacctacttatcacatgcagcgaactgatcagcaggtgcacttatctcaccctgatcaacatcaccactagtaccaccactagtgctggtttgtccaagcaaactacttattgaacgtgcctttaccatgccaagctttactctcttcttcttcacttccaccaccaccgcctttttctcgccgccacgaccaccaccactcttgttcatgctccttacccttcctttaccgagatgatgctcacaaagagaataaccaacaagcgtttgctgacaacatctccatcctctaccgttaacacggctgcaccgtgatccttcctctaacccaccaccgctctttttcgctttctttttccctttattaatacggcctccaccgccactagcttcttcatcgtcctcatcttcgtaatcctcaaagttgat

SEQ ID NO: 2929 - DNA, 572 bp, Arabidopsis thaliana
caagttcttgagtttatccacatcctcattcttacgaataaacaaaactccagccacagccacaaacaatagtgtcttgcagaagaaattccccatttgatcaacaagtcctactccggtaagactatcgacaaagtaagccataaagaatcctatcatcgccgcacgacctacaaagagtaagagtaagtaacattctttgtgtatgtgtttgatcttttgagagaggaaacaaataccatttaagagttcagcttcaggtaagtggtatctcttaatccaagcccaccatggaataatcgatgtatcgaaaagcactggttcgtcgttactcgttgtttctggattctcttctagccattttcttctctttgcctcttcaaatcaaaacacattaaacatcaaattcaaatttcgaattttcaccaaagtaacagagcaaaaaaacttaacgaggatctaattctaatctaaccagcaacgattacagaatcccaatcggtttttccatctttctcgaactgtttcagatcccaagttccattaatccatctcgcatcctggaattatat

SEQ ID NO: 2930 - DNA, 812 bp, Arabidopsis thaliana
aaaatagaaaccgcttttttctttattttttttcttaaagtcaatcagtaaaacaaaaactgccattacccataataccaactacactttcacagccaagtgtctataaatacagagcataattacaccatctttccttacaacacaatctcacaacaattacacactaaacaaaattcaattttgcatctccatttctcgagaaactttcgttttcgtagacttataaaaccatgggtcatggcactaacagagtagaagacatggcgtcaccaaacaatggaaccgcaggagaaacggtcgtggagatacacagcgtttgtctaccgccgaagaaaacagcgtttcagaaactgaaaaaacgcgttggggacgtgttcttccctgatgatccgttacagaggtttaggaaccaaacatggagaaacagagtgattctaggtcttcaaagcttgttcccgatattcacatggggttctcagtacgatctcaagcttcttaggtccgatgttatctctggtctcaccattgccagtctcgccattcctcaggttactatttgacaaaactcactcttttacttttacattgggtttttatgaccaaaaggaaagttttatggaacgtttcgaaattttgaaaaagttttaatccgtgaaatcattttgtttttttatgttgaaagaataataaaaggcgtaattatattgaagaggttttgtcatttttacatcttgagttgtgtggggatgctagttggacttggagaagctaaagcaaaacataaatatactttttgtggttgtttggat

SEQ ID NO: 2931 - DNA, 488 bp, Arabidopsis thaliana
tcattattcccgcccagacatgaacccttccttaattgccctttcacccttcaattttaactttattcccattttgccctcctctgttttttccacagagaagaaaagagcatctaatccaatccaaaatctcttccggtggtgttttcagcttcaattccaatgatcaacggtggagtaccagtgtagagacggcggttgttcatcggaaaagaattcacaagcttcttctccactcagaaagtcctcatgatcctccgtctgctccattttcacaaactggaagaaattacctcctggaaccgtcaccggagccgccacagtgacattagagctgctttcttcattcagcagagcgcttgaatcgctactgtctgaagatccagctgcggcggcgaatgaagaagccgccggctttaatggaagaagatcacgtagatctgtgaaactccggtaattaagaccatcagaatgttcaagaaaccgtg

SEQ ID NO: 2932 - DNA, 721 bp, Arabidopsis thaliana columbia
agcttaaggtgttgtaatttttttttactttgaatatctatttatcttgaattttacttgactattttgttctctcacttccactctctcaattattttgcaattcttcttacttctctctacaatttctgaaaacatgtaagtttttggtgtataaaatgtatctcttaccttaggtggttctgacgaagtgtgtcctgttttattttgaacatgaagattttgtacatgttacgttggttatatatagatgtccgaaaacatattgcgagggatttgcgagggatttgcgaggaacttgcgaggaacagcgctattttcctacgaatttgcgaaagaaggtcaactaccaaccaaagcaggaagattatttaaaacgtgctgacctaacctgccaaggactcgcaactccgacgcaaaatttgctacaaaaagtttgtacgccgcaagtttaccgcagtttgcgaggctcttatcgtacagcaaatcctcgcaagttgcgatgactttgcgaggaattcttccgtcgttgcaattttctcgcagttgccacgcaatattgcgtgggaattctccctcgcaaattttgcgactgattaacgacgtattggttttccccgcgcaaagtgctcgcaagtctatagaaatttgcgatggatttatgccatctcaaatttcattcgcaaatcgcctgttttcttgtagattgagagagatttca

SEQ ID NO: 2933 - DNA, 1205 bp, Arabidopsis thaliana columbia
tttatacataagcaaactcactattaaagtgtttatgatttattttacacatttgctttagtcctacttaaaatacgaataaattgctttgcagtataacaaatatagcatctcaaatataataaaatattgcatttagaatatctagatctaaaatattaagcattacaataatcaatttagataatctaataaactataaaaggtaactcaaatcgacaacatggacatttatcatcatttagatgtgcatttgcttattgtatcatatcattttgcaccattttagcttattttgcatacttaggcatctaggatcatcttgcatacgcattgcatgttttggtgtgttttcaggtgcagaaggagctcaaaaggactctactcgattcattcactcgatccaggcagctacagaagaggcatcatttcactcgacctctttactcgatccaggcagctacagacgaggctgcgattcacttgaccctcttactcgaccaaggcagcctcggatgaagcagcaaattgatctactcgcccctcctactcgatcctctacccgacccattactcgaccaagggtgaccaactctacaagacttgttgagctatcaaagcgtcttcggatcctcctcattccccactcaacctgacatctgagcatacggataggagaggaagaagcatctactcgaccaattgatcactcggagcatagacacaaaggcgcagactttgcagcaccctctttactcgatctccaagatcgagcatctatctaaatcgcctcaagtgtcttgtcttctagtgaatctaggggtttcgagattttaggataaataggttctttggggtttgtccaaatgaccaagcttttattctgtagtttttctttgtgttttagaatccggaaaccttaattactcttaatctattttgtttttgcatttagttctttgagcaaagttgtttatcttgtttagatctatattttgatatgtttagagtaatttttgggtttgtgttcttgattatgctgcttgagtagtgattagagtcattgaggatggattagattagggtaatctctatgatagtctggtggttaagattaggttagatcccttctggattcattggccctaatgcttatgtcactcagttcagtttggaattcgacccaaggtattccagcgtccaaa

SEQ ID NO: 2934 - DNA, 1164 bp, Arabidopsis thaliana
taactcaacaataactaaataaaaggtataactcagtcgtataatatgcagatcacgcagtcataactaaataaaagttataactcagttgtataatatgaagataagtcagtcgtaactaaatcaaagtaataactcagccattagcttactggaggaggactagtaacagattggttatttgtaggtttccttgaaccttctggtgtctgttgagtttggggtttaaggtagccttgccgccctttggttaaaaacatatctctaattaaactagagtttaattatgcgtcagctatgcccttcagatgctctttcatgtgtttgacctcgttctcaatagatgcaaaccttctttcaaactttgcatcaatcctcgattctacttgaactccaatcacctccaaacgggaggacattactttgatgctattatcaacggtgtcaaaccttgagcttaagggagagatcaagttggacaccacatccacgagcgactgctgttctccccgaacatcctgctcgtcctcgtcctcatcagattcgacagctacttccttcttcttattcttcttcttcttttgggcatctttctcacgagagactttctgcttctttgcgggagattcagagagactttctgcttctttgcgggagattcagacacatctgcatcattatcttttacgagtttcttcttcttctcactcgttttcacatcccaataacctttaacaagcttaagctcgtgtatgtcttcgatcaagtgatcgagtgctgggtctgctaattggtctggccaagaatggaacagctcgcttaactaagcctttagaaccattttacgcacacgcagctacaacacaagagataataaaacccatcagtatgtttaactcagccatagtataactcaagcgtcacatcatataactcagccattacagaatataactcagccgtcacataacataactcagctattacagaacataactcagctgtcacataacatatttgccaaaaaagagaacataactcagcgttcacagatcataactcagccgtcacataacatacttgacaaaaaaaacagaacatcaactcagtgataagagagcacaactcagccgtaacattaatatttgataaaaacaggacata

SEQ ID NO: 2935 - DNA, 1061 bp, Arabidopsis thaliana
cgtttccgcttttctctttaaaaccttgtttcttgcatgtcaagaaatcatgtctattccagaagaagtctcctctgcaacacatccacgtaccaatcaacaaccagatgtaaccaaagtgtctccgtacactctggccagctccgacaacccaggggccatgatttcctctgttatgttaaccggtgacaattaccacgagtggtcaacaaaaatgttgaatgcacttcaagccaaacgtaaaactggttttatcaatggttcaatctcaaaaccaccattggataatccggattatgagaattggcaggcggtaaactcaatgatcgtgggttggattagagcctccatagaaccaaaagtcaaatccacggtcaccttcatatgtgatgctcatcaactatggagtgaattaaaacaacgtttctctgtgggaaacaaagttcatgttcaccaaattaagactcagcttgctgcgtgtaggcaagatggacaacctgttattgactactatggtcgcttgtgtaagctttgggaagaatttcaaatttacaaaccaattactgtttgtaagtgtggcttgtgtacctgtggtgctactcttgaaccttccaaagaaagagaagaagagaagattcatcagtttgtgttaggactcgatgattcacgctttggagggctctctgctacacttatcgcgatggatccgtttccatctcttggagaaatctactctcgtgttgtgagagaagaacagagactcgcatcagttcagattagagagcaacaacagtcggcgattgggtttcttactcgtcaatcagaagttacagccgatggaaggactgattcttcgattatcaagtctcgtgaccgctctgttctctgctcacattgtgggcgaagtggtcatgagaagaaagattgctggcagatagtcgggtttcccgattagtgcacacagcgaaccagtggaggtggacgaggatcgagttctcgtcgtcgatgaggacgtagctcgtgttctaataactcaggtctgggtagaggacaagtcactg

SEQ ID NO: 2936 - DNA, 1426 bp, Arabidopsis thaliana
cattttcggaggaagagacctgcgacttcggataaacctcacgacgacgccctcgtaatatcactcgatgtggggaactgcgaagtacaaagaatcctcattgacactggaagttcagtcgatagatagccgtggttcaattatttacccatctttaaaagttcaaaatctgatagatagccggtcaaatttttggaacattgatcttttgaaagagctcattgacctagaaatgtccagctaataagtgcactgcacttgggtacgtcaacaagggatgattccctaggttagcatttcacaaaaactggaactgatacagttaaatccggctaccataaggcacagatggaaatcttgggaaacaactcctctttcattggcccagaaatcaaagctctgaaagcacaagtgtggaaagtgcaatgctcgcctaagttgcgccattttttatggcaaatattagcaggctgcgtgccagtaactgagaatttacggaaaagaggattaaattgtaattcaggatgtgtcagattggcactatagaggaaacaataaaccatactatttttcagtgtcatccggtaagacaaatatgagctctttcaaagattcctacggtcccaggtttttcccacttattaagtttatggaaatttggattttattctaaagaatccctttagaatttgattcatctgcatatccatggataatttagaatactggaaagcaagaaataaaaaagtgtttgaaaatgtggataaggacccgctagacgtgttatgtctagaagaaaaagaggctcatttatggcagttagctcaagtacagctcaatactgaaaatcaagtctcctatcgatcggaaaaccaactctgggtgagggatatctcacaagacattgtgtactctggctgtcgttgtttcgtggacggttcatggaaagaaaccgacaagttttcatgtctaggttggctttgtacttcatttaatggagggacgtcaacaatgggagctgctaatctgcgtaaaagtctttctcctctccatatcaaagtcaaagctttactctgggcaatgaagtgtatgattggagtcgacaaccaagaagtagcttttttaacaaactgttcagacctgatgaagatggtgtcttctccaaccgaatggctagcattttcagcgtatttggaggagtccagagcgagaaggaagagtcacttcttttttttatctttaatttctcgtaatgcaaatatcaaggcggataatttgacacgaaaagtttgtgttgaccgcttcatatcacttatgtaacatgttccctctagatggcttgtttgagcttaaataatatctgtgaaaaaaaaaaagctattactatacatatgggtttagatagtggccctatatcaatgagtgt

SEQ ID NO: 2937 - DNA, 1235 bp, Arabidopsis thaliana
tggtttgcatcaaaaatgtcggatattaacatatgtacgtacacttgccacagatacactttaatgtacacatctacgtacactgctatttttaggcatattttttattagaagttgctcataagaacaaaaacaaatcatatacgaaaaactattacgttgatttgacaatctgaatctgcatcatcacttacgtcctttgcaataaatacaaccataacttacccaaccatatcttcaatgatgtttatttaagagttggaattttattgttttgaaacaccttattccaaaatatggcaaacccaaatatacttgatgatttgctagcgaagatagccaagcaaatggctcacaaatgttggtggtacctcggacctatgttgaaataagagcctcatggaagaaatatagtctaccgatcggatgtcctgaaagatgcaaatattttcagcatgtgcgacgatcccgatgacttccacgcggttggctatgatacaaatgacatcaactctaaatgtcgatatagatccttcttcgaacggtgcgtagaggctggtaacccgactgctatttaccgtgaaggactgcgtcttgttacccatgagtctgacattaagggagctatcgtacatttagagagaattgcccaaagcgacgacgctgcaacccttgcctgcgcaattttttacatatttgacggtagtgctcacatgggtggtatttacttcggctcttcagaagcaaccattatgctttagaagaaataaagaaatatgttaatactttaaaaaacacctacgctaaaagcttttcgtaccctgaatgtggtgacatttgaacgcctgaatgcgcgatgatgtgtgtcgggactctttaataatctttgcaacgaatgtaacatctggtggtgtgccaaaaagattagccagattctgtagttttgacattcgtaacgatcctatcatatttataagtgtttcatgcaataatatgtgagctttgtactttgattatcaataatggaagtttgtttttaataattaacactttctaagaatttccaaacttactaaatcaaagtactgtaagaagaaacaacccatatgaataattaaataacaaaatatctacgtagatgctataagctattgtacactttgtatcgtttatttcaaactggaaagataaccaacgcaagtgacgagataattagtaaataaagacgtaaaaag

SEQ ID NO: 2938 - DNA, 771 bp, Arabidopsis thaliana columbia
tgttgagattccagcggttgtaatgactgagcagcatatccttaaagctcgatgttacagatgtttcacgctgtgtagacaacttctattagagttaccttatgttgacgtcatgagcctagagtatgtactttatgattatatctgggagatgctatcgaaaggtatcagtgctaaggacgcaagcttgcttaacgccgaaatcattgcacttctgatgtatgatgctccacagacgataaaagacaagctggcagtacctatctctacaatagtcaatgccatgatgcccgatccaggaagctgtgtactcgatagttgtgtatctacagagagtcaaattgctttgaatgagagtgatgtggttatgactcttgacatggacaagttgaagaagctacccaccatagattgtcaggcactctctgtagagcactccatagacactggtgttgagatagataaggttcatggtacaagctggcagctacaaaaagcaagtcacgatctaattgttgagaatggatctacagcgatagtgtcgatcgacaccaccacctttgtcaatcgacaccccacataggctgagccggagttctttgttagagctagtttttgggatgagttcactgctgatactccaggcactacagtcacgtctcccactctacctccactttttgatccacctccgaaacggcaaaggtactcatctccccctcctaaacctcctgatttcatcaataagactttaaaatctccaaaaacagt

SEQ ID NO: 2939 - DNA, 1024 bp, Arabidopsis thaliana columbia
taattttctatttttcttgttatttttgatgtttttctttaagtgtttcaagtttgttttagtgaccctaagagagtcaacagtcgagtaaattcaaaccaagtcaaaaaagatctcaaccgttgatcgagtagaatgaggaggagtatttttagccattgatttggatgatcaaatgagaggtgcatcaccaccgtttgagcgagtgacttcctgaagtttattttggtccgtttgatcgagtaaacaagaatgagaagctctccaccgttggatcaaattttgcgcaactaaagaagatgctcgatcctttacttgagcttgaattatttggagaccaagaagtggtgtcgcatgtcccacttgttccccttcacttcattattcaacggacaaaccatttacccatgcccatcaccatttccaatcaacttttctatctcttccaaagcaaaccaaagaccaatctcctccacccattgatttcgacaaaccctccatgaaactctctctttcatcatctcgttttcgcaacccctcacaaagctttgaagtcttcattccaaacccttccccaaaacgctccctatcactccttaagaatctgttccccttcaccattacttcaacaaagttactcgatcacctccaaagtctatcctcaagcattcaatcggtttcaagctcaaaatttcatcaccaaagaaaccgattcctttctcctttgatacctcttagagaagtgttcttgtttgccctgtcaaagcttaccaccaatctccatggatcaagaacgaagagttcatctcgggcaaaaagatcctctgttgataatgaggaagttgaggcatttgacatgagtggaatgactgaacgccaaattcaccaagctcgccgtgctcaaagattaagcttgattcaaggttgaagctcaagctgcccagccatgcaaagagaagaagtagctcagggaaagagggtcattgaagctgaagaagaacaccatgaagaggcaccctttgaa

SEQ ID NO: 2940 - DNA, 895 bp, Arabidopsis thaliana
cagtgtgctttaaagccgtcgaatctcactacccgtctgcgccacctggaaacagaactgggggttgatctgtttattcgcgagaatcagcgtttacgtctctctcctgccgggcataactttttacgctatagccaacaaattctcgcgttagtggatgaagcgcggagcgttgtcgctggcgatgagccgcaaggtttattttctcttggttcgctggaaagcaccgctgcagtgcgcattccagccacgctggcggaattcaaccgtcgttatcccaaaattcagttttcactttccacccggcccttccggcactatgctggatggtgtactggagggaaaactgaatgcggcgtttattgatggacccattaaccatactgccatcgacgggataccggtataccgcgaggaactgatgatcgtcacgccacaaggatatgcgccagtaacccgtgccagtcaggttaatggcagtaacatttatgccttccgcgccaattgttcgtatcgtcgccacttcgagagctggtttcatgctgacggtgccgctccgggaactatccatgagatggagtcttatcacggaatgttggcctgtgtgatcgcaggagcaggcattgcgcttattccgcgctctatgctggaaagtatgccggggcatcaccaggttgaagcgtggccgttagctgagcaatggcgttggttaacaacctggctggtctggcgtcgtggtgcgaaaacacgtccgctcgaggcatttattcaactgctggatgtgcctgactcggcaagacagggatatcaatgagctatttttgatagttcttgcggttaatatgctctatatagtgatgttccgatgacttatgactatatggggcaaatatgg

SEQ ID NO: 2941 - DNA, 580 bp, Arabidopsis thaliana
cttaagattgcgaccaaatatgcactatgttattgacatgtgctaaatatttgttttctgtttatactagggtgtcaagattcatgcatcagtgaagagggacttggttagcaagtatgtgaacaacttgcctttgaatgagtggaggtttatagaaacctttgctctaaaccatgcatcaggtcaattccgacaagatgttattggtcaagtggttaatattggtgagcttgagactctcgaggctagcaacaaacctaccacaaagcttgacttcgaattaagggacgacacataagtctatgtaccctgacctaaatcctcaagaatgtaatttagaaagcaatctcttgatatattgttttgtttagtgatgagggaatgtcctctactttatggggagcatttgctcagagagtttttagtgcatgtgaatctgctgatggtcaaatggttatttgtgttctgcgatttgccaagattaagtcttacaaaggtacatgtctactcttaactttcttgattttctcattgattatacatttatgaccatactaaaatacagtttctaatgtatgta

SEQ ID NO: 2942 - DNA, 1402 bp, Arabidopsis thaliana
ggtaaatccgacagttaatattataacctcccaaactacagctacacgaatcattctgcaatcttttcacaatccttcaacctcgctatattgaattcttgaaatcaatgtggttaccaaaacaatctaaaacatatttttatagttcaacagatatgtcaatatctacatatcagattcaatcatctttaacacgaagatatttttcaaaccggatttccagtttcatatcctagcagagaatattcacagtttgattctcaaagattacgcctactccataatctaaatctaaaaccgtatacaatctcaaaatcactataaatatactctagattgcatatcatttctacacattgcagtctatcaaatatcacaccatttttaatatcagaaactttgcttaccattcaaatggctgcctcttttgctttcctgagggatgtccgaccttacaagacctcatggcgtgtccaagtgaaggtgcttcactcttggtgtcaatacactaacatgactggtgaaacactcaagttagtgttggtaaactcacaagtaagtttagtatacataatgtaaatatgcaatatgttgaagtcatttcctaattatatgttttctgttcatactagggtgtcaagattcatgcatcagttaagaaagacttggtgagcaagtatgtaaacaacttgcctttgaatgagtggacgtttatagaaacctttgctcttaaccatgcatcaggtcaattccgacctactggtcatctatacaagatgtcttttgtcactgggacacaggtcatccggtgtgattctgttagtaattctagctacctttcattagctactttcgctaatatccaaactggtgactcaaatccggctattttagttggtaagcctatgaccagtagttaaatttcatccctgtaaaattcttcttttctatattgtttcattgactgtcagtgtattctactagatgttatgggcacagtggttgatattggtgagcttgagactctcgaggctaaaaacaaacctaccataaagcttgactttgaattaagggacgacacgtaagtctatgtacctatgttttttatcctcaagaatgcaactattgtttcaatctctctaatatattgtttggtttagtgatgagcgaatgtcatgtactttgtggggagcatttgctcagagtgtttttagtgcatgcgaatttgctgatggtcaaatggttatctgtgttctgagatttgcaaagattaagtcttacaaaggtacatgtctgttctgaactttcttgacattactcattgattctaacagttattaccataattaaatgttctactttttgtgtttgtaggagttaggagtttttctaactcttttta

SEQ ID NO: 2943 - DNA, 737 bp, Arabidopsis thaliana
tacagggcagagcatgacagagatgtggcgcattctcaatgagctgtttacgctcctcaagagcgtgaaatacaagcttcagctgtccataatcaagattgaaaacagctttctccaagtaacgaacccctaagtgtaaacgagcactaaatcaaatggtgtatcaagagccgcaaatgtaatacatatccttaacatgtatgttccttcaattattgaattaacaaacaaaaacacaacaatgagtggcaaaaaccaagtaactagctacaaattcttcaatataatttcgtcaattgaatggtcataccactcaattccaactagtaaactaagaaatggtttaatattaccagacaattcagagagcttcttatacgaaattcggaaatccacgccacatagaaaattcaaaaattaaaagtacctccatgaatcagctttgtagatcgcgaagaagtcccagaggagaaatcctcgcgctccaccaaaccaacacggaggccacgtgtaacagcgtcaagagcaactccagaaccggtggctccaccgccaatgacgagaacatcgagcggatcagaagcggtggctgcaatcagagcagactcttgagcagatcgagacggtacagaagcggtgggatcccaagcctacgcctcaacgaatctagaatcggaccacctcctttgtcgctggaggaaccgacggagacaggtagacagcgccaccggatgcag

SEQ ID NO: 2944 - DNA, 589 bp, Arabidopsis thaliana
gccagttccccctgccagaccatttgatcgctggcagccataatcactcttccccgcttcagcccgcgatacacctgatgtgaaagataaaacgacaccacggtaagcggcgttttcaggttacgcccttcccccattgccgcctctgccgcaatggccgttccggcaacgacgtcgatttctggatggcgttccagcatctcctgcaacaggttacgctggatttcaatatcgttatcaccaagcgcaatatcaacaatacgcaccgggcttccggcaatggctgcgcgaaaaccctcgaccatctccttactgcccccggcgttatcgggtccgggcatcaacagcacattcagtggtttaccgtgcgcccattgcaccagatatcgccccggttgatagcccatctgaaaccagggcacaccaacgcggcttttcacctggggagcatcaatagcatttaccagttcgatcaccggcagacttgctacctgcttttgcaggtcgggaaatgaggtcgtgctactaccgagcaaaatggcctctgcgccccacttgtttacactggtcgatttgtgcttgctgggta

SEQ ID NO: 2945 - DNA, 565 bp, Arabidopsis thaliana columbia
ctttacagattcaaaaggttcttcatttatttgctgaaagttttctacatttgcagattcattgcaactcgataatgatgcatgtacaaaggtcaactccatgatcattccatgctgtgaagacttgatagagctaaagagtgatcacaatcacaagatcatagagatcacagagaatgcagggaaatgtcttcttgatgaatatgtagtaagtttttactatttcaacttgcacaaaacaaaccgagaaacccgcagatttcagacattactattgtttttagagtctagttaacaatagagatgtgtttttggatggaacaggtggatgaaccatcatgttcaacgccaaagaaaagaccaatcgacataccaagcattgagtccatcgaagagcttagaactccagcatctgaggagttactgagagcgtttcgtgatgagaagttgtcgaagcaagccaatggggatgcaaagcagcagcagcagcagcaacaacaacaccttatacgcgcttcgtctctttacgaggcagctgtgtcggattcaagatatcccctctctg

SEQ ID NO: 2946 - DNA, 1128 bp, Arabidopsis thaliana
tcttagccagcagaagcatgtgcacttccttgttgatgacgagcaatttcaagtccaagatggggagggtaaccagttggaagaagtcagctacataaaacaaccagggtggctacaaaagatacaacaactatcgcttgaaactctttccaagaaaacttaaatccagatgttctggcccattctgtatcactgaggtccgtccttatggagcagtcactctagctggtaagagtagagattttacagtaaatgttcaaaggctcaagaaatacttagcagaccaaatccttccagaggtgacatcggttcatctccaagaacctcttgatgattaaaggagtaaaggagtcaagctaatgactttaaacaagctcacttgggaggaagtcccatgattatctctgtaaataaaaaatttcttgtcttgttatttttgatttgttttaattgtgtttgtggttttcagagaaaagggaacaacgtggagatagagtaaaaattcaaaacttttactctacagaagacctggagattgagtgtataacctggtggagtacaaaatttataaagttttctgctgcgtctggagacacggaattcgagtacatcagtcgagtatacgtgatgtttaaaatccaaaattttaaaaaaacatcattgtactcgaccaacaggagctacagagacttgcaaggatttcttgcagtttacagtagatcttctgcatattttttcagtcaacagagtgtggaccacgcgctgaggataagctggagagagaatctaaaactcaacctagaccactcatttaaaaacatcactcgacttcacaaaatccactcgacctacctcttttcatttcaccaccgacactctaatctctctacaccacgaatcgccgtccaaagagatactcgatcctgacaatatcactcggcctccgagagttactcgacatccgcgccgccgtcaccagatcatatcttccgtcactcgacctccgggaaccactcgacctctgcgcttccgtaatcgagtactcctcctcgttcaccgtcgaagtctccgtgaccacttgattacgaccaagctactagaccacaaactatcactcgacctcgagta

SEQ ID NO: 2947 - DNA, 886 bp, Arabidopsis thaliana
actggattctctaatgaatgatttaactgtgaagaagatgcttgggaagactgttgcatgtaagtatggtttagtatactacattactatttatcaaaatcatctaatttgaaagcacttattctgttttgtttgtgcttgcagcgatgtatactgttgagtttcagaaaagaggcttgcctcatgcacacattctcttattcatgcatgctaagagcaaattaccaacagcagacgacattgataaacttatttctgctgagattcctgacaaagaaaaagaaccagatctatacgaagttatcaaaaactccatgattcacggtccatgtggttcagcaaatgtcaattctccatgtatggttgatggagaatgttctaaactttatcccaaaaaacatcaagatataaccaagattggtagtgatggttatcctatttatagaagaagaaaaactgatgactatgttgagaagggtggtattaaatgtgacaataggtatgttgtgccttataacaagaagctttctcttcgttataatgctcatatcaatgtcgaatggtgtaaccagaatggctccattaaatacttattcaagtatatcaacaaaggaccagacaaagttgtcttcatagttgagccaactcagcagactacagctggtgactctgaaacgccacagcaagaacaaggttcagctgagaagaagaagaacgagatcaaagattggttcgattgcaggttagtctatttctttgttatttcttaattatttggtttggtttcatattgaataaaaaaatcattctaatacataatgaattgtttgcagatatgtttccgcatctgaagctgtttggagaatttttaaatatccaattcaac

SEQ ID NO: 2948 - DNA, 1096 bp, Arabidopsis thaliana
accttggacagggccacgaatctctagaattagtggttcagacatttcatcgaacacctttcgggtgcggaaatatctgggctcaaattctagttgatcagaaagcaatcggcattaagaacaactaatccagaaaggatctatcaatcaaactcaaccacctggcatattgagaattctacattactctaacccatcctcagaaacctattcactacttagacatcattgtagagaacataaacgttgaacagaatgaaaacatgataacaacactgtaatagcaagatgataaccggatgaacaacaagaaacgaaaatcaagaacaaatactgaatactgaatagataaagagaaatccggattacaaaaggtctagaacacagtgtttgcggaataaaacctagataaaaacttgttctcgaaaatgtaaagtacatgctacttattacaaaatattccaaaaccctaatactcaaaatgacgcagtattgggacggattaagaactgtactcgacccaggtggttgagtgagagttcgagtgataagctggagtcttcttttcttccttgtgctcgagtgtctggttaagtttggaatggagaagactctgaaggtcgccatcgagtatgtagtcgagtggtggtgatggtgatactcgacttccaggtagagtggcgtgatcgagtgatggtcaggtggtggaggtgaagacaagggggtcgagtggtctgttgaggtcctgaagcgtctactcgacctgggggtcgagtggtttgacatgatcaggtccacttcttccaattagctcgtcaccagctccgaatcacctgaaaacaacacaaatatgcaacatgcatgcaaaactatcctaaacatgcaaagtgatgtcaaatgatcagaaatggtataaaacagtgatgatatgatgctaaagtgatgacaaatggatggtcaaaacattgaaaatacacacttatcatacttcacccgggagtctatctgctgatgaccatgaagctggaagaagtagaaaatacatggaacgcagtccactttaagaggtactactactagatttagaacggggatg

SEQ ID NO: 2949 - DNA, 1095 bp, Arabidopsis thaliana
tgcaactgttccagaactcaacgactcaaccacatcgtcaagctcctccgcctctatctgaagaggtccactacattccaccgccaacagagcctgcttagcaagatccccctcaatcgccagatccagacactccagcgaacagccacccttcgtctcaagggaacaacttccaagaggaagttcctgggacgttgccggagctacaagaagactctgcggtggctctgcaagtgatactctccgtgccaaacagggaacagtggtgctgtgtcttgtctccgattcccacaccaaaaaccgagtggtatgttctcttcctctaattttttctcgtgttcttatcatgtgtagtgtaactcgtttctgttataaagaatggcttgttgtggaacatagttgtgaatgatggtttttggaattggattttgttatgggttgtgtaacatagtagaattagatgtagaatcttgttaagtgtagaatctgcctttgttctatactcgtgtagaatcttgttaagttcttcaatgtgtgtgctcttgttatgttctttattgtgttctgtttgtgaatcatgaacataattgtggaacatttgttgatcgttgaacttagcatgtttccggcttagacatttaggatctgcctttgttctagacttgtgtagaatcttgttaagttctatactgtgtctgctcttgttatgttctatattgtgttctattgtgaatcatgaactattgtggaacatttattgattgttgaacttagcatttgttgacatgaactaataggttctgttgtgaatcatgttctcttgttattcgtgttctctgcctgtgtagataaactcttgttcagttatatagtcttctctagttgtagtgttttggatttttaacatgtttacttctgtcattgttgcatgtgtttggaggtttactcgcgacaaaggatctaaatttgttagaaagatcacacggatttttactcaaaagttcaatgctccctactataattggtcttgtgtgccattggataaaagagaaagattgtttttagagtttgcggtaagcttcttgtatatctcca

SEQ ID NO: 2950 - DNA, 1355 bp, Arabidopsis thaliana
tctaagaaaggttgatattaacgaagatagagctgttttattattatacgaaaaatgcttacaaataaacaaacagtcgcacttggaacataaagacgaggatgggccgcgtgtacttttggtaagtcattgtgtgtttaatcagtcgaacatttggtctccgtagaaccagagagtagggacctcacatgctagaaaagggagatactggccacatcgaggaatcttaagcgtgatgcacaaatactgaccaccttgcaacctgtcagtatctttcccattaactaaaaagtacttacattaaacttaacagacaaaatctacatgttacaactctggtttatcttcaaagttgtaatttgcttgaagaactgatccgtttcagctccacactttaacctgcaacgacacaatggagatgcatctgtcagtatcttgaccattaacttacatcccaaggaaacccttcattccctgattcttactaagctgttggttggttctcctgatcctcaggttccttgctactacttgcctgcccggaactcagttgtgatgttgtttgaccctaagagaatatttaaaaaaggatcttgtgagcatcatcatacataaggattacctgcaacaacacaatggataccatggtaaagagttacctgaaatggaggaggaggaggttgttgcaactggtggggaccagcaaactggctatagggattcatgtaagccggaaactgaggctggttcgacaccgggttaggctgcgggcttggtaaacggactctggatgggtcaaaggtctgaatgttgggaaaagggtagcgcggtgctggatatgatggacctacacctgccatttgagccggcataggaaaagatgtgccggggaaaggtatgaatggaggaggtcggttcatatccatggccatatggggcatgaactgttgcgtattcccggcattcatcattggcgacatcataccctgtcccgtcgacatcatctgacataacaatatcgattcagatattaatatattatacataatcctcctgtaaactgggaagcaaaacagaagagtaagacctcaagaacagtgcataataagaggaattagctattaggccatcccatctaaaggaggtaccagtgtttcgaagtagagacttataagatttgcatttatctcccaagaaactttataacccttccaagaagatgaatctgcggacatcaaacattcaaactcttcggagacgctggttgatagagaccaaaaataactctagtaacctcaacaaaactagatacatatgaactctttccatgttgaaccattggtttagggaatcct

SEQ ID NO: 2951 - DNA, 836 bp, Arabidopsis thaliana
cccaacccacggttcggtttcagcttcgactatggtgtcgggggtgatttcttctactggttcgagcccaatatcttcctgcacagtagggttaggtacagttgcgatctcggactgcagctcgggatcttgtgacgacgtatgtctccttttcgtccttaatgctcctttccgaaatacacactactggaatgattcttttgacttcgggatcggatattgatgccagggctgcgagtgcatctgcggtagtgttttctccccgtggtatacgaatgagttcgaatttcctaaagtttctagccaagtctttgaccacctcaagatatgcctccattcgtgagtcttttgcttcataatcaccattgaacaggttaaccaccagttgggaatcatagtaggcgaccacttcatcggccccaactccctgtgccaacctaagtccagcaattaatgcttcgtattctgcttcattgttagatgcggtgaataacaatcgaaatgactgttcaaggatttccgaagtgggagattccaacttgattcccaccccggatccattttttgatgacgatccatcaacatgcagcttccaagtctgattttgcggctggtcctgccctccgggtatcggtaattctattaaaaaatcggctaggacttgagctttcatggcgactcgattcttgtactctatatcatattcacttaactccaccgcccatttcgctaatctaccggactggttcgggctatggagaatagtccgaagtggctgatttgatacactttgattggatgggattgaaaatatggacgaagtttcctagctgagg

SEQ ID NO: 2952 - DNA, 1035 bp, Arabidopsis thaliana
ggggaaagaaactaatgttcattggtgattcaatacattacaatcagtggcaatccatggtttgtatggttcaatccgtgattccctcaggcaaaaagaccttaaaacacacagcacaaatgtccatcttcaacatagaggtattaaagactatcttctatgcaaaaagacaataatccaagaagcaaaagaactccaaatcttaccttctctactattctgaatgtgtaggagtacaatgcaaccatatcattttactgggcacctttcctagtcgaatcaaatgctgatcctccagacaagagagacgggaagaccgatccagtaatcattcctaattcaatctcgaaacacggcgagaactggaaagacgcagactacctcatattcaacacctacatatggtggactagacattccacgatcaaagttctgtaagtgataaacgatctctctaccaagttccaaactttcaaatttgccaatcttgatgaagttttctactttgatgcatgaagaaaacaagaatctttcaacaaaggagactcaaaagagtacaatgaaatcggaatctatatagtatacaaacaagtgttatcaacatggacaaaatggctagaacaaaacatcaacccaagtcaaacatctatcttcttcagcagcatgtcaccaactcatatcaggtactaaatcatcaaacacccataaaaatcaaaactttacagagactgatccttttcagttgcaaacagaagttcagattggggattcaatgaaggaagcaaatgtgaaaaagagacagaaccaatactaaacatgtcaaaaccaataaatgttggaacaaatcgaagactttacgaaatcgcactgaatgcgaccaaatctacaaaagtgccgattcatttcctcaacataacgactatgtcagagtatagaaaagatgggcatacctcattttacggttcgataaatgggaaactcatgacgccggagcagaagttagatctgagaacttttgctgattgttacattggt

SEQ ID NO: 2953 - DNA, 1482 bp, Arabidopsis thaliana
attgcatcgttttagtttctccagtaatatatttctttagcttcagaatgtttatagaatccagcgagaagcttaagaaccatgaaagtattagaagggtgtcttagttcaaaatggaccacctttctaatacatcttaaaatcgagcacatgggtgtggaacattaaactagggtttagtaaagaaatactaacctaagccgatagcctcagagctcttcatgattctcagcttcttgcaggagcatataaacattctgcagaggaaaaaacagtaagagagcttcactgatctatattcttctgttaagctaaaactgtgctaagatcattagatatgatctaatacttgatgttaatttacattgttgagattgatcttttaaaaatcaaagacttactcccaagggacatctccgaccagcatccagtcactgtctttatcttcataggttacaacatactcagaaccacgcaagagatcagtcaagcgactctcgtttaacccatctctgccacaccctccatgagaaccaaactgacctgaaaaaaggaaccaaaagaaaacagttaactcaatcactggtattgatctcaaagaaggagagactagaaaacgttaccaatggtgaagcaactgaacatcttctcaagagcagaagagagctcaaggtagcttttgtaagtcttgagatcgattttcctcaagtaaggagcaccttccatactcactttgacatacaagcaaggttgttctggtccagacttagcttctgcttcttcagtctctgagttattaccaggtttctgagattgagaagaagccattgagttcttcctgaatgatcttattggtggccatcccaccacttgtgctctgctcaatcaaaaaaaaaaaacatcaagaatccctcttcacagaaatcataaaacagagcaaaaaagctgagaaaaatctaaaacagagcaaaaaaagcttactttgaagctggagctgtagcagagctcttcttctccttaaccggaacagccggtttagtgaaagttgtcgactttccatctttaacgacggaggtacggggaccagaacccgatacttcatcaccagtagcagtagtggatccaggagagaagacccatttgttagagtcgttaatagcgtcggagaacacccttttggcacctgacacgggacagctactcttgttgagagccaagaatcttgagtcgactcgctccggcgactcagaaccgggtaaaccgagtcttaactcggtagccttgaaattgagaccgttgttattgtctctggttttggttttgtcagacattgttgttgcttccatggttggaaactctgacaaacctatgtaatcatgctctgctgctacagatacagacatttttttcaaatataattgtggacaaacttttgaagcatttagtgattacaaaagaaaaaaagaacagaacactttctga

SEQ ID NO: 2954 - DNA, 1485 bp, Arabidopsis thaliana columbia
aatcacttccattgctttttcgaatttcaatcacgacaatgcataacaaagcaaagccaaaactagatctatgattcaaccagaagcattcaagttcaataacacaatcaatccaaacctaaaatctatcgaaatttatcaaatctaacaaaagaacaaagatctgattcgctaatcgagaaacaacaacgcatacgaaatagcaagacgaagagcaaaattccactaccgatccacaccaaatcaaaactaacccggagataaagaggtagagagctcaaagcttcaacgagaaagttagagttttcttcaaatggaaacaatggattctcctcagaaatcaaacagtgtgatctgcacgcagacgaagaagggtattatcgggttttccattcgaagcgttcttctctatttatttgggcctaaattgggccaataattttccgaataggctctaaacttggataggatacatttaaactcgtaaccaaacagaaccggagcaattcctttgttcctcaattaggtttagactttataaaagaagtccgacgcagaaattaaaaccccttttgcctcaaaaccctgatttcaaatctccccaagcacaacaatggcgaaatcaatgagatgcaagagggtgaagagattgagagcaataagaagagaaatagtggagaaggaatcattcactctaacgagagaagacgccaaatccgccgctattgaagccgcactcgctgctccgaagttaccagttcgtcaagccccagtttctccgtttatggaagttgcgacgccttcctctgagtctgcatctgcctccactacaatcgccaacgatagtggtatgcctcctctaaatttgcctctttgattttgtacgatttggttttagataaggtaacgcttgaagaatcgaatttaagctaagctttagaatctgaaatttaactgaatcattcattttagttgaaatctttgaaggagcttgttagttcattactcttgggaaggttgttactctaagagaaacgtatcgctctaaaagctttgtttggtttctttatattgaattttgtgtgcatctacaagtatatctttgaaagttttggtattaagggtttgttctgttttgggatactattgttgtttgcttgtagatgaggaaatggatgatgagaagaaaaacaagtcgctaaaacctattgggaagaagttgaagaagaagtttaagctggggatgaagaatcgtcgtagtaagggtgtccttcgaggcaaacgaaactaaaactggtcttggctttcttctactgggtttgttttctacttgcataatttatgttctctcttaattttggggttcttcaatgtcttagaatatagcatcttttgtactgtgttttttccatgagtttcagtactatagaaaccctaaaaacgtgatcgcgtctgaattgtgtctcccatctttcatttttcttg

SEQ ID NO: 2955 - DNA, 528 bp, Arabidopsis thaliana
  unsure (1)..(528): unsure at all n locations
ctnnnnnnnnnnnnnnnnnnnnnnnctaaagcaaaatgggttctcgttcacgtaacgggcagcaatacactggatgtgccgccgaaagggtcattacgccagaaggatgttgtggcagcacgaaagcgggtacctgatcggcggcaagatagttagcggtcgcaaactgtactaactctggcgttgtctgcgcttcctgcaataacaccagatgtgcatctttgccgtagttctttaataccgacaaccattcagcgcgttgctgtttgtatatgttccacaccaggatccgaatacgctcttcggtacttaacggttccccaggtggtaatgcctggccgatgctcgcaaaagaccccggcggtaagatcctttccgcaggttgtccggcaacatagcgcatggcataggtgttttttcgcacttttgactttgagacctctattacgtcaacccttccgcactcgggagggttctactgttatagggattttagctcactctttcaacgagcaattgtatattgtt

SEQ ID NO: 2956 - DNA, 885 bp, Arabidopsis thaliana columbia
atgaaaaaagtaacaaacaatcaactttttagggggcatgataaaaaaaaaaacacaaactatataaaactgagtccgaaccaaattatttttacccgaaccttagtcggacacttaacttcaatgatattagaaagattacaattttttttgtcttttttcatcacacttacacatttagtagtatattattatctagaaaggaataccccgtaaagcgataacaaagactaatattcataatcataccagaaatcttgtcgttgggtttggaatggtcacaagtccacaagacaccaaagatttaagattcgcgccgaacacccccgatgtagcctttgcattcattaaacgcagtattagttcttctggtttttaggtcagacaaaaggactgaatcattgtcaaagatagaaccatcatttgaagcaaggaacacaatgcaattctcatttgcacctgggagcttatgtaccgagcagcagagtttcgtccgagctccaagaaagatcactcggtcgttcaagtaattaacttgaacccactttctcttccctccttcttcatcaagtctaaacactttgaaccatgtatatatatattcatcataacgccgccctgcaggtatgaaccgttgcactagcaacaactcttcgcctaactgcaccagactttctttagaacaatattgcgatcctttgactgaggggatctccgtaactctcaaagaaagttcgacaacaaagacccgtccccttccacttgaatcaagagcataaaactttcctttgaatgcaaccaaatcttgatatgcatacgtttcaggatgctccacaacttgagtccaactcatgttacggcttctatacatcaccaaattgcaca

SEQ ID NO: 2957 - DNA, 634 bp, Arabidopsis thaliana
ttttgacttacgccatcctttaaggtgattggatccacgcggcctgcaggttcactcgcacgaaaatcagctcacccttggataaagtttccccgtcagctaaatgcaaatgctgggataacttgtcatctgcctcagagtccccctttggatacaactttagagtcctttgaaacataagtacataaccatccacttgttagcaagttaccactattgcacacatacaacaatatctatcagaacaaaaaaaactcaccaatctttttctcccatgtgaaaggttttggatacgcaatcattctgttctaggagagcgaaatcacgaatactccaagagaatttgtgaaaagggagaacttcaccaaaagaggcgggttgtgaacaatcttgacaagataaatccctttgcacggtctttgagtgtttcaacggaagaacttgtgacaatcccaaaccgtttttgaggaattgacctcttaacttcaacatctacatgtcaacatgtacaacacatattagagcttcattcttatatatatacagagaaagagatagataataagggtaagaggaaacgaacattgaatagagaggtactcttctcttctttgctaaagcaaagaaagtgaga

SEQ ID NO: 2958 - DNA, 513 bp, Arabidopsis thaliana
gtaaattgaaaaagccaaaaactaaattataacaactttttttatgcattaaagaaaagaagaaaaaattcctaataaaaaaaaaaatctaggcattatgttaaattgtatttaaatacctggattgtcggcgatgaatcttatggcagtccaaccaccggctggaactccaacggtgtttctctctaccggatccaccaagttaaacgctttcggatctttttccgggttaaaattccccaaacctctacccacttcgaggaagttagtcccgtgaagatgtctcggatggttatcggccaagatcattgctgtattctgccgaacaatttgcaccgtcgcgttgtatggacgcctgtaacgctttggccctttcatcgtctgcagcattaacgccgagctttactggtgcggtatcgtcatacggattggatggtttcgccgggaagtcgtcggtaattacgccggcaatgtcttcgaaatgagcctggagtaaagcggttttaggcatgg

SEQ ID NO: 2959 - DNA, 411 bp, Arabidopsis thaliana columbia
gattcaagatttgcgccgaaaacgcccatgtagcctttgcattcattaaacgcagtactagttcttctggtttttaagtcaaacaaaaggactgagtcattgtcaatgatgaaacaattatttgattcaatgaacacaatgcaattctcctttgcacatgggagcttatgtactgagcagcagagattcgtctgagctccaagaaagatcactcggtcgttagagtcattaacttgaacccactttctctttcctctttcttcatcaagtctaaacactctgaaccatgtatatatatatattcatcataatgccgcccaacaggggtgaaccgttgcactagcaacaactcctcgcctgactgcaccagactttctttagaagactgttgtgatcctccgactgagggga

SEQ ID NO: 2960 - DNA, 528 bp, Arabidopsis thaliana columbia
gttgtattgtacaaatcaatagcatataaaaattttgctactaaatactatagagctagcttatgggcggactgtacagagattatggagcataagaatcaattgatggagcttactaggttcagccacgggtgcgacaccacatgatcggcacacaaaagaacaaattgtcccaaattgtgaaagacaatgtgttgataatgtgatggccatcattatctgcccaactacgtttatatacttgctaagtcttatatcttttgaatttctgcttatgttgatctacctttgttttggtaaaataatacatttctactctggttaaacctatgaaaactcaaaccccatcgaatatagttcgtagtcatgaatgagtatagcctatgtatgtttaagctaatctcacagatttgatttccaattgataacccatttaggtcatatacatgtgctcacgttgttataataaatacaaacggactgatatctttggacatgttatcttggattgaacatattaacatgtac

SEQ ID NO: 2961 - DNA, 577 bp, Arabidopsis thaliana columbia
tgagacaaagattagacaagctacaaaagaagcgttgaaacaagttaaatctaagggtctttattgtgtttgccggcgaccagtggacggcggttgccggagttgcttacgtggcgaaatctctagacacctaagagatgtcgccggctacgattgcgtcatctctaaatctaaatggagaagttgtcaagacatccctgcaggtacaaactaactacctcatatattttcctctccatcatcccccccacactggttctgaaatattcagccatcgttatcatttctcaaatggaagataattatctttaaattggacaaatattattatgtccacaagaacacgaaacacttttttagacccattcttttatttgttacttgtggatcaagcaaatatcagattttgtcatcacattaagtcatatgattttatctagtatatctatatgaactctctatctatatatatgaatgtatggactaactcatatttcattttaatataacaccggggaatacgaatttatagagattgtggaccgatgggttaaagaaagcgagatggagtggtgat

SEQ ID NO: 2962 - DNA, 542 bp, Arabidopsis thaliana
tgtgctctaaagaaacgtctgccaacgattatcgacgcccccgcacaagaatttgccactatttatgtttccggcggcaagcgcggactggatatcgaactggcggcaggcgatctggcaaagatcctcgatgccaaatttgctgatatcgcccgccgcgattaagcattgtgccggatgcaaacatccggcactttcggattactgccagctcacctcacctttcggttcataaacactcacatccagcggcgagcttttctggatatacgctttcagcacttcggcatcaataaagccggtattcacatagcccggtttgttatcaaggcgcggatatccatcaccgccggtggcattgaagtttaatgtcgccatacggtaagttttcgccggatcgaccggttcgcctttgattttaaggtcgttcagtttgccgtctttcgccacaaagctaacgttggcaaattgcgggtaggcactgaatctggcttcatctgcgcgacggcggtcaggtaatcaatcacctctttaccggtcat

SEQ ID NO: 2963 - DNA, 1091 bp, Arabidopsis thaliana
tatcacgaacaattttttggaatatttataggatccactaattatattcggtaacccatcgctccaccacaccactccctactcatttgtccagagaattagggttcccatttcatcacgatctcaaatccgtttcccttcagcctagttcggtcctctttaattatcggtgtttcttcaaattccttagatcgttatttgttcactttcagtactatactaatttgataattcaaaatgtcaaaaatcgtctgcgagaaaagaaaatgtacccaccctcgaccaatgtcccctactagacattactggcgacccccaagtgcccttgcccctgttaggggaaatcaatttgtcgtgcagcgtcttcgtcaacctttggttcattttaacctacaggtaatgtttactcaaaacaaatttcaatcgaattgagacactcattttatatagactgaaattgatccaaaaattgcgaaattttgttttgaatttgtatatagcctcacaaatttggtgttaacgttagtacgcattttctttcagcctcctccgttccctgatttccacatgcctgatcatgtagcagctaaaatagtcagcttagtttctgaggacggtgtagatatgttaaaggcttggatttaatcaggtccagatggaaaagctgctgttttttcaagtgaaacactttattctgttcgaatagataagtctcctttttttattcatatggctgaagaatcgtctagttttcacatgttttacaccaaatgcctcaacgccaaaaatccgtacgccctatatcttcatagtttagttctggcatttcatacgtttgagctccaggagtcaattgctatattggatggcataaaggacgttttcccacatgctggtctactttacatcatgctctatagttgcgctggatcaattccgtgggaattttatattcagtacaagtgaaggtactacaaatttagtgaagtcgacttatttgcagatagattaatgttccatatcaacgaggttggccacgtcgccaagggacatacaaaaaatcctgggagtcgaggatatggggagtgttg

SEQ ID NO: 2964 - DNA, 769 bp, Arabidopsis thaliana columbia
agaagtggacttgctttgccatgaaatgcttttcacacactccttctcatgagataggacccattctataataataatatctactttaccttaacaaaacaattttaaaataaatgattcgttaccttcctctttaaaactcgtattagtagcaattagtcgcataatcacacgaccaactttcccttaaaatcaacagacagaaagtgagtgttatagacttatagtgagatagagataaagatagaaagatcagagagatgaagagagaatgagatttagtgatattttctgctcttctccggcatcaaccgccgtacgacatagtacacttcaccacgacggaaatgttaccggagtcgcagatctttccaaagccacctccggagccaaaaccctagtaagaagaaggataaaactgtcccttgcttctcttccgagatgcctttaatccctattcctcgtcacttgagctgtagaaactcctttgaatctccaagcgggtttcgtccgaaaatcgcttcggctcgcggtagcgatgttcaaatccgccggaaaagctctgctgacgtaagtgacttgaggagatcaaggagttctctgctaagctcatcgtccaggtatcttttaaaagatcataagtctttgaaaggtgatgataaggacctctggttatcatcggatcgttctaaagatttgattctttaccgtgaccgcaacgtaacttcttcagcctcatcatcttcttcgtcttcttcatcatctttct

SEQ ID NO: 2965 - DNA, 978 bp, Arabidopsis thaliana
tctagaggatcccccattcaagaggaatgctgacaacacaatcaaacatttcgctcatcaacataacctcatgagcttcagcaaagacagtgaagaaagcaacttctgtggagcatgtgttcgtcccatcggttcttgcacgttctacaagtgttcagaatcagattgtagtttcattctccatgaaacgtgtgctaatcttcggaagaagaaacgacattttctgagcccacaacctctcactctcgacttcgtaacaaaacgaaaagaagaaaaatgtggagcttgtcatcaaatctgttgccaagggttcatctactctacatatcaaaatgagaattttgacttactatgcagttcgattactgtgccttttatccatggaggccatgatcatcatttactctatatcaaactagaatacggtcaagtgaagacttgcaagaactgtggcatcgatcatgcagaagtcgttctaggttgtatcaaatgcaattattttctggattttcgatgtgccactctaccattaacggtaagtctttctaggtatgatgatcatccactcactctttgttatggtgatgaaaaggcaagtggcagatattggtgtgatatttgcgaaagagaaacaaatccaaagatttggttctacacttgtaaagattgcggggtcacttcgcatatattttgcgtggttggggatatcaggtacgccaaaccaagaggaatgatcgaccgccattatagacttctgtctaacaatagctcttcacggccactttgcaacacgtgcaattgtcgttgcccaggtcccttcattcttcatgatccatataactatcatggattcataagtcgagatgatagcgacgtcctatatttttgttcttattattgtatcgtcctccttgccagacgacgccgcgggaacatgtgcccaccgtgggcattagaacctaatacttgatgaggtgt

SEQ ID NO: 2966 - DNA, 847 bp, Arabidopsis thaliana
taaccgaatacaagagactacaattatagagcaaaccccagctttttattcaagcaactttgttctctccctttgattatttgtgagctaagagaggagtgaatttgtctaaatcccttagtacaaattcattgtttgattacagaatcaacaattggcgcgccaggtaggggggaatataaacaaattttctctaccctcctttaatcaaagcaagcatggttcaaatcgtcatcgaccccatcattcctccagtcaacgatgatgggacggaatcaagtctcctccacggaggagatccaccatctaccgtcgaagtagcggccaaaacgaccgtgaatcaaccaacacacggggagacccctatcgactcaccatctttctcattggaggacatcaaagccatcctcacaaccgtgacgaaagatctctctgaatcagtcatggagactaatcgccgactcgacgagctgccaaaaggaaggcggctggggtcagaccgcgccaaagccgtccaagacgaggtcgagcggctcctaaaagccggcctgattaaagaagtacaatatccagaatggctggccaacccagtcgtggtcaaaaagaagaatggtaagtggagagtctgcgtggattacaccgacctaaacagggcttgcctaaagacagttatccactgccacacatagatcgcctagtcgaggcaacgtctggaaatcagcttttatctttcatggatgccttctcggggtacaatcaacgaaaaacctatcttctataccagtaaagccctgaatgacgccgagaccagatatccgacttagaaaagctggcgttggcggtgata

SEQ ID NO: 2967 - DNA, 779 bp, Arabidopsis thaliana
cgatttgggtctccgtcggcgaccacgaagaaatcagagagaagaagaaaacaaaaaaacgcgtgttttttttttttgtttagtcaaaacgtttacccaataaaatgaagccacgtatgagtttctattgggtcgcgaaaaacccaattttaggaacgatcctaaatggattgttctgttttttttcatccgggcccattttttttaaaaaacccaacatagaaacccactaaaaacccttgctagacttgctcttagatgaatgcagactagagattatatacaatgcaacacacacttcttgagccctcccccaaacttaaatcacacagtccactgtgtgaccaaatttggaagagagtactgaggacaaaacacatcacagaaacaaaataaaaacaagagatggtatattacaatggtgaagtgaggtgcttacctcagtggaaaaaggaacggagttggtcgtcaatagctgcctgtgattgctcccatgccatcgaagaatctccctgttgtgtctcagcttccccgtggggttactcgacctctgctccttcgtcgcggccagcaccgctctgatgatactcgacctctcttcttctgctgcggccagaaccgcggtcacgtaagcttcgggactggagaagtcatgtactcctactgccagattgagccaatgcagccttcttctttctcccgagctcccgaggctcaaatgatgaatgcctcgcagggacctatgagactactcggtcactaggctcaggcgtgtgttg

SEQ ID NO: 2968 - DNA, 1236 bp, Arabidopsis thaliana
gatacatctctacttgcagtgtggaaagaaactcgattgtctcctccttataggcagcgtaagggtaagacatgagtgtctccagatgacacttctcgaacacatgttgcacatcctccagtaaccccagctgggctaaagtctcataacagggatacctcgttccccagaaatcattatgttcgaagaatctgatatactcctccattgtaacctcgtcaggtttgttcagcagcattgtctccttgcgccatgactctggctcatactcagttttgatgtcctcatcaattaactcatatctactcgaaatcgctctcttccctctagcgatttcagctcttccttgactacgttgagctgtggagcgttctatttctcctctaaagctctcgtaaacgtgttcttctctctcgggtctagtggaccaagactaggcttcatctacattataattaggatccatagaggattctccactatagttactcatgatgaaacctgaaaacagatgaaactcaaagataaacgttaatacgttagttccagcaaaaacaaaaacacaatccaacagtgtataccgctcgagtaaaccggtcggttttgaatatttttcttttttggattgtgagttgttggtcgagtctctccttggtgaacttgaagtggaacgatcgagtgaacttgagcgacaagacttcttgcggtcaagtgtggcgaatcgagtgagctaaaaaccggttagtgaggagagatttgatggggtcgagtgaactctttggtggagtgatgtgacgtgaccgagtgattctgcaaacaaaccgaaatgagcaaggatgaaaccttcaagtactcgatcgcgtggcaaatgtgagtagagttgtagacggttcactagattgtttggtgagctacttcttacacgcgatcgagtaagatgagagatggtgaagtgagttcaaggtgatcttgcactgaattgagtgattgataaacaagaaccggtgtggagatgttgaagaagtcgagtgattgattcggtggtagagcttcattcttcttctctttgatttggcaatcgagtgagcttgaaaactcgtgatggtgaaacgagacttacggtggtcgagtaaaggaggtgatgaagatggtgatgagagatcgagtgattgtgagaggcaagagaggcgcgatcaagtgtggttgctgaatcgagtgaaattgtgatgaatgggg

SEQ ID NO: 2969 - DNA, 918 bp, Arabidopsis thaliana
atgtgcccttgttgttctgcttttttcatcatatgactgaggacttctgcacatagaataaaaaggtatggggatagagggtctccttgacaaatgcctcgttccggttgaatgaatccatatggtgcaccatttatattaactgagaaggtggcagttcggacacaagtcatgatccattctatccaacgaacatcaaacccaaacttaaacatagttgcttgcaggaagtcccattcaaggcggtcatatgctttggtgatgtctgtcttgatagccgtgtaagaggtagagcatcgtttcttcacttttaaagcgtgtgtaatttcatgcgaaatgataacattgtcagtgattacacgccctgggatgaaagctgcttgttcctccgaaatgatgctagatagatgtttcttcaagcgaccaacaagaatttttgagatgatcttgtagctcacgttgcataaggcgattggtttgtaatcactcctgtgtcgtggatgttctggctttggaatcaagcatagatttgtgtggttcatggatttatcaaagacgccattctcaaagaaattatgtacctccttcattaccgtttgtttgatatcagcccaatacttgtgatagaaatctcctgtgaatccgtccgggcctggggctttggaacctccaatagagaatacagcttctgcaatctcctcttatgtgatcctctttgttaagtcatcattcatgtctgaagtaactcgctgtgtgaatccgtttaagacatggtagtgattgttgttggttgttagatcattgtggaaaagatttgagaagaagtgttgagccaccttgcctatattagagtcgctctgtgtcaacgccatcatcacaaatatagagtcattcgattctggatttctgattttgtag

SEQ ID NO: 2970 - DNA, 542 bp, Arabidopsis thaliana
tagtaacgtccgccagtgtgctctaaagctttagagaatcgctgggaacgagtgaggtataaatcagaggccatgtccagggagggtttctccataaccacaactgaaacatacttcaaattgacattgagccagaacaatgaaaggcgccggctctgcttcctttctcctaacccttctcagcacgatcacccgcacctccgcccacgggtatgtctccaacatcgtgatcaacggcgtctcgtaccggggctggctcccatcccaagacccctacagcccctctccacccattggagtcggctgggaaacccccaatctgagcaacggcttcgttacccccgaagaagcctccaccgatgcgattatctgtcataaggaggcaaccccagcccgcgggcacgccactgtcgcagcaggagacaagatttacatccagtggcagcctatcccgtggcctgactcacatcacggcccggtgttggactatctcgccccctgcaatggggactgccagacagtcgacaagaacagcctcgagt

SEQ ID NO: 2971 - DNA, 439 bp, Arabidopsis thaliana
ttaagatgacaattaaaatgattatggtgtctttctatcatttctctctaagcaaagactctgcaacaaatacttaccagaaaacgttgtgacgacaggttcataatcatggccaattttaacatcgacaagatcgacgaccacatggttctctatgggatcaagaccagcttcttgttggtctttcttgacctctaagaactcgaagtacgccatagatgggatgatggtgtacgacacatcgctaggcttgcacagaggattgacattgacacccatgaaacattcagagctgccataccacgatgaaatcaacggacgaccaccgccatagaattccagcaacggaatgtactgtgccatggagcctgtaacgacggcttcgacgcatttcgcttttggccaaagtctcttcactattgcctcccatgaggtgtta

SEQ ID NO: 2972 - DNA, 1226 bp, Arabidopsis thaliana
ctctaacaagggtcacattgcgatatgaacttctgagcatcccgtaacattgtaggccaccaaaaacctgcttgaagaacgttggatactgttttaaaggttgcaaaatgaccaccatagctagagctttgacaatctgatagtatatccggtacctctgttgcagcaatgcatctcctataaactccatcagaacaatgcttatagagataaggttcatcccaataatatcgcctaatctctcttaggaatctcttcttgttgtaatctgtgaaattatcaggttccacatctataactaggtagttaacactgttagcataccatggatagtccttctcgaccgttgtgacagcgcaattctcaattggtgaccaatttcttgtcgatttagaagggtgtcgatcgacaggtgcagtggtgtcgatcgacaccatcgcacaacttcgaatgtttacttcctctgaaatgtgagtgtcgatcgacataatgggagtgtcaatcgacactgaagctcgattctgcaacctatcacgtttgtagtcatcttcttcagctgtatcaatcatgtataagttcttttcaggcaagaaatcgtttatagggacatcatcatcgatcataatgcgtgatacaagatctgctacaccattctcaactcctttcttatctctaacctcaatgtcaaattcctgaagaagcaaaatccatctcaaaagtcttggcttagcatctttcttttgcatcaattacttcaaggcagcatgatctgtgtttacaaaccttggatccaacaagataagatctgaatttctcgaaagcaaatagcacagctaagaactccttctctgtagttgcataattcctttgagcatcatcaagagttctacttgcatagtagatagcatgaagtttcttatcctttctctgtcctagaacagctccaactgcaaaatcactcgcatcacacattacctcaaaaggtagatcccaatctggtggctgaacaattggtgcgctgatcaaggctagttttatctgctgaaaggcatcgtaaaactcttgtgtaaactcgaatttgacttctttacagagtaaagcagtcatcggtcttgcgattttgctaaagtctttgatgaatctcctgtagaaaccagcattgccaaggaaactcctcactgctttaacattatcaggcgcttgaagacttgtcataacgtagagtc

SEQ ID NO: 2973 - DNA, 965 bp, Arabidopsis thaliana
  unsure (1)..(965): unsure at all n locations
ttacccaattcctcagtagattttgttacgtcgagaatgtcatcaacaacctgaaacagtagtccaatacacctagcatactttctaagcttttcgatttcttgctctgttccacctcccattataacccctaaaactgccgctgcctccaacaatgccgccgttttgtggagatggatgaactctagatgctccaatccaaccttgtctggattcaatctttcgctggctaggtctatcatttgtccagcaactagccctgtagtccctatggccctggccagctcaaccacggcgcgaatcatcttctcgggagcgaccaacccactcgacacaaccgtcatgtgctcaaacgccaatgcaaggagtgcatcacccgccaaaaccgccatgtcttctccatataccttgtttgagcaaaagttggttcaacactagttcagcattatctctgagccttcatataattaaacaacataccttgtgattggtgggcttgcctctacggaggtcggcattgtccatgcacggaagatcgtcatgaatgagagagcttgtgtggatcatctcgaccgcgcaagccctgacatggcagtagcctcgtcgccccccacaagctcacaagcggcaatgcagagcagaggcctcacacgttttccgcccgctagcaaagagtacctgaccgcttcttggatagtaaggggtttcagaagcggtacggaaacgtcgagagccgcatttacagactcggctttgcggatcatatacaacttgaaatcaaaagcagagttgttatcgttgctttttccctctggttgaatcatgtgccctgcgtcttgtgaggtgagggcagaagagagagataaaacggtgcgttttcggagactcttgacggaagatatggagttgtctcttcttcctctggattggctgaagagggaggatgagctgagatngacagtagt

SEQ ID NO: 2974 - DNA, 892 bp, Arabidopsis thaliana
ggtaactctgatgcatttgtaaagataaaaacttgaagaacagagcatttgttggctggaaaaaaacagagaggtttaaattaagaaaagtcgtaaacattgttctcctcccctgccctcaaatctcacagatattatgactgcgggtttatctgccggagtgtaactcatgtaactcccacgatggaattttccggctaagaaactcggaaataacgttggcctccaatatcttcaaggcttcttcattcgtcaccgacctcggtgtcttgtactgactcacagaagagcctctagacagaaagaagttcatgagctcgtcaaaagcgccaggcttaacaaccttaatctcaagtggtccaatgttcttatcattctttcgtccttttctgtatacagcatcgagagactcctcaacagtgaagcagcattcctccaaaacattctggtcaagctcaagcttggcgtccttgacttttctcccgagttcccagtagagcacgtagtgacctggatacgaggaggaatccacacggctagtgaaatccatgagcattaggtcatgtggctcaagcaggagactcgcgttagtcactgccttgaggaggtcttcgtcgtaggtcttgtccatgtcgatgctcagaacaactttctgtcttcccacgaaatgaaactgtggcgcattgttgtagaaaccagtcactcttaaaacgtcccctaaacggtacctatacaaacctgtataaagaattttgatacacattaagaaaattattaacatgtcatttagttttgaaattgagagagtaaacaagaaaaaacacttaccagcaaacgttgtgacaacaggttcataatcatgaccgattttaacaggggatcctctatcctc

SEQ ID NO: 2975 - DNA, 711 bp, Arabidopsis thaliana
tgcgtcactgaccttggagtcttgtactgactcacagaagagcctcgagacaagaagaaattcatgagctcatcaaaagcgccaggtttaactaccttaatctcaagtggtccaatgatcttatcattttttcgtccttctctgtagatagagtcgagagactcctcaacggttaagcaacattcctccaagacattagatttgggatcgagcttggcgttcttgaatttgttaccaagttcccaatagagcacgtagtgtcctggcaacgaggatagatctacacggctagtgaaatccatgagcatcaggtcatgtggctcaagcaggagactcgcgtttttcactgccttgagaaggtcttcttcgtaggtcttgctcaagtcgatgctcagaactacattctgtctccccacgaagtaaaattgtggcgcattgttgtggaaaccagtcactcgtaaaacatcccctaaacggtacctatacagacctgtaattcacgcatgcatcttgtgagaaaaccaacatatagatttttagtatatcatatacattaagaaaacaaaagagtgaaaatatttaattctatcatttatagttttctcaagcaagcaatataaagactttttaaaacaaaaccctaaaactacatttattttgaaacgtagagtacaagaaacttaccagaaaacgttgtgacaagaagttcat

SEQ ID NO: 2976 - DNA, 910 bp, Arabidopsis thaliana
tgctcaaacattaggactggccgtcgcatctcttcgatcacagacgcgacctgtacttcagggatcggtaagttcctcactgctccaaatccggaactagcaagcctgatcgagcaagaatgcagtaaaacatcatgggaggcaatattgaagagactttggccaaaagcaaaatgcatcgaatccatcattacaggcaccatggcacagtacattccattgctggaattctatagtggtggtcttcctttgacttcatcgttttacggcagctctgaatgtttcatgggtgtcaactttaagcctctgtgtaagcctagtgatgtgtcgtacaccatcattccatgtatggggtacttcgagttcttagaggtcgagaaagaccatcaagaagctggtcatgatcccacagagaaacctgtggttgtcgatcttgtcgatgttaaaatcggccatgattatgaacctgttgtcacaacgttttcaggtaactcttttctcttgttaaccataaccgtttcaaaataaatgtcgttttgaaattttattgcagtcttcggttttttaaatgtgtatcaaaattctatatgtttctgcctaccaaaaaaataaataaaaaatctatatgtttcttcaagatctatatatgattttacaggtctatataggtaccgtgtgggggacgttttaagagcgactggtttctacaacaatgcgccacatttttgtttcgtgggaagacagaaagttgttctgagcatcgacatggacaagacctacgaagacgacctcctcaaggcagtgacaatacgcaaagctcctgcttgagccacatgacctgatgctcatggatttcactagccgtgtagattcgtcctcgtttccaggacactatgtaatctattgggaa

SEQ ID NO: 2977 - DNA, 862 bp, Arabidopsis thaliana
gaccgaagaaacattcagagctgccataaaacgttgaaatcacaggaagaccaccgctatagaattccagtaatggattgtactgtgccatggttcctgtaacaatggcttcgatgcattttgcttttggccatagtctcttcactattgcttcccatgatgtttgactgcattcttgctcgataaggctcgctagttccggattaggagcagtgaggaacttaccgatccctgaaacacattgggggtctgtaatccagtcactgagacaaccagtccttatgtttgagcaaaactcaggccagtgatcctccaagaacttgattattttgagaaaggatgaagcaaatggtgcaccaaggcgacctacattatctcgttgtagaagcccacaaagcagttggcagtacatgctctgagtagtgtctgaacaagtagtaatcgcatgcgggcttacctgtaagctatccctgcaagtaatagaacaaacacagtaaagaaacacgagtagtatcaagaggcttgtttgttaggcacttcggttaatcacttgtggaaagactgaattatgtaatgtaacgtgcaagtaagggttttattgactaaccaaagaaatgagttggtctgtttaatgcttttcaaaaaactagtaaccatagtcctgaccatcaacccattggcagtcttgctctctcgggtcacaaaataaaatatgagagattttccttcgctaagcccatcgatgtgcctgcaaacagtaacaacatcggactcggggttttactacttactgtttatggtatcaacaaagagacaaaactcggagtttttaactctttacttgtagagtagaggtgcatag

SEQ ID NO: 2978 - DNA, 578 bp, Arabidopsis thaliana columbia
agagtatcccccctctttccatttttttgaaatcaaatctaaagttttagtgttcttggtgacaatctaaatacaatttcctcttttacatttcttgttcaataaagctcaatgagccatcttaattatctatgtcaattaagcttgaatctttcttgtttgagattgtcaacattaatgtgtctttggtcctacctcaaaagtgagataagaaataagtctagtgatattgttatctaactaccaaaatcaaatccgcatgtcgcattgtcgcatgttactaacataaaaaaagaaaatatagtttccattataaacaagaccttaattaacatctgagagattaataatcttttccagtatatatatagctgtggaattatgtgcaacagctaagcttggaccatatcatagcgtagtatcttatgattcaaatgtccatagttcaacttggttgttccttgttctgtaagaaaagacatattactgtaatatcatctaccttcgtatacttaagccgtttcttccatgcagcttcagcgcctccgccaccattttagcggccgaagcttgctttt

SEQ ID NO: 2979 - DNA, 582 bp, Arabidopsis thaliana
ttgagaatttggctaccataatcatcattgaacttgtcgtaaagatgggcgtgcagatgagccgatggtcgagtgttgctcagagctcgatcaatgtcttctggcaggatgggaccaatttttggcagctctgcaagacaaaactaataatgtcaaagattctgcagttttaaaaggtaaactatgccaatgacggattctttttaaaagagatattaccgtcttcaggcacaacatcttctctgtcttccaaaatagccaatgtgcgtctcagtggttgcatcgcagcttccttacaaagtattcgaatgtctgaaccagagtagccctcagatttctcaaccaacacatcatgaggcaatggctcatcacctggttgtgacggtataagcatctcgaacattcctcttcttgcttctggatccggtaaaggtacaagaatctaatggtttcactagttgaggcctaaacaaaagaaaatcatgatacaagcatttttgttctatgagagtaagtaaaaggatactcgtttctctagacgccggagcatagctgcatctagttcccaggggagatttgttg

SEQ ID NO: 2980 - DNA, 529 bp, Arabidopsis thaliana
tgacagtaatatattttcccttgatttgagagaaagaatcttttttacatgtaaaacgaatctaaaccaaaacaataatatagaaattcctgaggaaaccgactgagaaagagaagccaaatttagaagatggccttttcctagcaaattgggcaaaggaaacccaccttaccaagttatcttcatacttcatataaatctctgctcattttcgataaaaagttgaatccttttcacattttccgctcaattcgatcttacatgttaacaatggttggtctaactccagctgaggatcgttcagagattgcctttttcgacgtcgagacgacaattccgttccgagttggtcaggggtacgcgattctggagtttggatcgattctggtttgcccaagaagcttgtggagctgaaaaactactctgttctggttcgtcctgctaatctcaacctcatcacagcctcggtcctgtgaagtgcaacggcatcaaacgcgaagacgtcgaatcagctcttacatttgcagat

SEQ ID NO: 2981 - DNA, 692 bp, Arabidopsis thaliana
ttactgtcactttccttgataataatcctaccattgctctttttgatctccatcagcgttgcgattggacgtgaaggtggggttccacctctaattgcacttgcacggtctgaagccgaggtaagaactttgagcatagccaagccatcttggataatctgatataaaatttcctcaatgtgctggtttttttcccaggatgtacatgaaactgcagcaggagctctatggaatcttgcttttaatcctggtaatgcactccgcattgttgaggaaggaggagttccagctcttgttcacttgtgttcgtcttctgtctcaaaaatggctcgattcatggctgcattggctttggcatacatgtttgatggaaggtatattaatatataacttagttaataaacatcccaaattcaatccgactctcacggttttcgatctgaattatcgatctgcaacaggatggatgaatatgctctgatgataggaacttcttcatcagagagcacatcgaaaaacattagcttagatggggcaagaaacatggctcttaaacacattgaagcttttgtcctaagttttatagatcctcacatatttgaatctcctgttgtttcatctacccctactatgctagcacaagtcacagagagagctcgcatacaagaagctggccgatttgagatgcaggc

SEQ ID NO: 2982 - DNA, 549 bp, Arabidopsis thaliana
cagatgcagagctaaaggtaagaactttggactacagagagagagaggtttgtcactgtcttacctcggaagtccaattagttttaagtgtaagaacaatcaaagttagggtttgaagtatgactcctgcaatcatcccccaccagatcccctgtaaagaaaaatctcccaagtgttatgtataatacaatacatataaatacaaagaaagagagaaagagagaaagagattatacagcaactccaagactggttttgaagccaaggacacagccaataggaagaccaatgacatagtacgtaacaagattcacataagccaccactgcttgccacccactcccaatagcaacccctttttaccaattcaacaaaacaaatcaatccacaaagaccaaagcatcaatcaagcattcacaagagggtctcttttgtgattttaccagagagaattggctggattccgtttaagaaaatggaaacggcgagaagaggaaagaggtcagagacggctgctataacttctgcatcgctggtgaaggctttgct

SEQ ID NO: 2983 - DNA, 462 bp, Arabidopsis thaliana
ctgcccttaaagactcagcttgctcgtcgttacaattctgtagcaatgcatcaactctgaagtttattccaagcgaacccaagaactgggactgagtcataggtccatggactgagacattttctgcagaacacacacatttgctttgtcaagtaagtaagctaaccctacctacatcacaatgactagtagccagtataggaacgaaacctgaagcttcctcagcggagtgttttattgaaggaaagtcgacataagcacttagatcggcagacccgggatcatctagtatgttgacaaacttgtgttttctaatagcctgaagacattttgccataacagagtcagaaaatgattgtcacattaaacatgatcagaacatgttgagacaacaaacctgaagactgtctgaaatgattgcattcatcccgtaatcgattataagtgctccacctccatcag

SEQ ID NO: 2984 - DNA, 402 bp, Arabidopsis thaliana columbia
acatttggatatcttcagtgacttcatgcctcgacagagaagagagaccaggtagagtatccctttggaaatcccgctttggtcttcctcgtcttgcttgtcctcttcttggcttgttaatacatgtatcttcgaatttcagattctctgggactaatggctctggcatgtagtcttcctcctttgtctcctgtatattcaggggcatggcttcaaagtaatcaaatctccccagaagaatagtcttccctgttaccttcaaagtctgtggcttctggagaaccatcaatctttctttctaactcatcaccgcaagaagtgattatttctgcaaaccaagagagcgggctttttgaagccgcatcagttgaagaggaagctgcgtcatcaggatggcgttgg

SEQ ID NO: 2985 - DNA, 517 bp, Arabidopsis thaliana
gacgggttctatgggtatcacaagtaataggccaagaagaggacaagcgaaactatcatcggaaaatatatccaatctagtaactgaagtttacgagacagatagctcagaccgcgggataattgccatgtatcatggtcacaatcgaatcttaagaactgaagattagacattccttcaaaaactctctcattcatatcgaattcttcctcgattatgtagtggaaatctatgcctattacacttttactaccctgaaataaaggaacaagaaaaaaaggtctagatggttagtttttaaataaactaaatattgtagggagcaatgcaatgcacttactgctgcatcaccattcagcacatcacatatctcttctccatcaaacaaaaactggcgttgtccaggctcatggatagattggttacgaacaatttctccacgtagttttgctagcagtttatgcatctctatagttcccaattgctaaaagatatgagagacttctcagctaagacg

SEQ ID NO: 2986 - DNA, 856 bp, Arabidopsis thaliana
tgcagaggtttcttcaggctcagaacatagtgaaccctttggcttacatgtccttaggagttttcttgctccacacgttactcacgtggctggttaccaacgtgctggatttcggcttgcttggggcggctctgattctcagtttctcatggtggctgctagtagctgtgaatggtatgtatatcttgatgagcccgaattgtaaggagacatggacagggttttcaacgagggcatttagagggatatggccttacttcaagctcacggtagcttcagcagttatgctatggtaaacataaagctgtttgatatgagcgttttgagtatatggtttaaagaaagctgataccaaatttgaaatgaaatattcttcagtttggagatatggtacaaccaagggctagtgattatctctggtttactctccaatccgacaatttctctagacgctatttcgatttggtattttttcacttacttatcaaaataccgatgaatctcaatggtttcttgactagttgagtcattttgcagcatgtattacttgaattgggatatgcagttcatgcttggtctaagtgcagcaatcaggtattaacaaaatgatccatttaaatcttcagtcgaaatgatccatttggaagcatcataccgtttttgtgtttttggtcagtgtgcgagtgagcaatgagctaggagcgggaaatccacgagtggctatgttatcagtagtggttgtcaacatcacgactgttctcatcagctcagttctctgtgtcatcgtgcttgtgttccgcgttggccttagcaaagccttcaccagcgatgcagaagttatagcagccgtctctga

SEQ ID NO: 2987 - DNA, 519 bp, Arabidopsis thaliana
caggaaactctccactggctaagcaaattccgtacctgcaattaaagaaagagcacctggaaaacttcagtatgctgcatctgctatgataaggggttcctacgatggttctggtgttgctggaaaggcttctaatacagtgacatctgaacagatgaacaacttgatatctaatctaaacttgctagaacaagttggtgacatgagtcggatatttactcgtagtcacagattgaatagtgtcgccatcagggactttgttaaagccctctgcaaagtttccatggatgagttacgatctccatctgatccacgggtcttcagcctaacaaagattgtggaaatagcgtaaggatcaatcttttctttacgatatctgttttgtatttgctcactctctcttatttataccctgtttgttgtaatggcaggcactataacatgaaccgcataagacttgtctggtcgagcatctggcatgtgctctctgatttctgtgtgactattggctgtgctgat

SEQ ID NO: 2988 - DNA, 1299 bp, Arabidopsis thaliana columbia
tgttccttatataaaaccattatcctcacataaagaagacttaacaaaaaaaaaactcttttcaaaacacattagagacaattaacaagaaaaacccttctaataatttgatcagagatatgggtttttcgcacaagttgtgggatgaaactttggccggtccaacgccggaaaatggtctcgggaagttgagaaaccaaatatccggtgaaagtgccaaccggaagttgatggtggatctgaaacgtgtcccgaattctcctgaccgttcaagcaaccccgtttcccctttgactcttatgttaccttttttaaaaatcctttctgatccactttttttttatcttctatgcttgtgttatgagcagttaaaaccctatatattcatgtaaattaaagactttgcaaggtgatacatatgttcatagtcattataagcttttttttattattttttttttttattttgacatccataatcattattagcttgagagtattatggatttgtaaattaatgattaccaaaatcatttgtatgcagctggaacaccaagtgaaacacatgctacaagtctcaatgcttgcgattggtttgatctccctcacttttctttcctctcagactatacttcattttatccaacgcattatcgctttcattagtaccaccatatctaattaacgtccggtaatactgcaggattgtgctaaacgcattggaccgttgaaaaatattacaaggtatttctacgagaagaagaagtatcccaaactacttttctttgtatatatatatttgctgtgtacataacataatggtcgcttttggtgttttgagatttgagaaatattaaatttctgtttgtttcacaattcacgaagattatataaggtctttttgaaacatagtatttctggaatgtttaaagttgtatctttgacaatggtgaaaagaaaaaatgatactaagtgataacatgctaacgtagcgtatggaaagcccaataaaaacccatgcccaaagtaaataacatccacgtcaccgttcttattgttaaaagagagactaattcgaatcgatttaacgaatgaagcaagacaacgaaggaagacaactggaaactatcgacggactaaaaaaagtctacgaccgatattgaaactgacggttaggctaagggtaatttcggtacatcaccggaaaaatggttcacggggatagttccggtaattatagtaaaactagatgggcttttccgtcaatacacttcctcatcggattacgaagaaatgggg

SEQ ID NO: 2989 - DNA, 1330 bp, Arabidopsis thaliana columbia
atcatcgctcaattcgtgtacggctgagtatgctaacgtaagggctgacttatcatcgctcaaatcgtgctatggctgagttctgatatcgtgacggctgagttatcgtagtttaattcgatgtttaactgagttatttctaaggtggtggctgacttgtcatcgcacaaatcgtgtgatggctgaattattttaacataacgactgacatatagtagattattcgatgttacggctgagttatgctatcgtggtggttgacttgtcatacccaaacttcgctgtaatcaaagaacccaaacgtcactagaggactataatacaccggttgacctccttataaatataactaaatagtcaagaacctaaacgttgttagaggactatatatacactggttctctcttgtcttttgataacactgtattttactcattttaggtgtatgtttatcatgatttagctttgcatttgctcattgtatcatataattttgcaccattttagcttgttttgcatacttaggcatctaggatcatcttgcattcgcattgcatgttttggtatgttttcaggtgcaaaaggagcttaaaaggactctactcaattcattcactcaatccgggcagctacagaagaggcatcattctactcgacctctttactcgatccaggatgctacaaaggaggctccagtttacttgaccctcttactcgatcaaggcaacctcagaagaaagcagcagactaatctactcgcccctcctactcgatccactactcgatccatttactcaaccaagggtgaccatctctacaagacttgttgagctatcaaagcgtcttcgaatcctcctcattccccactcaaccagacatctgagcatacggataggagaggataaaccatctactcgaccaattgatcactcagagcatatacacaaaggcgcaaactttgcagcaccctctttactcgatccccaagatcgagtattcgcccaaaccgcctcaagtctcttgtcttctagggaatctagggtttccaacattttagtataaatagatcatttggggtttgtcaaaagatctatgtttatctttcagtttttctttgtatttatgaatcttgaaactttaattactcttaatctattttgttttggcatttgattgtttaagtaaagttgtttagcttgtttagatctacattttggtatgattatagtaatttataggtttgtgttcttgagaatgttgcatgagtagtgattaggggtcttgaggatggattagattagggtaatctctaggtagttaggtgggtagt

SEQ ID NO: 2990 - DNA, 609 bp, Arabidopsis thaliana
  unsure (1)..(609): unsure at all n locations
attcacaggcaatatcccaccatccttggcgaatatcacaaatctcgagtcattagacctatcacgaaataacttgtctggtgagattcctataagtcttggaaaactctcgtttttgtccaacaccaacttctcctacaatcatcttgaaggattgattccacaaagtacacagtttgcaactcaaaattgttcttcggtccctgggaaatcttggactctatggtttcagggaaaattgtggagaaagccatcatgtgcccgttcctactacatctcagcaacccgaggaacctttgtcggaatcggaagaccaattgctgaactggatagcagctgcgatacggtttggacctggtatgttttgtggattagtgatcggacatatcttcacttcatagttcatacaaacatgagtggttcatagctcgttaagcccatctctctcccggtcaagtttgtactacggtaactaagctcgctagttgttttttctgtccttgtaattcccatttagtggttgcattataatttataaacagtgtcgacgttataagctgttatgtcncaccatagtgtgtacgtggtcatgtttgtaagttgatatgt

SEQ ID NO: 2991 - DNA, 539 bp, Arabidopsis thaliana columbia
cattgccgttcattttcagatcgattatcatcaaatccagggttgaatgtgatgacttccttgaaaagattgagtcagcccaggtttcagcgccgcaacatcttgctggtgaggactataatgttttttttaagcctgtttgctcattggttgtatagatgattgtgatttctggtgttttagaagatagtagctcttgggatgtagttagtgaagatgatctttgggatgatgaaaccatggctcaaagggaagaagattatgtccttgttagagaagaagatatagcagagggcattgcatgtttcatggctacttatttacaatcacttaagcagacaaaggtatctaaagtcttaactttcgttataatttgttcattgtatatcagcctttcatttgagtttatacaagttgccatcattgtgcaggacttgactcctgagcagcttcagaaaggtattctcgactcttctgtcaaccttcaaatgctgtgtactcaatgataagtagacataatagttggctgtacataatag

SEQ ID NO: 2992 - DNA, 570 bp, Arabidopsis thaliana
ccagggaaccatgaaatttgtttccttggatcatggagatgagagaccactcttgatttcaaagttgttgttctgaactggtggtggcactatcccttgtctttagtgatgattccttggggcatcaccagcaccaaggtttcttggttgatcaactatacgtgggtcttgaacctcaagtcctctgtcctgttgaccctaatctaatccatcctcaagaaccttaatcactactcaagcaacataactaagaacataaacccagaaattactgaaattatatcaaaatgtagatctaaacaagataaacaactttgctcaaagaactaaatgcaaaaaaaaaaaaaattaagagtaatctatacatttgatcgaggaagaagatgctaaattagtagcaaagcatcttccagcaaaaagaaaagacaaaaaacgtgacgtttatcaggaaccgcgaccacactacgatccaaaagaggtcaaacgaggaacgatctttgtcgcaatggattctaaataccaatctccccaaccatcgatgtcgatcgacattgctacacggttaaggtg

SEQ ID NO: 2993 - DNA, 1118 bp, Arabidopsis thaliana
taagagaatgccatttggtttatgcaatgctcctgcaacatttcagaggtgtatgacctctatattttcagacttaatcgaggagatggtggaggttttcatggatgatttttcggtctatggcccctctttctcgtcatgtttgttgaatcttggcagggtattgactaggtgcgaagagacgaatcttgttctcaattgggaaaagtgtcatttcatggtgaaggaaggcatagtgctggatcacaagatatcagagaagggtatagaggttgacaaaggaaaagttgaagtgatgatgcagttgcagccaccaaaaacggtgaaggacatcagaagtttccttggtcatgctgggttctacagaagatttattaaagacttctccaagatagccaggccgttaactagactattgtgcaaggaaacagaatttgaattcgatgaggacagcctcaaatcctttcaaaccatcaaggatgctttggtatctgctccggttgttcgagcgccaaattgggactatccatttgagatcatgtgtgatgcatcagattacgcaataggagctgttttaggccagaaaatagacaagaagcttcatgtcatatattacgccagccgaacgttggatgacgctcagggaagatatgcaacaactgagaaggagcttctagctgttgtatttgcatttgagaagttcagaagctatttggttggatcaaaggtaactgtctatacagacctttgaggcatctgtatgccaagaaggatactaaaccaagactgttgagatggatacttttattgcaagagtttgacatggagatagtagataagaaaggcattgaaaatggtgcagctgaccatctgtcaaggatgagaattgaaaaaccccttcccatagacgattcaatgccacaagagcagctcatggttgtagagttcttcggaaggagctacagtgggaaagagttccccaactgaatgctgttgaaggagaatcccatggtatgctgatcatatcaattacttggcgtgcagagtagagcctccaacctgacaagttatgaaaggaagaagtttttcagagacatacaccattactactaggatga

SEQ ID NO: 2994 - DNA, 993 bp, Arabidopsis thaliana
ccacttcaatagatggtcaatacttagataatgaaaaaaatgaccgtgagcccaaaaaaagaaaaaagtattagccaagaagcctaagctaattagttgttgccccaaaaaaagagaaatgtattacccaagcagcctaagttcaaaataaaatatttcaagttaatgatttctgttctacctaagcacatcgggaaaaatatataattcatttcaccaatgcaccatcagaagttgaaaacataacaaaagaaaaaatcaatacattcgactatggaacttttactcccacacgcttcaaactcatgtcctctcactgttcttggcttcttagaacgagccgcctctgtcttcggcgactctccttcactcctccacacaaccactgttcatacttggtctgaaactcattctcgatgtctccgtatagcttcaactctctcttccgcttccctcggaatcaaccgcggccaagttgtctctgttattggtccaaacgtcccatctgtctacgagcttcagttcgcagttccgatgtcaggcgcagtcctcaacaacatcaacccacgtttagacgctcatgcactctccgtccttctacgtcacagcgaatccaagctcgtgtttgttgaccatcactcaagctctttagtcctcgaagctgtctcgtttttgcccaaggatgagagacctcgtctcgtcatactcaacgacggaaacgacatgccatcatcttcatcagctgatatggattttcttgacacgtacgaagggtttatggagagaggagacctgaggttcaagtgggtacgtcctaaaagcgagtggactccaatggtgcttaactacacctcaggaactacgtcgtccccaaagggagtggtgcataccacagatcggttttcatgagcactattaactctttgctagactggtctttgcctaaccgtccggtatacctgtggacactgccgatgtccatgccaatggttg

SEQ ID NO: 2995 - DNA, 774 bp, Arabidopsis thaliana columbia
tatgcattcttagcgagttcaattgttcatcttagtagataggccgattcttattacacacctataaaccagactcatcaaataataaatcaatctacagatacctatggcgggcatatcaattgtctcgattcaagatctagttaattactctagatctagcattaaacataattaaagatgaagaattctacagataatctagcaaagggggcaatctactaaaccatatgaatccctaatgagataccctattcctaacaagcagactactaagacatattgaatgaaacaaacaacataattgagatagaaagcataaacacagcaatagagataagagttagaaaagatttcttcacggtatttaaaactggaatgagtgtctcaagaacaatggatgaatagcttttgtctctcagtcacagggttttgcaaaagcttgataaaagactcgataaaagaaacttaggtctaaaaacaatatataaaaccctaaaaacgtccagagactaataatgcaaatagggaagtctgctggggcaaatttcctcttctgtaaacttgaaagcgtctaggacttctgctgggccgaaactggtgtcgatcgacaccaagagtgtgtcgatcgacacttctcgctgattcctgaatccaaattcgtccttagcttcctttcccttagctcttgctccaaaatgtctcattatctccattgttgtcccactgcataaaataactgaaaagacattaaaaagactcgagaaataacat

SEQ ID NO: 2996 - DNA, 480 bp, Arabidopsis thaliana
gacatcagcccttaaagccatagattttggattatcagtcttcttcaagcctggtatagattttataatgtccagtatatatctcaggtcaacagataattttgttctgtctacgccacttgatatattttgaatttgtaacaggtgagggattcaacgagaatgttggaagtccttattacatggcaccagaggtacttaggcgaaattacggacctgaggttgatatctggagtgctggagttagccggtatatcctgctctgtggtgtcccaacacatgtgggccggtatgttatgaaccatcttattggcttaatccagtttttgttcatcaacagtggatgttttgtacggatatgcagctggtggattttaggttccatagatgagtagaaagatttactgcagaagcagtagtttcctctgtgaatgatttaggatgatgttacagaatacatggtcatggattcactagtga

SEQ ID NO: 2997 - DNA, 1033 bp, Arabidopsis thaliana
ttaaaacattcaagcaaaaaaaaatcccaagcataagttctacaataataagtggataaagccatccagacataggttctatagaaatacggataaagctgtccaggcgcaaagtctaaagaaaaacgccacgggtatctactcaagcttttcagtcgggagagtcccagctgcaagcagatacgatccagactgatcggtgacccccacttcatctgcgagagtctcgaccgatctatgacctccagggcttagaggagcaagctcaggagcaggggctttgagctcttccttcaactcagacgggagacgaatgagattcacctccgcatcagcgaaatccctgagccaatcctcaacctgcttcttctcggtcgccaaggatccaccatcttcaagcgccttaatgagctgtgcattggcccccgcttgggacaaatacataaactgatcgttagcgtcctcgaagagcgacattttctcctccacctcgccgtttgcgcgacccgagccacttcgctgtccttgagccctttcgcttcgacgagcagtcgcttgcaacgaacaacctcagagtccatcttcatgttgcgctcggccaccctgatcgcattctccttattgacaaaggcctctttctcagccctttctctcgccagttttgcctcagtggcctcggcgatcgccgcgtctctcgccttttcggcctctttcgccctggcctaagcctcagccaacctattaatcgcctctagattgttccgcatggccgtatcataagattggaccatccggttcatcgagccaacaacctgatacataaaaacaggcatccacgatcataacagctcggagaacacgccaagcatctaaaatgaataacatacttacccttagaaaatataaagcagtctcacgtactttctagactctagcagagtatctggaggcgggagcaggcgaccggcgcacttcccgacgagattcccaaagtagccttatcttcgaaaatgggaggctcgtcatccttttt

SEQ ID NO: 2998 - DNA, 1062 bp, Arabidopsis thaliana
gagattgacagagcaggatcgatacaagacagtagtgtcaaccgacactcacctaatgtcgatcgacactggacgcagactgcaccaatcaaccttgactttccacatgttgctgaacaagtctacacgcctaaatttcttgttcaatgcctcaacagtatatgcaagagattcaggaggagagctacaaagctccacagaatcagggagacaaaaggaagacaattattgtctcggaacaggtttcagagctgaattgttgacaggctaagggaagacgagttatagcacgagtgtcgatcgaaacccccactaatgtcgatagacaccaatcactcgttgaagcagaatcatctacgctagctacttttcaagcttgaaatcactgctataagtctaggaactacattcacgtcacccattgcacctctcatactccatccatctcctaaacgacaaaggtactcatatcatcctcctagacctcgtgatttcatcaataagagtttaaaatttcaaaaaacagttttacggttaagaaagccacgagtttctcaacgagcgcttgtttcttcttttgatgattgtgcaggaaaacggagaagatcacccatacctctgtcatgccctgctgatgttctggacttccttggtagacctcacatgccaactgcctatacgccaccatggttgatgagaggttttactccgcggtatttactgccaccatctgatccacctgattcccaaactccatcaaagtcaagctattgactataaacaagcgcttagtgggaggtaacccactggtatgaattttctttttcttttttcttttatttccgtttttcttttattttcttttttgcttattttggctttgaatgtcactagggggaggcgcttactaactatgtttttctttttgaatcttatttttactcttatttttctttttgagttgctttatggagtcaaaattttgtttggaattatgatctctattcttgagattattgcctggttgactaatgctgcaggttaaactcaatccgactatta

SEQ ID NO: 2999 - DNA, 573 bp, Arabidopsis thaliana
caaccgtataaaataaaacaacgaatatgaatacaacacatacactgagccaatcaatgtttctgtagctcttattaatttacattcacaccacttatttgggaagtaatctggtagaattcttgcttggcttctatagcttcacaaaacttcaaaagattacagatggtcttgatatccctttgcatatgtacatatatatcctgagaagtgaagatggtttgatactcggttacataggctacttgtaccaaaagagagtagtaaactttattgaggttggtttggatatgaaaagtagatcatgtgggttctgattgatgacttaacaaacttttgcatggtgaacatcgaatgaagtgacttgcaagaagctaaacttgtttacctctttatgcagaagaatcctcttttggtttgattatcacaacaggacaatggccgtggttggtgcagtagttgcttacacttcccagaaacattctgttgaaagaaagacaaactggattcaacactggcatttgctcactaaataagatttactcactagagacacacagtgacagtgatatg

SEQ ID NO: 3000 - DNA, 561 bp, Arabidopsis thaliana
ttcttgatttgcaaaattactaatgtttagtttagtagaattcaaatctgtagccaaactatttaatgtaacttatgaaatcacaaccttgacttgtggtgccaacgggcaacggcaatgtcatatacatcatagttgttttagattatttttatatatgtttaacacatcaactatttattatactacaattatttaactacctatcaagtttgagagccaattgttataaattacaatctcacatctgttattcagaactaattaatttacttgtatgggaaatttatttatatggtaacaaaaagaaagaaaattgtaaatagtttactcaggaaagagtagagagaatgttgatagaaaaagagtgatgataagaaattgtttgcatgggagcgaaataacggagaagacatagaagaaaaggacaagacagccccaaaaagatcaagacttgcgtcttggggaatgcagattaacactgactgctgcctttgtgtatgaatggaggagacacgcgatcatctttttctcactgctcctttgcgagaacgatatgga

SEQ ID NO: 3001 - DNA, 503 bp, Arabidopsis thaliana
ccccctacaaccttatgctatatatgctagcaagccatgtaagttactcaactcttagctatagggtctactgtatctatcgtaagactaaatgtagcagattaggtctgttctgttttttcttgaaaagaaactgaaaatggagataactgtttccaggttttaggagcttgttggtatttgctagcagtagagaggcaagaagcttgttggagacatgcttgcaacatcgagaaacagatttgtcaatacagattctttgagtgtagaagattggaagatccacagaggaactcttggtttgaatggagcaatataacaacaatatgcaaaccagcaagcaagttttacgagtttggtatattcggagatgcagtaacatcaactgtctacttcatcacagtttatcacccagtactttccctgtctatggtggggcttgaagaacctcaggtgacattcacagttctttgcagatttcactccattaggttatccataac

SEQ ID NO: 3002 - DNA, 446 bp, Arabidopsis thaliana
gtcctcgatataatatcagccgtgagtttatgcatctcctctcctatctccacctcatttgctccttccccaacttccttcctcaacctctcaactagcttgcttgtgcactccaccatatgccttgcgtatccctacatcataagggtacttcagtcattcaacgtcaagtaactaagcattgttttttgcatgaggctagtttattgacgtgccttgagtctttctccggtaaatgccggtgcagcaaggtggcgttggtggtgccaatcttggccattagccattaggagaccgcgaccgataaaattcttagtcccttgttgttgtagccacgatcttccactaacaccgttgtgtttcatcagcaactcctttatcaattccgtttccgttaagcaaagccgaggatccgtcccgttccacacaataaacctcttccctgt

SEQ ID NO: 3003 - DNA, 602 bp, Arabidopsis thaliana
ccctctattgggtttgggtgatgataccttctgtcagtagatcgtttctagggcaggctgaccggaatacaacggtcacctggccgtttcctctcttcaaagacaagtttttaggaacatccgaaataacatccccgaaactgtctccgctaggagttgtgtccatcatgactggtgtgaggaagcttagttgcttgtcaaggagatccggcggttgaggccccggttgaacaggcatatcaaggacgagagatttggagagtttcttgaactcttgaatgtagccactgagggtgtgtggcccatataacgtagatgcaccctaacagatgcaaccattgtaacacatgcatattaatgtaagactacgaactcttgtttgtttaaaagggccagtagataagcttttacctcgtatctctgcacttgatactcctcaaaagtagtcacatactgtgagtaaccattagccaatccagctatcacaacgtgaatctcaccgctcaaatctttattacactgtttttaagttgtgtttcactgcatagcggagaccgcttccagcatagttgtaaattctgcaagaaagatagacaggatta

SEQ ID NO: 3004 - DNA, 775 bp, Arabidopsis thaliana columbia
aaaaaatctcgcccacctcagtgaaccggtttctgatatcacggtccagtgaaattggttttgataaccgattcggagaatagagggtgtaatcagtattagtcaaagttataaggtcagtctgaaatatataaaaaaatataagggtagttttaatgaagatgtttcagaaacatgacacgtgttgaggtcacggatctacggtgagtattaatatctgagttctagagttataaagaagaccgccgcgtctttgtgtatatcgcctccacagatctaatcgctaaagtcatcgtcgtcgtctcttctctcaaaatcaaaaagtacgtgagtttccaaaaaccctagctagcttttttcttgtttcaattccatcttcctaacgttactacacttttcttcacgtcaatttcatttctccgatctgagattccgtgaatttctgggatcaaagtatatgatcttttgtgtaatttagctttcattatctatgttgctgcgttttattgaatttgttgtgtatggagaatgaaattgttttgttgaattgttaaaacgtttcttatgtgagaaatgaggatagcttaaacctgtttgatcgcatttgaggttttgattgtctaatcagatattgaaattgttgttaggtgctgatcacagcagatgttgttgtttatggctaatttttgtagggttgttataaaatggctgaggcaacgtctgctttgaggaagcctgtgttcacaaaggtaatgagttgagaccaggaccaatg

SEQ ID NO: 3005 - DNA, 515 bp, Arabidopsis thaliana
tgtttatgataaactctcttcatagacctgatgtgttaccagttaatgatcttggtgtaaggaagggtgtgcagatgcttaatggtatggaggatttgcctcgtccatccaaaatggagcagctttgcgagaaatggcgtccgtatagatcagtagcgtcttggtacttgtggcggctcattgaatctaaaaatacaccacctaatgctgcggctgctacggccggagctgctctttcgtttccacagttggaagacattcagcaacaagaacaagaacagcaacatcaacaacatcagcaacaacagccgcagcttatggaccctcttaataatgtgttcagtatcgggtatagtcagctacattgtgcaacttagtatctcagtggttaatatgcaaaatacatgtcctctgctttctactttgcttgaattatggtaccgttattgttgaatatgttctttagatagagagagcattgagtgattgtgttattgctattacttgctgagagt

SEQ ID NO: 3006 - DNA, 527 bp, Arabidopsis thaliana
aactgtaacttttcagtatatcggcattacgtcatcttggtagcccatgcaattttgtatagccgactcaaggtctgcccctgaatgaacagcctagacaaaataaagaaggccacaagttaaatgatttctcttagtaagaaaaggagaaagaggaaatcagaccaactttgccaaagaaagatgtagctagactcataaaaggggctagcataaacttggggaagtaacctttaaagtcctcatgtagtgtccaagatcacgcaaaagaccgtctttttgttctcctctaaaatttggttcagaatgtatagcacgatcataacttaagagtcgctctttggttatgccattatcgttcaaggtcttccagtaaacacttaagtcaaagtcacttttgatataatccatcaatgcctacaataagaaaagtgtcagagaaagattaagattggtagtttggtccagaagggtaaaatttcaaatacctgacagatgacaacatcatctggactagtgttgttatg

SEQ ID NO: 3007 - DNA, 428 bp, Arabidopsis thaliana
ggacctagaaatggatgagattgttgttcccctacggcgacctccaggaggatcacccacttacagcacagggagtcagtccgctcactgggacaacattgttccaatgggcactcttcagccagcgccgtgcatgcgcgatgtcccaaagctctcaccagtagtggctcaccgtgttcacaccgagcccctctcgggcttgatcttcacccaagaatcattgataacagcttgcagagaaggccatttaaagatctggacacgacctgacacccagcccagcagcagctcaggagcaacaaatccaacctacaagcaaaccctcgctgaccagcaaggttggtggttccagttaattcagtcaccatttagatcatatggtttcaggtcgttggtttcgaaaggaaaccctgtgaatatctctcctc

SEQ ID NO: 3008 - DNA, 1221 bp, Arabidopsis thaliana columbia
acatcctgcatacatatacccatgtaaatagttcagcatatctacatcatttaacttaatttaacatctttgtcatgtcttaccggggttgtttgcatgcaattcttctgtgtttccaatctgtcaaattcaattagtaaagtaagtgttcattccaaaaacacaagtgctagtggagaaatatacagacagatatagtaataccttagtgcttgacacctggtccttctctttaactcttttaagtggccgagtagattgggcgtccatatcagaactagatttttttttccgtcttttctgactagcatcgtcacctcggacctaatagtacatcacatttatatgtaatatttattcattaaaacaagtgaggaacaatttttaccgtatgctaacctccttaagagtgtcagtcttgatgccatctaacacacctaatccaccaattatgccacaaacacccgctacactgtcacttccaccagctagcccaatctcaggttcatccggctgggaaccaacatgcgtatgccctggctggtcaaagcttctatgttcctgtttcatgaattacaattgtaacataagcatattatgtcactgaaaatggaatggaacatatatggtcagtttccaaaacatatacagcaaatcaaagtaaccaaacctttgtagagcaggactctgctacacatttgttggattcccctttttgagccttctgtctattttgcccacttaccacttccctaatagattcagtaatcatttccaccaattctttcttatgcttatctagtttagtatcaaagtaggccttcaattcaactgtgttcgcctgttgaatcttgagaaaactttactcaaattcatcaggtgcctctttgatcaatgcactactactgttttgcgtttccccagcaatcgggacatcatgctgcaaatcttctccagccagaaaattgccatcatctttctgtgtttgtctatcatcaacaagaaaatcagcatccatgccgtcttcacattcaccggttgcaccctcttgtctctcttccatagcaccacctgggacatcagcctccatctcctcttcaccatcactcttagacggattcataccttcatctgcaaggaactcatcatcagatggttgtacaacatcacaagcgtccacgccaccactcaaactattatgcttgaatgggtgctccttca

SEQ ID NO: 3009 - DNA, 1057 bp, Arabidopsis thaliana
ctaaagaggcaaatctattcgttcgcagaacacggtctgctttgaggtattacatgaaaattatcagtaaacgcagggcaatgacgatataccgccagcatcctgagtcccgaatctttcgctactgcaccggcaaataccagtggcacggtagcgtctgtcattacaccggcagggacgttccggatatcgccggagtcctcgcggtatacgccgaacgccgccaggaccgcaatgggccctatacctgcctgatgagcatcaccctgaactgacaatagtggagaactgtaatgagcaaccctaccaggggcctgcagcgggagattacactgcgcctgggagcccgtctggtgcaggaaggcaaccgactgcattatctggctgaccgggccagcatcaccggcaagttcagtgacatcgaatgccggaagctggatgaaacattcccgcactttatcctccagatggaatcgatgctgaccaccggtgaactcagcccccaccatgcccactgcgttaccctgtaccacaacgatttaacctgcgaagccgacacccttggcagttgcggctacgtatacatcgccatttaccccactcagcgttaattacctacacgagagcaaacatgaaaactttacctgcaataactcagcgggcggtgaagccctgcctgtcacccgtggctgtctggcaaatgttactgacacgtctgctggaacagcactatggtctgacaataaacgacacgccattctgcaatgaggctgtgattaaggaacacatcgatgccggtatcaccctagccgatgccgtgaattttctggtagaaaaatacgagctggttcgtatcgacaggaagggatttagctggcaggaacaatctccttatctccgggcagacccattccgtgcaccttcactgttatgcttgcagacaggagcctagcataactgtcctctaagagcctccaccagcagccaatggagtcagatgcagagcccacagccagacattaacagatcttggagagtcttatggaagagttggggg

SEQ ID NO: 3010 - DNA, 547 bp, Arabidopsis thaliana
ttttcagattcccaatctccgccggaatattccccgcgagtctgttaccgttgagtcttaaccggtaaagattcgtgcagtttccaatatccggtggtatgaatccagataagtagttagagagaagaagaagcttcgtgaggtttcgaatctcaaagattccattaggtatcgaaccagagagattgttgtaggagagatcaatcgcttgaagctcttgacattgagaaagagactctggaattattccggttaactgattctgccacgcaaagaacatcgtcaagcttgttaatttcccgatcaacggcggaatctcgccggagatttggttgttatcgatctctaaatgcgtcaacttcgtgcaattcgcgagttcttcagggattgtaccggagagctggttaacacttagctgaagctcttggagatttggaaggtttccgaagcttcttgggatgtttccggtgaggagattttccgataaatcgacgaggaaaagctccggacaggtgcctagctcggtagggatcttccgacgagattg

SEQ ID NO: 3011 - DNA, 1012 bp, Arabidopsis thaliana columbia
tcagcggtagtgcaaaataatatttttgtttaggtaagtaattagtgcaaaatgtgaatagttgatcaaaaatttggtcattgtcctaaagaagacaatcttctctgattgattttgtagggactaaacatacaatatcgaaattgaaaaaggatttttcgacacaaatcttccccaaaaaagtatatgtagataaaatgggaaaatatttgttcgaaactccaaatccatctgaaatagttttgcaagaaaaaaaaagagagaatatttattttacgtttgaccatattttacggggggaaatatcaaaaaaaataccaactttcaaatttgggacgatttaatcttgaacttcacacaataaaaataaatcgtaaagtttttgttgactttctaaataaatgacaaagtttttgttgacttgctgtgagttctgaaatccacactagagatttgtatttaagattatgagaaaggagggatagatcttcactgaaaccttgagagttatattgctaagaacgagtggacttttgtattgattttgacaaagcttttacaatgagaaaagagattacaagtgtaaaagtgtgtgtgtgaatgtaagctagattcaatgtgtcttccaagtcgtcctagctcccttatataggtctacgcacgtggtagctccgtccgggatctgcggagatcctcctggatattcggcaggtcagttccgagatatgaggtccgctctgccaatatctcgtcgtcagttcctaggtcattattcgcttatctcccttcatcaggtgactgggcttatctggcccaaatacccattcgcgtatgtgggctcgtcagctgcgtaggtcctctacttagtgggcttggtgggcttttgtgggctggcttggtattttcgcaggtgcattcctggaggggaatccagctccaacacttgccatttgagtcatgtcgttaaataggttaacaagattttttacgatgttaatgttctgtttatctg

SEQ ID NO: 3012 - DNA, 1438 bp, Arabidopsis thaliana
tagacgatacctatggtgaaataatatttgttcctcatattgaaaaattatgtacgtatatgtgcaataatgtacgtacatttttgttggtaaattaatgtatgtacatgtgtagtaatatacgtacatctttgtttgtgaattaaattattaagaaaaatttattgattcaataataaaccgatattgacaatgactgagatatattctaagactttcatacgatgtgattttgaaacattctgaattcctgacgacttgagcagtcaaatgtcatggacaggtatcatcaacgcatactatctccaatcttgtaggacatgacctaggttgcttatagcaaaaacattgtttgattgcgagataagacattgtttgttgtatgacttttctgttcttaaaaatactcctcaatctatagtgtacgtacattggtacaaaccatgtttacacatatttcttggagtcacagctggtgtacggtcacccgagtgagaaatgttatctccgtcaggtacacgctgacttgtggacgtacactctgccaacagaggactgaattcccctggtgtgagaatgacgttctcctcaacattccctattccatgttcttctacaattacatcgtttcacttgttgtaatcataatcttcgccactactttcactaccatcaatagtaggatcgaaggcacttctccccatagatccatcgtcaccctgataatcatcatacccatcaccatcttcgttgtccccctcctcttcatcctcatctgttttatcgtcttcaacgtcgtcttactcatctacgacctcattattttcatcaacatttgaaacacggtcactttcagcatcgtcaccatgagtcctaaagacattattcatgagtgtcttgacgattgtaatgaaagagacaaacaagttgagagaaggatacctaccacgaatcataaagaacgtattcaaccccacttgactgtcattgtagacaggagggcgtttagtatctatcattactaacatctctcccggcatcctgtaactaattatgggattgatctctgtggacttcaaactgaaagcctcgcttagtgtacgtacaaattccgtgtacgtcatgttttccttaacacgtacacaacgaccaaacatgtcttcctttagtttaaatttccattcttcttctttgcatctccactcaccgaccatgataaatacgggaatatccattacccaacaacatcataaattcaggagaaccccagtaaatgcaattgaaaacatgattatatctacaaaaacaaatagaatttcgagatacacacttataaacataattatttacacatttatcattttcaaccaacaaaattaaaaataaaatatttttgggtttttctataaaaaagcaaaattaatttcgaacactataa

SEQ ID NO: 3013 - DNA, 1039 bp, Arabidopsis thaliana
taattagtgtatcttgattccgcagttaacatggaaattatggagaaagctattggtcaaatgatagcttggcctgttgctatgtgtgttaacctagaggaagagctcaatccagaagacattgcaccactggtaaaatgttatatatttagagtcataccaatatatttgtaaacgttaagttcacatactcatattattggttcaatgtgtttgacagggaccaagacccacctctggaaacaagtgcaaactactggatttgtcttcgaatgacgttgttgttgcagaaggacgttggtagacaaaagaccaaaacacattagttaatgggcttcctctcggacctgctgcaatgaaagtatttatggatgtaatacttcaacctgagacgtttatatggaggccaacgatggaggtgacataccttgaggactgtttacagtcttttgtagcatggcctgtgtaatacccctgaccaggactaggactaagccaaggattttagtcgacaatttagcaagtcgtacaatcggaacgatcggaagaagtccttacgggaagagtattgtttcgtcggaccaacggtctggcagttttggggatagttatgagcaagtggtcggggaaccggatgggtgagtcaagtggaacgaggacttggctgactgggattaatgtgttgatgcgttgagggaacgcatgaactcgtcgtggttacggttctacgagatgatcatcgttggtaacggtaatgtccccgagtgcgtgggatgtgtttcaccctgtaccgtggccgttagtaatatctcatcccttactaggcgctgcttatgtactatgttccaaacaagccgctacgtgttcgtcgagctttacttgtgcccgagcgatcggcatttggatcatgtagatcatgcctggtgatcggggattttaactgatcggactgagcgtatgattgcagtgttgctgttgtgtaagcagctaggtagaattagtggcctagtatagtcatgggcagatgggtattatttta

SEQ ID NO: 3014 - DNA, 146 bp, Arabidopsis thaliana columbia
accccagcccaacctgaacccccagggcggaaggggcgccttgctcacctcctccttgttcacctcctcctctactggccaccactggatgccaccagtgcctgtcaccagcacctcgtgggttgggggcccagcagcagactcag

SEQ ID NO: 3015 - DNA, 1116 bp, Arabidopsis thaliana
ttcctctttcaaatttccatgaattccagttctaaacaaacaacttcagctatttgaaatccatttgctgatcacggagatatgaaacatgtttgttggtaggtctacattggctgttcttggacttgtccctgattctcaaggaacacaaacaagccaagtgcaagcgaatgagacacaaacgagtcaggaacagcagcaacagcaagcaagcgagccacagcaaacgagccagtctcagcaagtttctgtaccattgagccactcccaagtagatcaccaggaacccagtcaggtagttgccagtcagtctcaaagcagtcccatagggaccgtccagtcagcaatgagtcagtctcagaacagtcccatagatacgggccggtctgaaatgagtcagtctcagaacagtcccatagatacgggccggtctgaaatgagtcagtctcagaacagtcccatagatacgggccggtctgaaatgagtcagtctcagaacagtcccatagatacgggaagatctgaaatgagtgaatctcagagcagtcctattggtcagtcacaaagcagtcctattggtactggccagtctgatatgtgtcaaacccctcaagtgtcggactcgagtgctccagaaccaacaagccatactcggacatcagatcctcaagcgtcaagccagacactacgagatgatgatgagaagatagacgacacagcaacctcagaaaacgaggtgacagaaatcgagaaatcacaagaatcttccgaagaagaagaagaagaagaagaagaagaagagtgagtgtaacattatgtaacttgagagagaagaagagatactttgaaattaaattcaggttgccttctacctcttatgtcggagaagaagagtgaatgaagcgtcgattagagcaggaaatcttcattccatgtattgtagcaatttttttcaaaatgaattttgtagaatttagttagagatttcttttaatgagtcattagcggttgtattgtcattgttttctttgagttaagactttaataaaagttttttttataaaaaatatatgtcatgaatgtttgcatacgttgcgaaaaagaaaaaaaaaaaag

SEQ ID NO: 3016 - DNA, 1111 bp, Arabidopsis thaliana
ctaaaaaatgttttcttagaacaacttccaaaggacttatggtaattcattttaccacccctcctccaccctcagctaagagtaagatggaatcaatgctttagcagattttagagggtcagtccaagttagttgtggacttcaatggcaagtttgatgctatctacacagatcttaatgggaagatcgacaatctgagctctcacatgaagtatctagatgtttaagtttctcaaactgcacaatccatcaagagacaagaaggttttcttcatggcacacctaacactaacccaaggaagatcaacaatgctatcttcgttagagatggagacaatgtatgggaggaattagatatagaagacgagttggagctcgcagctacagagctggtgttgagcgacacctaccagtgctgatcgacaccttatggtaacctcttttccgaaactatttatgaacaggcatgactaactacaagccaaaaaggatcactcttctcttcacggatcgttccaaacgggtccttgaaggtatcctagaggatgtgcctgtgagagttggtaattgcctcatgcctgctgattttatggttcctgacatatgatgaagaactcaagaagtctcttattccttggtagaactttcctagctacagatcgtgccaggattaatgtgaagaagggaatgatctctctcaacatatgcgatatagagatggagtttggcatggatggttcaaaattcacattgtctatcagcaacattgtcacccccaaagacacatctcctaaggctgctcagatttccaatctagagccaacatcaaaggcccttacagctcagcccgcatatgagaggtgcaccaaaccagtgtcgatcgacaccatcgcttgtcccagacaaatgcttcttcacctccttcacagcccacacctatttcagttccctcatctttagtattaatcaaataaatttgacaatacttgctttaatcatcaataaaagatatataataattttttcctccatgacctggagttgattgaaaacacataagtcactatgtattaaacgaagtaatacatttacacttcacaaatttataaga

SEQ ID NO: 3017 - DNA, 599 bp, Arabidopsis thaliana columbia
ttcttctgttcttctgagtacgaaaccctaaaaagtgacagagatggatgaacatggcgaccatcgacagagtaatcctttcaacgatcaacaaactagctcgggtaaaatccttaggattcgccttgagaatttcatgtgccacagtaatctcgagattgagtttggcgattgggtcaatttcatcactggtcaaaacggaagtaagtatcttttcacctaaatttagcttttttgagtgaattcgcttatggcttcgttttctcgagccgggtgtttgctattttcagtaaataagtctttttaggctttgattttggtttgtgctcaaaacccatgtttatgaatactcaattttgaatcatttaaatttgttgaatttctgaatgattgaccaattaagagcggaaatgagttttggagagtgtgttttcgtggttttcaggtggtaagagtgcgatattgactgctctatgtgttgcctttggatgtcgagccaggggaactcagcgcgccgcatacgttgaaagatttcattaaacctggatgcaggtttgcgcacatttgcttctccatgggataaattgcagaaatgacat

SEQ ID NO: 3018 - DNA, 673 bp, Arabidopsis thaliana
agaggatccccaaaaaacacaggagaatgtacaactttgtctcacagaagaaacgtaaataaggtatggaagatagacttatgtcgaatcaatttcctcgaagtcgtcgaactcaagaagccttgatgattgccctgctgctttcccttcaccaccaaaaacacacaaagatttcacatttccataaaaaggacaaacaataagccgagccagcgcgaattagatcataccttcgcagcatccttaagaggtccccaacactcgatccgattgtacttaggtgtgcttgaatggaaataaacccatacataagcatccattagctcaggattctctctaaacataactgaatctccatgcaccacagctttaagtacctatctcaaacacaacaccaaagagttattagatagtcattttcacattcattaagaaccaaatagacaaaagatgaagaagactaaccaaaggcaattccttggagaaaatatgatacctaagctcagcagcaacatcctgcaataaactcataccactcacacaacaatgaatatgtaaacgcagctcatcattcaccttcttccactcagcaaccacatcatctttcttgtaccagccttctagttgatccagattgataacgtgtgagattgttacgttaagttagcagtga

SEQ ID NO: 3019 - DNA, 999 bp, Arabidopsis thaliana
gagggcgtaaaggagaaagaaacagaagaatcagcaattttagttgatctcgatgaagagacttgcctgaggatgcaaacctgcgtctttcagtgacattgactctttgtctctcccatacactgtccttgggaagtttgtgattaagctgtactcttctgtatctaagagtccaagtgaatccacgtagtcatacaatgtctggatcttggtttcgctcttaaacatcctcccttttctttctccattcgggaaccgaactaacacctacattgcaggccaaaccaaacggttcagaaatagaataaatcagaccattaacaaacattctcataaacccaagtcaaaataacgcaaattttccgacgtttgatcaatgagaatcaaccatagaatcagatcatcaaagaggccctaagatttgggaaccgtacttaaatctacgtttgagggtagataaacggttcacggatacggactaccataaaacagaccgtcccaagtcgaaaggtaaattttcagacgtttgatcaaagagtatcaattatagaacctaaactttcaagaggcaccaagtttagtatctctcataaatgaatatcaataaagataattaatgttctttgcaattgcataggctacgaaactgtgtgagaaaagataagtaataaatggctaaggaagaaggcgaacttacttgtgtaacatcagggcctttctcaggttcttctccaagagcaagagctttctcttgtctcattcgcactctagcagcttgtctctcttcagcttcacgcgctgctctctcccgagcctcttcttcttctttgagtttcctctctgctcagcagcttctctctctaaacgctctttctcctcctgtctctgttgctcccttgcctaatcagcagaacaaatgacgccacaaatttagacagtagactaatcataaagtcttgtcaattctgaacaggcctacaaagaacagaaacatacttg

SEQ ID NO: 3020 - DNA, 581 bp, Arabidopsis thaliana columbia
tctgtcagtaatgttgagcggttaagggacttcatcagacatgtgtatgtaaataaaaggtatacgaatgtagaagaatgatgataagtctccaagtgagacacgtagttctagtggttctcggagtccaccttatgaagatggatatgaccgtcgttacggcgacagatcacgtcctggtgggagaagtccagggttcgagacgggtagtaggaatgctgttaataacagagaaagccctgctcgtcctgagatcctgaatgattggcgcagagaggataggtttgggggtaggaaaacatcagaagagggctcccagtcacctgagcaagtaaaagacttgggttcagctagccctcctgtagctcgacctgttagggaacttttgcaagcagccatctattcctcttcgtgtagtagagcctccataacccccttgtctagtagaaataccgatgcttcagcacatgcaaaggttttggcttcatctctttcagagtgcatgaaggatgtacagtatataagaaccattgatgctctgcttatataatgttgttgtacacatgcattcgttggtaata

SEQ ID NO: 3021 - DNA, 739 bp, Arabidopsis thaliana
cacaaaacagtccaaactgaaaccatatacatttggaattatgttatcaaaagcagcgaacgctatcatcatacatacaactcaaatcactaatcaaggtaaccttattagccccaggaagcggccacttgtaatgacaaacatcttccatcggaagtttcctgcctcctcgacgcatagccatgggatctgaggccacaccaattttgaagggtatctgaaactcattctgagaggagatacggaccttccaaagatgaaaagaaattgcatgaaattaacaagggaaacaaaaaaaattaccagcaagcaccttcaccactcagattgacttacatagacctttgttgttgttcccaaagttattatatcatcacttgcaagctcgacagggttaccccacttccggctgcctaaatcaggatgacttattgaatgagagtttacgagagttccatttagggctacccatatctaccagctcccatttaaatttctgaaatcaaaaccaggcaggtgtgacgcacagtgtaagaagtggcatgcagaagtcgtataaataaatctacatagctccttacagtagagttccatgttatatgtgcatgttcccagagacttctgagtccttcaatgccaaatcagaaggagaacccttccaagttcactggcagcttggaggacttgtggagtcacagcatgttgaacccaatggcaggaccgcgatgacttcaggaca

SEQ ID NO: 3022 - DNA, 531 bp, Arabidopsis thaliana columbia
ctctaatcccggcttcttctagtaagatttgctattctgattacgaagcagtgaacttgatagatacatacgttgattctttacttttgaattttatatgattgaaacagggccacctaaaagagaacaaggaataccttctcttgccacgacaatagcagctgaatctaatggaggagggaactaccaaaaggaagctcaactttgagaaagaagaaagctgaggaatctcacaattccaagaggaccgataaagtctttagtgtccagagagaatctgcaggtgcctcttcatcttctgttgcagaattctccatgtttatcaaaaaatcatacctcatctacatggtaagataagacaaaccaagacactaaacacttaaatgggctttgttttgtgaatcaaaacattattctgatattgcagtggttcccgaaatctgttcaaagtattcatatgccgaagcagagaacgattttcaagatacatcacccaaatatgaagaagtcatggaatgtggtttacgtggt

SEQ ID NO: 3023 - DNA, 355 bp, Arabidopsis thaliana columbia
ttgatgtctgatgatggtcttgttttagggggactttgaaaaggctgggatgtactatatggcagccatcaaagaaactaataataacccacacgaatttgtatttccttactttggtaacttttctccactcttctgctgaattccccttaattcttcggatgttaccaatctgagtcattactcattagcaatgaagatactgcacctttgtcatttatttcccttttagcagtagaatatatgaaatgagaccatcaataattagttccagtctgtaaaacgtatgattatgaacaaatttgtgtataatatctcgtgcttcaatttctagtattgctcagtttggattgat

SEQ ID NO: 3024 - DNA, 729 bp, Arabidopsis thaliana
cgcttattcgaggaacttggaaaccagagaaatttgtgctcatggaactccatgattggtagtctagctactcacgggaaacatgacgaagctcttacgctttttgcccaaatgttggtgagctgcatttttgtttgttccttcaattcaagcatgttgattccttggattgtaagagtttttaaccccctatggttttctgttgattcttcagcgagaaggtgagaaacccgatgcagtgacatttgttggattgttgctagcttgtgttcatggtgggatggtggtgaagggccaagaattgttcaagtccatggaggaagttcacaagatttccccaaagctagagcattatggatgcatgatcgatctcttggggcgtgttggaaagctgcaagaagcctatgatctcatcaaaacaatgccaatgaaaccagatgctgtcgtatggggaaccttctgggtgcttgtagttccacggaaatgttgagatagcagagatagcaagtgaggcactgttcaagcttgaacctacaaatccaggtaactgtgtgatcatgtcaaatatctacgccgccaatgagaagtgggatggagttttgaggatgcggaagttgatgaagaaggaaacgatgacaaaggctgctggatatagctattttgtggaagttggagttgatgttcataaatttactgtggaagataaatcacacccaagatcttatgaga

SEQ ID NO: 3025 - DNA, 653 bp, Arabidopsis thaliana
taacccaaacaggaagatcaaccaaacaaaattgatacaggcagttcacggactggaacagaacttatccctcagttcaccaatacttacattcaaggaagggtatcaggtcaactagggctgtgtcatcagcttctagtttgtaaggcttgattggcacgctattttctggctgaagggttgattcaaaggcatttgcgctaacaaacagaatcttcttcggatctctgttcagctttgacagatcctgcagcaggaattttaatagttagttgagaaacagttactcgggcaagtcagaaagtatgctttgacaagataagctagctgcttacgtaccctatagtgctttccattttcatatttagtagcgcctcttgctagcttataacgtatgtagccatttgggtctaatttctcacagaccgggagtacatactacaagtaatgaaacaagcgttagtagtcgcattactatgatattacaagccttccacgagaagctcgacgcaccccttgggactgtaccatctccatctggtcagaatacacggcaatctcatagaatttcccacgatgctccaagaatgcctcctgacctggtcctttgaatgacctccaccctctttcccgctagacatttctgtgcatga

SEQ ID NO: 3026 - DNA, 487 bp, Arabidopsis thaliana
tgggagaggaagaaccggctaaaggtctatgaaggtttgtactgcatgtccaccagaaattttaagaaggctgccagcttattcctggattctatatcaaccttcacaacatatgaaatttttccatatgagaccttcatattctacaccgtcctgacaagcatcataactttggacagagtttcccttaagcaaaaggtatttctcaatggctcagtcttccacttagagttgtctaaacttagataaaaactttttagtatgtcgacttattaaaatgatgtatatccatgtaatttgttgaaattcttatcaagtgctactaatttgacaggtcgttgatgcacctgagatcttaaccgtgcttgggaagattccattcctttctgagtttctgaactccttgtatgagtgccagtacaaggcgtttttctcagcatttggtaagttcattacaaggaccagaggcatacatccgaatgcatgt

SEQ ID NO: 3027 - DNA, 993 bp, Arabidopsis thaliana
ccaccatctcagcgtgtctttaacaattttggataatgtgatgtgggcaagaggtagccgtcaactagagcgagaacagcataacgaatccgcaaagacggatcgtcgtaaccttcttcttaagcatcgtgtaacacgagatacagtaacatcagactcaagctcaaacagagtgctgtaaaacggaatctctttctcagcagttcccttctttcgtttttttggcaagtcaggtatcgcccacaagcaaggccagtaaccaaatgaaactctcgcagagaaaatcgaacaggtgtaccagcataaactacccagatctcgttggctttgtcaatgtccaacttgcgaccaagcagataaagcccgaaagtagtagaccaggcgggtttgtttggaaaatccaacaacccaccgagaggagagttcctgatgagccggatttcgtcttcctctaatgcgtcgataatgccatgtagaatcttcatcttgttgtaaacatttgccctctccccaagaacttcttcgccggcagcgattatacgatgagggagttcaggagccgccatctacaaaacccagaaatttatttcagaacacaaatcgaactgaaccggaattaagaatcgacaactgcttcgactttatatggttacctcgacaaaacaaatgggaaacgccgagcttcaatcggtgatattgttttggattctggaggaacaaaactggagaataacggagaaagggatagaggggacaataaaaatgagagagaaggcatataccaacacatacaactcttagaatttgaaccgttctcatgttaattatcacacctattctccaaaaaatctcgaaaaatgaaatctttgaagatatgatgtctcggttctgacacacgcctagtatatatctcacttctgatttgatagaggagtaggggtttagatgtaataattttgctacagacattatcgaaacagtgtgtatttgatg

SEQ ID NO: 3028 - DNA, 2223 bp, Arabidopsis thaliana
tggttctttgttttttttcaggagttgagcacagtgaagataaacttcttttcattcatgtccgtaaaagaagattcttactctttcaagaaattaaaagcttggattttcaacctctaaaaggaagttaagcgaactcttgctgtgccaaatgaagcagagatggctgttagtgttgatactctgtttctttacgacttctcttgtgatgggcattcatggaaaacacctaatcaacgatgacttcaacgaaactgctctgttattggcgttcaagcaaaactctgtaaaatctgatcctaataacgttcttggtaactggaaatacgagtcgggtcgtggttcatgctcttggcgaggggtttcttgctctgacgatggtcgaatcgtcggattagatctccgaaacagtggactcaccggaaccctaaacctagttaacctcacggcgttgcctaatctccagaatctttacttgcaaggaaattacttctcctctggaggagattcgtctggttctgattgttatcttcaagttctggatttgtcttcgaattctatttcagactattcaatggtggattacgttttctcaaaatgttcgaatctggtttcggtgaatatctccaacaacaagctcgtcggaaaattaggttttgctccgtcgtctttacagagcttgacgactgttgatctctcttacaacatcttatcagataagattccggagagttttatttcagattttccggcgtcgttgaaatatctcgatctaactcacaacaacttatccggcgacttctccgatctcagtttcggtatctgtgggaatctcaccttcttcagtctatcacagaacaatctctccggtgataaattcccaatcactctaccaaactgcaaattcctcgagacattaaacatctctcggaacaatctcgccggaaaaatccctaacggagagtattggggaagtttccagaatctgaaacagctctctctagctcataaccgtctctccggcgaaatcccaccggagctttctctactctgcaaaaccctagtgattcttgatctatccggaaacactttctccggcgagcttccttcacagttcaccgcctgcgtctggttacagaatcttaacctcggaaacaactacctctccggagatttcttaaacacggtcgtgagtaaaatcaccggaatcacttatctatacgttgcttacaacaacatctcaggctctgttccgatttcgctcaccaactgtagtaatctgcgagttcttgatctgagctcaaacgagttcactggagaagtaccatctggtttctgctctcttcaaagctcttcggttttggaaaagttgcttattgccaacaattacctctcaggaactgtccctgtagagcttggtaaatgtaagagcttgaagactatagatcttagcttcaatgctctcactggtctgattcctaaggagatatggacattgcctaagctctccgacttagttatgtgggcgaacaatctcactggtggaatcccggagagcatttgtgttgatggaggaaacttggaaacgttaatcttaaacaacaatctcttaaccggttctcttccagaatcaatctccaaatgcaccaacatgctttggatctccctttctagtaacctgcttaccggtgaaatccctgtaggaatcggaaagcttgagaagttagcgattctgcaactcgggaacaattctttaactgggaacattccaagtgagcttggaaactgcaagaaccttatctggcttgatcttaacagcaataatctaactgggaatctcccaggtgaacttgcaagtcaggccggactggtaatgcccggaagcgtctctggtaaacagtttgcgtttgtgaggaatgaaggtgggacggattgcagaggtgcagggggtttggttgagtttgaaggaattcgtgctgagcggttagagcattttccaatggttcattcatgtcccaagactcggatatactcaggcatgaccatgtacatgttctccagtaacgggagcatgatctacttggacctttcctacaatgcggtttcaggttctattcctttgggttatggtgcaatgggatatcttcaggtcttgaatttgggacataacttgttaactggaaccataccggatagcttcggaggattgaaagcaattggagt

SEQ ID NO: 3029 - DNA, 652 bp, Arabidopsis thaliana
atgatcatcaacatcaacaacaagaacatgatggttatgcatatcagtcacaccaccaacaaagtagttccctttttcttcaatcactagctcctccccaaggaactaagaacaaagttgcttcttcttcttctccttcctcttgtgctcctgcctattctctaatggagatccatcataacgaaatcgttgcaggaggaatcaacccttgctcctcttcctcttcttcagcctctgtcaaggccaagatcatggctcatcctcactaccaccgcctcttggccgcttatgtcaattgtcagaaggtgatgagagaaagaaacttgaaaaaattactttgaaagtttcttcgtaactctaatgattcttatttgattttcttgcacaaaaaagaagagaaagattctagaaaccctaattaccaaactttaccttttatttcctttttacataaccctttacttgatgtctgagtttgattttgatatctacttttgtttactagttacttaacccagctaagtatatacaaatcaaaggatacaatttttcctatattgagaaagtttcaagaaacaatttgtaaaaaccctacttgcaagagattatccaaaatattgtatgtaggcttgaagattaggacatatataat

SEQ ID NO: 3030 - DNA, 494 bp, Arabidopsis thaliana
aaacgagctcatctagatcaggaacagaggtgtacttgtagtacagcaacacaccgtattgctcttcatcttcaattctctgcttctcgtgatcgccacacgagctcgttcccattagggtttctcttctttccactgggataatctcaggctcttggcgtcgcgaagatggaaccaggaagccaacactgtttcagagcgcgatttggaaaaccacgtaccagaggtggaccaaaccgaaccttgcttaaaccgacatttgtttataaatcgattggtttaatttaaaaaccgaattgaaccgattgatttccaagttgccatagcttagccttacaaactgtaacattgtgaacatagggaaaaagcggtggagatgggtttatctttgttctcttgaataacataggtcagacattgttgttactccattagagatactgaaagcagaagacatatctaaacaaaaacagagagattacacttctattgat

SEQ ID NO: 3031 - DNA, 1120 bp, Arabidopsis thaliana
ggcacattttaataacgtcgttgttataaactcggactataaaagagtttacattgaaggtaggaaaatacgactttatgtcgattcctataattgttttagggcgacatattggggttataccaaatctacaggagaagccttttcatttggaggaccaggtggaaattgtggtttttgatgatttgataatatatatatatatatatatatatatatcaaccaaattgtatcaaatttcaaataagaataaaatcatctaatctattcatattttcttactgaaaagtatgtaaataataaaacatgatcatcactaaaaccaaaactttacaagagaaggtggaaacatcatcaacgttttggtctgagactctgagtgataccaatggtatcataccataccaaacgaattatcatctctcattcaaatgggcctcatatttagacatgataaggcccattaataacaaattacaagcccaatttgttttactctctttcgttttcttcaatcgtatccataaaccctagtctcgtcgtcttcgtcgatcatcgccgggaaaccacaccagtctcaatggcgaaaactctatcccgatccaccgcctcatgcgtcgctaagcgtttcttttccacctccaatgccgtcgcctctccttctccgcttccttctcatctcatctctcgtcgattctcaccgacgatcttccacgccgtcggatacatcccagctttgacccgcttcacaacgatccggacccggatggataggtctggcggctcatattcgccgcttaaatccggatcaaacttcagcgatcgaccacccactgaaatggcacctctatttcctggttgcgattacgagcattggcttatcgtcatggagaagcccggagtgaaaatgctcagaaacagcaaatgatcgattgctatgttcaaacctagctaaaattgttggcaggtgagtgtctttgtcatgttcgttagtgttatcctcagctacttcactataacaaactgaatctgattgttgtctggttaatagtgaggaagagctagaaagaagactataatgttcgtgtgagaggtatttgggtttggctgtagatgatga

SEQ ID NO: 3032 - DNA, 552 bp, Arabidopsis thaliana
tatcacatatatggccacaactctctgtagtactaccaagactccttttataactacaagtacttgaattcaccacataaccgatgatacttttcaaacaacatcggttttaaagtctcagaataaacgaaaaaatatcaaacaacaactactagactcaaaagtgtttacaggacgctcttacttatgcacattattcacttttttgccaatcgtttcaatatagctatcaatatcatcattgaatactatgtatgagtttcagaccctttttgttgttttaccttggggtcatctaagcagcttgaaggaggacttgaaaccagggtcaggtcatgtgatcagcttgagggatgacttgggtttgaaccagcagcaacgagcttctcctgctcagatagtgagtggcggaagtggcaacggtgaccataaggacagttatcaccagcaagaaccattctgcaaacctcagtcttgtaacggggatggcggatcactggacggagttccttagtgccgtgagcgaactggcaatggtcaccatatgggcat

SEQ ID NO: 3033 - DNA, 1103 bp, Arabidopsis thaliana
atttaattaaacactttagatttctctctttccatatagctaaagagtctcatattttcaactttttggtatgtctaatgtctcaaaagttcattacatgaaaagaacttgcatgtcattgttaccaatttaccattagacacaaaaataaaaaaagaaaatgtcatatgataagttgtaaaatagtgtttgatacttgagcatgattttgtattttttaaagttttaaaaaggtagttaaaagtgatattaatggaagatttaacacaatagaagacttttcattttccttcaattagttatgctaaattttttgttaaataatgtagaatgacatatttcattttcttgtgtgatgatgtgacaatcatatggagagagttggccaactttcatatatatgattatcatattatcagaaaaatataaatcaactaaaacaattaatttttaattgaccaaaatctaacaattgtattgattagtcacttcatgtaactcttaaatttcaccactctctaaaccactattagaatgatcacatatcttcaattcattttttgcctcttatatatcttctaaaataacatattctatcgaaattcatttcttttattaattggtaatagattgtcttgtggaaaggttgttaaagggtaatgacttaggttcgaggaacgtcaagcgcaccaataacctaccagacccataggaaagagattagggttgatgcgttgcagcaccagctgagtcccacggaacggattgttataatactatttattttgtttgcttattattttttcatatatactgaagatacataaaatatcaattcttttttttagttgataatttcataatttataacttttaaaggttatatatgcaaatttctcatagatagaaacaaatatctctctcagagaagtaaaaacaaaatttcgttctgtgtgaagcctcttcttcttcgatcaaccatggaagctacctctctaagtctgcagcaacaatcatctcctcctcatcttcgcccactctccatattctctccaaagaagcgaacagactcatcacctcccccgagaatcgtccgtctctcg

SEQ ID NO: 3034 - DNA, 469 bp, Arabidopsis thaliana
actctagagcacgcatatttccacttcagtgtagtgaatcaactctctgatgaactctctcaagctagaggtgattgtttttctacacaatgctcgttacttgatatgcgttggaaattgattgcaacagttttttttttccttatgttgtttgagttggttggtttaagactagtgtcaatgtttcgtagcaagtttagagcatggttcatggatggctttattttatgtgaagtgaagtcaatgatgaaatggaatttatttcgttgttgttacagaaacaaaaaattggtttgatgcgagtactagtgactggggttttcatcaatgctttccctgaaaaaacttcatgacaaagatggtggattcctggttaatggagagctcaagattgttgtagatgtttctgttcttgaagttattggcaaattagacgtaccagtggaatctgaagagacaacaccaaagc

SEQ ID NO: 3035 - DNA, 1547 bp, Arabidopsis thaliana
caatcccgattttactgaagaggactaaccaccttgttcgttttggtgattgctatgccactgtagtcctatgataattgtttgaagtaaagttcgtgaagctaacacgttttcaactgagagttttttttataaaagcataatttcagtttttgtgcttgtgtgaataggaccttctgagtgcccagcaaccaagcattcaacgactcagttctaagcgtgtaattgagcagcttctcttgcaagaaacatttgcaaggtatttctctgcctggctttttggacatcataagtagcagcctcctcgactattcttattatttacacctcatagcttaaagaatctttctgagacgtgtgtagttaccaaatctaagctgatcttgtatcctgcttattcattcatgtgtatgttgtttcagggaagagggtgataggttaatagatatcatcaaggctagggttgtagatcatcccagcgtcccctctgctattgagacgagtcatgatgactatggattgacaagcggtatgttactgatggtagactgtgcaagtagaccggattagtctatgtgataacgtcttcttttctattttatttctagacgtgaatgtgggtgaaatgtccaatacagctgtcatggaagcaagaaaatggttggaggagaagaaatcaggatcaagttcaaagtataaagtaagttctggaaacttgcttcttaactgttctaattgctgcagcctgcaggtatcaacttttttgtgatatcttgtctccgtgctctaagccattattattatagaaggagacatcttctgtttgggtaaaatgatttgattgttatatgccaatccatgtgatcagcaacttaaagctctcttgcaaaagtaggttgttcagaattctgcgtgtggccatctggtgacgttaatcctgaaatgtcctgattgggaatacctttttgtccgcttaaaatgcaaaagatccatattgttgctcttcttttgactatgaagaccatttacttacatgattttggtcaacttctgatacgttcgcttcacagtattctttttccattgtactttaaatgatgatcaccatctcagccattagtttaaatctccaggcaactgaagatggtgctggatcgcctgtggacgtggccaagtcttatatgcgagctcgtctgccatggggatctccagctgcgaataatttagattttcgatcaccatcatcagcaagagtgcaagggacaccccttccttatagcgctggaaacttttcctcatccaaggttagaattttaagttctccagcagtgcatacttttcttttggtcaaatgttgtttgaaagtctgaagtcgtttcatcttggtttatgagataaaattctctgcttaacttctattgtttatgttagataaccacgaggaatttgtgggacactatttccagctattcctaaagaaaagttgcataccgttatatgtattttcaatggctctctcaaatttaccgttattcattctgacattg

SEQ ID NO: 3036 - DNA, 896 bp, Arabidopsis thaliana
atactactttcattttttttgtttacctttttggtttgcaacagattaagggcgctaagtcttagacattcttataaataatgtcttcataagaattcaaacttcatattatactagaaaaatattaaatatgacaagattatttgagaagtatcttctaccaccttggcaaatcggaatcttctagctatcccggtaacaccgtaagagcacgtgtcaatctgactgcaagatttgcatgtaaaaggttttatattttcttgataaattaagggttctagggcctgactggtttaaacgcagcagatgcggttgcggttgtgggagtttgcggaaacgggcggttgcggtttcaagtgttatcaagtgttttgaacgactggttacgtttgataatggatgcatttgcgggagatttatgattggtaaaccagcgggtgcgatagtaactaaataaaaataaatcaaaataaatataatatattaatattaccccacagaaaaatacaatatattaatcaaaaaactcaaaataatacaaaaaacaaaaaaaatgatgccatgaaatactcaaagaattacattagctaatgaatggataaaaggatagatcatacttacgtttgattcttgattttgattttaatcagtttgggtggatgccaaaattgagagaatagagatacaatatattgattagggttttctaataaaatatataaaggtttagattatagtgattagggtttgagtgaaatttagaattattttaattaatttaattttttttaatctaatcggtaccgcccgcaaccgcaaacgcttgtgggaaagaacttttgaaatctggcgatttcgagcagtccaaggcggtatttagcggtttctatgattgg

SEQ ID NO: 3037 - DNA, 1041 bp, Arabidopsis thaliana
tgatgacatttttgttgactaaattgctactactgttgttttcagaaaaccaatcgaaccactcaaaataggaaaccttgctgagaaaaaaacctaaagtacgagaatcatacacaccaattcattctcatataagaaacgtaacaaaacacaaattgcaagaacatgtttgattcacatacaactaagaactttgttcaacacaagtacataacttttacacataaaaactttgaaaactgacattgagttcttgagtaaggagtttagacatagacctatgaagcagatgatgatggagagcatgagggaggatttgtggttgtctctgccgattgcgtctcgaggaaattcaggaaccagggatcagtttcgcgcaagaacttctccaccaaggacaagtgctcgatcttcttcttatgctcatccgcaactcgggaaatctcagcttcacgcaaagcaacctcaatatcacgcttctgattgtaagagacctgctcttctatcttgcgttgatcttccaataactgtttttgcagaccgacaaaggaagttaagtcacctgcttccttccgcttgccattgacaagagactctttcaggcttcctactccataaggaacgcctcttgaatctctctcagttgactacaaagtatgagaaaaactgagattaggaagcgctaagatcagacctaaacttaaacagagaccaacacacaactcttcaatgcatctgtgacaaccagaagaaacaattcagacaattcacacaagaaacttaaacacaaaacaacacacaactcttcaatgcctaacaaatctcattacccaacagagccattagttaaacatccgtgacaaaaacaagaaacactacatgttctcactacaacaatatatcagaccaaacatgttatcacaaacacaacatatcagacctttacttcaacattgacccaaatatcaaaatacttaagaagaagtattgggaaacagaaaacgttacttgaagaaatattgttgtacattccttagctgt

SEQ ID NO: 3038 - DNA, 929 bp, Arabidopsis thaliana columbia
gctcgcatgtaacgcctcgcccgcccctaccagtggacccccacgttctctgggcccacctctatctgatggtcagtacgccacatctgggagaggtttaaaagaattgatttggccacctatgtcaccaaagtgcacttatcttttcggtcaaaggtcctaagagaactgcacagttaagcgtgcttgaactgaagtagtttcaggatgggtgaccttcaagaaagtgatcgtcaaaaccatgcgagtgaggacaaagcatggggaaagatcatttggtgatttttaagatcggtaacaagtctttaaagcctcctagacatggcacaccgactgttagataggggtgggcccatgggctaagagaggacgtggggcccactggtaagggcggtcagggcgttacaaatggtatcagagcccaacccatacgagtgtggagtcaagaaggctcaccttatagggggtgacagtcttggtgcgcaacgaggacgttgcgatctattaccctgggtgaattgttacaccccgaattcatgaatatggtggtgcatgcgaagagatttaaaagaattgaatttgccaggtatgtcaccaaattgcacttatctttttggtcaaaagtcctgagagaactctacagttaagcgtgcttgagctggagtagtttcaggatgggtgaccttccgggaagtgattgtcggaactatgcgagtgcagacaaagcatagggaaagatcatgtggtgatttgtagggtcggtaacaagtcttgaaagcctgccagacgtagcgcactgaccgtcagataggggtgggcccatgggaggtgacatttttttatgttatctctttgttgggaggtgaccttcaagcgttctttaattcccttagtcccatctgttaacaaatgacctcacactctgctat

SEQ ID NO: 3039 - DNA, 1043 bp, Arabidopsis thaliana
gtgttcgatgacatgtctaaaccactaattccagaaattcgtggcccagtaccaaggtattggttgtagggagtgttttggctttaacttgttgattcataatgcttgttaggttagctctcgtcaatggtgattgagtctgggactaggttaacttgagggtctctgttgcggtggcacttagatttggttaatgaacttgttgtctagggataatttattaagcatgtcaatcacctgtaactgagaaaacgaaactactcaattaccccatcctcgggaattctttatctgattgaatttattgtttactctactgctgtttactgcatcttgtcatctgttgcttagtttctgcaattctttactgttactcgacctgatactcgaccacctagttgtctggcaacagactgtgcagtcgagtatccctgtttcattttctgtctgttactcgacctgtcactcgaccacacccagtgctctgtaacgagctgtgttggtcgagtgttttattgtttctacgtgaatttctgttttctacatgttcacttggaattgctagaacacaacaaaacctgttattgcttggcttgacttagtgacttctgatcacatcttgattgttagcatcacacccatttggattgacaaccttcagtactacaacgatatgatagtgctttaggattaattgatcttaaaaacctattatcacgctgaaatcagttatgttcagaaccaaggcggctacaacaaagggtacaacaattacagacccaacccaaatatgtcatacagaagcacaaatgtcgcaaatcctcaagaccaagtttaccctcagcagcagcagcagcagcagaaccaacccaaaccatttgttccttacaaccaaagccaagggttcgatcctaagcagcagttccaaagagggtatcaaaagcaactgccaccacctggtttcacaccacagcaacatcaggcctctacaccccaggaatcagacatcaaatcttagaaataggaaataaaggagtcgacct

SEQ ID NO: 3040 - DNA, 1326 bp, Arabidopsis thaliana
tttctccttaagcttttgaaaacttggtacaactgttgaacatgtttattagggtttttgttttattttggtatatctacttatgttttgtaacactaggtataattatatgtttttgtaattgataagaaaagaattttaaccgaaataactagattcaacacaacacttagtctttataattagattcatatccattcatcacatcaaattcaacacttagtcttcataattaaacattacaacacttacgcttgaatttctacgacaaacgcaacatgccaacaattgccatggttattaaacatccagaactaaaaatgattatcatattaaagtccttcccctttttgttcttttccatcggatctctttccatcctctcttggttcctttccatcttcatcactcttacttcttcttcaagaacaccgagttgaaattccaattgttcaatctcatgtgtaaaagcctcatctacccacttaaacacatgattgtcgttcataagctacattttgaaattgtaaaaattgttaaatcacatgtatatctatgtataaactaggtatatctattaggtatatctattaggtatttctattaggtaaatctaggtattttagtgactagtcaaattaggtttatctataccttttttctgcagctaaaccacaccggtaataacgacggtacggatttggatttgatcttgaaatcctctcaacgatttcatcgccacaccaacactgctttggaattccaggaaccattggtcttggtcgggaaacggaggtccacacgagttcgatgctcctgagaggtggctcataattccctgagttttggatttagaaattctagaatatttaatagataaaccaggttgtacaatatgaatcttcaaactccgaaatcgaaaattgtcaattgcatatcagaaatctataagtgaaacgtgaattgaatgaaaaatgtacccagaaaaacgaaatgcttaccaaataattccactcttctctctttttctctcttcttctctcttctgagtcttctctcttcttgtcttttcttcttctttttcgatttgattttctgattttaattcataatagggttttaaaaaaattctgcgaattgggggaaacgaaaattttgggtgaaaattttttgatagtgtgaaaagtaatgtgaacacgtttcttatagtgtgaaaaagaattaaccgtgggacccgcgtacgagttgttcggaacaaaaaaggtggggcccgcaaactctttgcacacagatattccaagttaacaggttgtacctgggggatcc

SEQ ID NO: 3041 - DNA, 1524 bp, Arabidopsis thaliana
cactctctcgtgtaggtgaacgcttttcgtagaacaagctctcccacatcaaatctccgaatttcgatattggagttatagtagcgagcggtagcttgttgataattttgaactcggatcattgcctgatctctgcgttcatcgatgaagtccatgttatcctgcaacatttgcgtgttcagatccgagttagatggactggcggtccttctcacttttggtactatggtatcgacagggattactacttctagaccataggcgagagagaacagggtttcttgcgttaatttgcgaggtgtagttcggtaggcccagagatttgtaatccacactagagatttttaattgagattatgagaaaggagggcttcggttcgagggtttcaagctctagctcctcttccgttgcacttgcctccgcagctgctgcgagagctctggctacggcggtggtgcttcgggttactcgtgtgaagttgcaagttaccgaggtttccatcctagcatgtttgactgttaggtcgatgctcgggtgttctattccttcgactgggataattcttttgacgaaaggatctgacgtagaaggtacatcggttctcattcttcgggttttgcgagtatggatggttcggtcaggtatgctttcaattgtttaaaagcttgttcgcagtcctcattccagtcaaactttttctcctttcggaggagctgatagaaagggacgcacttgtcggtggacctagatatgaacctattgagggcggcgatacgaccggttagccattggacctcctgtgccgtttttggtggtggcatttcgatgaaggctgcaatctgcttaggattggcctcgatgcctctttatattctgggtatccgaggaattctcctgattggactccgaaagagcatttctcgggatttagcttcatttcgaatttgtttaggattttgaagcattctttatattctgggacatggtccttttcgtgagctgatttgaccagcatgtcgtcaatatagacctccattgttttacctagctggtcagcgaacattctgttcaccaatcgttggtaggtagctccggcatttttcaaaccaaagggcattactttataacagtagatgcctcggtcggtaataaaagctgttttttcttggtcgtctaggcgcacaagtatttagttgtacccaaagaatgtgtcaatgaaggacagtagtttgtgtcctacagtggcttcgaccaatcggtcgatatgcgggagtgtgaaactgtctttagaacatgctttatttaggtcggtaaagtcaatgcatactctcaacttcccatttttctttttaacgacaatcggtcgatatgcgggagtaagggtattttacttcccttatcgatctgattttgagtaaccggtcgacctcatcgttcacagctttacgcctttcaggacctagcttgcgacgtttcttgtttataggtcggtaggtcggatcgacgttgagttcgtgtgaggt

SEQ ID NO: 3042 - DNA, 974 bp, Arabidopsis thaliana
tgtcaatcgacagcctttgcagaaccagaaagctacaataggcgactttaacggaactgatctcttctacaccaaccgttcaacattcaagctaccaccatttaaaagagaagaatttgctatacaccctgcctattatgatcttgtatcaagaggaaagtttagaggagctctagatgaatcaccatttgatcatttggaagtcttggaagacatagtgtcctctactaatacaaaaggtgtaccagctgattaccttctttgcatactcttcccccactctctcgcgagcaggggaacatcatggttgcgtcaactagaacaaggttcaataaccaactggactgatttaaagaatgcattcatgaattaattctttgatgaatctgtgatagaggcacttcgtttgcaaatttcttcggtcactcaagctccagccgagtcccttcgagcagcttggctccgcttcagatcttatcagagagaatgtccccaacatggcttccaagagagtcaactcatcaatctattctagagagggatagcaaagccatacaagaatcaactcaatgcagcaagctaatgtaacttcatgacaagaactactagtgaagcattactcctcatcaccaatgctttaactagtctttcgacacaggaagttgacacaaaacaaagaatttcagctgagattgccactgcaagcaaagagaatcatgtttcagcaatctctgctcctttctaagcggccaccccccacccctccaccctccttagacaaccgactcgactccatgcttgcgcagattcttgcgggccaaacaaagctcgtggttgagtttaatagcaagtacacagatcttaatgggaaaatcaacaatctgcaatctcatatccctgagccttctcctaccactgcatcagtcaatgcagtcacactacgcagcggaatgcagctcaaccttttattttag

SEQ ID NO: 3043 - DNA, 980 bp, Arabidopsis thaliana
taaaatagtaagtcggttaaaacgaagtaaaaattgcatagcagttaggatgggggaaaaacttacccggttttccccagtagatggtatccttttggtgggtggtctcctaggtggtcgtctgctgcgtggaggtatgagaatcaggtccgataaatcttgaggaataacaacgtcttttgggtccgctataggtaaaacaggttcttggaaagaattagaaaacacttgaaagctataccacaatccaacctcagccttcgggttgatgccaaaaaggtattgcagcagctagagcatgctcgcatgggattcttaacatcgtgtacctaagacaagtacacgtacactcatctagtacaacgtgaaaatgctcaccactctttgaagtaacttgataactccatggcctagacatcatgactgcgaactttcctaacgcaggcaagtcttggagaaaacgttcatctacctccggggtcaccaaagagttacacttcaacacttttttccgccttgctgcaaatcttcgcatgatgacctctcggatgaactgtagcatatagacaattggataagcttttgccttccttaagacattgttcattgcctcggagttgttgctagtcatgatattgtaccgctcccctttgcaatatgcccttgtccaatgctcaaatccaacatcctctaaatactttgcgcatccgggactccgacctcttaactcttcaaagtatttttcaaaatctctaatccgatatgctttagcggcgcgaaagaataaaccagacacaccgtaccttgcgtaaaacaccgatatgtttcgctccaggtgtactatacatgctccatgatgggtttctcgggtacaccacactgacgcctttatatatgttaaaaatgcatgtctgagacaatcatcaaatcgtcagtatctggaacaatctctgatacagtctcaaagaacaaaatccatg

SEQ ID NO: 3044 - DNA, 963 bp, Arabidopsis thaliana
ctctaaatttgataatgtccgaacttatttgcatggatgtttatatattacactagaactcgtattattgattattaatttaaacgaagtatcacgaatttaaactatattttcatactttgtctttcacacccgattttccgcgacaaatgcaaaatccagatactgaaaattatgcaatattaaaatttgaaaaaattgaaaaagtgaaatactaataaaattgagcgacacatttctgattccagtcttaactgttacactttcgagtgtcagatctcgtctttcttctccaactcgtctatcttcttctccgattaatctaatctctcgtcggagatttagaaatgagcacacctacaacttccggttcggcggcgaaaccgacgagaccagcacggtcgtcgagtttagcaactaggtcatgttccaattccggttccctcacttcgttccaagcaatggtggagctgaagcaaaagatccttacctcaatctctaagctcgccgatcgagatacataccagatcgccgtcgaggatctcgagaaaactattcaatctctcactcccgaaaccctaccgatgtttctcaattgtctctacgattcgtgctccgatccgaaacctgcagtgaagaaggagtgtctccatcttctctcctacgtttgtagtctccattgcgattcgacggctgcgcatctcactaaaatcatcgctcagatagttaaacggttgaaggattctgattctggagttagggatgcttgtagagatacgattggtgctttgtctgggatttatctcaagggaaaagaagaggggactaatactggttcagcgtcgttagcggtgggtttgttcgttaagccattgtttgaggcaatgggagagcagaacaaagtggtacaatctggagcttcaatgtgtatggctaggatggttgaatcagctgctagtctcc

SEQ ID NO: 3045 - DNA, 1100 bp, Arabidopsis thaliana
cttaagttaagttgttgttttagctctgttggctaacccttgaaggatcttatgattagatgaaagtttgaatggtagaagctatgtatgattctatggttattttaggtttttgttgctttagccttactgttactgttactcaacattgattgttaggtattaaattgactgatccatgtgtgggtacaatgccagttgagatgagtaattggtcattagaatgtggtagtcaactcgatatttgacttcttgatttatggacacaatttgtaagctttggcacaactttcttctatgtacattgtgaagaacacgagctggggtcttatgattaggtagattttggttgctagaagcttaatgattttatggtcaaattagtattgatttggctctgttgttactgctactcaacatcggttgttaggtattaactatgagagtaatttgactgatccatttgtgttgagataagtaaatggtcatttaactctgttaattaccttaggtgagtggatgaatacatcagctggacttgcttttgcacctcatgtgatcagtgttggatcaggagaagtaatctctaaaaactcctatcaatcttaatgagttatgcagcttttcattgtttcaatttccttttatttttcttgcaggatattgtttcgaaagttttgtctttttcacaaaaaagacctcgggctctttgtataatgtcaggcactggaacggtttcttcagtcactctgcgtgaacccgcttcaacaacgccttccttaacatttgaggtttcaaaatcgttcattcagttaatccaaaaaagaaccaaaccgtggagaactaaagattctttatcccttctttgtgttctttagggacgttttgagattctaagtttaggtggatcttatctggtgaatgaagaaggtggatccaaaagtcgaacaggcggtttgagtgtctctctttctggtcctgaaggtcatgttatcggcggtggaattggaatgcttatcgcagccagcctcgttcaggtattcaaaattggtttggctcattaagttttgttttggttgtaattgtttggtatacatttg

SEQ ID NO: 3046 - DNA, 792 bp, Arabidopsis thaliana
tccactgtttcatgcgcgcaacaaacacattcacagaagatatcacttcataagagagtgtgttgagaatggacacattgaggtggagtatgttcccggagacatacaaaaggcggacatcttgactaaggcacttggaagagttaagtttcaagtgatgaggagtctcattggtgttcaagatttggagaagagtgagttcaggcttaagggggagaatgttgattaagcttgaagaagacttaagcaataagtcattcatttatttaagatataaggagatccttgtaattctaggagttatctagaatattcattaggagttatctaatgattaggataatgttgaatctctattatataaggagttattgagatgtgataacccttatgagctttgagagagattgtgagattgagagctttaggttttgagctattttccctaaagtaataaagagagtatttctttgtacattgagttcataatctttcttaaactctagatttggtatcagagcttgaggctattgaatcaatcataagagatgggtgatatcgttcccgtagataaaacaacgaaatatgttagcggatcctcttcaatccaatgtcctatacattgagttcatatctattatataaggagttattgagatgtgatacccttatgagctttgagagagattgtgagattgaaagctttaggttttgagctattttcctaaagtaataaagagagtatttctttatacattgagttcataatctttcttaaactctagatttggt

SEQ ID NO: 3047 - DNA, 916 bp, Arabidopsis thaliana columbia
ccatgttgcttcgcatagccgaatcatacgaatgtaccatccggttcatcgaagcaacagcctggaaaagagaaaagttagctttataatgataacaccaagataggttataagcaacagaactcttacccgcagaaaatgagatgaagtctcggcatacttccgagattccagaagagtatctggaggaggaagcaagggaccaacacatcccccgagcagattagccgaggcagtacgatcttcaaagatggggagtattttctccgcctcgaaaccagatgccttcttcttcttcttcttcttctttgacgactcatcgtcaacccgaatgcgcttacctgccgctttgtcactcgcaggcaacgccacaactgcctcgggcgcagagcggagtggctcggctccctgagcctcagcggtcgtcacgtcaaccggcccggcagtatagggattgaccccatctcgagatgcctcgggagcagtctgcggcgcggtagatacgggaataacattcccatcttgggtcgcctcaggatcggcccgcggtgagatcaatcccgtattaacaaggcgcctctcttccgccaatcgcctctccttgtcctctttcttcttggcatagacctcccgcaaagtaagtttcgtcgattgcatgtccacgaaaaattgagtgcgatgatcggaagattccgaactagtgggacaagaaacgccgtgaagaagacgaagcgcacactcaactcgttcccgagaaaaatgcttcagccaatcgcactttcgagccgacaacgcgtgaaaagccgaaagaaaatcgtctggaatcggctcgagaaacttgagagtgcgttctgcaaaaggaaaattgcaattagagaacgaaattaacatcaccatcgggtactaataaatttct

SEQ ID NO: 3048 - DNA, 895 bp, Arabidopsis thaliana
tcgcatcttagaactaccaacttagacattgattttatctgctttatctgatgctttggttctgagtccccaccttcaaacctctccttcagctatgtcttcttatttgcttgaaggtaagcaaagactaagtttgggggagttgatatgtctatattttgcaagttttctatgttcattcatcatcgttttgagtctagtttcatatcattcatcactattttatatcattcctcatcattcttgcatattttgcatgattagttgcatgattaggatagctttgcatacatattctatttctgagttgttttcaagtgatttggagctattgacgagcaaattggaagaagagagccggaaccagaagacatactcgaccccttggtcgagtaactccagcagcacactcggccccttggtctagtaacattgaggccgttcttaccaatcactcgaccccctggtcgagtaaccacactccatgctactcgatgacaccactcgaccactgggtcgagtaacacttcgtcacacccctgaccaccactcggacattcactctactcgaccacgagatcgagtatcatcactctaccaccactcgactaggcactcgaccacatcttcaaattctactcaaatccacactcaactagacaagctgagcacaaggaagagaagaggagacgaagaagtgtttggaagcggtccggagcttcatccgatcacgatgcccatctcggcccattatcactctatgggacggtcgattaggtttccggctcatctactatcattttatattgttttgtataaataggtgtctgaggggtttgtcctgagacatctagtcgacattgagtttttgcttcagttttattctgttttactc

SEQ ID NO: 3049 - DNA, 904 bp, Arabidopsis thaliana
gtggtgctaaccatgtctttcaagcgccgtttgcagacctcattgaagtaatactgcacagtgcctgttattaagggatcccaactgtgagttttctacaaaacattgtagcttgagttagtgaaattcaaaagattaagccggaaagttaagaaagtaagagagatgcatgacagcttaccgcaaactctagaaaaataacctctctcttttatccaatggcacacatgaccagttatagtagggagcattaaatttttgtgtaaaaatccgagtgatctttctaaccaactttgaacctctgtcgcgagtaaacctccaaacacatgaaacaatgaaagataaaaacatgttacattagtgaaacaactcaacagaaagaatagcaagccaccacaacagaacacaagagagcaagccaccacaacagaacacaagtattgctagatatgaccactatgttcacagaagatagcaagcgaccacaacagaacaagccaccacaacagaacacaagatagcaagccaccacaacagaacaaaccgccacaacagaacacaagagagcaagccaccacaacagaacacaagtatgctagaacatgaccactatgttcacagaagatatagcaagcgaccacaacagaacaagccaccacaacagaacacaagtaagcaagccaccacaacagaacaaaccgccacaacagaacacaagagagtaagccacgactctagaacacaagatagcaagccaccacaacagaacactagatagcaatccaccacaacagaacaaaccgccacaacagaacacaagagagtaagccaccacaacagatatcaagctcatcaagacatgagctttatgttcacacaagatagcaatcgaccacaatctaac

SEQ ID NO: 3050 - DNA, 780 bp, Arabidopsis thaliana
cttcatctgaggtaattccattgttaacaagtcgcttgacatacgtgttgagtgaagcggaagatgtctcagaagcctctttaggaagagtatggaggatcttctccatgatggttgtacacttagcatcatgaatctcctgcttagaacgacgcctcatcggataagggactggagggttgtcaacagactcgggctgcattagaatttgcacctcacaaggtgcagttcggatccagtgttgatcgacactagaggggtatcgatcgacaccgtcgtactgtgtcatctctgagaaaagagtcctgtatggtgtcgatcgaccctgaagggtgtcggtcgacaacatctctgcaactgcgagctccaactcgtcttcagtgtccaattcctcccacacatcatctccttctctaatcaagatggcattacagctcttccttgggtttgcatcaggattaccaggaagaaagccctcttgtctcttgatagattgtgcagtttgagctacctgtacaggagtgagagctcagattcttcaagtgagagctcagattgtcgatcttcccattaagatctgtgtagacagcatcaaacttgccattaaattccacaacaagctttgtttggctctccagaatctgctcaagcattgattccattcttgtctctgctgagggtggagggggggcttggtaagctgaattaccataggtcctctgaaagttgctttgaggaaaggtcttctggaaagcaggctttggagtttagttggaggac

SEQ ID NO: 3051 - DNA, 553 bp, Arabidopsis thaliana columbia
ctagtaacgtccgcttttcccactagggttgatcaaaattgattactggttgaccatttttgatccatatattatataagttaacattttcgatttcttttgaaaatataaaatctggcagggtcgttcagcactcacaaggaaagtagtgaaacagattttgttggatgtgaagcgaattaaggatttaaggagtaagaaaggtgttagtggctttatcaccaccgcagaaatgtttgccgaagcttgtcactcctaaaggctgcgacaccaacgacacctcgacgtacctccacaacagtcttctccgcaaaggactgataaaactaaacgataaggagattaacaataatgataaaagtttcatgacgttagatctctacaatgcctttgtgaccatattcaagaacaaaggagtttcaggtacgtaagatatataccaacactgtatatgaccaaacataaccgatcacgtctttgatagattaaacagaaatacatatacctaaatagatgggatatataatataaatgtttaaatttgggcaggagt

SEQ ID NO: 3052 - DNA, 1558 bp, Arabidopsis thaliana
ccgctcctgatgctgacatgaaacaaatgctacaacagctgcttcacgggcaagcctctagctccatggagatggcaaagaagatatctgagttacataacaagctggactgtagctacaatgatctcaatgtcaaggtggaaacactgaataccaaagtacgatacttagagggacattctgcatcctcttcagctccaaaacagataagccaactacaaggcaaagcagttcagaatgcaaaagaatatgctcacgctatcaccctgcgtagtggaagagcactgccaactagggaggaaccaaagacaatcactgaggacagtgaagatcaagatggggaggatttaagtctcggtaaagatcaagctgaaaaatcactcgagcatccactcgagcaaccactcgggctgccactcgaccacgttactcgaccaacaactcgaccaatcttcccagcggcatcaccaactgctccaaaaccagttgctgtcaagaacaaagaaaaggtctttgttcctcctccttacaaaccacaacttccatttcctggccgtcacaagaaatcgttggcagataagtttagggctatgtttgccaagaatattaaggaggttgagttgcggatacctcttgttgacgctctagcaccaatcccagactctcacaggtttctgaaagacttgatcgtggagagaattcaagaagtgcaagggatggtggtattgagtcatgaatgcagtgctatcatagagaagaagatcgttcctaaggagcttagtgatcctggttcattcactctaccatgctctttaggtccattggctttcaacagacgcctatgtgatttaggagcatcagtcagtctcataccgctctctgttgccaaaagattggggttcactcaatgcaaatcctgcaacatatcccttatccaagctgacaggtcaattaaggatctctcatggtttactttgacaacctaccaatcaggattggagatgtagagatcccactgatgtagtctagacacggatggcgagccaaagacccattcccccccggaagaccttccccagaactacaggagccatgactgacgtcaagacagggaagatcgatttaaaccttgatatagattttaagatgaccttcgacgtcaaagatgcaatgaagaagcctaccatagaaggacaactcttttggatcgaagaaatggatcagttagctgatgagttactagaagagcttgcagaagaagatcaccttaacagtgctttaaccaaaagtggtgaagatgggtttctgcacttggaaactttgggataccagaagttgttagactcacataaagcgatggaagaatcagaaccctttgaggtattgaatggaccagtaacagaggtaatggtaatgagtgaagaagggtcaacacaagttcaacctgctcactcgagaacatactcgaccaatcactcaacctcgataatcagcagctctggagagctgatcattccaacttcagatgactggtcaaaactcaaggcaccgaaggtcg

SEQ ID NO: 3053 - DNA, 588 bp, Arabidopsis thaliana
  unsure (1)..(588): unsure at all n locations
cagcacctgatactgtaacctcttcaatctcatttcgattcccacctctgtattacctaccagtagttttgcatcaggataatttgctttgagctcaagcaagttctgaagacatacgggtctataccaggtaatccccccatttccccttaactttaagggagttaacttcctcagcaaaagttcaggggggaaaataagctccttatctgtatacttagctccatctatatcactataagagattgactgaaatctatcttcattacaactggcaacttcatttgttgtttttgatccacaagagcaaggtttgccagtagatgggcaaatagtagaaccatcttgaaggctaagtgaagatacaccacagtagagagcatcatcagattttgcaaaaacccgaaacgcatcaacaatgggtcgataaccagtacaacgacatagatttcctgcaagacattcttcaatctcctcctcagaaggtgagtttttacttgacctcaacaacgaatacatggacatgataaacccgggagtacaaaacccacattgggaaccatgggaagatgcanagactcctgagag

SEQ ID NO: 3054 - DNA, 606 bp, Arabidopsis thaliana columbia
cagccccaaatgcagaacacacatagagctctctattgattcaaattacgatctgatactgataacgtctagatttttagggttaaagcaatcaatcacctgacgattcaaggtggttggatcatgacgattccagaaaacatcaagcaagctctcaaagctacactctttgggatcatactgaactctaacaacctcgttatgtcccgtagtgccagtacagacatcctcgtaactcggattgtgcacgatgccatggctatacccaacctcggtcttggtcacaccaggaactctctggtaagctagctccactccccagaaacaaccggcgccaaattgcgcgaattgctgacctgaagacggaacatcatcgtcgggtccttgggcgattgcggcggaagatgggtcagcttgggcttgaggacgagacccgaatccgagtctgttgaaaaggttgttcattggggatttgtatacggagattggtcgtcgagaggtttgagggaaaggacaaatgggtttggctctggagaaagagagtgcggctttagagagagaattgagaggtttagagagagatgccgcggcgatgagcggaggaga

SEQ ID NO: 3055 - DNA, 618 bp, Arabidopsis thaliana columbia
  unsure (1)..(618): unsure at all n locations
gagatcagaggctttcaactttctcggacgcttatgagctggtgaaggagtatctgcttgtcttccaggaccctgcaggattcccaaacatattttaattaagattcaagttttacatgtagatgcaaaggattttcggaggaattggtacgaaaaataaagaagagcaaactctgatgtgcaccaccttgcgtttttgttccttcttgattggtctttcagctgaaataaacacacaaaatgaacttagagatggttaagtagtgcatacaatgctgaaaccaacaagataaggaaataatgtacctccaaaactgaatgggtccggtgcgaaaacacgatcctgatcaaatatatatagaaattaaagagatcaacaggaagatgaaactgtagcgagaaccaataaacaaagtttgttgctcacctttggagtgtctggcattgcggcatacgacccttcacgatgtgatgaaccttctgattccttatattgcagctgaagttacgacccaccatgttttggcacaagttaaataaacaaatagctgtatatttgtgaactatgtgagataagcttgtattgtatggtttantgcttctgaagatcagtagtgt

SEQ ID NO: 3056 - DNA, 553 bp, Arabidopsis thaliana columbia
ccctcgaggcatatataatggccacaaagatactgttgaagacgtggcattctgtccatctaggtaacttcttgggacagtctccttttttaataagctcttaagtttacacccaaatgcagacctactcagaattttctgatgcttttggtataaaaaaattggtaattttttgttttgtcctacagtgcacaagaattctgcagtgttggtgacgattcttgccttatgctatgggacgcaagaactggcactagtcctgccatgaaggtacctcttttttttagccagatcgacatttgaggtttaagtttttggtcttgtttcagattccgtctgtttcttcttgtgcgctggcaggttgagaaggcacatgatgctgatcttcactgtgtcgattggaatcctcatgacaataatctgatcctgactgggtactgatttcacaaacttaaatacttgtccaaaagtacagagatgctactcgtcctctcactctacgcttctacatcacttttccaggtcagcagataacactggtccgtgtgtttga

SEQ ID NO: 3057 - DNA, 767 bp, Arabidopsis thaliana
aagcgttctctagtattgaattgctcttagtggtggtcttgggacttagtcctggtgctgcagccgccgccctccacggtggtggttgactattcacggaacctggtttctccggctgctgagtggttctcgcttgtggagtatacgacggtggatcttggttggttactcctacttcaactgatctagtggtattaccattttgctgtggcttcatcaatccatggttcttggcaaaacaatttcccatgattttaaaaagctcaaattccgacgacccagagaggaaagatcggaactttagctaagctagctcaaattccgatgacccggagagaaagatcgtaacttttttttgttgaagatgatcaaaagaagaaacaagagagaaaattgaaagtcaggatctttttttaaaattgttgagggattataataatataaagacgtggaagcatcacctcattagataatataccttaattgcatcaagctaaataatgttagccagatggatttgattaagaaaggaaacaaatgattatataaaatcaaagagttgaaaaattgcagaaatgtaacatgagaagcatgaaatgatgaataattataagaggacggctctatctaggtaaaatgttgaaaagtacgactaatatcaaaaggaaaccgagtcaaactcatacttccattgaattattcctggtcagataagaacgatgagaatgatttgttttatctgaaaaaatatatgtaacatgttgagg

SEQ ID NO: 3058 - DNA, 1306 bp, Arabidopsis thaliana
cccatcgtttgagtcaaatttgaaagattcttctcacagattcttacctgaagattatgccaatcccctggattccttgaatcgcttaggaacggtgacttctttgtatcgatcacaaagtttattcctatgtccacataccctaaaagtccccctgggtatcgagttaagagatcaatcgtgttccttacatggaggatctttaagttcttgtgactcattacttcgtctctgaactccttgtttcctacctgtggacaaccaaagactatagcagtgaccggaacatcatcactggaaccgttctcagctatatcataggcggccagaacagcctctgtagctcccaagctatgtccagtcaacacaatgctcggtttctcgtccttatacttcaacagaagctccttgatcttggctaacaactgtgaccgtagactcagcttagtgaatttcgattcggggtgattagaagtatagattgtgagccacccgagcatcaccttacacccttcttcatcttcactgtcactatcaaaagtcgtaccttcaactacaccaccagaaccatcctgctcgggtccgtgcagcaaggggtcagctgaagttggcctagcacccaaaacattgacccactcatagttcctgctcgttcctctcaaagctatatagatctcacggcgtcctaaagccttagaccgttcatcagacgtgacagcaatgtagcaaaccagttagactcacggtcccaagaatctcttgattgtgattggagaagcaaaccttcggggagagaaacacgagctgtggcgtagaggaagtttacaacctcgtagtcggaagcgttttcgagcatgaccttgtcgaagaaagaagatttgccgtagcggctggcttccacagtacttggagttttggtcgttgacgaaggcatcgtaggtggcttgacaaaagtcgccacgacgtaagatgagttccctaagtgattggtctaatgggtctaagatagtgtcccaattctttgagcctaagagttcttcccatgatgtggttgttgtagccattagagagaaatggtgtgtgtaaggagataataagtgactcttgactcttaagttgtttaactttatacaaatggttgtggactggtgatgatgctgtctgacccacttatgtccaaagcgataaaaggttatcgctggtgtgggaatattattggcatatagaattatccacaaacttgcacatcattctcaaccatacaaaaaagagtaaaaataaacccaatcaaatagagagaagaaaa

SEQ ID NO: 3059 - DNA, 891 bp, Arabidopsis thaliana
tctctcttctctctctcaaatctctcctaaatcctaaatataccttctccatttgttcttttcttcttttttgggtgctacctataatccgaaaaccaccatgaggttttgtgttttcgggtttttatcgcttttcttgattgtttctcctgcctccgcctggttcttccctaactccaccgcggtaccaccgtctctacgtaacactacacgtgttttctgggacgctttctccaatttcaccggttgtcaccacggccaaaacgttgatggtctctaccgtatcaaaaaatacttccaacgttttggttacatccctgaaacgttttcgggaaatttcaccgatgattttgatgatatcctcaaagccgctgtcgaattgtatcagacgaatttcaatcttaacgttaccggtgagcttgatgcgcttaccattcaacacatcgtgatcccgcgttgcggtaatcctgacgtggtcaacggtacttcgttgatgcatggcgggagaagaaagaccttcgaggtcaacttctcccgcacgcatttgcacgcggttaaacgctacacgttattcccaggcgagccacggtggccgagaaaccgccgtgacttgacctacgcgttcgacccgaaaaacccgttgacggaagaggtcaagagcgtgttctcacgcgcttttggtcgttggtctgacgtcaccgcgttaaacttcactctttccgagtctttctcgacgtctgacatcacaatcggattctacaccggcgaccatggtgacggagagcctttcgacggcgttttgggaacattagctcacgctttctctcctcccagcgggaaattccacctagacgcagatgagaactgggtggtctcggagacctagacagt

SEQ ID NO: 3060 - DNA, 1703 bp, Arabidopsis thaliana
cattcaattggaccctaagcataatcgtaaaccaaagtgtaccaaatcaaaatcaaatgttctgaagaaatcaaaatctcactcagcgaagaaatctaacctggttaccatagccatcgccgaaagcgacgctgatctgatcgcgcgtgtacctagtcgacgaacagctcgtcgagatgatcactgtgtaagcacaagtattccccaatttctgcatcatagatataaatttacacgcatacaaggaaaatcataagtttctcgggaaaagtttctacccaaagacgatgaaggaaagttcaaacggggaaagagagacgaacctggatgaggctaacgttgaatgattcagcgacgtgaggaggatccaatacttttgattcgtaaacagaggtggatataatgaagacgaaggagattaaagtgaagaagagtcgtacggacgccattttcgtgcttcgagaaatcgctcgcagatacacaagcgaagagaaaacgaaagagtaattgagaagataaagtctcgaaccagttgaggataaaccggattagaccgggtcaaattcaaacaaattcaatttcggtataagaactgaaataaatggcgacgcgcccaagttacaggccacacatctcttgtcagtgtcataatatttaggtagaggagaaaatgtaattaatgttttgtatagaagaaattgattagagattcgacatgtaactgtaggttatgtgcttttctagatgattcttaatcaagtaaccactttaagctttgaaaaaaaaatgttgtatacaaatcaatacaaaacttgcacactgatattaaatttttgtcatgtatcatcattttaccatccacagaaactgaatgtgatcatgcactaagtaaatttacaacatcttgatatactggaatttctataataaactaaagtcaacattttagaatcatttgtttactctatagctctagatttatgtaaaaagtttagagttttaagagtacttggtatttcgaagtacataaatgtcattatcaaattgtattttccttggtgtgtggttgtatagttgtgtaatctaatattcatagatttatcacatacaaaacattgatgcagaatttataaggaatagtacgttaaaaactcgaactcatacattagttaactaattaatgttaccacaatatgaaattgtcaatgttcaactacaaagagtcaaagacaaaacagagggattacacgatactcgttacttattgagacaactcttaattcttaacaaaataactcaaacaaccacagccgcaaacgcaaacacaaacgcagcaaacgcaacaaccaaactctgaccacttccacgtccagaggcagcagacggcggtgatggtggtggtggcggcgggattgaaggtggttcaggaggaaaataaggtggtgaaggcggtgggatggatggagaaaacggagggaaatcctggggaaggcggtggcaaatcggtgttgttacaatagttgtttccgtaccaaatgttttcagggacgttcttgttgaaatcgaatttcacggatttggaaccttccttgtatatctcgacggtctccgggatccagccgtcggtaccggaacggtagatgtagacggagcagatagtgttgagacatttacctttgacttggaatgtgtccgatgaacat

SEQ ID NO: 3061 - DNA, 482 bp, Arabidopsis thaliana
tcgtaagcagtttcaacgttctcttgagaagcagaagatgaagttcatgctcaagactaaagttgtttctgtggattcctcctctgatggtgtgaagcttacagtggaaccggcagaaggaggagagcagtctattctggaagctgatgtggtacttgtctcagcgggaagaacaccgttcacttctggacttgatctggagaaaatcggagttgagacagacaaaggcgggagaattctggtgaatgatagattcttgagtaatgtcccaggcgtgtatgctattggagatgtgattccaggaccaatgcttgctcacaaagccgaagaagatggtgttgcatgtgtggagtttatagcaggcaaacacggtcatgttgattatgacaaggttcctggggttgtttacactcatcctgaggttgcttcggttggtaaaaccgaagaacagctgaagaaagaaggtgtaagctacaatgttg

SEQ ID NO: 3062 - DNA, 987 bp, Arabidopsis thaliana
ttgaatttgagtttaaataaaataatttgaactttactcctaaaaagttagtttgaactttatactttgaactcataaatttcatctcaaaattaattagtaacaaaaaaaaaagtatactattatgttcaaaaagagaaactatgcatgaatgaagaaccaatctaggaaaaataatccaaaccgtgtcttaataatctgtaaattaatgaactaatccaatcatctacactaaatacaaaaataatccaaatataatccaaaaataatactgaagtagattagtcaaaaccgatctagaaccgtcgcttctaccaggagcaccagaatcgccagtgtctcgttgttgagtggacggtggtggagatctagaaccattgaagttaggattcgcaccgtacaaatattggactccttccacgtcatcggtcgttaaatcaactttacgcctacccgtcctgatggttggatacatgatcgaaccttctaccgaggaatggcctaaccctagaagatgtccaatctcgtgaacagccaccgattctagatcaacagcctcagacacggagataaaaccgtcgcctccttcgccggagacgatccagttctcttctccgtctagatggaagtgtcccgtcgggggcgagaacgcatgtgctagcgttctcattgggccgtcgaacggttctccgtctccgtgctctccggagtagaatccgatgctgatgtcagaggtcgagaacctctccacgcgtgtgaacgttagtggagtcacctcctcccaacgagtgaaagcgcgtgagaacacgctcttgacctcttcggtcaacgcgtttcgcgggtcgaaagcgtaggttagatcacgacgatttctcggccaccgtggctctccggggaagaaagagtagtgtttaacggcgtggaagcgttgtccccgccggcgaaggaaacatcgaaggttttcctacagctatgcatagttgaggt

SEQ ID NO: 3063 - DNA, 451 bp, Arabidopsis thaliana columbia
actctctaacgtacctgtcacacaataggtgagcttgaggatacttggaagtaacaaaaaggaaagcttcacagtggaaaagctttacgtggataaccgtaggtctctaagaacaggtgctctattaagcggcatttttttgtcaatgaattaaatagctcctcggttaagttatacctgtcacatgaaacacgaaataacgtaaaacaggagacaatgttgcttaacgaattagcagaactgaaagtcagcagcaattgaagtagtaacaacccgaaagcatagaagatgacaatatgaaacctctggacaaagggagaaaaaaaagagaaattcttgaaattcataacagacaagcaggcactcaaagacaacttacaatcccacaatcctcagatcagtgatatttggacaaactgacaacgcatcgcataaggacctgtattttata

SEQ ID NO: 3064 - DNA, 433 bp, Arabidopsis thaliana
ttttcagttgcttattaacctgtaaactgttcaatctaaagattgctctgtttttttcaattatttcttccccaagaaactttttgtttttcttcaattaatactctgttcttttcttcaataatcattatttttaatattctctgctttaatttcttcatggttggtactagaaatttgtcaattctctgcttcttatatataggtattattgcacatagttgttacaagacttccgttgataaatcaaaagagaaaaaacgaagacactgtaagatgctgatcaaatgcagataagagagaatgatctgatgatcacttagttttggtggggaaagaagccatcttgttgattcacagagaccctctgggtttccagtgttcctcttcagcatgatgtaacctttttctcccccattttggtccccaagga

SEQ ID NO: 3065 - DNA, 917 bp, Arabidopsis thaliana
ttgctcgttttagctatgaacttgtgtttctgattcaatgtcaaagaatctcttcattcgtctgttttggtaatctgatcaaaaatgttaatcagagcttctgccaactacatctggtttcatttccttagcgcttaatggtagcttgtatcttaatgcatgacatctatgctagtgtatcttaaatagtgtatcttggcttgcggttcaggatagattattaacgggggaacgtatgctgcaatggaacagaggcgtctcaagttattgtgcgttctgcacaaacactatagagtctcccaaccatcttttcttctcttgtgtgttacagggaaacctgcgattcacaagaacaatccaaatctccaattatcattcgaaaccaacaatcaatcgatgttcataaaacaccaaatgattcagctagctctcgatgtgagagaaatctagcacttacaaaggttctagagaattctgaagattacagattattcgataatgaaagcatgagcataacatgttgctcttatataaaaaggtaaagaaagtaaacgttaaccacgttaataacgatcgccgttaacgtccattgcattgccagctcgccagctcgccagctcacaagtactttgcctaacatccgacttcacattgccagctcgccagctcgtcagctcaccagctcaccacacgttaatcctgtatcaaatctcccccctttcacaaaaccttgacctcaaggttctatgcttcaaactcaggaaatgttttctgcaaatcgaagaggaactcccatgtagcttcttccaaaggttcattgctccatttcaccaacactttagtgacagcttttccctgacgattgaccattttcctttccaccactttctcaggtactttctcaaagacatcttgca

SEQ ID NO: 3066 - DNA, 792 bp, Arabidopsis thaliana columbia
gtcgactctcccaactgggctttcaaaacttgcaactatttatgacatacagttgtttaaagatatttttgataccgttgtaaagtttcttgtcaaaatttggattagattcactattcactcaagtatagttgaagattatttcgttttattcggtctgagagacttttaaaaggcaaaacccctttgtcacatcttataatgatgcaaaaacaactatgaatctatgtgatatcataagctaacgatggtgtttcatttagcttctgcggctttctcactgatacggagactttcagctttacgcacaacctcctctgccacaagcttcacgtggccgcttagattgctctcctcaggatggtttaccgaacccaccacccatattctgaccgttccgtcttctgagcctgaggtgtatgactcccctcctggcgcatacctcacgcagtgcactggcccgtgatgacccttgttacaccctacattcaccacattggctttaaaggatacacacaggttcctaaaatgaaaacttcattcttttttaaaagaaacttaccaatctcttctccagtctggaaatcaaacctgtgcacccacatatcttctcctccagcaatgaaagtgttaccgtgtttcggttccaacgatgccgattcaacattgcaaggcatgtcatagctcttcagcaatccaaaactaggagagcaggagaaaaagctcaaccatcaaagaaaaacgataaaactgtaactgaggatgcatttctatatttttacttacttttta

SEQ ID NO: 3067 - DNA, 659 bp, Arabidopsis thaliana
taacaagaactctctctcgccgtttcttcaccagattcctccaccttcttactttagaagctcaggtttgataatgtcttctctttattgattggattttggtgaaatgggttgtgtaaaataatcaaattttttacatttttgctgtggaatgcaggaggatatggttctggtggaatgatgatgaacatgagcatgcaagggaacttcacaggtgttaaaggaccttttacattgactcaatgggctgagttagagcaacaggcgttgatctataagtacatcacagccaatgtccctgttccttctagtttgctcatctctatcaagaagtctttttatccttacggatctttgcctcctagttcctgtaagctccatctctttaacacaatttctagttgcacataactttccattgagcgatcacttgtttgtgaaagttttggggttttgatcaactcatttgtggtgtggttgcttaaccaagaatcagattttatctagtcttttatgtcattttggtgctaaatccttcataacattgctcatagggtttcaagatttgtcttggttggtgaaaagctttacgacaatggttgcttttaggattttcatagggattttggtataatggtaatgagtgttatgtcggtttg

SEQ ID NO: 3068 - DNA, 1148 bp, Arabidopsis thaliana
gcaagtgtcgatgcccatggcgtagttctaaggatttacaagagagttgggatcaatactattaagcatagtgagtttcgcggaacccaccggttactcaatattagtgatttgagttcaaaaatggttcgttaataatcctaatataatattctgatatttcttgagcattttcctaaacccaacgtcttaatcatccgaatctacaaccaatctcttttattgctttcttgtcttttatttttataatattttctgtttagctttattcgaaactgttaatctattgtgtgatctgagaactttgttgaattcgatccctaagtgctataaccgacctctttatttgaaagagtagtcattagggtaatttgactcatatcaccaagcggccttgaaagcttcagttggaccttgggtgaaggtaggcagcttatttctcagctcctcagagttagcatcatcatagaagttattcaagaaagctatcttgatgcttctccaagtcttgagtgaaactgctttcaattgcttcaggcaagaagcagcttccccagcaaatgagtaagggaagagcttgcagagtaggtagtcctctgagactctattagtcttgatgctcagaacgaggttctcaaaacgttcaatgtggtccattcttatcgtgagataagccatggaaaggatgttggccaactaaagcaaagtagccagacttcagctcatagtcgttcctctggaaggatgggggtacgatcggtgacctattggcatagaacaggtcgggcctgttgaaattcccaagagtacgacgtggttccactgctggaggtataactgcaagaatttgtggttggtgtcgattgacacccaaggggtgtcgctcgacaccaacttcttctgcgttctgctcttgatgcgtgttttatttcgcctcagtattttacttgaaagaccacacgactactgcaagtgcacagtatatcggagtagtgttttaggatcgaatccacaaggagagaagtagttcagagaaatccttaagaagagagtgaagctagaaccaaaataaagagaggggttgttgtatgctatgagtaccaaactaagagacaaatactagactagacggtaagcaataagagaga

SEQ ID NO: 3069 - DNA, 993 bp, Arabidopsis thaliana
aaaaaataataaaaaggaaaatattaaacgaaactgaagacaaaaataaatgacgaccctaggagagccggacagaggcctaaaatctaccataatcaaggttccattcaatcctaaattcaaccgaagattcctccacaaggttccggtccaccttagcatagaagtatcctcctaaccagtcccgggtcttggagggtccgttttcgagaatcttgaaacctctaactgagctaatataatgctggccgagcttgtgaggtactttactgaaagaagtaagttcttccataagctccactgaaaggggaatgccgcacctcgcgcaaagcatctggaggcaggctgcagttcgtatctgaagcgaccgtcagttgggatatagcaatctgacggttccgacagaatcgcatgagaaagtcgggaataggaaagcgaagtcccgtctcggtgaaaaacccttcgaagagacaaatgaacccctcaggacaatcgctcggccgatctgtgtctcgtgggatcctaatagttagagggcccggcaacaagcaaaagtcggtcgtttggccaacagattcacgggtcgacgtagtgggtcccagatcgaccatctcgttttttctagattcacccgaaacgttttcatccgccgattctctctcatcgtcggcataacgattcccagctccatcagaatcagtattaactcgcaaacacggaacaacagtaggaacgcgactagaggagggaaccctatctctaatggcggagatttcgcgacgatctatcccggaggaaggaacctcagcagagtttccacgatgagtcgaagacccgacagaacgacgagacgactcctcggaccaacctattgaaggagatttcttccccgaaaggtccgaaggagttctctcgcggatgtaagaggcgacggagttgtttggagatgaaaaacccattgcttgagacgagaaaaaacacaaatttcgaaga

SEQ ID NO: 3070 - DNA, 1050 bp, Arabidopsis thaliana
cacaattttaggagattcggctttctgtcaagatatgctactggttctcatttgtgatccgagctttgcgatgcacatcgtaccaactccaggacctgtgctcagattagatgacgaagtgacctttcacgaaagcgataccaacggcttggagtgtccgcacaacgatcctttagtcattacactaaccattggtgatttcaacgtcgaacgagttctggtcgacacgggaagcacactagacataatttttcttacaactctgcgagaaatgaaagtcgacatgacgcgaattgtaccaactccgtgacctgtgctcggattctctggggaaaccactatgactctcgggaccatcaagttaccagtccgagccaaaggggtaacaaaaatcgtcgatttctctgttaccgaccagccgaccgtttacaacataattatcggcacaccatggttaaatcaattccgagccgtcgcttcgacatattatctctgcctgaaatttcccacgagcaacggcgtgaaaaccatctaggaaattagaataatgctcaaatctgcctcatggcagcacacaagctaaggaacccgtcactgaatcaactaccgacgtgaatcataagaaagctaagcttggccgagctgaagagaaagtaatttccgagcagttatagcagctaaagatcgaggaggctcgggaatccacaagaccaatccccaattcggtaatctctatctgccttgatgacgaaaaactcgagcggtgcgtggaaatcggtggagacctaggagaagaattaacagctgaactcaccgctttcctcaaagaaattgttaatacagtcgcatggtccctagaagatctgcccagagtaagtgttgatatcgtatcacacgagctctacatccacccgacgttcaaaccttttaagcagaagaggagaaaattggatcgggagcgagcagaagccgtgaaagctgaagtagagaaattactgaggatcgggtccatcaccgaggcaaaatatcccgattggctcgcgaatccgg

SEQ ID NO: 3071 - DNA, 581 bp, Arabidopsis thaliana
acatcacgtaatcatgtacttattccaccagagaagcatacaaggacacagtggtccatctcccgacttttcttcctctttttaaacacttcaaaaaacattcattccatacccccaaagcccatccttcaacattgcttcctaaccagaaatccaccatcatcttcccacgaatacaacttaaagctttaccagaaaatggagggtcagagaacacaacgccggggttacttgaaagacaaggctacagtctccaaccttgttgaagaagaaatggagaatggcatggatggagaagaggaggatggaggagacgaagacaaaaggaagaaggtgatggaaagagttagaggtcctagcactgaccgtgttccatcgcgactgtgccaggtcgataggtgcactgttaatttgactgaggccaagcagtattaccgcagacacagagtatgtgaagtacatgcaaaggcatctgctgcgactgttgcaggggtcaggcaacgcttttgtcaacaatgcagcaggtatgattcttcccttcagtattactttatacaaagtattaagtaggggtttggttt

SEQ ID NO: 3072 - DNA, 934 bp, Arabidopsis thaliana
gatggatggttgcagcatactccttgtagctcaataggtgatccaagagaacaacactcaacgaagtgtccgctctatcactcgccatctttttcccatctcttgtctccctcaaaatgaagacgaaagattggtctatcatgcatagctcctcttcactaacaaatgcggtggccttctttggaaagagggtgttggcgatgcattggtggaggtatctaatcacgggattacggattgaagaactcttgctcttggttggcgagaagggcttcggaccgactattgtcttccaaagagattttagctcttcttgatcatagtcttggcggattccttctccacttgggaacccgaaaattgtatcaagatggcaaatatcaagagtatattcgacatccctaattttgaaagttatgtacccaagacctcctctctcttctttctccgaattatcaacaccaaaatgaaccttgagggttgcaaggagttggcagctctcctctttgtatccacattggcagctcatgaatgttgcaagattggccaattccatcaagtattccacatcaccacaaatatctagctcttgcatcgtttccttatgagggtatctagttccctcaaacttcaactccttcaaatattgatagtactcgctcggggttggttctctcttcctccttggtcggtttcttctcccaacaggggttggtgtatcatcctcgatgatctcaacctcttcttcagaaaccgcttcttcaaagggtgcctcttcatggtgttcttcttcagcttcaatgaccctctttccccgagctacttcttctctttgcatggtcgagcggcttgagcttcttccttgaatcaagcttgatctttgagcacggtgagcttggcgaatttggcgttcagttatgccactcatctaaac

SEQ ID NO: 3073 - DNA, 905 bp, Arabidopsis thaliana
acgtgagttcttggctgtttcagtcctttttcttcatatgtttagctgcgtcatcaacttgccttttcttaactttggaaaaatgcaaaaaaatagtacattagaaaaagaccccacctcaattcaaatgctaaagtctgtgaattgtcaacgttcattgcacagattacttatcctatgaatttaagaatatagtacatctgaatacactgtaatcttaaatgcatatatttagtagtctatgcatttaatgtggatagcagataaacatagggatcacacacactgattgttacgttacgtataagatcttgggcctgcctttgtataagtgaaacagtcagatatcacatgaaggcccattaactttaaggtaaataaacagagaattaagaaacagagagaattcgaagttagagagctacgcgtcgagattctttcttgctgaataaatcaatcacacccgccggaaaaaacagtaagagcataggacttgccggcggtaacggaggaatctgagctctacacaacggacacttggacatttcactgagccatgtatctatgcaatccgcgtggaaacagtgacggcaaatcgtcaatcgcctcatcttctctccttcctccgcctcttgtagacacacggcgcagaaaggtggagacgaatcatcgttttccgccgctctccaccgacggaacgtgaatgtgcggtggcgacgccatggacttgtgacgatcaaagtggcgaatctttcagaaaagacggcgacggaggtaatcaaaatagaaacggtgatatattcgcaaactctatacacagattgagtcaacatcctccacaaaaagtattacaagtgattgaagaacgacgagagactcttcttgtggcgtgtacgtgtgtgtgt

SEQ ID NO: 3074 - DNA, 1399 bp, Arabidopsis thaliana
atctccaacacctgttcagcaaactacaagcttcattcagaattatgcatcttcaatccaagcccaccctccacccgagaccagacctgcgaattctccaaaacccgatttcagctgcagaaaggcaaccaaacccaagattccttttcccaagagtcctaggaagtcaaaacaggagctagacgatgctagatgcaaagcgatgatggataaattgattgtagagatgccacttattgatgctgtgaagtcttcttctatgatcagacattatgtgaagaggatgattactaaggatttgcttactgagtaagctttgatgatgatttctacacaggttagcaacattattaagaacaagatgccacaaaaacttccagatcaaggtagctttgttctcaattgtggtatccttaacaagtgttgtgagcaatgcttgtgcgatcttggttctagtttcagcttgatgccacgatcagttgcactacgacttggtttgacagatttagagcctacgcaaatcactcttgttcttgctgatcgatttgtccgtagacccaatggtatcttatgcgatgtccctgtacaagtcggtactagctacattcctacagattttgtggttttatcttatgagaaagaacctaagtatcctctaatcatgggaaggcctttcttagcctcaaccgattccattattgatgtcaggaaggatagaataggcttgaatgtaggtgatcttacaatgtagtttgacatgaataaggtggttaagaagcctaccatcgatgggcagactttctatgtggatattatctcgtctctagttaacgatatctcatggagatgacacatgctgatcctttgaaacatgctctaatcccttcaatagacaatgttcccgacgggtatggtaagctgttggatagaactgagcatgtaatgcaattgattactcaagaggagttaattggcccatctacaaaagcagcaacggttggcgagtggagcccagaaaaagctcctaatattgatctaaaaccacttcctacaaggctaaggtacgcatttcttggtgaaaattctacttccatgtcattgttaatccttctttaaacaacacagagctcacttaattgctaagcaagctgcgcaagtatcgcaaagctcttggcttttctcttgatgatattacaggtatctctcccgacttgtgtatgcataggattcaccgtaaggattaatctaaaccctcagttgagcatcagagaagactaaacccaaatatcaaggatgttgtaagaaggagatcatgaaattgtttgaagcaggaatcatctatcctatttcaaatagtgattgggttagtcactccatgtggttcataagaaaggaggtg

SEQ ID NO: 3075 - DNA, 1730 bp, Arabidopsis thaliana
gactctacagtaaagtatgattatgagtatgtatgtatgatgaatgtatgactggggaggaggtatgggccgtggtctccctagtgatgtggacagtgatggaccgacgggttaacagctagtcaagaacggctgacgagcccggaatgagagtgtctgagccacgagggccagcttccatgtaacacccgcgatcctcaataggatcgtccggatcggggcctttcactccacctatgaggttctagtcgtcacgaggatgactggacctaacgatgtgtatgtttatattattatatataagatggttgtaatgaatgtgttattagatggtaaagcatgttaggttgattgcttgtgtcaaagtttatatgttatgatgatggttgtatagctttagaaagtgttctatgtgtcagtgggcagagttgatttccttcactgagtaatctttactcacccccctttttcccttttttctcaggttagtaagcgtgaagagttatgtgaaataatttgttcgtgtatgaagtttaaagaaaacatttttggcaagatcatatgaataacatgccgtcttggcctataaggcggggcaggtgttacacctctgccatttaatttcctaaaacagctccaacaatcttcttcctctcaaagtcagcattcttaatactgtttctgcaagataggttctctatcaaagcggttgcatcagccggatacctggtgttgaagtaaccatttctcgctgcatcgagagccatctgatatctccaatctactcctctgaaaaaggtaccaataagttgtacctcagtgaagccatgatgcgggcagtcccgttgatactccttgaaacgaacccaagcggcattgaaagcttatttctcagctcctaagacttagcatcatcatagaaattattcaagaatgctatcttgatgcttctccaagtcttgagggaacctgcttttagttgtttcagccaagaagcggcttccccaacaagtgtataagggaagagcttgcatagtaggtagtcctctgagactccattagccttgatgctcagaacgaggtcctcaaaacgctcgatatggtctattggctgctcatgagacaagccatggaaaggatgctgggaaactaaagcaaagtagcctggcttcagctcataatcgttcctctggaagggtgggggtacaatcgctgatcgattagcatagaataaggccagttgaaatctccaagagtacgacgtggttccctagctggaggaatagctgcaggaatctggggttggtgtcgatcgacacctctgttgtgtcgctcgacacaaccgcatctgcgttctgctcccgaaggtgtcgatcgacacctagttggtgtcgctcgacaccgagccctgctacgtttctggcagctaattgcgcattgaggccgcctgatcctcattggcgtcctcagggaggatgattccatgctcatccaatctctgattagcctcattgtaggcttgccatcctcatctctcaaaactccttcctcatcaagtctgatgactttgttaaccattgctaatctctaagttttgcggttggtgcgttcaagtttcccaagtccagaacagacaagttgatcaactccttctgttgtgtgctccttgtttgcctaggcatacacatgacacacagaaaagaagaaacatgtgagtacaaaataaaagt

SEQ ID NO: 3076 - DNA, 1036 bp, Arabidopsis thaliana
ctctatccccgcaagatatgctgccttccaacccaacaccaaacacacaaactcccgtgatctcgcgcattacaaccacaaagtatgcaaccggagcatcagatacttcttgagttcttgaaaagcctcctcgcatctggtcatccattcaaattttttgtttccccgaagcacatcgtagaaatccaggcatttgtcggtagaccgcgagataaatcgattaagagctgcgactcttccggttaaacgctgcacttcgcgtttgttcttaggtgatgccattcccaataacgcctcgatttgcttcgggttttcctcaatgccgagttgggtgactagatatcccaagaatttgccggatcttaccctgaaacgacacttgaccggattaagcttaacgttatagaggttgagctgttgaaaacatttgcgcaaattggctacatgttctttttcttccatggattttaccaaggtgtcatcaacgtacacttccatcgttttcctgatctgcaaggcgaagatcataagtcccgaggtttttaagtccgaatggcatcactcggtagcaaataccttgttccgtgtagaatgccgttttctcttggtcctcaggattcatcattatttggttgtatccagcaaaagcgtccatgaatgataacaatgtgtttcctgaggttgactctacgaggcggtcgatgtgcggcagtgggaaactatcctacagaaaggctttgttcaggttagtgaagtcgatgcagaatctccacttgccgttcttcttttttaccactaccggatttgtgagccaatcgggatattttgcctcggttatagagtagattcttaaaagtttttctacctcggctttcacagcttccgctcgttcccgacccaattttcttctcttttgcttaataggtttaaaggttggatcaacgttgagctcgtgtgatacgatttcgacgctcactccaagcaaatcctacggcaaccaggcaaaagtgctgacgttatcgttgaggaaggaagt

SEQ ID NO: 3077 - DNA, 1361 bp, Arabidopsis thaliana
cctagtcactactcagacatcattgtagaaagaataaacgatgataagaatgaaaacatgatagcaacagagtaatatcaagatgataacatgatgaaaaacttagtaaacgaaatgaaaagcaaatactgaatagattaagagaaattcggattacaaaatgtcaagaacacacagtgtctgccgaaattaaaacttttttggaaaatgtaaagtacatgctacttattgttggaaaatattctgaaaccctaatacttaaaacgacacagtattgggatggatttaagaacggcactcgacccaggtggtcgagtgattggtcgagtggtaagctggagtcttcttctcttccttatgctcgagtgtctgattgagtgcagaatggagaagactttgaagctggcagtcgagtatgatgtcgagtggtggatgatggtggtactcgactatgtaatcgagtggaggtgatcgagtgaacgtggagtggtagagatggtgatactcgaccagggtgtcgagtggtggagagaagtggtgatgccttctactcgaccagggggtcgagtggtgaaccagagtgttgcggtcgagtgactggctgcggaggtgtgatcgggtgcttcagaaattccaggatggcagtactctacctcagggtcgagtatattgatatgattaggtccatttcatccaattagcttgccaacagctccaaatcacctgaaaacaacataaatatgcaacattcatgcaaaattatcctaaacatgcaaagtgatgacaaatgatgagaaatggtataaaacagtggtaatatgatgctaatgtgatgacaaatggatgctcaaaatatgtaaaatgcacacttatcaactccacagacttagtctttgcttgccctcaagcaaacaattaagaacaagctggaggtgaggtttgaaagcagagactcagagccaaagcaccagataaatcaaattaaatcaatgtccaagttggtagttataagctgcgatatgatcgaattctactcaaaaacgttagctaagccttgttattaatcaatctgactcttatgctcgacctacacatgttttcaaatctaccaatccttttaacattcattagttctggaacatgaatcaagcaatgcatcatcagtgaactcatttggctaaggtataggtcaagagacaaagatggtagcttcttctgtatgaacatcctcatatgtctagcagggacatgtgagactctctgctcactaggctctggcatgtcctgacttggctcaggcactcaaactcttgctctccctcgctggaggtacatcctcactacaatgatacatggtcata

SEQ ID NO: 3078 - DNA, 985 bp, Arabidopsis thaliana
tcaaaataagtgacaatgagtaagtttccgtctttgttagtttaatttgaattacctaaattaaactattctaatactattttttattatctgtttagaaatcgtgttttggaatgtctagctactaagaaggaagctcttgactttgatcataactatcgtcgatatggtggtggagttattgtcgttgttcttgggtggtggaagattgaccgttattttgatggtccaaagaacgtacgtgtttgcaccgcaggcccgatatcaaccgtctttccggatcctgatattcccaagtctaaccagatccatgagatgtaagttttgatatattcgtatattattacatttcgttattagtaattgatagtaggtttttactcaattaatcttaaaacactatcctatcgttgaagtattttaggtgtcaatccaaatgggtgtgatgcagacacatgagatatgatcagaagttgctaagtcaagccaagcagaatttggttggttttctaacagtcctagtgttgatgcagaaaacagtaaaaagtcacagaaatgaccgaaatactcgatcgcagggtcgactgccagaagggaccctgtgatcgagtacaacaggatgacagagattgaaaatgcagaaatggaccagtttactctatcacgcagtctcactgttagtagactcgtgtgatcgagtagaatggttgaaaacaaaaaatactaaaattcaatagcaagtgaatcaagcaggtaagtaaacagagaaattaaatggatgaggaactcctaaggatagggtaatcgaatagtgtggtctctctaatcaattcacttggttaacaaatctcaattaaggtatccctagacaacaaagtcaacaacagattaattaactcccgtaatagaaatcctcaagcatagctagacactgacctaattcccattagggatctctaactaagaagacaataagaaccgactg

SEQ ID NO: 3079 - DNA, 1324 bp, Arabidopsis thaliana
ctgatgtcttagaatatgagagagatcatcacttacttaggttctaaggttgtgaataaaaacacattatgttgtcttgctttttttttaattactgaacctattgtgcaaaagtaaagtctgacttgctctgggtatattatgggatatataacagctccggagagggacaacagaaacaggaggatggagcaccaccagtggtacctatatatctatatatatagatgtatattcactttgtctcttatcttgcctctcattgcttatgttgttgcagtcgcgaaggcagagagaattcgagaaacgaaaagctgaacctatgcacagagaattggagagattatggctgttgaaggagtaatgacatttcacacttgttgctctgcaaaatagtgtctgtcactttggttcttatgtgtttctttgaatccttacaggagaatgaatggcagagagctgacaagtatgagttacatggagctgaatatactttgggatcagatacaccacggatttcatggtttgcatgagcatctaaatgtctaatatgaccaatagtggaacattttgcgatgctatgctagactcatgtagctgcttcttatttcccctccctaatattattgacttggacataattttatcttgtatcgtctcctcccttattatactttcggactatattattgacttttaagtatcacagaaatcagtcctgactttcctcatgtcgagtctcttagttgattttaatgtcttgaagtaaatttaataatcttttattatagttatggcatgttacagatttctgtcatatcatattttttcttgatacttgcactctcctacctcttctttcaacatcaccttcatcctcaaaatcttattattactgttcttttaaaacattctttccaacacttggcatcatagttgctaatagcgcaaacgacgtcgttcacaacttaggctctgaatggtgactgcgttttgcggtgcgggagaagtgcggtatggttcaaatagttacgaaaatacatagatacatatgtatatgtagagattttgatactgttacagcactgttgcggtgcggttttgagtgcggttttggtcaccattcacaaccttagttaaaacgatgcaataccactaatataccaaacgacgacgtatcgacatttccattaatctcggattcgctcgcgggacagagcagtgacgatggaggagcgagccagatgcgcatcgtcgccaacagatctgcaacaactgcgatcgaccaaacgcgatttgtctccgccacgtcataccggctgat

SEQ ID NO: 3080 - DNA, 816 bp, Arabidopsis thaliana
gggtttcgacactctcatcctgacaaagtttgtcgccttcgtaagtcactatacggtttaaaacaagctcctaggtgttggtttaagaaattgtctgatgctcttaaaagattcgggttcatccaaggttatgaggattactctttcttttcttattcctgtaaagggattgaacttcgcgtcttagtatatgtcgatgatttaataatctgcggtaatgatgagtatatggttcagaaatttaaggagtatttgggacgttgcttttccatgaaagacttaggcaagctcaaatattttcttggcattgaagtaagtcgtgggcctgatggtattttcttgtctcaacgaaaatatgcccttgatataatttctgatagtggcactctaggagcgagaccggcatatactccgttggaacaaaatcatcaccttgcctccgacgatggtccgttacttcaggatcccaagccatttcgtcgtctcgttggtcggctactatatcttcttcatactcgcccagagttgagctactccgttcatgtattgtcccaatttatgcaagctcctagggaagctcatttggaggctgcgatgcgcatagttcgttacttgaagggttcaccgggtcagggcattttgctgagttctaataaggatttgactctcgaggtttattgtgattcggattttcaatcttgtcccttgactcgacgttcacttagtgcgtatgtggttctgcttggtggctcgcctatttcttggaaaaccaagaaacaagacacggtttctcactcgtctgcggaagcagagtat

SEQ ID NO: 3081 - DNA, 734 bp, Arabidopsis thaliana
atcctttaatatagctttgtttccgctcacgagattatttatcttcacaattttttttcgtctctcaaaccaacgcaaaagaacaatgtctaacgttgtagtaatcgccgttgttctcatcgtagcatcgctaacaggacatgtgtcagcacaaatggatatgtctccgtcgtcaggaccatcgggtgcaccagactgcatggcgaacctaatgaacatgacaggctgtctctcgtacgttacggtcggagaaggtggtggtgcggccaagccggacaagacgtgttgtccggcgctacggggctagtggagagctcgccgcaatgcttatgttacctcctctccggtgacatggcggcacaacttggaatcaagattgataaggcaaaggctctcaaacttcccggagtttgcggcgtgatcactcccgatccttcactttgttctcgtatatttcttgaccttctttctagttcttggtttgcatattcatgagagttgttaagaaataatcttgcatgcaaatatagttatacgaccactaatgactattcatgaccaataataactcaaatgtataaacttatattattcaaatttgtgataataagaagctgagtatattaggagatagatattttgaaactgaaatctaggagatagaaattgaaggaaaatatagacaaatctttagtgattttttcaaaacatgaaataatgtgtcctatatataa

SEQ ID NO: 3082 - DNA, 841 bp, Arabidopsis thaliana
tcaggagtttggaaggattgtttggtttcccagtggaaagggaacaaaacccaagtttgagagggaagagttgaaggatttgtggttaactattgagaacgatatggcgctcaactctgcgaggtccaagagcaaccagattcgaagccctgtgatccgctactatcaacgctctgtagcaaatgttctgtactctagggaatctacatgcaccgtgtctaacacatacatggagatgattgattctgcactcaagggcattctccccagaacaaaggggaagaaggtcctgaagggcgacctcaatgatggaccaccggttatgcttctggtgatccacctgtgtggatacaggaagtgggcgcacaccaacgggaagaagagggcgcgaggagccctttgtgtaggtggtgttgtgacaccaattctaatagcatgtggtgtacctctcatgtctccagggttcgatccgaggatgatggatttagatcacttgcgtcgttgtgagtttctggagcacgacatggttgccgatttctatcgctacaaatttgagcactccttgacccgaacaaccaacattctgcttccctgcactgaggccacaaccatactccagagcgaaaacattgacttcaagcgtgcgcgtgattacctctactttgagagcgctccaccgactgatgacaacgtccctacaacagaagctacagaggatgagattgctgagacaaatgaggatagggaggaggagtacgatacgagcatgtatcatttcagtgagcatgtacctccagcgagggagagcaagagcttgagcgaagctcacagaaacaacagc

SEQ ID NO: 3083 - DNA, 1177 bp, Arabidopsis thaliana
agtctgggctagctttgcttgagaatttctatcatgagagtgaattaactctgttgttgaacctgttgcctagaaacctcaaacaccgactgttaaccatcttaataggctaaggagaccaccccatttgattaccccatccttaggtatttctcgtctatttgatttttctgtttcattgctattgattaatcgttctcatctcatattgtttagttttcacgtttgttttacctgttatcacgaacttactcgaccacacccagtgtctggcaacaaaatgtgcaatcgagtataattgctacattttctgtattttactcgactacttacttgaccacaccctgttactggcatcagccaattgtggtcgagtgttttgtgattctgtttcatgcattttcatttaggactgttagatactccaaaatctataattgcttggcttgacttagttacttctgatcacatctcatttgtttgcatcacacctaaaatggatgacacctaaaatactacaacgacaggatagtattttagtattaattgatcgtaaaaacctattatcaatttggcgttgttgccatttgggtgcttgttagctatatttgagattccagaatatttaagattaattgctttttaattttcattcaaagttactaactatgtgctttttctgtttgtctgttatgattcaggtactatgaatcaccagctttactcgacctctgataagtctgcattttacttgtattaagcatccatttctcatcactttagcatcatatcaccactgtttcataccatttcgcatcatttgtcatcactttgcacgtttaggatagttttgcatgcatattgcatatatgtgttgttttcaagtgatttggagctgctggtgagctaattggaagaagtgggcctgatcaaatcaacatactcgaccacgagctcgagtaccatcatccttgacttcctgaaatactcggccacaacatctacaactcaccactcgaccccctggtcgagtagaggacttcaccacttctcaacagcactcgacccccaggtcgagtaaatgccttcaccaattttcaccactactcgactccatgatcgagcatcaccatcaccatcgctcgattgctcactcgactacatggtctcggtaccc

SEQ ID NO: 3084 - DNA, 346 bp, Arabidopsis thaliana columbia
agagttgctttaacaagctctcgtaacgcgtttggtaagcaattgcttcatgtaacacttttaaatggattgagtgttagaataaagttgaacaataagtatgaaaaaggctaatagaagtaacgagctatttagccgtgcaataccttaatttgaggaacagtagatctgagtccaggacgatctgctagtccagtcaaatcatgatccatgtactcaaaaaccatgtagatgccactccttgtatttgttattatctataggtgctaaagccacaacctttagttaagaagaaatcctcaataagcagtaactaagacagtacgtgaaacacttttttcacaaa

SEQ ID NO: 3085 - DNA, 1223 bp, Arabidopsis thaliana
gcaactaaattaccttagctttagactgaatgaagtcatccaaacttagcgaccgtagaccaggagatgcttctgctcttgcaccctaaagattcaaacaacgcaaaatcatcaagcaaaaaaagctatgtaagtgagcagtctatgtttcactgcaaaatctggattctgtaccttttgttcttcttgtaacagttcttgaacaggcctgtacgcagcagcaatgcatagattctgcaaatgtaagcccacaaaagaaacaaaaaagattaaataaagaacttacaagtgccgtcatgagctagggatgagaaaacaaataccaaccttcagatcgctaccggaataaccttcagtttcctttgcaagtttctcgaactggaaatcagattccagattttcaggagttagaaatattttcagtatctttaaccggttttcggcatctggtaagtcgacatatatcctagaattcaaaggtacacagtttaccaatactagaaatacaaactagcaattttcaaaaaggtaaataaaagtcaaatcaggtgttaccgccttggtagacgacgaatgacagcatcatcaagatcaaagggacggttggtggcaccaagaatgaggatcctttggctgtcttttgacctgagcccgtcccaagctgccatgaactcatttctcattcttctggtagcttcgtgctcggaagagccaccacgagcacctagcagactgtcgatctaccaaacaaacaaaaatcccgttcagtcacatttacccatcatcaaatatttactaagagcatcaataactaagatagaactatggacataataaagaaatgaattttagttttaggtacaaaattctcacctcatcaacaaaaataattacaggtgctagcttggtggcaaaggaaaagagagccttagtgagcttctctgcatctccgaaccactatgccaaacaaggaataaagacaagacagagtcagatcagaataataatggggagtatcataaatcatttatagaagtgtaagctaagaaattacatattcgctaagacaagtgtatcaatacaggccagtgaagactgaagcatatttattaaggttaactattcttcttgattgattaaacatgcatacaaatagacacatcaacaaggagaccaaacactgtcatcacataaccagttactttgatgtagtgtgagcagta

SEQ ID NO: 3086 - DNA, 759 bp, Arabidopsis thaliana
cgcatgattcgccagccagtttgctagcaagggttatgggaatcgtaggatctttcgataatgaaatgcttaccaagggacgtgattcccacaaatacttcacaaaaaaccgaatgctctatgagcggaaccaggttagtgtttccagagaccttaaaggaacattccctggaactccaaaaactctgcaactcttaagttgaatggaagaaacatatgctaataaagaacattctctctggaaaaattgtttgttcaggaaagcaacagattggagtacctgataccaaaaagaacatcgttgagacatcggctgccaatgggagaccaaggattcacagactttgtggctcatcttcttgagataaacccaaagaagcgtccttctgcagcagaggctctgaagcacccttggctttcatacccatacgagccaatctctgcttaaacaactggtgtctttacttaagctactaaaagccgcaaaacctcagattaatggaaacctcatatgtgcaaaggttcaagcccctttggtgggtgacccttaatacaagttgtggctgtctccttcagtcaaaatgtgagctgacaagaagaaaacttttgtgaaatttgattagagtgtaacacctgtgttgtcaaacttgtgattattatcctcctagaacagactaactagtagagctcattcttgtatcatctgctgatccttagtagtttagtcatttgactatgatttataaatgtcatttatgt

SEQ ID NO: 3087 - DNA, 593 bp, Arabidopsis thaliana columbia
ccgatgtggtaatgaaaattctcatttgctgaggacgagagatgatccttcctttggttttgtttctcacatgatcatcatcattatatctcaggttctaagtggtgttgctctagtgtcttacagagctgcaaatgttcccaaggacaaagaacatccttatggttaccttttctcttctctttcctttgatgtaaatacattataataacaatgaactgaatttccccatgcatacaagggcaggtcatggtaaatttgaaacgcttggagcacttggcatctctgccatgcttttggctactggctctggtattgcctggcatgctttagaccttttatctgtatgaccaccactctctcctttctctttcttttttaattactcatctccacctccacaaccttgcttcattgtatgagaatatattgcacttcatgtttatgttttatcgatcctccattgtttgttttatttgggatataataaattcaatttacagagttcttctcccttcctttctcatttgcagattgcactgtccgcagctcctgaggtaattcatagtggacatcacacggcattgatatga

SEQ ID NO: 3088 - DNA, 529 bp, Arabidopsis thaliana columbia
ctgaacgtgatagtaactacctgtccaagagtatgacttcacgtgaatcaagaggcaaaactttctcatatttactaagagtcataaagggcctatcacgtccagcatcaaaaaagccatcaggaagagaatcttctgtgctgcaaaatgagttgctgctgtatttgcgcgataaattagtaatatcggtagatagtttatggcatttagagccttttgggttatctagatacttctcactacatcgcttcgacttgttatttggcttctttctctctgaagaagaattatagtctacagtaccaggtgcatctcctgaagagggagaagatgtcttgatctcacaactttcatagttatccctttcactcgttaattgggtttcacacattgggaattgtcagaaacaacatcagctttaagactgctctcttcctcttcagaagtaatgacagaagcctcctcgaacagtttatcattctcatccgagcagctgttatcaactgaacctctgtcagtgttctgagga

SEQ ID NO: 3089 - DNA, 819 bp, Arabidopsis thaliana
ttcttaaacggatcaggaccatcaaaaacctcagaacccacaaaaaccccatcacaacctagctgcatcatcaaagctgcatcagcaggagtcgtgatcccacctgatgcaaactgaacaaccggaaccctacccatctgcttagtctgagccacaagatcatacggtgctgaaatcttcttagcaaacgtgaacacctcatcatcatccatgttgttcaagactctaacttcacccatcaatgacctaacgttcttcacagtctctgcaatgttacctgttgcggttaaatctccttggatcctaatcatagcagcaccttctctgattctcctcaaagcttctcctgtatcacggcaaccacaaatgaacggagatcggaaattatgtttgttgatgaaatgatcatcatccgcaacagagataatctcgctctcgtcaatgtaatcaaccgcaagagattccaagatctgagcctcaacaaaatgaccaacgcgagctcgtgccatcacaggtacagacacagctcgttttacctctttgatgagaaccggatccggcatacgacgaacaccgccgcgagatcgaaccggatctgagacgattacagaacatgcgccggcggattcagcgagcttagcttggttaaccgaggaaacttcaacaatggcgccgccacgaagtacctgagctaatccgaccttaacagagaacggatggtttttcttcgcgtcggtaatggctgtgccgctgtagagagtaacagctccttgatcttgatccgtcatagcttgatccgccatttttgcgttctaggat

SEQ ID NO: 3090 - DNA, 549 bp, Arabidopsis thaliana columbia
taagctagtccttagctttatatttgtcaaaatttatattagaaaattcttaaggattccttaaggatcttaaccattggggttgcttattagtttttttatattacttgaattacatatttatttagtttaaagaataaataataataaaaagacagtttggaggggtatgtaaaaagtaatataacagaaaaataaatatcttgtctgaatcagagagagagctctcaacaaccaaagctttggactctcaggccaggaagactatgggattgggcggcgatcaatcctttgttcccgtcatggattccggccaagtccgcctcaaggagctcggctacaagcaagagctcaagcgcgatctctcgtctgtctccgccactctttcctttttcttctttgatttgtgttagctaaacaattgttagatttcagggtcttctccaatttcgccatctccttctccatcatatcggtgctcactggtatcacaccacctacaacaccggcttaagattcggcggcactgtcactctggtctacggatgg

SEQ ID NO: 3091 - DNA, 589 bp, Arabidopsis thaliana
aggaatgttggtgccaagagggacaccattgcatcgagaaagaagatcatcaggcttttgggctaggatcactgctgctacacctttccctgcaattggagttgcactatcgaaaacaagaactgttttccccttcacatcaacagtgtcatcactgtctgagtccaagaaagctaaaccggttgaaatctccggtccagtgaacagagattcagcctaaaaacgaacgaacaaaagaacaacaagttactcaaaaaagaactccaaactttgaactgttttctctaactagtaaaacgtacgaagagggtttgattattcccaagtgtgatctttgtaggaaaagaccggtcaagagtagttgcagcaacagtcaaaagccaaggagcaacattgtcaacagtgtgagcaccaggcccttcgttacccgcagcagccacaaccgtaatccctttagccaccgcgtgaaaagccgcgatataatcgagcttatcgacttccgaatcctcgggaatacatcccccgatagaaccgacaaacatcaaccccatcatgtatagcatcatcaaagcttcacatatcacagatg

SEQ ID NO: 3092 - DNA, 583 bp, Arabidopsis thaliana
ggggtaatgatgggcctggtgctcagaatattaccaatgctgctccttggctcttgactgttgctgctactactcttgaccggtcttttcctacaaagatcacacttgggaataaccaaaccctcttcgtacgttttacacccaaaaaactcaaattagttaaatagttgaacgtttggagttatttttttaacttgttgtttttttttggtatctaattaggctgaatctctgttcactggaccggagatttcaaccagtttagcattcttggattcagatcataatgttgatgtgaaggggaaaacaattcttgaattcgatagtactcatccttcttcaattgcagggagaggtgtagtagcagtcatcttagccaaaaagcctgatgatcttcttgctcgatacaactctataccgtacattttcacagattatgagattggaactcacattttacaatacatacgtactaccaggtctctctatcttgatgccaaaacactctgttacataagtccatttacatttcttaaatatatacattattgatccgtcaaacctacagatccccactgtgaga

SEQ ID NO: 3093 - DNA, 1445 bp, Arabidopsis thaliana
gggatggggcgtgtatatgctcatctgctgatatgtggaaggcttatgatgatgctatacatgatcaggtagatgttttgtcggtttctattggggcgagtattcccgaggattccgagagggtcgactttatcgcggcttttcatgcggtggctaaagggattacagttgtagctgcggcgggaaatgatgggtctggtgctcagactatttgcaatgttgctccatggctcttgactgttgctgcaactactcttgaccggtcttttcctacaaagatcacacttgggaataaccaaactttcttcgtacgtttgataccaaaaataactttgagaaaatagttcaaagttcgaccttattgtttttgctaccaaaagctcaaattaacttgttgttttttgttggtatctaatttggctgaatctttgttcactggaccggaaatttcaacgggtttagctttcttggatgatgatgttgatgtgaaggggaaaacaattcttgaattcgatagtactcatccttcttcaattgcagggagaggtgtagtagcagtcatcttagccaaaaagcctgatgatcgtcctgccccagacaattcttacattttcacagattatgagattggaactcacattttacaatacatacgtactaccaggtctctctatcttgatgccaaaacactctgttacatacttatataagttcatatacatttctggaatatatacattattgatccgtcaaaccaacagatctcccactgtgagaattagtgcggccacaacactaaccggccagcctgcaacgcctaaggttgctgcattctcatctagagggcctaactcggtttcaccagccattctcaaggttataaagcctcttatctatatttactttaaaagttgaatcctttttgtgtaaacttgttagagtatgcacatagttggtactcatagagtatcatcaacaattttttattattaattttaatgcttgtttattgtttgagattttttatgatactcataataatctctttccagtggtaagaccagtattggtatcatcaaaaaacaaaatttatttgtaaaatcgaaattacatgctagcatcggctactggagcgatagtcgagagcaaataatttttttttctctcattttccacaaaaacgcgttttttcgactaattacaagccgccacgtcattagagactggtatcagaaattatcactccagtgatacttctcaagtccaaatcagttgctttgtctattaatttaatatttttaggcttatgataccacaaaaaatctcctatgtacatggtcttatatatctggtcatgtttttactttgtagcctgatatagcagcaccgggtgttagcatactcgcggcagtgagtccgcttgatcctggtgcgttcacggattt

SEQ ID NO: 3094 - DNA, 997 bp, Arabidopsis thaliana
gatgcagctatagcgaaagcaagggtttcagtggtgattttctctgagaatttcgcttcgtccaaaggatgcctaaacgagtttttgaaggtttctaagtgccgacgtagcaagggcctagttgtggttccagttttctacggactcacaaattccatagtgaagaaacattgcttggaactgaaaaagatgtatcctgacgataaggtagacgagtggcggaacgctctatgggacatcgcagacttacgaggaggacacgtatcatctcataagcgaaggtttgtacaagtagaaccatttttatatcttgattagtgttcgaatttggtaattcagaacaaaaaaaagcagttgacttaaatgagttcccaaagaaaattgagttcttctttgcttcttttcgcaaatatagttaactaacctaatcaagaaaatatattattttgtgattgaggttttctgaagttcaaatttacttatcaaaacggcgtccttagatttacaaaacgtttggaaatattttgtgtgttcatttttaggagtcaaaccattttacaaaacgttttgaaatattagtggggaaaaaaaaaaaaacgtttcgaaatatcttgaattctgctgaacaataaagagaattagcctacttttctaaaatttagatttttttcccccttttccccttaaaagggatcttttttgtattttttttagccttcatgctttgtgaaatgaagatagataataataatatacaaatttaatattatttttgaattagatcaataaatatgtctccgaaaatgttgaaaatgtctaatccggaaaatccttttaaccatgacctcgttagttgatatattaaaatatctttaataagacgatttgtataaaaatgcagcgactccgaacttgtggaaaaaattgttgccgacgtgcgtcaaaaacttgaccgtaggggtagaattggagtctactccagattgacgaagataga

SEQ ID NO: 3095 - DNA, 518 bp, Arabidopsis thaliana
ctatacctttatacaaagatttgtatatatcatacactaaaagacatagatgatctgagaccaaacagagccaaaatacaacaaagctacttgtaggaccttctcaagatgtaccactagaagcagccatggcggatttaccagcgctaaggttggatttttcttcatgactactgtcttcgtgatgctcatcctccttcttggcatttagaaaccgcccgccacatcctcttggtcgtcttatcgcatgcaaatgccgagattcatgcaaatacggctacaaatacactctcaagatttacacaaatgaagtaagatatcatgacccataaacgattttagaaaagttttcttaccttacgtgacttgatgactttattctgagactcaagtcttgctcttgattgtctgcgccttagtataccgtggtattgctttgcgttaacaaaaacaggttcctcgactgcatcagatggtaaaggaacgccttgttgctgcactcccatcaactgtagatg

SEQ ID NO: 3096 - DNA, 591 bp, Arabidopsis thaliana
tgtgtcgtgcagttgaaaggagttgactttaaagatttggaggaatctccacttgacagagtgtaagaagcattattatttcctcttctctgctagtgggtgatgaatacatacgaagtaaacatttccattttcatgcaaaaaacaggctgacgaatgttactgaggaaggagatctttatggtgtagctgggagttctggtggttatgcagaaacaatattcagacatgcggcaaaagcactatttggacaaactattgaaggtcctctggagtttaaaactctcagaaattctgatttccgtgaagtgactcttcaagtaagttcttagccagactatgaacagttttgaaattttctctcattaatccccctcgggatttgtctcatgttcgtcatctttctcttgaagttggaaggtaaaacagtgttaaaatttgcgctgtgttacggtttccagaacctccagaatattgttcggagagtgaaaacgcgcaaatgcgattatcagtatgtagagattatggcgtgcctgcaggttcatcttctgcaaaccctagttgaaaaacgtgtcttatatgttgacttat

SEQ ID NO: 3097 - DNA, 590 bp, Arabidopsis thaliana
tgagtgaaaaaattgagatgcatatgaatcaaacacatcaacaagccaatggttcattggatcaatccatcaaaagtttggatcttggtaagagatgatcaatacctgtgcttcatcagatggatccgctggggcgagaataaccttaccatctctgatcgtcaaattatagttaggctccgcattggaatacaccttcaccgttgctcttccggcgagtccagcaagattatcaggtagacgattctcatcaggcttgtggtagacaccagaagacgattggggctgatttgagctatggtgagccacgtgcgtgactccactgtgatctccatgactttccaaataaggaattagacggctgttgataacctccgtaacggtggtgttccggtgggtaagattcgttgggtgattggtgaccaacatgactcacatgaccaaatgaaggcggtggtgcggagttcaaagtaagctctgatcggtaaggcggagcgcgtggggtcgaattgagttctgatcggtaaggcccggacttgaggagtggcgcgtaagatcaaatgagctgtgactggtaagacatgaggttg

SEQ ID NO: 3098 - DNA, 739 bp, Arabidopsis thaliana columbia
ccccgatggtttgagcagtagttcagattctatttcaaaagcagttctcattttgagaaagaaggcacctcggttgactggcaaagatcttaacccagagttttttcagaaactggaaaaaagaggttctggtgatatgccagttgaagttattcttccttctaggcaaaagaattcgtcgaactcaaatacagaggatgaatcagacgccaatacttcagtattaaggagtaggtcaaatggtttgtgcagaactgctggtgtccataccaaacaaagacattttggagattttgcaagagaaaaatgggttgatgaaagaatgaacggaggcgaatcacggttgagagcatttgatggagatcatactgaagtaatccaggcggacacatctgaaaacagagggaactggccaccattacagagacagttattgcacttggagagacaacaaacccacataatgaatatgttgcaggtactgatccgatttcaaataaatatagggattcactttaaaaagtttctctattaaaaggtagcatccttatcattgcaggatttcatgggtggttcacatgacggcatgataagtttggagaaccgtgttagaggtcttgagaggattgtagaagagatgtctagagaaatgtccatacaatcaggtacgtataactgcatgacctgcgctgttaaaacaattctacttgttgcaccatttgaagaaagatatttatta

SEQ ID NO: 3099 - DNA, 513 bp, Arabidopsis thaliana
tccccgatatacattatgtaaatcttttttaggtgtaaacacttgttaaaaataaaaagaacaatgaatatgaatggacttgcctgaaagcctttgaacttgatgacttctttaagtcgatcaacaatgaaaatctcatcatcttcatcaacatatccaatgtctcctgtgtgaagccaaccttcttcgtctattgttgctgaagtggcttctggatcgttcaagtactctgcgagccatatgttattagttgaaaagtttattcatagtcaacacttaattaattagtcgagattgcgctactatgtacttaatctttattatgttttgttttctaaaattgactccccaagatttatttactaggaattatgaagaagacatgtcacgtgtgtgaacacgagatgacgtaactaatatgcatgtcgtataaatgacatgtgatgcaaacgtaataaaatgctatataattgaaaataaaaatgatatcacacaaaaatatttttgaaaata

SEQ ID NO: 3100 - DNA, 438 bp, Arabidopsis thaliana
tattatgacgtaatgatagaaaaaaagaaggtttaatataacatgaatgatttagggtaaaaaagagagaggaataagatgttgatcacaactttgacaaagaaaaatgcgaggcacttcctcattgtgttgaacaccaacacaccttgtgtgttgccatacttcacaaatatcacaacacaccattctctctccatcttcttccgttgctccacactcacactctattctcttatccttctttttatcatcatcttcataacatttcgtcacttcaatgttcatcatcattcctacgttcccttctaacaccaatcccttattcccattcaaggccatttcatcgacccttgtgatctctatttgaccacccaccactgactccaccacgacgtctcttagtcccaatagatatctctaaacactctttctgcctct

SEQ ID NO: 3101 - DNA, 887 bp, Arabidopsis thaliana
cgactctagagcgaacatactaatcagtcaatgagtatagctcagatcgactattcagctcaacctttctatcaggctcagtctgacttggaggagaaggctgctataatcgagaggatggtgaaacgattcaagccagctccatcaccctcacttgctcttccatggacgttcaggaaagcttggaaaagcagattgaactatggttcatgtttatccgttaaggctcaagcttatccacaattccggtcatccttatcctttagggtcgagcttatgcattttggatgatgtttatccataaaaaatggaggaaaccaatcggagaccgattagtgtcccggagcgcccgtggagtaacatttatcgagttttgattggtctgggcgacctcgtgcttgttttggccgatcttgtgaccgacttaagaccctaaaaatactccatttgttcctcagacccaaaaatccactagaaaacgcctagctcgcgggagaagaccttagaaggcaaaccgcttacgggttgaaaagccttaggccacgggcgggaggctagactcttgtggttggacgactcgggcatacgaattcatttcggaaaccttggttggccgactgcgggcgtctacgtaacgcttctatttcgtttatatttatatagcgggataggggtgttacaaggtggtatgagagcatggttatgatgctacgggaaaccatagttttcaatgttttatcgagtaaatgtgtcgcaaaaagctgttaggaaattggttcagtcacttgctagagtttaggtagattaacccataggattaaccctttttgtttaggttggcttacctttgttgttagtattataggatgcttacccttttgcttgta

SEQ ID NO: 3102 - DNA, 1771 bp, Arabidopsis thaliana
cttcaagcgttcccgtcatgacgaccttatcggacttgaggcggtctttctcatgttttgccctctccctttccatctttttctcggcacggtatgagggggctgacatttcttcttcggagaagattctgggttcgaaagcaggagaggaaatagcaaggtcggtccgagagcgaagtctttttcctgatgctcggacccggtcgctcgataaagattcccaacccaagtcttgacgaacgaagctggagaagtgcgaagcgaatgtcttggagataggaagtaggtccaccgaagctgcatacaaagacaaagttggtcatttcgtgcgcatcagaaaagacataacaaaagcatgatagatatggcatgtcttcctaagttactatctaccagctcgggcagaccattccgaaacaaagaggcccgttttctcgccgaatgtgagctcgttaacgcggaagaagaagaatgatttcctccattgctcatccttttcgggaaaatcttcaaaaactctgaatcctttgcgaggtgataagaagaaggtaccctgtgttcgacctttcttaattgcgtaaagctgtagaaggtcgggcagagagagaaggaagttgtcttcttcggctagtgtaagaagacttaggatggtgcggattacgttcgggcacagctgcggtagtgcgatcccgaactcatgcatgaaatctatcaaaatgtcaggaagcgggaagtatagcccgcactccgaaaagaagatctcgaaagcacaagcatgaccaggcgagggagtctctggcgagtcagtcgcctcgggggaaatcaggtttatccgacctggaatcccgtgagctccttttagtaaggagagtctcctcgaggttgattgagacgaggtatacgtcccgaactgaccatctattgagtaaacctcgcgttggattctcttcggcggcatgataaacaccgagacttagtcttattggaaaaagaaagatctgaagggaactgttcctcgaagactcaagaacacgatgaagaactgtctcgaacacctgaagaacacagaggcgcttttcgtcgggatctgggaacctgcgcttgtttccgacagcgaaatttagtggttgacggtgaatccaagggtggagaaggaaaagaacagcggtgaaacggcgaaatcctcaaatcggcgctgaaaatctacgaaatcgataaggatttccaaccgagcaatcacccgttcaaaccctaatcgtttgtagatctaagcaattctggtgaaattcctagcagctaaataacggaattagaatagatggaggatcgagagaaattaccttgggatgacgagagtagatcgcagcagtttataagcgaaagttaactcgtttagatagggaagctgatgagcgggaaaacgaaaaccctaagactacgaaccgtcacacttttcccaagaaaagtctcgagaattgtgagattttattttcctttttggctacggaattatgcggataaggaaggaagttccgacgtgataccgcaattaccgggattgtgaattaaacgcaaaataagtctccgaattaattcacttcgaagacttggggtgcaagttgtggatgtcggatctcgtatctttactcgatccgtcatcattctttaaatgggcctgagtcaaagcctcaatgatgagtccagcattgtcaaatgtggagtgggccgaaataagcccaccagagtcaggtcaatttgaagaatcattttt

SEQ ID NO: 3103 - DNA, 598 bp, Arabidopsis thaliana
ccatgacaactatgaccaggatagaggaagggaaagagaaagggaagagcctcaagagacgagggaggagagggaaaaaaggattcagagagaaaagatacgagaagagcgtcgcagggaaagagagagggagagaaggttggatgccaaagatgctgccatggggaagaagagcaagatcaccagagacagagaccgtgacatcagtgagaaagttgctcttggaatggcatctactggaggaaaaggtggtggtgaagttatgtatgatcaacgtctgtttaaccaagacaaaggaatggactctggtttcgctgctgatgaccaatacaacttatacgacaaaggcttgttcactgcacaaccaactctttcgactttgtacaagccaaagaaggataacgatgaagaaatgtatggaaacgctgatgagcagctcgataagatcaagaatactgagaggtttaagcctgacaaagctttcacaggggcttcagagagggtgggtagtaagagagccgacctgttgagtttgagaaggaagaggacaagatctttcggtctgagaagtgggttctgatttaagaagggtaagaac

SEQ ID NO: 3104 - DNA, 1270 bp, Arabidopsis thaliana
cagctcgtccgactcctcgtctagctatcagctcatccctcgactacaaaactcatctacctcctcgcctagcggcagttcgtccattgactgcatagtccacctatctcgtcgcccagctcgtctataccttcagcagacaactcggtttgtccaattcgcctctctatccagctcgtcgcacatctacctaccttaaaattttcgtacgactcctcgtctagctgtgattcgtgtatcaacattttcgtacacaacttaaaatacaagagtagctaagttgtcccagttggccggtcaatacacataacttaaaatacaagagtaacatatttaggttcaaatgccatacaccatcctcaataacataaaacacatcataatcaccatgtagaaagtaatgccctaagcctatcaatctcgacttctttggcgagtaacctttctttaagggtttcaatttcgccttgcatgagttgaatagtttcccggatggactccaaagcatgattgcatgctagttgtccatgtcttagtgcggaatcaagtttgtgatttaccttctcaagctcctcagttaccgcctgatcccaccactgaataaggtggtttcgggactcgtactcttcatcctgcgaaagagagaagacttcataaatataattcacatgtactttgttgttccaatgaaatgaaaacacaataacttactttaagcattgggcatttgtagactctgtcgccttgcctgtaaccagttttgcacacttcaagttttacaggcttaccacaaaaacatttttctgaaccccccaatttgcatcggcattcgcctctccactattccaactagtttaggacgtggatggttgagagtaactatagggcctctacaaaatagagaaacccgtaagaaaccctagatctactaattacggcggctaaaaacccgtaagaaaccctagatctactaattacggcggctaaaaatccgtaagaaaccctatatcataccttggttgttgttgttgtcgtcggcggcggcagataatgggaaccctaatttcagttgtcgtcgccgatgttgggaaggaagaagagagaagaacgagagagaggaagaagagagaagaacgagagaagtgaaatagaagagagagggagaaagagagattgaaggagaataaataggtagaaactttgtaatgtgaacgcaataatcgtagtgtgaacgcaagtcgtggggtctatttttaaaaaaaattgtatg

SEQ ID NO: 3105 - DNA, 861 bp, Arabidopsis thaliana
agtaacgtccgccagtgtgctttaaaggaaatgcaccgataatttatctacatttaataacgccatctcgaacctcttactgcttcagtttgggatcgagcgcgtcaccagaccgtcacccatcaggttaaatgccagcaccgtcagcaggatcgccagacccgggaaggtcacgacccaccaggcgctttgctgaactgcaacacgtcggagagcatggtgccccactcaggcgttggcggctgtgccccatgccgaggaaaccaagagcagccatatcgagaatggcgttagagaaaccgagcgacgcctgaacaatcagcggcgcaaggcagttcgggaagatgttaataaacatctgacgcatcgccccggcacccgccacgcgagacgcggtgacgtaatcgcggttaacttccaccagcacggcggcgcgggttaagcgacatagtgggcaaggcaacgaaggtcagtgccagcgcggcgttaccaatcgacgggccgaaaattgccaccagcaccagcgccacgagcagacttggcagcgcagcactgatatcgaccacgcgcataatgatgttatcgaccaggccgccaaagtaaccggcgatcaggccgagaataacgcccataatcagcgataacacaactaccagacagccaaccagcagcgacaggcgcgcaccgtacatcaggcgcgacacgacatcacggcctacgtcatcggtgcccagcaagtgcgccatgctgccgccttcctgccaggctggcggggcgagcagtgcatcgcggaactgttccgccgggttatagggtgcaatccagttggcaaagatcgcgatgaacagcacgatgacgacg

SEQ ID NO: 3106 - DNA, 1067 bp, Arabidopsis thaliana
agccaacacaaaacaaagacattaagaccaaacaaaaactgcagcccaaatcattgcgctagagccaacactaaagccaaatcattgcactagagccaacacaaaacaaatagtgccgtccaacacaaagaatccagaccatacttagctttatcaccatttcataatcttcatctgtttctagaaggagagaattatagagcttaccaaagagtctcgactcatggaataggctcttgagacagaatcataagatgttgtcggcctggcagggctagtaagcgatccaacagctcttggtagtcgacattagggttttgttcttcttcctcgacctcctccccatcttcttcccctactttctcgccatcttcttccccatcgtcctcatcttcctcttcatgattagttgggttttgatggtttggtatgaactgtgtctctggtgaatcctgagcaggctgttcttgaagataaggaatctgatgttgacgagcaggaggttgttgttgctttcgacgaataagaggcggttgttgagagccagattgcgagagagaacgagcaggagtcggggtttgtgttgcttgggttggtgatttctgggctcgtgtcgccaaaggatattgggaaggaaggcttctatttgactgtgtaacggagagcatcgctgaattagggtttgatgactgagaagaacctccgacttctctcccacggtcaataggatttttatcgtggaaagcctttgccttcggcgtcgattccctaccgcgacctcgacctcttgatgatttgcctttaccaccaccagccatcgttgaaattcgagtttagaaagaaagaattccaaaccctgatttctagatctacaagccctagatctagaatttgactagggagagggtttaagagaattacaggggattgaacggaagaaggagagctcaagaggattgaaaggaagaagtatatgagagcgactgtgaaaccctagattgggttaaaggaaacgataaaatgaaagcagtcgctcgtcaagaggattgaaatgaagaaagatatga

SEQ ID NO: 3107 - DNA, 490 bp, Arabidopsis thaliana
  unsure (1)..(490): unsure at all n locations
gtaacgtccgccagtgtgctctaaagaaaatagcgtgctgccaatttgctgtctggcaccgtctgcgatggcaaggttggtattggcctggatttgtaccacggttggtggaacggcgggagattttaaggagtggctggtaaatgccgttagcaggctgagcagcgccagtgaagctttcatctggttcgtccgtgaaaataagagtcacagattcgaccttccgggctaacgattgttctgtagagaaaatgtccagaagcggataaaaaattcctgaacaacgtgggagtttcagattactggcacagagtgcggatgcggagtgaacgccttatccggcctacaaaagcacgcaaattcaatatattgcagagattgcgtaggcctgataagcgtacggantcaggcaattttgcgttcaaactcccggacaagccgggagtttggagtaggttatcccactcttgcaggaaacgctgaccgtact

SEQ ID NO: 3108 - DNA, 1170 bp, Arabidopsis thaliana
tcccggtcgagtaacaagtcgagtaacagacaggatatgaaccagctatactcgactgcacagtctgtagccagacactgggtgtggtcaagtatagtggtcgagtaacagacaggaaacgagatacctgtactcgactgcacagtctgttgccagacactgggtgtggtgataagtgtgtattttgcatgttttgagcatccatttgtcatcactttagcatcatatcatcattgttttataccatttctcatcatttgtcatcactttacatgtttaggatagatttgcatgcatgttgcatatttgcgttgatttcaggtgatttggagctgttgacgagctatctggaagaagcggacctgatcatgacaaaaccactcgacccagcggtcgagtaggagcttcaagatctcaagagaccactcgacccccaggtcgagtagaagacatcacaacttcacctcaccactcgaccacgaggtcgagcatcttcatctccatcacctgaccatcactcgatcacatcactcgaccccgaagtcgagtgtattcactttaattaccagaccactactcgacctcatcactcaacctggaagtcgagtatctccttgataataggttttaatgatcacttaaacctaaaacaccaatcatgtcgttgtagtattttaggtgtcaatccaaatgggtgtgatgcaaacagatgagatgtgatcagaagtcactaagtcaagccaagcaataacagttttggggtttctaacagtcctaagtgaacatgcagaaaacagaaacaatatctgaattactaaaatcactcgaccacaacaggctgatgccaaaagtaggatgtggtcgagtaacaggtcgagtaacagacatgatataaaacagatatactcaactgcacagtctattgccagacactgggtgtggtcgagtatgctggtcgagtaacagacacgaaacgagacaactgcactcgactgcacaatctgttgccagacattgggtgtggtcgagtaagttggtcgagtaattgcaaaaactatgaaacaggcaatgacaacgattaagtgataacgataaaacagagaaatcagatagacaagaaattcctaaggatggggtaatcgaatagagtggtatcctagcctattcggg

SEQ ID NO: 3109 - DNA, 371 bp, Arabidopsis thaliana columbia
aactgaagaagtgaagcagcagcttttgcaggatcaatgcctctcatgtcttgaagggcagctgcagccattgcttggtacacatcattttgcataccaagcaagcccgacgtatcaagtctcggctgcatccacgggtttactcccataccttgaaagtttagagattggagtcctcgatcccacataagcggtgaactcatactcatacccatatcatcttctttaaggcctgcaaccaaaattagaagatataaaagactagaaatagaaacctttcagagatttgttaaagttttgaaatttacaataccatggaaagatgggagaccaggaggccacggcgtttaagcctgagaggaaaaggagat

SEQ ID NO: 3110 - DNA, 765 bp, Arabidopsis thaliana
caaaattcttacaaggctatctcatcatcatcccctatgcatatgcaacaatcctaaatgaaacactctagactcgatcctaaatgtaatgcaactacatgaacactccttttttgtgaaatcattttctgaaatttttcaaatctttttgttttttttatgccttagatgaatgcagactcaagaatatatacaatgcaacacacacttcctgagccctcccccaaacttaaatcacacagtccactgtgcgaataaacttggaaaagagtactcaggacaaatccaatcacataaacaaaatgaagaaacaaatcacaacagatgatataatacaatggtgaagtgaggcgcttacctcagtcgaagaatgaacgtagttgctcgtcaatgactgcctgtgattgctcccaggccatagacaaaccgccttgttttgtatcagctccagcaggtgggtactcgacctcatcaggtctgtagcggtcagcaccgctctgaggatactcgacctctctccttttgctgcggccagcaccgcggtcgagtgacctcctcgagtgaatgaggcgtgatttgctgctagatcaagtgagtgtagccttccttcttctcttgtgttcccgggactcgaatgacgaatgcctagccgggacagtgagactctctgctcgctaagctcacgcctgtgctcaggatcatcaaatctcctcgatggcatcccagaggaggctgtccatgtggaatagaagtggactgttactg

SEQ ID NO: 3111 - DNA, 1260 bp, Arabidopsis thaliana
tcggcgaaatctttcaaccactcatcaacttgctctttctctctctccagaactccgccaccttcgaacgcctcgattagctgcgcattggctcgcgcctgagacaagtacatgaatcggtcgttgacctcatcaaggagcgacattttgtgcttggcagtttttatcttggcagtgaaggcttccgaaacctcccgcctcgtcgtctgaatggcccgagccacctcgctatcacgaagccctctctcctcagataacatccccttgtgacggacaatctcagaattcgcctagagattctgctcggccatccttatggcattttctctgtttacgaaggccatcctctcgacctcctccctttccaacttcgctgcggcacgttcggagagtgcctcatttttctcccgctcggcggcctgaatccgagactccgcctcggctaacttaccagccacctccatgttgctccgcatagccgaatcatacgaatgtaccatccggttcatcgaggcgacacgtggaaaaggaaaagttagatttataatgacaacgctaaaagcgaattataagtaacaaagcacatacccgcaaaaagtgagatgccgtctcggcatattttcgagattccagaagagtatctggaggaggaagtaaggtaccaacgcatcccacgagtagattggccgaggcaatgcgatcttcgaagatcgggagtactttctccgcctcggagccggatgtcttctttttcgtcttcttcttctttgacgattcatcgtcaacccgaacgcgcttacccgccgctgtgtcacttacaggtaacgccacaaccgcttcggatgcagcaacagacggctcagcttcctgagcttcagagggtgccgcatcaaccggcgcggcagcatcgggaataacattcccatctcgggacgcctcaggaggtcccgcagcgagatcagtcccgcatcaaccggcgcggcagcatctggaataacattcccatctcgggacgcctcaggagcggcccgcggagagatcagtcccgcatcaaccggcgcggcagcatcgggaataacattcccatctcgggtcgtctcaggagcagcacgcggcgagataaatcccgcatcaacaaggcgtttctcctccgccaatcgcctctccttatcctctttctttttggcgtaaacctcccacagagtaagcttcgtcgattgcatgtctacaaagaattgggtacggtgatcgaaagactcc

SEQ ID NO: 3112 - DNA, 1041 bp, Arabidopsis thaliana
ttacccatcaaacgatgccaaagaagcgcgctggtcagattgttcgagatcaagaagtttatgttatgaactcgcctacagtaatcatgctggtttaggatttacagattatactttatgaacttgcctgtagtaatctggatttggaacaaacgtttccttttcaagcagaccgtagaaacctccgaccaaagcttgtctgcagtatactttggtgttatgcttcgacgaaataccgagctgatctaagtaccttaagagaagagttcattttgtcaataatagaaaccgagtaaagatagaatgtggaatttgattctgtcttaccagaaactgttaatgaatgtctcggaaacctgacggccaccactgttaaaggctccaccagcttctccaacccaagcagcagcccaaggtccatgttcttgaattgtttggttcacattcgcgaataattccgaaattccgctcaagtaatttggatctagtatcttattcactagcttaggatcattccctgcaacactaaattcaacattgtttaggaatgctacaaagagagtctcttattgatttatttttcatatgcagcacctggaccaagattgtatatatgatgagtcaggacatcaagaacaccaggcccagagagccgatgaagctccgagtaccattgttcttcaaagaatccacctggagctacaaccaaatgcttggttctagaattcttgtaaacgttcttgattacatttttcagtacaatcaagtctttcccataaagctctacactcacgcttgcccaaatctccgcttccactaagctcattacctagtcaagaacagagctcgtgttataaggaccaacactaatatataagaatcaacatgggccaataagaaacaacataagaaaagagagatctagttctatatatcaaactcccactgagtctatagcataaccctttgagactgtgtagttcatgaaatcctgagtgttggtatgatccaatcacgtcccacgcagttccgttgagttta

SEQ ID NO: 3113 - DNA, 1524 bp, Arabidopsis thaliana
tgcatagttagattccgttaatgggaattagtctgggctagctttgcttgaggatttctatcacgggagtgaattgatctgttgttgaacctgttgtctaaggatagcttgattgtgcttgttaaccattcgaataggctaggataccactctattcgattaccccatccttaggaatttttcgtctatctgatttctctgttttatcgttatcgcttaatcgttctcattgcctgtttcttagtttttgcaattactcgactaacttactcgaccacacccagtgtctggcaatagactgtgcagtggagtacagttgtctcgttttctgtctgttactcgatcagcatactcgaccacatccagtgtctggcaatagactgtgcagtcgagtatagttgtttcatttcctgtctgttactcgacctgttactcgaccacatcctgcttctggcatcagcttgttgtggtcgagtgattttagtaattctgttattgtttctgttttctgcatgttcgccatgttcgcttaggattgttagaaatctcaaaactgttattggttggcttgacttagtgacttctgatcacatcttgattgttagcatcacacccatttggattgacaaccttcagtactacaacgacatgatagtgctttaggattaattgatcttaaaaacctattatcaaaaacactaaacaagcttcatcttgcttctcaaagctttgatggtttagccaaagtctgtatgagtctttggttgtgtatcttctaacaaggaaacactacttaggctttaaagatctgaatgttgttcttgtttttatactcaatcatacacatgacatatatatttgactccctaacattaaacaagattcatcttgcttctcaaagctttgatggtgtagccgaattccatatgagtatttggtttgtatcttataacaagaaaacactacttaggcttttaaggtcgagttgcggctctagttcttatactcaatcatactgataagtgtgtattttgcatgttttgagaatccatttgtcatcactttagcatcatatcatcactgttttataccatttctcatcatttgtcatcactttgcatgtttaggatagttttgcatgcatgttgcatatttgtgttgttttcaggtgattcggagctgttgacgagctaattggaagaagcggacctgatcatgtaaaaccactcgactcccatgtcgagtagacgcttcacaacctcagaagaccactcgaccccctggtcgagtagaggacatcacaaattcacctcaccactcgaccacgaggtcgagtgtcttcatctccatcacctgaccatcactcgatcacctcactcgaccccgaggtcgagtgtcttcaccaccattaccagacaaccactcgatctcaccactctaccttgaaatcgagtatcaccatcaccaccactcggctacatactcgattgcgagcttcagagtcttcttcaggggatcattctg

SEQ ID NO: 3114 - DNA, 1500 bp, Arabidopsis thaliana
ctagaggatgggaaggctttcatcctttcgtttatttctctttgaacttggtgcctgagaaggcttttatcctttgttcggttaagtacttttgatgcctgggaaggcttttatccattttaacaagtactttttgtcttttgttcgagtgttgacacttcgtcgattttggtgtatgatcacctcattttgcttatgttccggataataattggaactgttttcagtccaagttatttcggattatggtatgttcttcgtaggttcaaacttgaataagtttgagtgattttatctcgagaacctgttgaagtgaggtcacacaggggacctgccagattttgggaactggacttgtggtatcgccagatcgcgaatgaaaccttcgtttcttccttgtttagtatgttatgtgttgatagtgaaggaaggagttaaatatggttgtcgtaggtgagctcggatgatgtcgaagtgatgtatttttataggtaaggttcacttgtcgactttttggaagcgagatcacaaagtggatccgtcaacattcgggtgttgggctttaggtatcgtaagattacgaatgagttttaaatggtagtggaaacgattgttttgcgaaacatgatattgggtatcaaaattttcttttattcttatctcgaaattgttaagacgatctaacgtctggtcatctagaggagacctgcttggtatcgaaggatggttgaactgtcaggtgagcagcttacctggttaggggtttaagccttatcgtagttcgattgaagtggtggctgcgctcttgggtggagctgcctacgtagcctgctaagggatcaagccttatcgtagttcgattgaagtggtggctgcgctctggggaggagctgcctacgtaccctgccaagggatcaagccttatcgtagttcgattgtttttgagtacctattcgtggtatttcttgagatgcatggcattccaaggccgtaacttaggtactccgttgataacttttttgagcttatagacgccgtcacgtaccacctcggtgattcgatagggaccttcctagttagtccccagttttccggcgtttactctctcgtgttgctgaacactttttgtagaacgagctctcccacttcgaatctccgaattttgatattaaagttatagtagcgggcggcacgttgttgatagttttgaactcggatcattgcctgatctctgcgttcatcgatgaagtccaagttgtcctgtaacatttgcttgttcaggtccaagttagcaggactggcggtccttctcacacttggtactattgtttcgacagggattactgcctctaaaccataggcgagagagaacggtgtttcttgcgttgatttgcgaggtgtagttcggtaggcccagagaactccgtgtagtacgtcggaccatttgatttttttagaatcaagtcttttcttgatgttgctaagtatagctttgttggc

SEQ ID NO: 3115 - DNA, 987 bp, Arabidopsis thaliana
  unsure (1)..(987): unsure at all n locations
ggtctattattatcattgaaataaatattgttaatttgttttcaaaatttgtggtttttagttatagaaatgttatttaaaaaaacttagatctttcacatagttttttataactaaagtggagtttttaagatatatattttaaattagtggctattttattttttttgtatgaaaaaaaataataaaaaaaattggacccttggacagaacatctaagccgcaataatactaatttgataaaaccaaaattatgtataaataatagtactaatatgagttgatttgatattttaatgaaaatcagattgttttcctaacgacaaaagccgtttattaaacagtacagttagttgacgtcatctcatcgtagtttttacttttggtcttaaaaaagaaagaaagaagtaagtaaaatgacgagaataccctgcggatccgggagagaccatggtgccttcggagatgagaaaaccgccgggagtggtccgttgagcataatactctgccaacgccgcgtttggtactccgttcaacgccctgcaccgcgtcatcggcgccagaaccactctgaaaacgcaaacgcgatatgagactacacgtcatacaaaaaccactcaagatcattaatctagctgaaactcaccgatgagagagatcgaatcttcccatcttgtaagaagaaaacagagtctcgttagagttcccttgtgccgccgtcatgtctccgccgatctggaagaaggagaagtaaaagtcagatctgagaaatcaacggtcaatacaaaaatattgagtagtagttagttggatcttcttcattacataaaaggacaaaacacaaactacaaagtaacttaagtttgtgatgagtttaccggttttgttattcggaaatagaaaattcgagtggatgtgttgttgttgtgtggtcgtggaaatggaatttgctanattttataccaaaaaaggttaggttgatggatg

SEQ ID NO: 3116 - DNA, 1207 bp, Arabidopsis thaliana columbia
tattaatttgtttaataaagataactatgaaaaaggtttaattgtgattcaattattctgttaaaccccaattaataaatagatttaattagacaaaccaatttaaccccatttaacctttttcccctaaatgagtttaaatattttaattttcttatacatacttatttattggatatgggttcaatgcttaaattaacatcatttatacataagttatgagtattcaaattaactttagaaacgtggatgatctttcgtaatcaatggtcaaattttaaaggttttttgcgtttacttcttctctagattctttgattcttcaccgtttcttgtgatttcaggctctaatctcattagaatttcaccctctatcttctcaaagtctccatttcatccatctgcaatatggctgaacagaaaagaaggcaaggaagaacgtcggaccaccttctttctccgccgctcatccttgctggagcatctccaccaccgccggcgctcgtcctccaccactagaatcatcagctgcagctcctcaacctccaattttccgatttccatggccaaaattgcctagtgagtggattccttctcaaagagtttgggaaagggatatcaacaaagaattcattaaaagtgactatatcaatcgccctttttctccagattgagatgattatgatactatgttctataatgcctagatgaatgtggaaattttgcctactcggattacggatttcggtttgatgcagcgtttgaagatagagaaatctgttttaggattgctaaacggcataagtttgggaaccatctgttttaggcagtacgatttgtatctttagctagttaggcacttcatggcttctgttagggtctactatgtaaatgacaggaagcgcgtggattccttctcaaagagtttgggaaagggatatcaacaaagaattcattaaaagtgactatatcaatcgccctttttctagattgagatgattatgatactatgttttataatacctagatcaacctccgatttccgatttccatggccaaaattgcctagtgagtggattctttctcaaagagtttgggacagggatatcgacaaagaattcattaaaagtgactatatcaatcgcccctttttctccagattgagatgattatgatactatgttctataatgcctagatgaatgtgg

SEQ ID NO: 3117 - DNA, 794 bp, Arabidopsis thaliana columbia
tcttatgcaatcgatctttcctcttcgatttcctcttaaatcgatatttcttcttcgatttccaactctatctctctgatttcaaaccatagcagctctcttcgatttcaaaaccctagcttgtccttcgatttcttcgatttcttcgatttctttgatttcttcaatttcaacctccgtctcatctcgatctctccttcacacgatgtttgggcgaggaaaaaagaggcgtaccactcctaaccttgatgagagagccaccggatccacggctggtggacaacctagttctcttctggctcagtatgacttcacgctggcagcacaacggcctactcagctatagacgcctacaacagaagaccccgttcctccattacagtcatcgacagctcatgtccggaactacccgccgcctcaacaattattctagcactccggcagtcgacaacctgaagtgcaaaggactgcttccgtagaagtctagaacaatcccccgactcaagcgacaacgactccggagcttgtccctccgactcctcagcaagaccctccgccttctccagttcaagagtctcgggctcacagtcacccatcctctcaaggcaacaacttcgaagaatatccacctctgtcgccggatctctaggaggacacacttcagtctctaaatgatctgcttatgttgacggagagggataagttcgttactatcctctcttccattcctcgaccgaatacgacatggaatgatcttcttcttctcttgtttctgatcccatcggggatcctct

SEQ ID NO: 3118 - DNA, 1116 bp, Arabidopsis thaliana
cggatgctgaaggtgaagtctgggctcatgttacaatgaacatctccgatcgttgaatcttagtacgatctgttgaattcgaacctgccacagtcccagtcatggttaggtttgttttcgctaaactgaagaaattctgctttagatgtgggtcattgctgcatgatgaattagcttgtaaccatcaaagcattgtgctccagttgaacgttgaagcaactagacaagctatagaaccgatgcaaggcattaatcaaggggatgacgaacctatgcaggaaggttctagttcctcaacacatgttgctggccctattcctatagttgttagagaaactggtgaagcatctgagactcttacaattcgcaccagagcagctaatttattgactgctggtaatgatgaatctatgcaagaaggagaagagaatcccattcaaacccagccaacacttcactcagaagaaatgggaccgacacagttgcaacctcaagaagagcttgatgctcttagaaacacagcagatagtattcgcaaaaggaaaggggataacctttttgatgaagatcaagctgcaacaagttgccaaaggacgcaagatccaatactcactcaaggggaggtggcaacccctaaaccaccatcgccaaaatgaagatattacactggaattgtcagggacttaagaggaaccctctgacaattccgtatttaaaagacataaggcagtcttctaaacctgatgtagtgttcctcatagaaactaagaacggtcaagaatatgtacaaagtctatgtaatgatcttggatatgcccaccattttgttgtgaatccggaagggcttagcggtggtatggcagttttttggaatgatgaggttaagctggattttctatcatcacctactctccattatactgatatgtatatatcggaatccggttcacctacttttcgtcttacttatatctatggtaatccagaatataaagagcgaaatgccgtgtggaagaaaatgatttttttggtagaagcaggactctatcaaagtaaaccacgtctggttcttggtgactttaatgacatcaagactaatgaagaaaaatcaggcgg

SEQ ID NO: 3119 - DNA, 793 bp, Arabidopsis thaliana
ccatatctgaaatactatctaaagctaatgaagtgaaagaatctatcaggaaagttctgacctctatgatgggtctcttaaccaacgtgctcatatcgaacttcatagtaagatcgccaacattcagccctatccgtccttctcaaacgtctataatcgctctagctgtgtgcaagaaaggtctcccaaagattaatggatccttaggttctttctcataagaaaagaccacaaagtctgtagcaatcatgctcttctcaatcataacaggaacattgctaagaatcccatcttgaattcgggtagaacgatctgccagcacaagagtgataaaggtaggctcaagattggaatacccaagacgcatagcaagcgagcgaggcatcagattcacactagaaccgggatcacataaggctcttgggaaagaatcatagttgatggcgacacttagtacaaaggttccgaggtcaggtaacttccttggaagttgtccatgaatgatatcgctaccctgctctgaaatcttcataacactgtattcttttgtcaaattcttagtgaccatcgtcttgacataccttcgtattgctggagagagatgaatatcttaaactagaggcatctcaaaattcagcttgtcaatcatagccttgcatctgacatcatctaaggctagtcttgactttttaggactcttggggaaaggaattcgccgggtttggtgacttagtttcagctggatgttgcacattgtctgaacgagctgggtgtcgatcgataggaggtgggt

SEQ ID NO: 3120 - DNA, 573 bp, Arabidopsis thaliana columbia
tagaggttaggttacaacaacttgacaaaccgaaaggattttcattttggcattggtaggtaatctagcttttctaactgagcttggaatgtttcgatgtaggtattgtgtaaaaaccaaccgtccgagttcgtttcatactttcattactgccgatctttacggtttgatgacaaacctgattactcttacctcaagaggcttttccgtgacttgtttatccgagaaggttcttatcttaacatcattattccgagaaattttattcgcttactgtttcaagccactctcatcttatctttttcatattgttgaaactcttacaggttatcaattcgattatgtatttgactggacagtcttaaagtatcctcaaatcggatccagctctggttctagttcacgaacaagggtgattattaaaaatcttatacttgtgtttttaccctcatggtttttgagtttctctgtacttacgtaaatgtaaatctttggatttccagcatcatacaacagcggaaacccggatcaacgcagatcctattgaaagacaagagaggatcctaggtaaaa

SEQ ID NO: 3121 - DNA, 662 bp, Arabidopsis thaliana columbia
gcttattgctggagatgtataccgacctgctgctatcgatcaacttgtcattttaggtgaacaggtattgaaatggcttaacctctgtgtgaatatgtgatgatatttgattccggaaatcaatattccctgatgccctctttgtgtcaggttggtgtgccggtttatacagcagggactgatgtaaaacctgcagatatagctaagcaaggtctaaaagaagctaaaaagaacaatgttgatgtagttattatggatactgcagggaggcttcaggtaatgtttcgtctttaagagtcattgtatcataaatctattgcagcttcagtcatgaaattgcctctttgtgacagatagataaaggcatgatggacgaattaaaagacgtgaagaaatttctgaatccaacagaagtgttactagttgttgatgccatgactggacaagaagctgcaggtacgctgtttctattttacctttgtcaagaagattcgagacatcctgaaaatggattagatcaaaaccgtagctgtatcggtcatatactaagatgagctcttgtacttcctacagcactggtgacgacattcaatgtagagatacgaattcaggagccattttgacaagctagatggtgatctagaggtggtgctctttgagtg

SEQ ID NO: 3122 - DNA, 598 bp, Arabidopsis thaliana columbia
aacgggctcttttgtctgcagaaacggctgcaagttataagaattgaaatcttcttttctttcctcttcacggcgctgctcgagtccttgctcataccgtgagatgaactccctaagagacgttagagaattaagggaagtgccgtaaaacggatcaaaggtgccgtctacatggattccaccaaagaaactggctcttagatatgccggtacccatttctcgcgcttttcatatatttctctaagccacatgttatccctaaggccgtatttgtttacaagagaactccacatggtatcaaactcgaccgttgtctgagactggtataaacatttctcgtactcgtacttgaattcattcgggaacgacctgagattttctcgttctttggaccttatttgccacgctgagaaccggtgatgagtccgggaaagacttgagccacagcttgttggataggcaagtcttgatcagctaccatagatctcggacgacggcctgacattgcacgaagccatgtctgaaacaaccatgagaaagcatctttagattcatcagcaactaaggcaccccgagaagcacgggttgctatgatga

SEQ ID NO: 3123 - DNA, 650 bp, Arabidopsis thaliana columbia
tttttaattcataattgaatataaggtaggagaaatctaaaaaaataccgtaaatctttttcccaaaataaagttttcaagaagtttatacattgtagtattttgtggggcgaaaagtttgttttaatttgtagaggtatttttaggtaaggattgtatataatcaacccaaaggaaaagacaaaccttgaaggaagtgggagagagtgtcaaagttggaggcaaggagagaatgaaggtcttgtcctgcccaaacagggcagacaaagatagagataagcacgcaactaactcctcccattatcactgtcgatagtctcttatgcgccaaatccaatatctcgtcctctctaaaccccgaaactgatatcagtgcgaacgtcaatatgaatatcaataccccataatcatatcttgccttcacccgcgggaagaacctcacgaacgtcgacaatgcagctgcatatatatatatattgttagtcttcgctctttaattcgagacaaatgtatgcatatatgcatgttttctagactcttcgctctagccccgtccgaaaaggttatatggaccaaacatcaaaattcatatagacaaatagaaaatatgagtgtatgagggtactaggacaagcaagatggcagagatg

SEQ ID NO: 3124 - DNA, 557 bp, Arabidopsis thaliana columbia
aactgcaagctctgtttcttcttgatgttctttaaacccatttgctttctcacattctctacatcttcccatctacctgtagttgcgaacatatttgaggacatgacataaacagaatcatcctctggttctagcttcgagagattttccgctgcttttcttccgcggtctaaattcccgtggattttgcaggaagctatcatactacgccacacgaggtcgtttggtttcattggcatcttagatatcaaggtttcagcttcagctaacctccctgatcttccaagaagatcaattacacagatgctatgttcaatcgccggttctgatccaaaatctctagcaatcatgtcgtaatacgcaaggccttctgtctactaatcccccagtggctgcatgctgtaagaagagagactgatgtgacatggcccggcttgatttcatttcaagcatctcatggaaagtcgcacaaacttcctcgaaatacccgtgtcgttccaaagctgatactagtatgttccctgaggggagtgatcgattgactgatggaggaagca

SEQ ID NO: 3125 - DNA, 428 bp, Arabidopsis thaliana
tggagagcggaggatacaacttaacatatgagactccagatggtttagtttccgtgcagacaaaagtgttgtaatgacggtgccatctcatgttgcaagtggtctcttgcgccctctttctgtaagtttctcattttgcgaactaggaatttgctcacaattcatagattcgacaaatatgggttcttaaatcgtgtgctgcaactgttatcttctcaggaatctgctgcaaatgcactctcaaaactatattacccaccagttgcagcagtatctatctcgtacccgagagaagcaatccgaacagaatgtttgatagatggtgaactaaagggttatgggcaattgcatccacgcacgcaaggagttgaaacattaggtatatatcttgtagttataatcgtcaattatgtcaaaatgttcataga

SEQ ID NO: 3126 - DNA, 593 bp, Arabidopsis thaliana
tcccgattgcttaaggaacatgggattttgatgcctttgtctgagatgttgaaggttagtgatggtcagtttaaccattggcttttagaacttcgtcttaggtctgctgaaagaagatgatgataaacaacaacgttctttttgatgttctttttacttgagatttgggacatgtcaagacacttcacatgagttttgtatatagtttctgtttcaatgattaggctgagtacatgtttcgttagatcatgtaatgtgtaacttgagatcgtgaaagaagatgatgatcaacaacaacaatgtaagctttttgatgttctttgttcttggtacttgagatttgagagatgaaaattgcagaagttttgtactttgggacatgctaagacactttcatatgagcttgtatatagttttttgtttcaatatgttagatcatgaaggtgtaattaagaatctagttttctttttttggtaaggtaattaagaacgatgttgatgaggaatgaaagttgctttaaagtttacatgagaaagatggtaattgactgcaaaagtgatgatttgcccaagtacgtgggttcagtagatga

SEQ ID NO: 3127 - DNA, 541 bp, Arabidopsis thaliana
tgcttaaggcttcagcttatattttaggagccacaggttcgagtataatgtataaagccgttcttgaagacggtagggttttcgcggttcgtcgactcggtgaaaacggtttatctcagcgccggtttaaggattttgagccgcacattcgagccattgggaaattggttcacccgaatttggttagactttgtgggttctattggggtaccgacgagaaactagtcatttacgattttgtccctaacggcagcctcgtcaacccccgttaccgtgagtctctttaaccaggaggcgtgctataacattgtttgctatcttacacatgtgtgtatatgagtttgctgaattttgtgtgtccttgggcaggaaaaggaggagggtcttcttcaccgtatcacctaccgtgggaaactcggctcaagatagcaaagggcattgcacgtgggctggcttatctccacgagaagaagcatgtgcatggaaacttgaagcctagcaacatacttttgggccatgacatggaacccaaaataggcga

SEQ ID NO: 3128 - DNA, 799 bp, Arabidopsis thaliana
gtatccattatctttcatcatattcctgactctaactacgtcgtcccacattgcttctgttgcatataggtttgacatcaatacatacagccctccattcttgtaatccagcataaacattttcctagctacatattccccaacctccaactctctgtgaataatgcacgcgctaagtagagcaccccatactgcagaatccggctttatatccatcttccaaattaaatacaatgcctcagtaaataaacatgctcttcccaacaagccaaccataagtgcataatgctgtaaagttggagatattccaaactctttgatcattgctctgaaacatatttttccttcatcgacaaagcctccatggttacatgcagacagaacccccaaaaaggtgatctcgtcaggtttcaaccccttctctcgcatttccaagtaacaagaaagagctcgatgttgtaaccccgataagctgtatcctgatatcattgagttccatgttgctgtacacggagcttttatactcttgaacacactttccgcttgtacttcgtttccacatttggcatacatatctatcagagcagtgcaaacaaagttctcattttcaaaattgttcctaagagtatagccatgaagctccttccccaaattcaagcaacaaagctgggaacagccagcaagcaaactggctatcgtaatggcatccggcaaaagtccaccagttaacatcatctgatggaacacctcaaaagctgtacttgcccttccagactgtacacacccggatatcactgag

SEQ ID NO: 3129 - DNA, 296 bp, Arabidopsis thaliana
atccctgttatattctgtttcttagcatggcagttagttaactactgacaactcaaaactgcgaagatctcgatatggagatgttattttggggtaattttggagaatgttcagtagaaaattgttgtcactgtgagtcttggcttcttgctacttgcattgtcttcaggagataattatctttgtcgctgtacttctggaagatcatttctcagttaatgattcactcgaagacattacatggaccagagggttagatactttacaaataccggaaggttttaaaagttaaatat

SEQ ID NO: 3130 - DNA, 500 bp, Arabidopsis thaliana
gcactatccaggtactacaagagggacaagaccactcccccccctgttagtcttattaaatgctgaacaacattaatataatgagcgaacaacatagataacagaaacataaccaaatgtttcgagtaggcttatgcactttgattgtcaaagtgacatgatatatgaaggtgaatattcttcttcatctggacttacatattgttccaattctatttgacgtcttggaaggtattcacctgccccgatgtagttagagacataacgacgatcgttatcttgtgatgcttctagcttgtgcaatgttcttttccaactctcttcgtctttatcatatagaaatgaaccgagtactttcagggacagaggaagacgtccagcaaagtggacagcacgaatggagaatagttcaaaaccaataagagggtaagttttcttgaaagcgtatagagagaagagttgtagagcttcctcatatctcagacactccatctcgtatt

SEQ ID NO: 3131 - DNA, 602 bp, Arabidopsis thaliana
ttctcttcactgatcgtgtttgttattgtgtgcttagaaagctgccaatgttagaggtattttcctagacttgtctgaagtggaagacgaaacgagcttagaccgcgaccacttcataaatatgggaaatctccggtatctcaagttctacaattcccattgtccacaggaatgtaaaaccaacaataaaatcaacatccctgataaacttaagctaccattgaaagaagttcgatgcctccactggctgaaattcccattggagacacttccaaacgatttcaacccaattaatcttgtcgaccttaagctgccctacagtgaaatggaacaactttgggagggtgacaaggtgtgtctctgaataatctgttgattgcttttgtgaatggttaatttacctggataggtttgtttgactggtggctaaactttgttttcttctttttctgtaataggacacaccatgcttaaggtgggtcgatctcaatcactcaagtaagttgtgcagcttgtcagggttacaaaagctgaaaagcttcaaaggttgaaccttgaaggttgacaacactgaaagccgttcacatgatatgaaaaaatga

SEQ ID NO: 3132 - DNA, 561 bp, Arabidopsis thaliana
taacacaaaccaaaggtttagaaaatatcaaatgtagactatggggatcttcaagtcggctattcttcgtgacgtaacccaccatgtacgagaggacttcctcctgtgtaaataaatatatgattataatccttaaactcagtagttaagtcgagaccaatcttttttttatagtttatagcgaagaataaaagtcgacaatgtttaaaagataactatgtactcacagtattatccacgagtgaccgacgaaggttcgaataacaaccatcgcatacgacagtaagaggtgcaaaggccgttatttcttcgcctgcgctatttttgtatgtcactcctttgaccactccttcttcttcaattaaagacttcactgttccttcttctaattgaacactgccaaggttcattgcatttatattaagaagatgaaatagaaatctagtatataagagtcgtaagattattttactcataagttataaaaagtattacgaaagaaaagaagtaaaatatgtacgtacttgctaagagaagctgctttttggcgtaaacgttgta

SEQ ID NO: 3133 - DNA, 577 bp, Arabidopsis thaliana columbia
tctaagctatttttatcccttagatatagtataagattttgacaggattgagattttatgagaaaagcacctggtaagcatttaagaaactttctcgcgattgaagcaaattttggatagttgtcttcaattcactctgcttgttttccagcaaactatagtcgttctgaagataactcacctgcaaaatcaattagaaactttcactaactccatgtgaaatagattcgcagaagagaagaatcttccaaacctttctctcgagtgcctcctgtgtttctctagaagaagctaaatcagcttgaagctcctgcactttcctgatgcagtcctcctccgtttgcttctgtttctgtagcgaaacaccaaacaaaatgatcaccatctacgaatcagaaacgaaacaaaaacgagagctatgaacagtaacattgatcgaagaacctgattcgcaagagtaatgtgatctgtgactgatcgctccctttcctgcaaaaacgccggtagtaaagtggaagaagacgaagaagaagaagagagaaactggtggagcgaagaagatcacaatccatagatg

SEQ ID NO: 3134 - DNA, 857 bp, Arabidopsis thaliana
ccccactcatgtcataataatatttactaattaattatgtaagtatgtacatattcatatatcactgagtatatatatcctactcatctctgcctttttctctcgttcccaactccttacgcgctctctctctatctctttagctttctctttctagcggcgaagcatgggttatccggtggggtacactgagctcctcctcccaagaatcttccttcacttactctctctcttaggcttaatacgaacactcatagacacgggttttcggatattgggtctacccgactttctcgaatccgacccggtttcatcgtcatcgtcatggctggaacaccgtatatgtcacggcggcgcatcatcaccaagaaagctcatttttcttccagtggcggcgaggctagctggagaaatcttgcccgtcatcagattctcggagctaactcgacccggattcggatccggatccgattgctgcgcggtgtgcctccacgagttcgagaacgatgacgagatccgacggctgacgaattgtcaacacatatttcaccggagctgtttagaccgttggatgatgggttataatcagatgacgtgtccactttgtagaacgccgtttatttctgatgagttacaagttgcttttaaccaacgagtttggtctgaatctgaacttctcgcagaatcaaattagaatctctcttgtttgggtggaattagtttctactaatgagataattaatttctatcttattattttttttttgtttaatctttagctgagtggttgatatatgtaaatataaaattataggtgttgatgcttagtaaattagaagaatgatatttatattatc

SEQ ID NO: 3135 - DNA, 464 bp, Arabidopsis thaliana
catgattgcatcattagatagacatttctcgcttctatatggtcttctgaaaaaacacatcacagataatgtgggctataaggtatattgttcctccaatgcctttgttaatcaccactgtaattctggattaacatgatctccttgctgttgcaggttattattttctgtacaactgctatggttacaagattggtggctgatctgcttggtaagctaagccttaacgtcagagagatccattctagaaaaccgcagagttacagaaccagagtttctgatgagttccgcaagtccaagagtattatccttgtgacatctgatgtatctgctcgtggtgttgattacctgatgtgtccttagtcgtacaggtaaatcatgtagtagttttcaatcatggaattgaacagtatctacaaagttgattggttttttttaccgaagttgttgttgtgtgtatgttg

SEQ ID NO: 3136 - DNA, 613 bp, Arabidopsis thaliana
ctagtaacggccgcggccgccagtgtgctctaaagcgaagttcatgaggccctgccacacccaatcataacaacactccagattactgagaagcgcattgcacccgctcagcgccaggaggaacgtcatcgtcatcctcgtccatgctggccgccccgtgagcgcgtgcttgtgagcgctcgctgttatcaacctcctccaaatcaaagtcttccaccatagcgtccgcaggaggcctgtttgtctcctgtcggggaggcagaacctgctccaaaagttcgaggtttctaagttcgtggttttcggggaacttgacgtcgaactggatgtagaggttaccgtgatcgtggtggcggtacgacggcataccctggcccttgataaccttgatgacacctataattgcgttacgttggtaccacgagagtttcgcgcggacggcgaagaagaaaaggacttaccaggtgtgataacctcgccaggggcgattgttacagacaaccaccggtcgtcaaggtgctcaatgttgattgttccgcagcaagcgcagtaaggaggtcaatttcggcatggtagaaaaggtcgtcatccttgcgctggaatcgggggtggg

SEQ ID NO: 3137 - DNA, 1060 bp, Arabidopsis thaliana columbia
catttacacacagtagacatacattttcaaatcaagaaattacaaatccacaccaatcgattatcaaaagaaacaaacgagggattaaatttataaattaccagaggttaaaaaacagagctaaacggtgtcgtttggatgaggagcggcggagagagcgagaggacggtgatgggattcgtcgtcgtcgtcgtcgtcgtcgtcatgagaggtggagagattgacgcaggcgcacgttcgagggaggtgaagaaagcggatattacggttgcgctgatccagctagcggcgtggtcgatcttttccatggaagtcgtcgtgctaacgttggaggtgatgctgatgcttttgtccatggcttctggatccgattagcgtttcagaagacgaccaagaaaagaagatcgtgggatggatcaatatattacaggaataacgattttgaaccgagaaaatgtaaatataagtatataaaacgattattgtttgtcagaaatagcgcatctggtgtagtggtatcatagtaccctcccacggtactgaccagggttcgattccctggatgcgcaactgtgggaatgttatatttgttttttcattttagtgttatattttctttttgtaaatcaaccattgcaatcttgtttcatttgtactatgttattgtaatagcgacatataaggttttagctatgataagcataaaatctgtcttcatttctttttcgtttagtgatcatgctgataaagagttttttactatgtgtttgactgcataagattgaaatcatcaactaatgtgaaatattgtagaagacgcatttataataatactatacagaactaaaaataaccataacactttatttattttctgatataacgattacacaggatataatggctatattatatatgtcaatgaaataagatgataataaataaggatttattatgtcttgttattagacactaatcctttcactagcgggtttccgaagggtattttacactgagctcatcctcaaacaaaaagagtcagaatggaggatacatcaca

SEQ ID NO: 3138 - DNA, 580 bp, Arabidopsis thaliana
tgacactgatgatgtctgagtgatcttcgattttcccactcttcaaatgatcatcaatcacaagttcaaagaaattggtgagtttggaaaaggctttcatcaccgtggaatgctgaccggagatccgatctatgatccaccctgcaggtaagaagtcagcaaacgccagggagccgaggttggtctccgattcaagcaccaactcttccactgtctccatatcgacaaaatcgcaaaaattttgtccaaaagaaagtctacaaatgatacttgccgcgaaggtaaaaatgaccttcctcaaattaactgatgaagttggtgtctcaagagcagattttgataccttccggaccaacaattggctctcgtcctctctaatatacctgaaagatttgagcttcttctggctaaagagctcggaaaccgcaattttcctcatctctcgccaattctcaccatacggagcaaaaccaatatctttaaagttgtaagtaaacaacccgctccccaccgtcttaggtcggctacaagtctcaagatcgtgagtcttgagcacttcctcagctccttctttggaaga

SEQ ID NO: 3139 - DNA, 918 bp, Arabidopsis thaliana
ccatcgatatctccgatccggtcgtttcacactacgaccgtctacagtctactaacgatatacctgtccggtccatggtggtctgtaaatctttcggcttatcgatctatccatacgatccgaatgcttccattatcacactcaagggtctatgatctcacccatcggttactcataggctagcccatgaagtccttcttctgtcagtctcagctttgctcgcgtgtccaacatccgttttgtccatcgaatctcaccgtagactttcacgttggttatccgtcgagtcaccctttggtcttaccgatctccgatcggttttaccatggcagaggagatcgatacatgaaggtagccgcgatattgatcctatgtggtgaatcacgttccttacccattcttggtgctttctccctttaccggtaagattgcatccatgggcgacctttgggtatgtttggatgcacttacccttgtgcttcctcgaacacttttctcgatccatcccatccgatgatgggtctgtctgacccgttccgtctgatgatcggcctgtcccatccgatccgtccgacgatcagtctgtctgatccaatccgtctggccgatccgattagtccgatgatcggtctggccgatccgatccgtctggccgatccgatccgacgatcggtctaccagatctgatttgtctctaagacgaacggtctaccctcccatcctctacactccatcgaaccgttggaccgggaggtagcatgcgcatcagttcggttgagttatactcgccgagccgcaccccctctccgaccaacaacttcgggatgtgttgggattgttttgagaatgttttgtggtgtatggatgatgtgtgagatgccttgggcgtcctcccttatataggggagaatggatgct

SEQ ID NO: 3140 - DNA, 538 bp, Arabidopsis thaliana
atccctgagaatattgtgccaatgacatctctaaaagaaaaaaaaaaaggtcactttctttctcacactttaaggatacaacaaacaatctcaatttctttttgttatctttttctttctttctaaagcaaacatttttggaaaataacaaaagaataaatagcagagagtctgtaacgagaagaaggacgaatatctctctctctctttctctctgcttccttctcgatttctgattcgctcaccggccgaggaatcagatatggcgacgagaacggaatcgaagaagcagattccgccgtacatgaaagcagtctcaggctcactaggcggagtggtcgaggcttgttgtctccaaccaatcgacgtaatcaaaacgcgtctccagctagatcgcgtcggcgcttacaaaggaatcgctcactgtggttcgaaggtggttcgcaccgaaggagttcgtgctctctggaaaggcttaacaccgttcgctactcatctcacgcttaagtacacgcttcggatgggatcaacgccatgt

SEQ ID NO: 3141 - DNA, 1010 bp, Arabidopsis thaliana
agcttgtcaactccgcaacctgttgcactctctctccccgtgctcttttacagcaaccaatgcgacctgaagatcgctgatctctttctgaagatcagcttctcgactattgagcctcttgacctcgttattcaacgagctcatctccgccttatgaatctcggcagcatctctcaatgcagccatctccttcatgtctttggcatagatggctttcgcctggtcagcgcacttcttccggttatcgaaggcctctctgtcggcgagcttcagcttcaacttgcgatcatatgtcgcaatcagatcgttggccagggcggcggtctggaaaaagaatcatggttaaatccaaaatacaaagatattaggcaacaggaagacatgtaactagcgcgtacctcaagtgatgatctggcaaacttctgatatccctcttttagaaccagatcatcaggattagggaaatccttcgtcccggggagcatcaagttgcgccaaacgtggctggcggcctcttgatctctcacgaggaatttctcaccagaatacttgaacgtaaactggtcagaattaagagtctcgcctcgcgacaggcgaaacgtctttggagcaacggcctcatctaaaccgccttcagaagccgacctcttcttggattggttagccactcctttccctttctcctcacgggacctcctggaaatcccgggctcagcaacggtttcgtccttgtctcgatcaaggatagttaggcccgtgttgacctcttcgcctgctggaggggcggcataaacgacgacggagcggtcgtcggtaatattttaaacttcaggctcgacgacctgaacggactgactttgatcgcactcggcgatctcttgagctggcacgatgtcggccccttcaagacacatcctgtcttgagactacaggtcgaccatctcatgggagacctgatcaacatcggaagggccggcactagcgggaggatttgacggagctcggtaccc

SEQ ID NO: 3142 - DNA, 975 bp, Arabidopsis thaliana
tactcttatttcctgcacaatcatcaaaagaaagaacaagcgctcgacaaaaaactcgtggcttgctaaaccgtaaaacagtgttttgaaactttaaagtcgtattgatgatatcctgaggtttaggtggaagagatgagtaccgtagccttttcggaggtgggtgtagtggtagaggtgtggtggttgttattacaacagtccttggaatatcagcagtgatgtcaactcgaaaactatctttagggaacaactcttgtgcagcccgtgtggggtgtcgatcgacacaagtgatggtgtcaatcgacaccatctctgcatgatcgattctcaacaacgaatttcaaactttcttcatgtggacgcttgctgttactgaataccttgccaggataaacaactgtgtctatagaggtctctatagagaatgcttggccataatcataggtggtttcctctagttgtcaatgtcaaaagtcataaccacatcacacacattcaaagcaattcggccaagcttcacatcaatctgagcaccagcagaagctaagaatgatcttcccaaaataagaggatctggaggttcttcttcatattccaaaaccaagaagtcagttggaatcaagcattctccaattttcacaggaatatcatctaagataccttcagggattctctttgagcgatcagctaggagaagagtaatcttagtagccatgaaatttgtcatcccaagtcttacatcaacagaatgaggcatcaaattgatacaagaaccaagatcacaaagagaacgaggaaacctgtctgtagagattgaaaaatcgagtacaaagcttccttgaacagatagcttctcaggaaatcctacttggatttatgtcactgccctgttctgagacaagtactgtccttcccttctcatcctgcttctctggagcttcatctagtgtaatagcatttggaagcgatggt

SEQ ID NO: 3143 - DNA, 1057 bp, Arabidopsis thaliana
tatcgttcatattagtcacgaagagcatgttctcagattggatgagaattatgttacggatgatgctaacatgcgttgtcagtgttgcattcttgctatcaacggtgatccatgctaccgatgcgtggaatgtgacttcatccttcatgatgcatgtgcaaatcttccacggaagaagcaacatttattgcacaagcataaactcactctttcctcgacatgtattgatggagaaacatattgtcagtgtaaagtttatgatgtctatacggatggtttcatatacaagtgtcatcatgaagattgcgaaagtaaatatattaactatgatgctcggtgtagttctgtattggaaccgtttcaccacgatctgcatcaacatcccttatactttaccttgcaaagttcgagacggtgtcaggcgtgtgacagagaaatacacgatgatcccttaaattgcacggtctgtgatgactactctttattcatgaggtgcgctactttaccaagaaaggtaaaacaccaggtgtgatgatcattttctatcactatgtcaaggtgtgggaaacgcaatcggtgacttatggtgtgatatttgtgagacgaagacaaactgataagtaggtttttaggcctacttatatgctgaagtgaggttcagttcaattccccttaaacactaacatgtcgatgcagctataggggctgttaatcgagtccactgttattgctagcaataaagatgtgtatagaagcaactaagtcaagccagattataatgatggtgggtttctagtaacaatcctaggtcaggatttaaacaggtaaaaatgagaacttaagagccctactcgatcattgggttgagtagaatcaacagtgaacaatattaaaaactaaaatgcaatcaaaaggggatacaaataacaggtaactaagccctaattctcttctctgtttcttatcactaacccgtgaagacgaagagaactacacactcaccttcaagcttttacaatgctttaaagtttaccaatgtattgaaaatacctagagt

SEQ ID NO: 3144 - DNA, 339 bp, Arabidopsis thaliana columbia
gaaaacagacacacagctttgccagttgaagtcgctgaagcatactctgaggtagcaatgcagtacgagtcaatgaacgaatttgaaaccgcgatctcgttattgcagaaaactttaggtatactagagaagcttcctcaagaacagcactcagcaggaagtgtgtctgcaacgacaggatggtcgcctctaatctcaggccgagtctcacgaagcggcaccttacatggaaagtgcagccgagaggttacacgatagctatggtgctaaacatatcggagatggataagcatatcacaatctcggtgcagcttatttagaactcggaagacctcaatc

SEQ ID NO: 3145 - DNA, 1114 bp, Arabidopsis thaliana
atcacctgtaaactgaggaaacaaacctactcaattaccccatcctcgtgaattctttatgtgattgatttctttgttacgctactgttgtttactgcatcttgtcatctgttgcttagtttctacaattctttcctgttactcgacctgatactcgaccacccagttgtctagcaacagactgtgcagtcgagtatctttgtttcggttactgcatgttactcgaccagtcactcgaccaccccagtgctctgcaacgagttgtgttggtcgagtgttttactgtatccgcttgattttctgttttctgcatgttcacttaggactgctagaacacaccaaaacctgttattgcttggcttgacttagtgacttctgatcacatcttgattgttagcatcacatccatttggattgacaacctaaaatactacaatgacatgattgatgttttaggataattgagtaaaaacctattatcaatttggcgctgttgccgattaggtgtttgtttgttacatttaagatttcaaacatgcttagaccaagttctttttcaattttcagttcagttactgactgtgtattcttgttgttgtctttttgatccaggtacacctctgctgtatgcaaactcgatcaccagagaaccagaacctctttttcaacaataacatcgaccacatggcttgcgaattcagagaaagaagaaacacagtccaccttttaccccaacaaccactcgaaatggctgacgaacagaatcaacagaatggtcctgccaacattggtgatgtagatgcaccatcgtcagaggaaaggaattgcacctcctgctatccagaacaataacttcgagattaagagtggtctcatctcgatgattcagggaaacaaattccatggtctaccaatggaggatccactcgaccaccttgatgaattcgataggctctgcaacctaacaaaaatcaatggtgtaagtgaagacggattcaagctctgtttatttccattctcgttgggcgacaaagcacacatctgagagaagaatctgccccatgactccatcaccacctgggatgattgcaagaaggcttttctagcaaagttt

SEQ ID NO: 3146 - DNA, 907 bp, Arabidopsis thaliana
taataaattactttcctgacttttataccctaattataaacgatgtattctcttactttttttcgcatctgattttagttccctcctcaacattgagaaactgatttataccgggacaatttaccacctattataaattgtttaatataaccgcagaaaaacttaaactactctttccttaataatctatataaacacccaacattcattaatgtttttcccattacccatttcttcagttaaaaccaaaaaacagagaaattatgcagaagtttacgaagataagcaacaatgaaacatcatctgcctcagatgtgaaaatggttgttcgtccaaacccaaagtacttagtattctacagttttaactactactttaataaaaatactaacaatctctttcgttttttttccaacaggatgctgctatcccagaagtttacttgccggccccgctgcttgctaaaattgttagctacgttgcagaatctggtgttgattctttgaaatcctttgttaaggctggtccgttatttaaagcggctgtctattccaaggaaacactaagttgtgtctgccttgacagatctcggtattttatgtggtggtcaatgcctcattccatctattatcatttctttacaaaatgtcttgaagccaacaatccacatgctttaactgctgtattatacaaaagaatagcatacgagaatttggttgttgaatgctatagatctagtttatggatggaaccttatggagaggacggaggatgggtacaaatagatggagcttactgggctcaaccccgagttcgagagagtatccacgttgctccgttgcaaatctcgggcacacaaaagatctaattgtccaaaatattgaaagacaatgttttaatactgtgt

SEQ ID NO: 3147 - DNA, 950 bp, Arabidopsis thaliana
gtcatcccccaagtgaatggagattttatttgtttatagaattcctataatttccctagcaaagggaaaatgaacaagaaccctagaactccagccgtggcagcgttgataggcggcgataagtcggctttttactcggtagggtttgctggaattcaagataccttgtgggactttgatggccggcactacttccaccggtgtaccatacaaggcgcggtcgatttcatctttggtaccggtcaatctatttaccaggtgatccgttacattcttcacataataatgttggttttgagattatgacaggatgatattaatcctaaatctaaataatttgaaacttttagaatgtctttaaaatggccaaggaattgttaacagtagatgtccgtagatagttgtgatgttcaatctagatatatctttctaaccactgcgattggaatgtttttttcacttttcctatgcacaaaaaggaaaatatcgaactgaagtttaattttatgaaaagtaaagatatgataaattaaaaattgaaccaaactaagaatgttcttgattggattttgatttgataaccattttcgaaaaaaaactaaatatacatagctaatggaaccattcttaatagccctgtagttttcacatattaataatcctttataaaactaaaattcctatttattcgggccaagtttcattaaataaaagttgtgtttggtgggttgtagagctgtgtgatacaagtgctaggtgggcagctagaaccggggctagccggttacataacggctcaaggacggaccaacccgtacgatgcaaatggattcatcttcatcaactgcctcgtatatggaacaggcatggccttcttgggcaggccgtggcgcggttattctcgagtgatcttttacaactcgaacctgaccgatgtagttgttcctgaa

SEQ ID NO: 3148 - DNA, 554 bp, Arabidopsis thaliana
actaaccaagtttcgtcttgcttctcaaacctttgatggtgtagccaaagtccgtatgagtctttggctttggccgattggttggaaggtaaggatagcgtgattggccgattggttggaaggtaaggatacgcatgattggttggaaggtaaacaaccagagcttgaatccgtcttcactgacaccgttgattttgattaagctgcagagcctatcaaattcatccaagtggtcgagtgggtattccataggcagaccatgtaacttgtttccctgaatcatcgagatgagaccactcttaatctcgaagatgtgttttggacagcaggaggtgcaattcctttccactgacggtgattccttggtgcatctctagcaccaatgtttgcgggtccactttgttgattttgttcatcagccatttcgagtggttggtggtgcacaaggttgactgtgtttctccgttccagtagttcgcgagcaatgcagtcgatattatcattgtaaatgaggttctggttgcagtttgatcaagtttgcatacagtagaggt

SEQ ID NO: 3149 - DNA, 1570 bp, Arabidopsis thaliana
aatgcacaaagcatcgaaggacaacaaacggaggaaagaacttctcataatgaacttcaagtccactgccataccagagaagaaccaagtcgccacattccaattcgaacaggaacaccaacgacccatatttggagtctaggctaaagggagtttagcttagagttaggttatcctgattaaatctattctcacgagattttatttaagggaagattatccttaaggtttcacgttaatagaaagggtcgataaatcaagagggttgtgcttgttttcgcgtttgtgaattggttgtaatttgctttcttgttttaatgaaatcaaatcatgacttggtcccgtggagtacagaaaaccgaacttcattaacaaatttcttatcttctttattccggcaatttattttaccacatacgtacgtataagtggtatcagagcaggttctcgatatagatcaagttgaatttaaggctaattaagactgcgatatttacaatgatattgattcaagccacttcaagttgatttatcaatgtgcatcagctcaaaaagcatgaatttttttggagaatatgtttgagggaactacaagcgttaaaagaacaaaagtggatatgttgggatcgcaatttgagaatttaaggatggaaaagaggaacccgtggctgatttcagtgcaaagttatgtgacatatttaatgagtcctttgctcttggaaagctttacaagaacaaaaagttggtcaagaagttgaagagatcattacatgtaaaatttgtgtcaaatattttgaagttgaagaagctcataatctagatgagattgcttttcatgagtttgttgggattcttctgacttttgaattaagtaaaggatatgaaactaaagggaagatgaagaaggaggatgagtgaagaagaaagttaacattggatttgctcttaatggataatcaattgaagattcaatggctatgttgtcaagacatttcactaaatatctgaagcaaaagagaaaagagaagaaggataaaattgatgaagattttgagaagttctttaaagaatgtgcaatgttttgaatgcaaaggatatggacatgtttgttctgaatgtgccaatctacacaagtataagaagaaggctatgaatgttgtcactagtgatactgaaactaattcagataaagaagaagatctgatgaattttatggcgtagataacattcgagtctgcttcagcttctgcaacagagtctgcatcagggtctacaacatggtctacatcagcgtcaacaataggacctgcaactggcagtgataatgatcaaagtgatgatgatgctacaattaagtgatgacgagtttgctgagaattacaacttatatgagtgattgcttgagtaattgctcgatacacttaaccgcaaggtagtatatgcgaggtcgattcacaagaaccaaagatactttaaggattttcaagattcgttcttagctaaagcgagattcgttcttaacaagttcatatagttcacagggttcctaacttcaactttcgttggctag

SEQ ID NO: 3150 - DNA, 921 bp, Arabidopsis thaliana
gcttgcatcttactttgagtcacaacctggtaagcctgtaactagaatttcaagttctgcaaggcgggtgaggagtgctctgaggaaggcggataagcctggcttcgtttctgctttctgtcaaacgaactgtggagatgttagcccaaatgtgcttggagccttttgcctggacactggtcttccttgtgatttcaatcacagtacatgtggtgggaaaaatgagatgtgctatgggcgtggaccagggtattcacctgtcttttttttttttttttttttttttttggtcgtcttacaagtttggatagcacaaacttatggtaaactctcatgacctatttttctttatcatttcagctatcctgatgaatttgaaagtacacgtataattggtgagagacaattcaagatggctttggaacttttcaacaaagcatctgaacagctacaagggaaggttgattaccgccatgtttatgttgacttttcacagctcaatgtgacacttcctaaaaaagatgggaaatcagaagttgtaaaaacatgtcctgcggcaatgggctttgctttcgctgctgggaccacagatggaccaggagcatttgattttacacaaggagatgataaggttttcagtaaaattcataatgcattatccaataagtagatattgcctttatgctttccaattcttaagtctacgtttggttaaatgaggggaacctttctggagattggtgagaaatgttcttaaaacaccggacaagaaacaaatcgattgtcactatccaaaacctatcttgcttgacactggagaaatgacaaagccatatgactgggctgtaagtagttaaaaatgtaaacttccatgagtcttgtatacagtattaagactctactctaacttgtcgttttgaa

SEQ ID NO: 3151 - DNA, 1221 bp, Arabidopsis thaliana
tataaaataataaattctttcagtatttgggactagtgtaaaaagcgatacaaatcgataaattaataaaatattttttttttgaaaatcctatgtaaacatatagtcccatcaatatcataaattaataattgtattaaaatatcagctatatatatatataagaaatttcaatgaaatataattctagtatcgtttatttttgtaatttaatttaatattttaattatatcaaaaaaattcttgttgttttcaagatatgataattatttgtaattgattataaaaaaatattttaatcatcaaaaaaaatcttatatttttatagaaattaaaaaaatcttaccgtagtattcagtcatttagttactatttttcattggggtttttagaccaatgatttgttacttttatttccaactgcatttgtttcatataaaaacgtcgtgtatcgagatttcctttcttttctttataaagaaatataaattggccgttatctttttcctcaaactaaacaactcagatgaaacaaattcaaagactaaacaaatatgtatattttattcatagccaattgaaataatatcagcattatatgtttatgcaatcatatccttttgagtataaccaaaaggaaacaaagagttaaaagacacattcacacatctacatgttaggctttataacagcacattattttgatcatttgcaaccattttttcccaaacttgtagtaatctgatcagatgaatcttgaataccttccagattcttcccttctgatgccaacgagcaagactgcgaaacgaaaaacacactcgaagaagaagaagattcagcagtcgaaaacaactccctttcatcgaatcccctagatttcttcatgtctctctcttcttcttcctcaggtttcactctctttgacccgttgtaacgaacagccgaaggtacttgttggtcattagaagacacagatgggcaaagaccaggttctttaatggtattagcccctaaggcctcgaagctatctgctacaatctcatcaggtgctgctccgatcatgatctgtgcttcacgggttcttgaaatagctttagctagtagctcacgagctgtgtcgatgtctacaatgggtttcgcatagtttgttccgagttccacaccagaagctttgagtacggttaaaggagcgtcccatggatgatggatccattcagt

SEQ ID NO: 3152 - DNA, 1540 bp, Arabidopsis thaliana columbia
  unsure (1)..(1540): unsure at all n locations
cacacttgtccaagataaagaaccaaagctagacacatgttctcacacttgtcaattgcctacatctctactatgatggatggttgagactgaattaaaagggcaaaaccctaatgtggaatggggtcctctccccacctatatatagatgatttgctccatcacaaatcacgtgaacaataaaaacaacacttaaagagaaagacatataggcaaggggagagaaatcttatacctaaagacataggagcttcatcttcaaggaaccatttaaaggtagcatcatttctacaatgagtggaggtatttctttaacactcttttgattctattatgtgattattatagatgtttaagattttagggttcatgttaaaagaatgttaacgaattaaaattactggaatggaagagacaacagttggaagcagtttgatcagaggaatcagggacgaagaaaaagatgacccctcaaatggttgcaaacttggcatacgacgtcgtcagattatttatttatttataaatccagacattatcattattcatctagcccaatttttatttacccaaattgtttaattaaccatccttattttatataattgattctgtacttttgctaatttgaatatcaattttagaagtgatgatcagaaagtaataatgaactaggtttagacctgtgctagtatgaaaacgtttatcgagctcatcaaaaggagaggagagatgggttagtggaaaaaagagtaattggtggatgcacaagagctgtccaccatctccaggacggagtccccgtcgccggagaggttgtagaaactagagaggagggtaaagaacgaacaaggaagtcttcttttgaactgattgcatctgaaagatgatttgaaattttggggtagtggaagaggatgtagaaaacaacaacaaacagaaaaaatagaacgagaagtgcaataacgagatttgtagtgacattcatctttggagggcgagaatctcaggcaagagtgtaaattggggattatcaatttctcaacccctatccataaatattaaaaatattcattaacctagatctgaaaatctaaactggaacttattcgagaaagctgaaaggccccgatccggactgcctaaagtccggacgagttctctcgacccaagccactaagtgactcggccctaaccgtttatgaggttctttcctagtctaatccgttccatatgattccgtgattcaatatatgagacgaatagagtaaacaaacaatcggatactttattgattaagcaaaggattcgatacaacctatgagtttgcatataagctattacaagtcatataatcgatccctagactaaccgaactatcaccacccatcatcccggccttgagtctctcgcgcctaagccaagtccttcccacgatcaccattcgctcctgaaagtcatagagccacaagtaatctcatttacttaatcatatgcaagtccatgcaatgctctatatgccatacactacntcgatccg

SEQ ID NO: 3153 - DNA, 895 bp, Arabidopsis thaliana
gatagtattgaccgacaccaacctgaggaagtgtcgacgtttgacagagcataattgaccgagattgagagagcatgatcgataccagatagtagtgtcgactgacactcacctagtgtcgatcaacactggacgcaaactgcaccaatcagccttgactttccacttgttgctgaactagtctacacacctgaaattccttgtccattgcctcaacagtatatgcaagagattcaggaggaacactgcaaggttccacagcatcgggagaacaacaggaagaaaaatattgttcaaaatagattgtagcgctgaattgtcaacatgctaaggaaagttaagttgtagcacgagtgtcgatcaacaacaccactcgcgtcgatcaacacacattactcgttgaagcatagtcatcaccaagaggtacttttaagctgggatcactgctataagtccaggcactgctgtcacgtcacccactgcacctgtcatacttcatccacctcctaaacggccaaggtactcatctcctcctccttaacctccagatgtcatcaataagagtttaaaatttccaaaaactgttttacggttaagcaagccacgagtttctcgtcaagcgcttgttcgttattttgatgattgtgtatgagaaaggagtattccaaccatacctgagtcccaccctgttgatgctcctctcttcctagatagacctcatgtgctaactgcttatacgccagcatggatgatgagaggtctttctccgcaatatttactgccaccttttgatccacctgatcccatactccatcaaagtcaagctattgactataaacaagcgcttagtgggaagcaaccactgatattattttctttttctttcctttttttt

SEQ ID NO: 3154 - DNA, 607 bp, Arabidopsis thaliana columbia
cttattttccattctttcgcggttaactagggagaatttgtttgaggatgggaatcacttgtatcggtttctagacgatgaccctatagtgtcatctcaatgtcacaacatacctagaggaataatcgatttgaagccaaggccgattgtggaaatcgcatcgagactcagacttgtgtaccgagcgattcttgaagcttacacttcaccggatggaaaacatgtggactatagaagcatccatgggagtgaagagtttgcaaggtatgtatagtgacattctttatctattttctaatgttttgttactcacccgagtattgttcgattttcaaaggtacttgcgaataatccaggagcttcatagagtagagcttgaagatatgcaaagagaggaaaagctagcgttcttcataaacctttataacatgatggctatacattcaatactagtatggggacatccagcaggaacttttgatcgaaccaagatgtttatggacttcaagtatgtgattggtggctacacttactcgctttcggctatacaaaatggaattctaaggggtaacagcgaccgatgtttaacctatgaaacatttggtgt

SEQ ID NO: 3155 - DNA, 1843 bp, Arabidopsis thaliana columbia
tttaaccatcaaggtaaacctttttaattcttcatatttctgtttaatcttttttcagatctataattaatgatgtaggtcaaattgccctaataccattctctcaaaataagagatcaattgtcgtatttatgggttgaattccacaaatctctcggataacacaatagactaaaatttcgaattaagctaaacaaaagataagacaataaaaacaaagcaaagtaagaaaataacagatgatgggggttgtaagacaagataataaaacataaggtttaaggtattctcaggaaaaaatgattagtagatctagtaatagctaggttgttatcgaaccattcttaaacccaaactctaatattagaataatgataacactgtattttactcattttaggcatgtgtttttcatcatttagcttagtgatcactcattgtttcatatcattttgcatcacatttagcttattttgcatacttaggcatttacgatcatcttacatacacattgcatgttttggtgtgttttcaggttcataaaaagtttacaaggattctacttaaccctctactctatccaacccagagggaagcagcagagcattctactcgaccagttcactcgatccagacagccacagaggaggctgcaattcactcgacccctttactcgatcaaggcagcctcagtggaagcagcaaattgatcttcggatcctcctcattccccactcaaccagacatctgagcatacagataggagaggaagaaacatctactcgaccaattgatcactcggagcataaacacaaaggcgcaaactttacagcaccctccttactcgatccccaagatctagcactcgcccaaaccacctcaagtctcttgtcttctagtgaatctagggttttcaacatttcactataaatagatcactttgggatttgccaaaggatctagctttaatcctttagtttttctttgtgttcttgaatcttcaaaacttaattactcttcatctatttcatttttgcacttagttcttttagtaaagttgtttagcttgtttagatcttcattttgatatgatttcagtaatttctgggtttgtgttcttaattgtgttgcttgagtagtgattagggttcttgaggatgaattagattagggtaatctctaggttagtcaggtggttaagattaggttagatcccttctggattcgcgtggaccctatgcgtttttcgctggtaatgtcgagattcgatcatagacgtccagcgtccaaaagatgttcaaatggatgtctgatctacgaattccagagatttgtagacttgaccaagacattggctagtccgcttattgactttggtagattgttgcttaaacccttctctgctatgtttcatcaacgagaggtgagattaggaagtggtagagttatgagggtctctgtcatgacagtggattgacccggtttttgaatctatcgtctagggtatctacctttcacctgttagcctcctgatgaaccctagagttgcccttatcaatgaatccatccttaggacttctattcttcttagatttatttgtattcaccccttgattgcacttttatttaccttttatttgtatcccctgttgattgcattttagttctgcctgttggttctactcgacccaatgatcgagtagggcttttaaaagttctttttttgttgtttgaatcttgacctaggattgttactagaaacccaccatcactataatctggcttgacttagtagcttctgtacacatcttgactggattgacaccccctatacatgcatcga

SEQ ID NO: 3156 - DNA, 1396 bp, Arabidopsis thaliana
tctgtccattcacagaaaatggttttccattgttgtttttgagaatgactgttccatatggcctaaccgagtggactgtgtagagacctgtccaacgagaagataattttccaggaaatattatcaatctagaatcataaagaagtacctggtcattaggctcaaaggtccgagtgaggatcttcttgtcgtggtaagcttttgtgcgttccttgtagagcttcgagttgtcataggcgtgaattcgtatttcatcaagctcattcaactgaataagtctcttttctccagccgatttgatgtcgaaattcatcatcttgactgtccaagctgctttgtgcctttaattccactggaagatgacaagctttaccatatagaagatgaaaaggtgtggtaccaagcggagttttgaaagctgtcctgtaggcccacagtgaatcatctaacttgtaggaccactcttttttcgctttcccactgttttctcaagaatctctttgatttgccagttagaaacttcaacttgaccgcttgtttgttgatggtagggagtagcaactcgatgttgaactccatactgtaaaagcaatttcgcaagaatcttaatgaaatgcttacctacgtcactaatgactatgcgtggtactccaaaacgagggaagatgatagacttgaagagtttcatgacaaccgctgaatcgttcttcggactatctatagcttctaaccatttggagatataatccacagctactaggatgtagagattcttgttcgaaggtgggaagggtcccatgaaatctttaccccaacaattgaagacttcgacttcgaggataaatttttgaggcatctcattacgcttgctgatctttccctttctctgacaagggtaacattgcgatatgaacttctgagcatctcgaaacattgtaagccaccaaaagtctgctcgaagaactttggatactgccttgaagattacaaaatgacaaccatagctagagctctgacaatgcgatagtatatcaggaacctctgttgcagcaatgcatctcctataaactccatctgaacaatgcttatagagataaggttcatcccaataataacgcctaatctctcttaggaatctcttcttgttgtaattagtgaaattatcaggttccacatctgcaagtaggtaattaacaatatcagcataccatgggtagtccttctcgaccgctgtgacggtgcaattctcagttggtgaccaatttcttgtcgattcataagggtgtcgatcgacagttccacttcttcatcgcgcaactacgaacatcaactttctctgaaatgtgagtgtcgatcaacatagaagtggtgtcgatcgacattgaagctcgattct

SEQ ID NO: 3157 - DNA, 506 bp, Arabidopsis thaliana columbia
tgtattaactgaagatgataactggatttttcaggtttggaagctgagtgcgtgtgacctgtgcgagatagctcgtaactcagtgtaccagtcaggtttctcacacgccctgaaggtacttgttatatcaacatggcccatagtatgaatgaacaagatgtctctgttccgatctactaataatactaacttgttgagatgttccagtcgcactggattggaaaagattactacaaaagaggacctgatggaaacgacattcacaaaacaaacgtgccacacataagggtggagttccgtgacacggtatggaatgaaatatatttattcttcacacaagttaatttctctttgtaggaaaacaaattaaaaatatgaagttgatgcagatctggaaagaggagatgcaacaggtttatctgggcaaggctgttatctctgatgaagttgttccatataaccacaatcagaaatggcaagacgtaagaatccaacatgtatgtaca

SEQ ID NO: 3158 - DNA, 502 bp, Arabidopsis thaliana columbia
gtttttttttttttcacaattaagaaaaggttaagatgtgcgaacaatcaaatttggtttgtgcaccacgtggaatcttcctggatgacaacaatgtatcattaatgcataaaaataacaaaaaaaaatagaaaaaaatagaaagggtattaaaggaaagaatagtcaacccaagaaggcaagaatcgtcaagtcacgtgaaaacgaacgtcgattctgactcgacgacaatccggcctcatatataaatagacagatgatactacataatccataatccatagatctcttattaaataacagtgctgaccaagctcttacaaagcaaaccaatctagaacaccaaagttaatggagagctcaaacaggagcagcaacaaccaatcacaagatgacaagcaagctcgtttccggggagttcgaacaaggccttggggaaagtttgcagcagagattcgagacccgtcgagaaacggtgcccgtctttggctcgggacatttg

SEQ ID NO: 3159 - DNA, 758 bp, Arabidopsis thaliana
attaccactccgtcgcagattcgtgtgaatccactcaagtaaagacatagtgaagaacccccgttgcatgcgcctacgtacaatgcggagcaaatacccgccatagccagacaatccctgaccacatgtaaacttgtttcaacgcctcccttacaaacttgacaaatatcagactcacacaagtgtcttcgttttcgctcagaatccgtcataatgacttggtttacaactagccagagaaagactcttacccgttcgggcactagaactttccacacactcccatagaaactactcatatcttgacccggagcctcatttccagtcaacatatgataagcagatgtaaccgtaaagagcccatctgaggactctccccaagctagcatgtctaaaactcccgtgaggccatctactaccactgccaagagttccaaccacttattctctgtgacaaacggcgctactctcaacatgtcccagccctctccattctgccaaagatgtcgggctgtacaattaaccacattcggtggaattggagctgtaatttcatcaataagtggagtattagataaccacatatttgtccagaatcgaatctgtctcccatccccgattacccatttaacaccttgcaacatgcatcacgcagccccaggcctacactcctccaagtcgaggaccagttgcttctagcgagacgccaagatccatcatgaactgctccaactcgatacttgcttcgaactacttga

SEQ ID NO: 3160 - DNA, 530 bp, Arabidopsis thaliana columbia
agggaacacactgatctcgtgtgcttagacctctctttcactctcttgcaccaactgtgaagtgagtctcttacgctctctgctatcacagctttcttatgccgagatcccatctgttcagattcaggtgaaaccatagagtttttatgaacgatgtttagtcacagacttggataggcttaagattgtggaattgtagatatatgaaaggttttgacgaacctgagtaacgattacattgagaggcacagtgccataactacaccagaactgaacgagaaccctgcattcaccagaaagaaaaaaaaaatcttaagagacagtgtgttgctgcgaattgttgtgtatttgaaacgcacccagaaattagccggcttgatatcatcacatggttcttcatgaagcaagatctttccttgattcccactgatacatgaaattgatgatcttctcaaaaactgaaaaactttgcatagctgatttaagtattgatgcattttataaggtggcctaccaagaccagatgaatg

SEQ ID NO: 3161 - DNA, 412 bp, Arabidopsis thaliana columbia
tttagatggtgcattgaaagaatgtatgaggcagataagggacatgaagaaagaccatgaagtgaaactgcatgatgttgctttaagcaagaccaagcgtgtaggaagaatgaccatggagtttgataagaggatgtgatgctatgatccagaagttgcttaggtctgcagcggatagtgatgctttatctagaactttacaggagcggtccaacatgctggtaaaagtcagtgaggagaagtcaagagctgatgccgagatcgagaccctgaagagcaatctggaaatgtgtgacagagatataaagtctcttaagtatgaagtccatgttgtttctaaagagctagagatacgaaacgaagaacagaacatgtgtattagatctgcagaatctgctactaagcaacactt

SEQ ID NO: 3162 - DNA, 561 bp, Arabidopsis thaliana
ttccccgcatttgctatacatgtctgcagcagcgttaaagataaaagaatcatgttcaaacccgagttttacagctaagccatgaagttgttggccttcctctaggacggctagcttcgcagcggcagaaagtccctcagagaaactaaactggtctagactcaccccaaagcttctcatctttgatacaagttttagcacctcttctccatgaccgtggtgagcatttgccgcaagcatagcattccacgtgatgatattcctattatctaatccgttaaataggtcctgactcgagcttaaatcaccacatttggcgtacatagtgataagcgaatttttcacgtgttcatctgattcaaacccagcagaaactatataggcgtgtaatggtttcccccgttcaagtaaatcacccggcaataagcaagcactaagaacacttaccactgtgatataatttgaagaaacaccttccactcgcatagtttgaaaagccgccagggccttgtcgggatcttcgtcctcagcatagccaccaatagagagcattccaagcta

SEQ ID NO: 3163 - DNA, 838 bp, Arabidopsis thaliana
ccatcatgaacttctccaactcgatacttgcttcgaactacttgagcccaaaggcaggaacgatcatgtaatactctccatccaattttaacgatcaaagccctattcatgttagctgctgaacgaatgcctaggcccccctcacatcttggtaagcacactctgtcccaagcaactaaatgctgccttctcttctccgctgtgctgccccaaagaaaagagcgagagattttatcaaattctcaagcgtagactgaggcagtttaatggtgctcatagtatgaaccgggactgaattcaacactgctttagttagcgttaatctgcccaccaaactcaatgtacgccctttccaacccgccaattttgacgagactctctcaagcacctctccaaaagtatccttattaatcctcttatgaagaattggcatccccaaatattttcccaagtcttgtgtagcttttatgccactctcatcactaatcaacttccccatctcccttgagacattcttagaaaaaaagattttggacttctccaagctaaccttttggcccgacgcaacacaaaacctttccagcacgcccctgatcacccgaattttttcaacagaagcctctccaaataaaatcagatcgtctgcaaaacagatgtgtgagagcttcggctcagtctgagatattttaattggtttccatttcttccctccaatggaagcttttatcaaatgacaaaaccgctccaaacacagtacaaacagatattgtgacaatggatctccctgccgcagcccacgtaacggttcaaacgcatccgtccgctcaccattccacaa

SEQ ID NO: 3164 - DNA, 451 bp, Arabidopsis thaliana columbia
attcatgaaaatgaccgcatttcttttggtgtaggaacggcaacaggagcagcatattcaacaatgctaataagggatagttagtggcgttgcgattctttatactaagaaaaatcatcctttttaattttaataaattagttgcgcggtactttaggttctggcgctaacaacaaactcagagaaacctctatctccggtctcccaagtaattgagtgtgtccggatataatatagctatatatatattaactcccccagaaatttacattccctcataggctaccaattgcgatattagctagcattgtgattatatttaataaaccaatacagaatcgctataatgaggcgctttatgactcttacagttataccaatgctaatagtgttacttccccaggtgcaagactggcaatgtacgaaattgggttaaatatattcataaagt

SEQ ID NO: 3165 - DNA, 513 bp, Arabidopsis thaliana
cttggtaatttataccaggaaacatgtgtgtaaattcgtcccatgaggtcaagcctctcccagaaccctttttagcaccttcaacctaaaagtcaaaccaatttgaaaatgataagactgatcttctatatatcatcaatgttataatgtgtttatatgtatgttgacctgatatgcggaaacagatgttccaaatatgaaatctgcggggaaatcttgcttgtggatctcaaactcgggtccaatgatggtgcccaaatcatcatcatttaggttggtctgcggtccaacggtggtgcccatgtccatgtcaatgtcttcgtcatctacggtcgcatgtggtccaatcacgatgcctatctcgtcatcgaagctagtttgatgaggtccaatgatggtaccaagatcctcatcacttggttgaggcctagcatcggcgttgaagctaagtatggtactagttaaggctaagagcctaggaaaagagtgagagtagctgtagccatatgagtg

SEQ ID NO: 3166 - DNA, 531 bp, Arabidopsis thaliana
gtgttctaacaagacttccacagcatttttttggtcgtggccagcagcccagattaatggcgtgccagattcactttcagaatcaacaggaacacctctagagagcaattcctttagcaactcgatttctcctaatagatgtatagagagaagctatataagtaaaacagaacacttcatgacccaagagagtgaaataaaaaaagacagagcaattgataaccaacctgtcccagccgcatgatgcaaagctgtggctcctagttcactagctatattgggatcagctccttgctctaaaagatacttaaccgtttcaatctgtccttgcctcgcagcatgaacaagcggagtatcacctaccaaatcataacaatctcagtgatcaactttcacatatatagaaaagttctgcaaattgtaaaacacaaggaaacacaaaccagtttcatcttttgcatcagcattgagtttcagttcttccaaaagatatctgcatatttcagtttgtccttctctcgcagcgaagtg

SEQ ID NO: 3167 - DNA, 593 bp, Arabidopsis thaliana
gatgagcttaattttaccgggttgcctgatgaacttgacgatctcgaagagtgtgatgtcttttgcacgggagggggtatggagttggatgttgaatcccaagataatcatgctgttgatgcgtcagggatgcagatttctgatcgcggtgctgcaaatgcatttgttcctcgtaaacgtcccaatacggctggtagagtttcagtggaacatccaaacggtgaacatccttcaaggacattatttgttaggaatatcaacagcagtgtcgaggattctgagttaagcgccctttttgaggtaatcaacacttgttcgctttcatctttctcgttgagccgtaactcatagaatatttgaggtttgctcgctcttgctgatgggatttctatttgtcaccagccgtttggggagatcagaagtttgtacactgcatgtaaaagcagggggtttgttatgatatcctactacgatattcgagctgctcatgccgcaatgcgtgcactacagaacacacttttaagaaaaggacactggacattcacttttccattcctaaagtatggactacgagagatatcttgatttgaagt

SEQ ID NO: 3168 - DNA, 538 bp, Arabidopsis thaliana
tttactagaagcttatgttagatgcagggtgatgcgtcttataaaagagaaaaaagagatgatacgttgtcaatatactttctaacatgtcaggacttcagattctgtaactataaggaaccattggaaaaatgtgcaaagagagatctaagctgaagcctttccactatagagaggttacagatataaaatcacgagattactaaacctatcatcatgagcttcaattgcggatacaaaggccatccaagacaaaggtataccaataaatcaattacattagcatgctaaagtggcaagtaagaccctaaagtgaacagatacttcattaaataaatacatactttctcatttgcaaattgatcagcccaacttggtggccccagatactgctgttcatattcagtagcccattccccgggggctgaagcttgcttgacctgattctcatcaataataagttcaccacggctcatcttggaaacaaactgaaggaatcttgaattctgcattcaccgaaacatgtttgccaagtttt

SEQ ID NO: 3169 - DNA, 450 bp, Arabidopsis thaliana
gccagtgtgctctaaagccagtaggcaaagatagcaaaaatgaagtatgcaaccggacctgcggcaataatcgcagctcgttggccgacagatttattattgaaggcatggtggcggagttccggaacgaccggttctgcgcgctcatccagcattttgacataaccgcccaacgggatcagggcgataacatattcggtgccgagcttatcagttcgccgccagagcgccttaccaaaccctattgcgaaacgctcaacgcgaacaccacaacgccgggcaacccagaaatgaccatattcatgcacggtgataagtacacccagtgcaacgatgaacgaagccatatcccagagaaaactcagcactattaccttccgttaaagcgtcctgcatacgagtaaccacaagcaagcaaagaccggtaccgcagccgtcacgtatcaatac

SEQ ID NO: 3170 - DNA, 533 bp, Arabidopsis thaliana
  unsure (1)..(533): unsure at all n locations
nnnnnnnnnnnnnnnnnnnnnnnctaaagaataacggcccgtatatcgaactgatgaccggtatttttgccgataaccagcccgattttacctggcttgatgcttacgaagagaagcgttttgagcagtatttcctgccttatcattctttgggcatggtgcaaaatgcctcccgcgatgcggtgataaaactccagcgtagtaagcgggggattgagtgggggctgtatgccatctctccgttgaacggataccgcctggcgatccgcgaaatcggtaaatgcaacgcgttacttgatgatgccgtggcactgatgcctgcgacctgcgatcagggcgtgttgcacggtatcaatcctgaaaggctgaccattgagctctccgatgccgacgcgaatattgtactgagttatcaggaacatcagccgcaagcgttgccgtgtacggacgtcgccaaagcgccacgtggagcacaagacattaccagtacagatgaagcctggtttatcggtcagcatctggagcaatatcat

SEQ ID NO: 3171 - DNA, 545 bp, Arabidopsis thaliana
  unsure (1)..(545): unsure at all n locations
nnnnnnnnnnnnnnnnnnnnnnctaaaggccatcattaaggaccattctgccgtcgtgggtaaagatggcaaaggtcagcgcatcgtcatcaacatgaccgtgttttaatctatttggcgtctgtgccatgcgatccgccgcgttgatttcgttgagatcgagcgtacttaaccgcttggcaaacagcatcagttgggtgtcgaacaattcatcgacgttatccgttgtttgtttccaggcgacaaagctggaaagcagccaggtcaccgaggccagaattaaaaagattagcgtcacgctgacgcgcagactaagacgttgggtaaatttcatttctcacctaatgtgtaaccaataccatgcacggtacgaataaaatcactaccgagtttgcgtcgcagatgatgcacatgcacttcaacggcattactggtgacctcttcgtcccaggtatacagtttctcttcaatcagtttgcgcgacagtacccgaccagcgttacgcatcagtaattccagcagggcaaattcttttggtttcagtg

SEQ ID NO: 3172 - DNA, 1082 bp, Arabidopsis thaliana
agttataaaactggttcaagctgaagtagttttcattaaactggcctaccccatttctatgcagagcggtcgggccttcaactgcgggtgggtccggctgccaatagccggaaactgaattgagttgagccgcagaccggtgagctacgggttggaggttgcttgagggatggtgatcaagggtaaaacgccttggttggtcagaggaagaaacccatgttgttgaatttgacagaagagagagagcaccatcaagatcttgagaagcacccatgtgtgaagagattgtgaccttttctaaaaatacgcataacataaagcatcatcaagatcatgaatacaacaaaaagatgagaccatgtacttgaaactcaagagaatacaaacctttactgaataactcggctcttgcggttttggttttggggtccaacaatccaaatctattgtgctcggtatcggaaatctcagtctttgcaggttgcggcattaacactcttgatggtacgtgcttcgaacttggccatataaacttttcctcacttcttggatggataagtgcaaatctgttccatacaaaatccacctgtgtttcccatctgcatacacagaatgacaaaagcatctccaattctccatcaatgagattgttgtgaacccccaaaactacatgaaatgatatctatcttgacaaaggaaactaactaaatgctataactgaactataggcaatttcagagttcatataaggataagaaataaatgattgttgtatataccatatgtccttccaggatttggcttgcgacgtcttgcattgtgatctgagagacgtcggcgacagctacgtttcttctcatcaaactcagagagacagtggaacctttggagaccaaaaaagttaagattttattaaggcttttgctaacagattaaacaaccttctctctcgagaaagactagcttttacctgctacattgttggcagaaccgacgctctacgccactcacaacgactttaggaaactttgcacgattttcacaaatcctatgtttccgatgatagtctttagctgatgaaa

SEQ ID NO: 3173 - DNA, 613 bp, Arabidopsis thaliana
  unsure (1)..(613): unsure at all n locations
gccaatggacattaaattcatagaagaagaggaagaagactgtgtcactggaggtggtggttcaagcatcaggggtgcttctttcgaacgttgtggaaatttcacaccacaccgctgtggattcaaaaggaatgagctagaggctaataataatctaaagaaagaaaagaaagtgggttatatatatactttaagctcttggtatgcccagttgtagtgagggtgtttgcaagcaactccactgaatgcttcattccatgtatccaacaaaatcaagagtttgttccttacttcaaaatcaccctttcacacacattttcaacactcacacatatcaagattattattattatatccacaaactaaaaaagagggtgccttggagaagttaacaagagagctcaggataaaagaaaaagaacctttttcctgacaagcttaaccatatcttcaagaagatgtttctcagcgatatgagaatgcacaaagtcaccgcagttcttcagcattgcctccaacaactataaggaaacgaagatagtattcggagtcagcagctgcatgtagttataactgagagaagacaggttggttagganaagaaataagagtg

SEQ ID NO: 3174 - DNA, 811 bp, Arabidopsis thaliana
tagtaacgtccgccagtgtgctttaaaggcagagcattgatgagctgatggaagcttgtcgtgacgtgatccgcaaaaacaatctcaccagcgcctatatccgtccgctgatcttcgtcggtgatgttggcatgggagtaaacccgccagcgggatactcaaccgacgtgattatcgctgctttcccgtggggagcgtatctgggcgcagaagcgctggagcaggggatcgatgcgatggtttcctcctggaaccgcgcagcaccaaacaccatcccgacggcggcaaaagccggtggtaactacctctcttccctgctggtgggtagcgaagcgcgccgccacggttatcaggaaggtatcgcgctggatgtgaacggttatatctctgaaggcgcaggcgaaaacctgtttgaagtgaaagatggtgtgctgttcaccccaccgttcacctcctccgcgctgccgggtattacccgtgatgccatcatcaaactggcgaaagagctgggagcgaaaggttccgtgctgccgttgctggtcggcttagggctggatgaactcagcatgagcgcaccatcaattccggcggcgaaagctcggatggcgcaacttgatagccgtgagtgccgcaagttgctcaaccaggcaatggcctgccgtacttcgctggaagtagaacacctgctggcgcaattccgcatgacccaacaagacgcaccgctggtcaccgccgagtgcatcacactggaaagcgactggcgcacgaaagaagaagtgctcaaaggcatgaccgataacctgctgctggc

SEQ ID NO: 3175 - DNA, 3156 bp, Arabidopsis thaliana
tgacacaattttgattgttcaaatataatggagtaatttagtaacttgtatcatgactctataggaagaaattagagaaagaaatccacgacgaacttttaatatccaatgattaatctgaatcgataagagatatatgtatgtttgttaaaaataataaagaaccaacttagagttgacccaatgataaatctcttaggtggaggtgttggattcgacacaagttgggagaaatttcttatgaatttaacattatttgcgaatggtttatgccggttcggcttggttcacacttggtttatttttctgagaatatactctattagatgctgataattgtatagttacggatagcttttagatcttctcaactgtagggattttcctagattcacgacgtctgttgtatagtcgatctatatatgttgtatgcttctcttgatgatcaataacacatatacattgtcgaactctgtattcctttatggtatcagagcctgaaaagcaaaactcttgattttttttttctcgacaatgtcaactgaaagcaacacctccgctgcgactgaagtaaggagaacaatctctccttatgacctgacttctgctgataatcctggagccgtaatctctcatcctctcttgaagggaagcaactatgaagagtgggcttgtggttttcgaaccacgttgatatcacggaaaaagtatggatttctcgatggttcaatttccaaaccagaagagacttcccctgattttgaagactggacgacgattcaagctcttcttgtgtcatggatcaaaatgacaattgaaccaactcttcgatccaccatttctcatagagatgtggctcaagatctgtgggaaacatctgaaaaagaggttctctgtcatgaatgggtcacgactacaacaactgaaatctgagctagcttgctgcaaacagagaggtttggctattgaatcttactttggcaagttgactaggatctgggataacctcgccacacatcgtccgttgcgtgtttgtcgttgtggtaagtgtacctgcaatcttggtgctgctcaagaggcagatcgggaggaagacaagactcatgaatttctcaatggttttgatgagcagtttcgggcggtccgatcaactctagtggctcggactcccattcaaccacttgaagaggtgtacaacatcattcgtcaggaagaggacttgcgtgttcccgtagaagagtcaccgtcaatgacagcttttgcggtgcaatccaaaccacgtcttccaactgacgaaaaggagaaaagtttcttctgcaaactgtgtaatcgatctggtcacactgcagagcggtgctatgctgtcatcgggtatccagagtggtggggtgatagacccaagggtcgtactctacaagggaagggacgtggtggcagtacgtctcgtggtggcaggggacgcggagcctcccaagaggttgctaatcgggtttatgtgccgaatgtggaaaacgtgacaactgaacaagctaatcatgttctcacagacgacgaccgatctggagctcatggactgaatgatacccagtggaaaatgataaaatcaattctcaatgcgggaaaacaaccttcaactgaacaacaaacgagtatgtcttctctctctccttggattatggatacaggggcgtcacatcatttaactggaaggtttgagaccttaacaaatgtgcgagaaatgccccctgttttgatcattatggcagacggtagagagcaagtttcttacaaagaaggttctattagtcttggtagtcatttggtaatgaaatctgtttactatgttgaagagttgaaaactgatttgatgtctttggggcagttaatggatgaaaacaagtgtgttgttcagttggctgatcggtttctcgtggttcaggaccgcatttcgaggatggtgattgggtgtggtaaaagagtgggtggtacctttcactttcgtagtacaaagatcgcagcttcagccgcaacaaaggaaatcaagtcatttgagttgtggcataatcggatgggtcatccgtcgacgcaagtggtgggaaagcttccgtttgtttctgcttctgtttcttcttctagtttgaataagccttgtgatatttgtcttcgttcaaaacagacaagggatagttttccattgagtatgaataaaagttcaaattgttttgaattaatacatgttgatttatggggtccttatagaactccatctcattctggagcaagatacttcttaactattgttgatgactactccagaggagtgtggctgtatttgttaaccactaaaagtgaagctccagagcagttgaaaaagttttgtgctttaacagagagacaattcaataccaaaataaagaggatccggagtgacaacgggactgagtttctatgcttaactaagtattttctcaccaatggtatcatccatgaaacctcgtgtgtagctactcctcaacagaatgcaagagctgaaaggaaacatcgccatatcttaaatattgctagggcattgagatttcaagcgtctttacccattgaattttggggtgaatgtgtgttaaccgcagcgtatttgataaaccggactcctagttcagttctcgacttcgcaacaccattcgaacgcttatttaacaaagctccaacttatgatcatatcagagttttcggctccctgtgctatgcccatgatcagaataaaagtggtgataaatttgcttcccgaagtaaatgttgtgtttttgtgggttatccgtatgggaaaaaaggctggagattatatgacttagaaaaattggaattttttgtctcaagagatgttgttttctctgagacacagtttccttttgctccgattaatcacttgcaggcttcagacgaatctaaagctttgtgggctccaatatctgaatttttggaaaatgatgattgtgggcttcgtaagcccaatcctattaggtctgttgcattagggcctgtatcatccagccagctgtcgactcccatctcatctgcaaatgatacacgccggtctgaaaattcagacggtgacaacggtggtgccgacaacttcctgaaccaaccgccggtgacaaa

SEQ ID NO: 3176 - DNA, 264 bp, Arabidopsis thaliana
tactaactattgatcagcaaagatcaactgctatggatcaacagaacaaactagttgatgttcaagacccacctaatgttgatcaaccaagaaacatttgtgctggtgcaggccacgaaatgatcaccatcgagaaggaatagtgcctccaccagttcagaacaaccactttgacgtcccagatgtggtctcatctccatgatccaaggacacaagtttcatggtctacctatggaagatcccccggacggtctagacagcatt

SEQ ID NO: 3177 - DNA, 554 bp, Arabidopsis thaliana
  unsure (1)..(554): unsure at all n locations
tnnnnnnnnnnnnnnnnnnnnnnnctaaagtctgatccttaacctgatgccgaagaagattgaaactgaaaatcagtttctgcgcctgctttcaaactcacctttgcaggtcgatattcagctgttgcgcatcgattcccgtgaatcgcgcaacacgcccgcagagcatctgaacaacttctactgtaactttgaagatattcaggatcagaactttgacggtttgattgtaactggtgcgccgctgggcctggtggagtttaatgatgtcgcttactggccgcagatcaaattggtgctggagtggtcgaaagatcacgtcacctcgacgctgtttgtctgctagtcggtaacaacctgaataaccctatgccaatacacgataaatcccctcgtccgcaggagtttgctgcggtcgatcttggttcaaacagttttcacatggtcatagcccgtgtggtagatggtgccatgcagattattggccgcctgaaacagcgggtgatctggcggacggcatggggcaagataatatgttgagtgaagaggcaatg

SEQ ID NO: 3178 - DNA, 582 bp, Arabidopsis thaliana
ggatcccgggttgtttgctttaacttgcaagcaaagacaggtttgcgtatagaaattttgagtgaatatataaataacctgaaagaacggtttggaagctgtccagggaatgacctaaggcaagaatcggcaacatcgaggctacatggctgactacttccgggtcactactgtatgcgaatccccagatcttcctgataagtatcaagaccgttccaactagtatactctctacgatggaaaagctcaagaccacgcgaaccgcaagcttagcccctttcggattccctgatcctaactcatttgacacccttgtgctgcggatttgcacaattaacagtaatattgaggttgaatgatctctatatatggaatggtttactaattaatgactagtgttgttattgacctagcggcgccactaaggccaaacgggatcatccagacggttcctgatgtattaaggcggcaaatttattaccacactcaatcacaaggtaatgactaaatttggttctgaattatgacgaagagataacaattattactatcgttcttgccagattgcgaggacaagaagtt

SEQ ID NO: 3179 - DNA, 961 bp, Arabidopsis thaliana
ctaaaggcttacggtcggcgtgggttgccagcagcgagccgttgcccggctgcgacaggcccagcgcttcggtcaggcagttcattgagttagcggtaaacatcccggagcaggaaccgcaggtcggacacgcggaacgttcaacctgatcgctctgggagtcagatactttcgggtctgcgccctggatcatcgcatcaaccagatcgagcttgatgatctgatcggaaagtttggttttcccggcctccatcgggccgccggaaacaaagatcaccggaatattcaggcgcagggaagccatcagcatccccggggtgattttgtcgcagttagagatgcagaccatggcgtcggcgcagtgggcgttgaccatatactcaacggaatcagcgatcagttcgcgagatggcagtgaataaagcatccccccgtggcccatggcaatcccatcatccaccgcaatggtgttgaactctttggcaacgcgccagccgcttcaatttgttcggcgaccagtttaccgagatcgcgcagatggacgtgacccggtacaaattgggtgaacgagttcacaaccgcgataatcggcttaccgaaatcggcgtcggtcattccggtggccggccacagcgcacgagcacccgccatattacgaccatgagtggtggtggcggaacggtacttaggcatactttatttactcccagtgtctgtctcgtaaatgggacggtgcgtgccgtcccattttttgtatttattgattaacttgatctaaccagccccattcatcttcggtttcgccagtgaagaggccgaagaaggcttgctgaatgcgtttggtaaccgggccacaacggccttcgccaacctgaataccgtctgacgtgcgcactggcgtgatttctgccgccgtaccggacataaacacttcatccgccaggtacagggattcctttag

SEQ ID NO: 3180 - DNA, 946 bp, Arabidopsis thaliana
gaacaactaatccaaaagggatctatcaatcaatactcaaccacctagcatactgagaattctacactagtctaacccatcctcagaaatctattcactactcagacatcattgtagagaacaaaaacgttgaacaggttgaaaacataataacaacagtgtaacagcaggatgatagcaagatgaacaacagtaaacaaaaatcaagaacaaatactgaatacaaaatagataaagagatatccggattaaaaaaggtctagaacatagtgtctacggaataaaactagataaaaacttgtcctcgaaaatgtaaagtacatgctacttatagcaaaatattctgaaaccctaatactcaaaacgactcagtattgggacggattaagaactgtactcgacccaggtggtcgagtgtgtggtcgagtgaatagctggagtcttcttttcttccttgtgcttgagtgtctggttgagtgcggaatggagaagactctgaagctcgccatcgagtatgtagtcgagtggtggtgatggtgatactcgacttccaggtagagtggtgtgatcgagtgatgatcaggtaatggaggtgaagacactcgacctcggggtcgagtgaagtgaacgagtgattgttaggtggtagaggtgaagacactcgaccagggggacgagtgatgagatgaaatcgagaagtcccctactcgacctgggggtcgagtggtctttgaaggtcttgaagcttctactcgaccttggggtcgagtggtttgacatgatcaagtctgcttggtttgacatgatcaagtccgcttcttccaattagctcgtcaacaactccaaatcacctgaaatcacacaaatatgcaacatgaatgcaaaactatcctacatcaaagtgatgacaaatgatgagaaatgatataaaacagtgatgatatga

SEQ ID NO: 3181 - DNA, 905 bp, Arabidopsis thaliana
atacacaaagtgattgggcatttgactaaatactgtagtgtccttaaaagatatctcgcagaattatgggcaagcgggatctctctaaattcaatatagaagacttcgtgaaaaaatatcatgaagcaagggacaactccgaagctcaaaaccctaacgtgaaaaggccgaggtcgtccaacgaagaagaaccaaggagttcagagggaaagatcaatgtgatccttggaggttccaaactttgtcgagattcgatcaatgctatcaataagcataggcgaaatgttttagttaaagcaagcttaagtgaagaagttcactttcaagtttctttaatatcattcgatgaggaagaaacccggaacctcgaaagacctcatgatgatgccttagtcattactttggacgttgctaactacgaagtaccaagaattctcgtcgacacgggaagtttggtggatttaatttttctaagtactttggaaaggatggggattagtcgggctgaggtgttaggacctccatctcctttggtggcggttacaagttagtcagccatgtctctcagaaccatcaagctaccagtttttgccggaaagatatcaaaaatcctcgacttcgttgtctttgttaaaccagcaacttacaacatcatccttgggactccttggatttatcaaatgaaggcggtccctctacatatcgatcaatgcatcaaatttccaaccccgaacagagtgaaaataattcgaggagatcaagaagcttcgcagacattgttatctaggtagccacggtttgaagatctaatagcaattaacgaagctcgcgaagaatggagtaattcgaagatttcctagtgggcaaaagtggatgatgtcgtgacaaagtgatattagagaaga

SEQ ID NO: 3182 - DNA, 1113 bp, Arabidopsis thaliana
taaaccctaaacctaaccacattggcaacaacgaaacactattcttacatttaccttttgaatgaacatttgacatgcgtcatgcatctcatcggatagattcgtttgaccaaaaaactttccgggccaaataacctcacctgggatgaaatctcttggggctggaacaaaatccgaccccatatctcctggtaaaggagaccacatccacggtaccgtcggctccactgctccatgagggattacacggtgaagcggaacccccaaatgttggcggataatcccgatgtcaactaaccactcaggtgctggtggagaagaacaatccggtgatgttggagtcagagacgcaggagaggaaggcgccgacgttcttactctctgaatgctccggcgatgagcatgtagttcaccggtgaacagtttcaatttcttgaattctctggtttcgtgtaaaattaaaagcaaacgagtaaattgaatagacatgactcttcggctgtctcatctgaactttgacgccgaacgattaagaaaatgggttgggcttaggcctttcgtttactaggggttgtagcatccctaaaataagtatccgttttgggtcttttgccatctttaatgggcttataaattacaaaaaacaaaatccaataaatttcaaaatatagagtctgctttatgcaaaattcataattcaaaattcgaaaaggcaaaaacgatttcaatccctaaatcgaaaaattcgaattccaattccgaattgcaaaattgatttagggttttgtgagtgccttctctaactactccgatgagttcaagttcagtgtcagtgtcatctggtgttgatggagcccgtggttttccggtgaattgtgcgtgtggagcagatgtgacgatcttcacatccaagagtcaagacaatcccggaagacctttttccggtgtaaaaccaaaagagatccgaaaatgtggacaaacaaaagagatgtaagtagagttggtggttataatgtgtattcgtatgttgtgtggaattgtgaacagattggtctttcaggattggtccttctatgtcagatacaaccatgttatatgggtggggattagggg

SEQ ID NO: 3183 - DNA, 1359 bp, Arabidopsis thaliana
atatagtttctgaattgcgacttgggattgtgttaagtgttttgtcttgatttttttttgtgtgttgcggttccattaagtaatagtgacttggtattgtggcattgtgacttggctttttgttgttagtttttgtctgactttgtttttgtgtgttgccaatgcattaagtaatagtgacttggcattgtggcattgtgacttggctttgtgttgttagattttgtctgactttgtatttgtgtgttgtcaacgcatttactaatagtgacttcgcattgtggcattgtaacgtggcattgtaacttggcattgtggcattgtaacgtggcattgtgttcagtgttttgtcatgacttggttcttgtgtgttttggttgcaattgtcttagcattgtagcattgtgacttagcttatcatggttgcattatgtaatagtttctcggcattgtcttgatttgtttttgtgtgttttggttgcattatgttatagtgacttggcatttgtttttggttttgagtttctcttaggtggctccaaagaagaaagggaggatatatggggctggttcattgcagctagaagcctcatcagctcacattggttcttctgttcctcgagaagattcgattgaactctctcaaaagctggctgccgcagaagctctaattgcaaaccaagcggagaagatcactagctttgatgtgtacttcgactaccttgcctagaaagatccagacttcaattcactgccctctttcgagccagatcctctaggactgaacctgtcagatccaacctgagacctgaggtgccaaatgccacaactgctacatctgctgggatcgcacatgtgactgtcgaagctgaaacagttggagctgaggcaaacactggatcctctccatctcacactttctaaggcacttgctacactctgttttaatttcactcatcacaaaccctagacaatttaaaaattgtataattattttgttagattcaaaattgtatttgaatgtcaaactactttcagtctttaaattatgagtttaagctttcaaataagtttccaaattagtttcttaccttaaataaaaagttaagattagattaaatcaagaaaccaattaagaagatcattaattaagctaaacacaacagtaattacgtttacaaaataattaagagcgtcgcataaacctagcaaatccatcaaaaaatttgctagggatttgctactacgaatacatgaactcacaactctatcgcaggtttgctacagataaatgaatcgcaactccctcacaaagtttgcaatgaatttgctacatttattattactcgcaaattgcga

SEQ ID NO: 3184 - DNA, 796 bp, Arabidopsis thaliana
tactccccacaagactatttgaatttcttctgtcttggaaaccgagaaatggtgaacggaaataatgaatcgggtacaggaagtgcaagcaacgagaacactcctcaggtaacaaaaccaaactgcttgacttgctaatgcggtttctatcgtcattgattgatgagttttgattgaaactgtattatagggattatgtcgaaagagcagaagatttatgatatatgttcattcaaaagggatggttgttgatgatgagtatgtggtaattggatctgcaaacataaaccaaagatcaatggaggggacaagagatacagagattgcaatgggagcttaccagcctcaacatacatgggcacgacgacagtcaggtcctcggggtcaggtaatagcacacaaagatagtacacacatggtttcatagtcctagtcgtatcaataatacttggtacataatctgcagatctacggatatagaatgtcgctttgggcagaacacatggcactgctagatgattgctttgtggagccagagagtctagggtgtgtaaggaaagtgagaacagtggcggaggagaactgggaacagtttaggagtgaggaagtgtcggagatgagaggacatctgatgaaatatccggtggaagttgatcggaaaggcaaagtccgaccacttccaggaagtgaggagttcctgatgtcggaggaacgttgttggatctttctagcatacaggagaacccactatctaatcataagcagagtcgcatttattaagaagaccttatatgtg

SEQ ID NO: 3185 - DNA, 566 bp, Arabidopsis thaliana columbia
gcaagttgttcttacatataactccatatagagtattacctgcaatcaaaagaaagataattgtaaaatattgtcacaagtgatatataataaccctcaaattaacaatgtatagatgagtagattttctttacttacggagaccaggatgcggccggtggaaccaaaagcggcatggccaatatcaggataggtctggacatcggggtggctgtcgaggcagtaccgcagaagcaaaccggtgtaaaaacaaagaataccaaatgcaaagagaatgataagtcccaaccatcctccttccttcacagcatatggtgttgacaatattccaaccccacataaaacattcactcctgcacatgtatctcatcactcagagaattttaactagttaaggtttacatagtgtcagtgaacagagcagacttgtcagttatttttctgttattcacaagttttgatactattgtctcttagttaataacttttgttttaaaaaggactaaagtgttttattcttttgctggacaaaatgtaagaatagtattggtgtacatatgtattag

SEQ ID NO: 3186 - DNA, 553 bp, Arabidopsis thaliana columbia
aaagacaaaacccgattgtttcgagcacaaacgtcacttgtggtttacatcgtcttcatcatctccataacttcatatctcctctccttccgctgccaccgttagcgatgtctttggacactgtggacaaactggtggtgttcttggccaagagagacggaatagacaagcttgtgaagacattccaatacgtggccaagctcgcgtgctggcatgttgaagccacacgacccgaagccgccgataggttcaagaagtgggaggtcgcctccggtctcagccgcaaagccttcaggtcccacatctttttaatattaatcactttatcgacaaagtggcatcatcgtaaatatagtttaatagatgaaatgaaatgaaatgttttagtcacttcttgattaatatcttatctcatctagcatatttgaatagtgactagtacgatacactttatattacaagaaaaatataattgaatagtgattatggtcgaattatgcgaacaggaccgggagatctctcacggggttcaatgcgctgagacgaaccccgg

SEQ ID NO: 3187 - DNA, 594 bp, Arabidopsis thaliana
ccaacaaatctctctttgcatcgtctagttttagcaactgaatgctctgagaaatgaactcgattacacaacgcggacgatgctttgcttgaagaatcagagataagtcatctgcttctatcaagttccggagatctcttgctatatctgaaccataaatcacatgacactgcaaatgaaattaaagcatcagaaaccaacaatagagtcaagcaagagatgaatattttttaccttaagagcaacagggaaagctgcaatgtaacgaagaagcaaatctttgatgatcaattcatcaccggagctatcaacggaacaaataacttgcctagctaaatcattagttccagcaataatcccaacccaagctttccttccttcttcatacctagaatacgaagcctccgtacgaaagaccagaagaagagccaaagccggagctgtgagctgatacggcaacgacgaggatcgaagaattggaaaaataccaggaagccaatccaaagccacggcggagttgtagctagcgatcacaaccgcgacgcttgtgaagaagaaaacaggtggaatcagggagagtataactcgtgaaga

SEQ ID NO: 3188 - DNA, 596 bp, Arabidopsis thaliana
caaagtctccgctgtgaaattatatcgaatatggattatattttcaaaagaactccataacatcatgttaaagaacagtttttcttgattacctaaagaactggaagataaccgaaggaagtgtgaaaaagatgtatggtactaaaagggtggtcaacattttggttttccagttggtacgatccaatatcaacagataactgtcaaagcaaaacaataagaaccatcatatcaatatatgattcaaacaaaaaccagagaggttatatggttttgtcttttggctcacatagcgaagattgaagcggcccattggaggactgacgtgccaaaacctaccccgccgagcatccctacgtctttcacgagcttctttgcagcggcgacgaactcattcatatcggaattgatcaggttagccgcgttctcctcagtcttcatggccaaaaactcaccccttcccatttttaagttttagtttgtttgtgaatgtagtaaactctctcacatagcagagtatttataaccaatcacaaaacaccttggctgtttgtgacaactgttgaatcagaacgaaagaaaaaaaaatactgttg

SEQ ID NO: 3189 - DNA, 531 bp, Arabidopsis thaliana columbia
cgcctaaagctgttataccgtttctactgttgtcatcatcattatacaatgcaatcacctctgaccaaccgtagtaacttatcatttccgcaatggcacgcatcagaaagagatcactaggtgctgtctggacaaagaacgggaactgaagcgccgagagactagggtctaaagctgtgaatgacaacataggcacactaagctcatttgcaagatgagacagtacatgagccattattgatgtctgaggaccaatgatagccacagcatcagtctccatgaattgcaaagctgtgaaataaaaccaacacaaaggataagtaaaagtttagttccaaaacaagaatcaacgaaacaagatcatatctttttttcacctcccatgatggtgaggaatccattacgctttgcatcatacgtcgttatacgcaattttgatccaccaaggaagctaggatcagaatttacatcttcctctgcagctttcatagcaatatttgtaacttcacctgtaaagtcctaaactgaata

SEQ ID NO: 3190 - DNA, 549 bp, Arabidopsis thaliana columbia
aattacaaaggaggtttattctcttcagagtgttgatttcgatagacaggttagtcaaattaaaattgaataagtcaaggagatgtgtatgacttgtttatcatgtgtatggatctttgaacctagaggtctgattcaagaagcatcatatggtttaatggatgtaatctttatcccattggttgttaatagggaattgcgtaaacttgttcggaaagtacagttggttcatgagcaaagaaaaggcacaacagaggagaagcagaaagaagttgaggctgcattagtgactgctgaaaagtctctgaatcaattcctctgctccatggcgaaacaagtgcacagtgagcagactgatttgtacttatgaatgataatgtgttcttgactctctatttgttttttatatatatcagaactccattctttccccagacatccaaaggaccatagttttttaggtgaatgttgttaatcgaatgatcctgtacaataagtccataaggcataagcttggcaaattgaatgatgctgttaattcaggatagt

SEQ ID NO: 3191 - DNA, 738 bp, Arabidopsis thaliana
tacagaattaatatctattgcaacctctaacacagtagattagtttttgcatgttgttcgattttggccaccattaccatattgggaacacgcatgcaatttttttggtccttttctatctaatgcaacctctaatgcagatttcactcttgttgttttaggcctaccaggttggggcctcacgtcaggcgagtgacatattttctgcaaaacgatgtcgggcaaagtgcatgattcttgtgacattaccgacttgtcatatctgttgcaaaggtagtctttacggtagtaggggtggcattttgtgatccttgatactttggccatttctacagaagcgagagcatgaatgcaaggtaacttctcaaggtcaaacatacgacacgtacatttattttgggatagattgacaacatttattgttgaagagcttctcacttcgtattgatgaggatctatctcttgtacttttagaatactagctcttaacacgcggctctgaccacatataaaggagagtcattcaataacataagtagaaagattatctattatggagagtttaaatagaatttgaacctgtaatagttttttaacactagtagtcagagttgttgtcattccacaggcttgtttacgctagcggcaaatcaacgggttagcatcatcctcactttatcaagcaatgcaacaatatgatagtttctgtagggcctaagaactttatttattggggat

SEQ ID NO: 3192 - DNA, 682 bp, Arabidopsis thaliana
gatcccctgaaacaaaagtacagacaaccagatttaggacgagcttctcttctgcttttaagaagtctatgatgaaagtggtcggagaaatcacctggattccagctccgatgatgatacccatgaggaagttgggaacaatactagcaattgccatcattaagctctccacaacggtgacacttgcatagaggcagagaacaaagaagaggtagtgagtgaatcctggatgcagacccaccatgaagtaacagattgtcccggagatgaaagttatcatgatcaggaatggtgttgcagataatgtgttggctatcacaaacgcagctactccatagtgcccgtttagtctctctctttggaagacctgcaatcattttcagtttaacaaaactgtttggttcatctatttgcgcaagaaaaaaaactgcaggaggagctaactaaccttcatgtcttcaacgaacgaaggaaatccaccaattgacatgaatgttacaaagccaaagacgaaagacgcacatgagccccgtgcctgaattcacaaaccgaaagaggtaagattaatacaattctgagtgtgagttgctctccagtaaatgatattagcaataccagaatggcgctgtagctagtcccaacgttcagatagatggttccaatgcagactgtgaccaagatg

SEQ ID NO: 3193 - DNA, 514 bp, Arabidopsis thaliana
gcaaagaacaagctggaataatttgattttctctcataccataagttaacagttgcaacacctattaactctgagacattaaattgcacacaggggcttagtggtcagcccttatcagggccagatatcggtggctttgctggcaatgcaactccgcggctatttggacgttggatgggtgttggagctatgtttccattctgtcgtggccattccgaggctggcactgatgaccatgaaccatggtcctttggagaagaggtagtttttttcttgcaaatcttgtaagagctatttcaggcttttcggcattacaatttctttttcttactaaaagtaggacagatagacacctgagataactcataagatatgtacgcagaaatactaactcttttacgaagacctgcaactacatgtaaatttgttaaagaaatcaaccattcttgttattttccacttatgaactgtagtgttttaattagtgtgaggaagtctgcgtgcgcattgaaga

SEQ ID NO: 3194 - DNA, 522 bp, Arabidopsis thaliana
tgatagggtgtttacagtaaatccggttggtttaagtggtggtttggctctcttttggaagaagggtgtaaatattgatttcaagtactatgataagaaccttttggactttagtgtacaatttggtgaagtagatttttttgtttcttgtgtgtatggagatccttcttatagttcaagaccccttctatgggatagactatcaaggatcggtttgaccagaactgaagcgtggtgtatgctaggagactttaatgccattcttcacaatggggaaaagattggtggtcctcgcaggggagatgcttcttttcggcctttcaaagacatgctgagcaactgtgatatggaagagttgcctagctcaggcaatgcgttcacttagggaggcaagagaagtaatatgtggattcaaagcaagctggatcgttgtttcggaaacaagaactggctggttaaattccccatctctaaccaatgtttccttgataaaagaggctcggatcataaacagttttggtg

SEQ ID NO: 3195 - DNA, 572 bp, Arabidopsis thaliana columbia
gatctgacctcaaaatcaaacgagtttctttgataatcttcttgctaagtgttcttgttgagttttgctatggagggttcacaagtgaatatgtcagaggaagtgatttaccagatgacatgccactagacagcgatgtttttgaagttcctcctggtcctaattcacctcaacaggttcatgtaacgcaagggaaccatgaaggtaatggagtgatcatttcttgggtgactccggttaagcccggttctaagactgttcaatattggtgtgagaatgagaaatcgaggaaacaagcagaagcaacagttaatacttaccggttctttaattacacgtctggttatattcaccattgcctcatcgatgatttggaagtaagtcttatcactttaaagccgtttttttctttggatttttggttaattttatccttattgtcagtattgatagttgggttttggttttgtgttttagtcgaatatccttaatttagaagtgttcttttagttttacttgttatatatggtcgtgtacagtttgatacgaaatactactacgaaattgggagt

SEQ ID NO: 3196 - DNA, 616 bp, Arabidopsis thaliana
  unsure (1)..(616): unsure at all n locations
ctataactttgagcaaaccttgaacgactgctgcaagatgagcgcttgtgcctccgattaaccaaaactgttcatttctccaccattcttccagtccgattcccgaccatttgacctcgaggagtgagattagggttagggttacggtgatgcagagaaggtaggagaggaagtggatatcgaggctctggacgatgaattttccgctgaagagacagagagcagggaggaagcaatagacgaccaagaagatggaagtgaaagggtagatcccgacattgaggtaggcgactcgctggagaaacttgagccttctggtggcgaacatggcattgtaacatggcccaagcccacaaaggagatacttaaaatatcaactaagaaataatccaacatacactaagcatgctttgccaaataattccttatttcattttcattactatgtcccccattacattacacgaaacacttcattgtaactacttgagttgatcgaataaaaaataaaataaaatatccgatggaaaagatgttattgaatttgtttgtttggcgtaacaggaaattaagactanatgtttgatatatattggtaacataattatctgatgaa

SEQ ID NO: 3197 - DNA, 489 bp, Arabidopsis thaliana
catttgcaggtgattggtttaaataatgtccccattgctggtgatgaatttgagatcgtctcttcccttgatgtggcgcgggagatggcagaggcacgtgcggtatcactacgagatgaaagaatatctgcaaaggctggggatggaaaggtcacgctttcctccttagcttctgctgtatcagcgaaaaagatgtcaggcttagatttgcatcagcttaatatcatcttgaaggtcgatgtacaggtaaatagtcactttggattcatccactcatcgccttaaacattttggtttcctctgtctcttcttatttatgctgatgcaaatcatcaatgtgactactagggatccattgaagctgtaagacaagcccttcaagtcctccctcaggagaatgtcaccttgaaattcttgctacaagcaacaggggatgtgagcaacagtgatgttgatctagcatcagcgagtgaagctatcgtttttgga

SEQ ID NO: 3198 - DNA, 788 bp, Arabidopsis thaliana columbia
gtcggccctcttgtttccacaaagttcctcccgagtctcctacataaacatcagtctcaatgctaaaaatttattttaaaacaccccacttggaaacacaaataaataaaaataaattcaaaacaatgtattcttcatcatctgtatcaaaacgcttcgttctagtccctattgtggtcgtggtgaccacacaactcctcctggtacgtaacgtttcttcactaaaccttaccaattcgtatcttcaccacaaatgcgtagtcaatcaagggaaatacaagccaggaagcaagtacgagaaatccctcgatgatatcatccaaagcttttcgaataaagataaagattcgtatggttttcgtaccggttacagcatgaaggcctacggtaaagaacctgatatggtctccatcacctaccagtgccgtatcgactctcgtgggcccaagtgccagtcctgcgttgtcacggccggttatgaggtaacatacttgagtgttactaataaggtagctttcacataatgtataaatatgcgtgcagagtctaccgacacacactatatttatgtttagatctaacacaaatataaacgcgagaaactatatcttatatatgaaattagtccatgcaatgttgatattaattatgggcctgtgggcatgtggcgttaatatgctaaatgtctatgacagcttcttcgtaagagatgtccgagatataaagaggcaataatatggtacgaccaatgtcttgtggagttttcttcgttagatacttctgggcag

SEQ ID NO: 3199 - DNA, 535 bp, Arabidopsis thaliana
tccttgctccagcggttgaactgggggctttcctgttattagctccagaagcacaactccaaagctatagatatcacatttctctgtcaccttcatcgtgtaagcatattctgaaacacagcaaaacatcaattagatatgttagataagcgattgtgggaagaaagaaaactgtgatgttttactcacctggagcgatgtatccgtaagacccagcaacagctgacatggactttgagtaagagagatcaatcaacttagccaggccaaaatctccaacatgagcctggaaccgttcatcaagaagaatgttgttcgattttatgtcgcgatggactatttgaggtctgcaatcatgatggagataacacaaaccctctgcagcaccgagggcgattctataccgagcattccaatccaacaaacagtttttctcacctcgctgtagttgttcgcgaggcttccttttgacatgtactcatacaagagaagatttgaattctggtgatagcagaaaccatatagcttcacaata

SEQ ID NO: 3200 - DNA, 507 bp, Arabidopsis thaliana
agtgtgctctaaaggctgtggtatggttttggcgcttttaaaacagcaatgagcagtaatattgagttagccagcgccgaagtcatgaagcaaggcagatggaaaattatcgccaccatgttggcagtgacctggctgaatccgcatgtttacctggatacttttgttgtactgggcagccttggcgggcaacttgatgtggaaccaaaacgctggtttgcactcgggacaattagcgcctctttcctgtggttctttggtctggctcttctcgcagcctggctggcaccgcgtctgcgcacggcaaaagcacagcgcattatcaatctggttgtgggatgtgttatgtggtttattggcttgcagctggcgagagacggtattgctcatgcacaagccttgttcagttaggcgctatctgatggaagaataaaacagaggcgctaagcttgcctccagaggtcctgaattttgggcaagtcaattaacacggagagactaacgtga

SEQ ID NO: 3201 - DNA, 593 bp, Arabidopsis thaliana
tgccaaaatatattaattggatgaaaagagcctagccactatttatatgtatgtggcaaactgtttttattgttgacgattacaaatatatatatggaaatgcttcatgcggcgacagccaaggttgcagttgtaaacgggttcaagagtcagttcgagatcattcctcctcattgccataggatcatcttcttgatacagaccactgcattcacaatcatacataggatatatatgaaagtgcatatgtaatcatatgtttcaccgtacaacaaaggaaaatcaaatatcagtccattgtgaaatgtcaaagatatattaatttcatttatctaacaaactaaaattgtacttaaacacatagaccaacaacaacaaaaagtcgacttaggcttttcgcaaccattccatgtacattttccacactaataagtttgttcgtttggcgaccattgcattaacctacgttaataaaataatgttttaaaataaagttttctagtttcaaaatcatgacatcatgtaaccatcactaacagctataacttcaatgaaattacaacacctaacgtaactagcttgcgatacatatg

SEQ ID NO: 3202 - DNA, 675 bp, Arabidopsis thaliana
ttttatattaattgtcatttgaataatttatttcaaaccgatcggtccttgccgacaatgaagatgtcgtgttccgacgaggaacaagaagtcgttgaaatcggagccaaaacttcattacagtccgatacactgtcttgtaacgtaagcaataactccgacgtactaaaactcatcgacgacgacggtttcgcaatcggaacttccggcacatcagcttcaccaacaagaatctgaaccacacttctcatagtgggcctggtgaccggatcgggttgtgaacaagcaaggcccaccatcataacccgactcatctcctccgggttcaactcactcaaccgctcgtccacggcggtcaataacttcccttctctatacaaaccccaaacccaatctaccaaactcgacctcaaaccgggtcttaaaccgggttccggttcgggtcgggttatgggtcttctaccagtgcatacttctaaaacaacggctccgtagctaaaaacgtcggttttctccgtcgctcgaccggttaacaaatactccggcgctaaataccccattgttccagcggcggcggttgcgtccggcgatttatcgtgctccgtttgcctcgcgagtccaaaatcacctaacttcggattaaaattcgcgtcgagcataatgttacttgtttta

SEQ ID NO: 3203 - DNA, 533 bp, Arabidopsis thaliana
gaggatgtcctgacaatgtgatagttagcaaagtgaatacaaatgttgagatacagaactcaactttgcaactttctgaggtcgttgaaaatcaggaggtctccgacaaggtgataccagaagtcactcagtcagacggagatggttggtccttagtctctccagggaaaggaagtacaagttctgaaaaatcaaatggaaaacctttagagttcggccaagtaacgcttttatcctcttctcgatactctgttttgagtgatcatgaggagaatggggacaaagaagagacagagcgtggggaacaggtggaagttttggattccaacgtgggggctctgaagaactcggcaccggagacggagaaaacaggggcgctgagagtcaatctccctcgttcctcgaagagctcccataaagtactgtcggagacttttactcaaaaagcaagagacaatgtctcaagcaattcgagcagaagaaactccaaaaaacttcattaaatgattggatttgtctggaatgtgcgcgga

SEQ ID NO: 3204 - DNA, 552 bp, Arabidopsis thaliana
  unsure (1)..(552): unsure at all n locations
nnnnnnnnnnnnnnnnnnnnnnnctaaaggcgatccagcacggtctggcgattgccgccgggattaaagcagcaaaagatctcggcaatatgccgccgaatatctgtaacgccgcttacctcgcttcacaagcgcgccactggctgacagctacagcaagaatgtcatcacccgcgttatcggcgaacagcagatgaaagagctggggatgcattcctatctggcggtcggtcagggttcgcaaaacgaatcgctgatgtcggtgattgagtacaaaggcaacgcgtcggaagatgcacgcccaatcgtgctggtgggtaaaggtttaaccttcgactccggcggtatctcgatcaagccttcagaaggcatggatgagatgaagtacgatatgtgcggtgcggcacgggtttacggcgtgatgcggatggtcgcggacgtacaactgccgattaacgttatcggcgtgttggcaggctgcgaaaacatgcctggcggacgagcctatcgtccgggcgatgtgttaacaccatgtccggtcaaccgttgaag

SEQ ID NO: 3205 - DNA, 514 bp, Arabidopsis thaliana
  unsure (1)..(514): unsure at all n locations
nnnnnnnnnnnnnnnnnnnnnnctaaagctgcgtgttcgtgatcaactgctggaaattggcagtcagcaactggcatttacccatcaggaagcgaacgagttttttgattgccgtctgtcatcgccgattgaagccgcagaaagcagtcggatttgcgatgacgtttccggttgggcgacggcactacagctaatcgccctctccgcccggcagaatacccactcagcccataagtcggcacgccgcctggcgggaatcaatgccagccatctttcggattatctggtcgatgaggttttggataacgtcgatctcgcaacgcgccattttctgttgaaaagcgccattttgcgctcaatgaacgatgccctcatcacccgtgtgaccggcgaagaaaacgggcaaatgcgcctcgaagagattgagcgtcaggggctgtttttacagcggatggatgatacggcgagtggttctgctatcagatgtctgatcggacttcatatttcgagatga

SEQ ID NO: 3206 - DNA, 474 bp, Arabidopsis thaliana
cggtaattacaccgtcaaatctggatacgaccgattaatatgagtagataggagactaacaacccaattagcaaaaacagaaaaaacgttttaatccattgaaagggaacacttaccatcaccagctacgtcatttgtggcgttacaacctgtttcacaagactggcaccaacgttcttaattctatccttgaactcaatgctcttggcaacagtcacaccatcctttgtcacctttggtgcaccccagctttgttcgatgatgacattacgacccttcaaaaatggttttagacatgtagtatcagagagtgtgagggtaacaaaacagacgattgttgatacttgtcaataggtcgtcacgttatctatttttaactagattcacttacaatacaagtctcttacacagaaattatctgaaacataagtttataccttgggtcccatagtgactttaactgcatcagcaaga

SEQ ID NO: 3207 - DNA, 592 bp, Arabidopsis thaliana columbia
ccaacttgacatccgtaaatataacacccacaaaaaaaaacttataacactcctgtccgacagtcggtgcgccacgtccgggaggctttaaagacttgttaccgaccctaaaaattaccacatgatctttctccatgctttgtcctcactcgcatggttccgacagttactttccgaaaggtcatccatcctgaaactactccagcccaagcacgcttaacagtggaattctctcaggacctttgaccgaaaatataagtgcactttggtgacatagatggccaaatcagttcttttaaatttctccgcatgcaccaccatattccccgaaatcggggtgttacagtattcttcttagacgttagtccactttgctacgaaggaaacaaacccagttctcaagcttttggtcactggatttcactcttcttctctcaagtcagcctcactgatcctgtcatagctgtaaaaatctctccttttctttgattctttcttccgcaagctttttctcttcttcgatcaatgaaagatagttcccttttgtaggtatcgatggagaagaaggtaacaacgacgcagagaattgttg

SEQ ID NO: 3208 - DNA, 557 bp, Arabidopsis thaliana
cgccagtcgtaaccacttaatttcccgcttgttacacattaaaatcataaatttggacattcacacttacatggttttggtaatgtttcctccaaatcgttccgtacttttcgctgactggtgaccggagctaacggtgccgtcgtggccaaagcctctgcctctcctgccattctctctctcttactcttttacaatctcgctgtcttgtgtaattgttaataattgataatgctctctgtttcttcttatgcaaaagacgtacacattgatgttttggtgttcgtgatcctttataagtaaaacgatataacaaggatgatgtgaatagggacacgtgtcaggaagtagtggtgtaaacatttaaaagaaaacgaagacgacaagcaatatgatcacatataatatggtccatccacgtggttattttcaatttgctaaaatgtaattgtacttttgttcacgaggaggacggtggaaaaaacaacgtgcttattctatgagtttaggaagagactcataagatagcatatgcgagcaaaacatgattgactggg

SEQ ID NO: 3209 - DNA, 697 bp, Arabidopsis thaliana columbia
tgcgagttcccctttgtttactctctaaaaagaataagtctgggagagagaaagaacaccaaagaaaaaaataaaaaaagaatggtcgatttatcatggtatagtacaggaatgagtcaagcttgaatgttagtttgtttgatgagacccagcgatgaaagcctggtggatatagttgtggaacttaggtatggaatctagaatgttgtgtaagcttgcaaagaagtacatgttggttaggatttgattagaactactaggcatatcgatttggttaaaataatcatggcaatagactagagaatgttgggagttcctgtgttttcaaacatcttccacgggttcggcttttgtgttttgcttgagggcaagcaaaagctaagtctgggagagttgatatatccctatttttactgtttttaactatgttttaggtataggttttagagtccttttgttatttctagagtcttttctagtcttttttaggtctttacatgtttgggattcatttggagataatggagcattctggaggaaaacagagaatttatgctgctgaagaaatccggagacgaaaaagcacgtaggtgtcgaacgacaccacccctggtgtcgagcgacaccaatacctaacagcaatttcgaaacgcaacttattgatgtttttgaacatttccaaattcggcccagaact

SEQ ID NO: 3210 - DNA, 575 bp, Arabidopsis thaliana
aatgataaaccctaaaagaaaagtttaattaaacaccattcatgaaatgacagattaaatgaagcccactatatatttttataatgatatatagtcatagccagggactcacatcacaactacaagaaacaactagctcgaatattcaacacattttgtacgaagtaaacgtacgcaaatgtattaaccggttattcaacacaaagcaacgtagagactacaaacaaaacaccaatattaatgtgtttaggctacctctctagagctcggaggcagctgcttggtcaaggtaccaaacattttcgacttgagcactaagatgagcagaaggtaacgagaggttgttgtgcttcatgatctcagccacggatttggccggtgctttgtcacaaatggccataagattgtacaaagtagagttgatgaccggtaaagtgaatgtgattctctttggtggtggttttggagagtcggtgatgtaagtgacccatttctgcttctcattgatctgtggatggtttgggaagagagacgccatgtggccatcaggacccatccctatgaagttgtagatc

SEQ ID NO: 3211 - DNA, 805 bp, Arabidopsis thaliana columbia
gcggattggaggaatgatttgttcgtttcgcaagcctccacaatcgacttggatagcgtcttgcgtcaagctgcgatggcccgagcagaagtcccttgaggtaagggagggggcaatggcagttggagaagatgtccagggggctcatcctgagcttgtggttggcctctacgaatcggtcgagggtaaaggagttccagagggtatccccttcgatgacgatcttgaagaattcggcgaattcaacagacggtagggtcggtgcgatgaaagctgcgaattgaaaattaaaagttggtcagataagccaagaagtaaataagggtcatatgcatgacctaatatctagtaattgtaggggattcgagatcaatgcaataacataatttaggcgggaaataagagagtcatttggcgcaatctttgcctttagaacattaaagccttccgaactggagtgatactttgaaagacttggagggctaattgttggtgtcggatcgcgcaccatgggcttgggtccggccaaagattgttacacaagtaggagaggcccataatagagagggcccataagtgtcctcgaggtgagagtatgggcgagatgttgatttgcgaagtggatgcagcatcgaagtcagaactactcggattgaagaagccgaatgggccggaaggagaagttcagaaggcccggagtggattcaaattcaaacgtccaaatagttaattcaaagactaaaaacggatacatttaaggtagaatgattgtgagtaaatggggattaaatgtattctttggata

SEQ ID NO: 3212 - DNA, 1106 bp, Arabidopsis thaliana columbia
cctttaatacacaaatgtttgaagaaggaagtgaagatgaagtaacactctatgggttgtacacaagatgaagtcaaaccgaaggttggtttatcacaaaagaaatggtttcccaaagaagatattgttctcgtcagggcatggcttaacactaacaaggatcatgtgattggtaatgaccaacaatgtcaatcattcttgaaacagattgcatcatatgttgcaatcagtccgcaacttgattatctgccaaagagagagcatgctaaatgtaagcaaaggtggtcaaaggtcaataaaagtgtgaccaagtttgtaggttgttataagacggcaacaactcataaaactagtggacaaagtgaggatgatgtaatgaagttggcttatgaaatctactacaatgataccaagaagaagttcaacttagagcatacgtggagaaagttaaggtatgatcaaaaatggtgtgaagctgcaactattaaagggaataaaaatgctaaaagaaagtgtgtcgatggttattgatatggttcaaattacctagaactactctctcaaataagagatcaattgcagtattttaggatcgaattcacggagttcttttgttaaaacagttagttaaatgtcgagattaagctagcagggtaatagtgaaaataaaggagaacaaagtaaaaagacagcagattgattgtgttgtaaacgatttaataaagagctaggacagggtattctcagggtaactattagttagtagactctaatgaaagcaaggttgttatcgaaccattcttaaactcaaactctaattatggaataaccggtgggcgtgctgcaaaactccctatatctatagcttataataaccagagaagccgagaaactatcaacctaaatatgcattcttaacgagttcaattgttcattttagtagataggccgattcttattacacacctataaaccagactcatcaaataatagatccaactacagatacctatggcgggcatatctattgtctggattcaagatctagttaattactccagatctagcattatgcatagttaaagatgaaaaattctacttttaac

SEQ ID NO: 3213 - DNA, 577 bp, Arabidopsis thaliana columbia
aaatcactaaatgtcttttccaagaataccacatgtcttttttcagccggcctcttttttttaaggaatactaatatgcaagtctaacacgaatgttaatttttaacttaactctgaaaaaaaatctaacacgtatgttagaatagattaaactacatacctcagccggggcatggcgatcagcaagctggaaagccaaaagctcatggaaaaggcaaccatagtagtattgactgataatagcagtatgaccttctaagacttccacagttttggacagggctttagcaatggcatccacttctgtaatgacaaaggctacttctaaatccgaatagacctgttgaacgcacatgacacaacgttaagatcatgaattgatctcagagttagttagatctcaattaaatgagatacaacataatgcatactcgtcaccaatgtggttggtcgaaatctttaccttattctttaccagaccgcagataattgctgcatgagaaggtagttgatttcagcgagatattttagtacccattggatgcaggaaggctagacactcaaagtgatcagatat

SEQ ID NO: 3214 - DNA, 576 bp, Arabidopsis thaliana columbia
caatcaaattttagatcataatgaaactgctttatattgtgaaatccaaacaaggcattgtggacaaggctaaccacgcaaagcaatgatttggtggaaggatgcgtgacatcctcaggaagcaagggctcttcaagagttggttcactgtaaccacgagccattctctgagctaagacagatccagctggtggtgtatgactactcgacaaagatcttgccgacctgacaaaacaaaaacgcgaaaacacacacacaacctttaaacaaatctctcgcttgaaaagaattgatttcatcataatgctagtatagcctgagtacagaatctaaatggcaccattacgtgtaaaatagttctcttccggtaaaactagttcgttgactcccaggaatcatagtgataggtgtggtttgacaccacaagtagtagtatcagagctatttctccatctgcccggaattttaacatcgctgattatgtttgatatacgttctgcttcacctacaccaaacattcacactcaagctgttttagcatacacgcaaaatggacagtctttaagaataaggaag

SEQ ID NO: 3215 - DNA, 522 bp, Arabidopsis thaliana columbia
tagtaacggccgccagtaaaatttaaaattgctggcgatgagacattatagcttgtttgcatgaaagttactaagtgattagagtttgtttggtgcagatatgagcaatctccaatcactggaggagggagcattggtgaagggggaatcaacactcagaaattgactaccgatgatgctttgacctacttaaaggaagtaaaggagatgtttcaagatcagcgagacaaatatgatatgttccttgaggttatgaaagactttaaggcacaaaagtaagatctttaatttctttcctatcagatcgattgaatttttgaagcctctgggaacaattcttcatcttgcatttacaggactgatacatctggtgtgatttcacgagtgaaggagctgtttaaggggcataacaatttgattttcgggtttacacctttttgcctaaggggtttgaaataacgcttgatgatgtagaagcccttcaaagaaacctgttgaatttgaagaagcgataagctttgt

SEQ ID NO: 3216 - DNA, 564 bp, Arabidopsis thaliana columbia
ctagtaacgtccgccatacaactgttgacccgttaaacaaccaccgttattaggtgtgtgttccggtatcatcataggattgttatgcatttccagattcgtcatcgaaggtggtggcacaaatgtggggacgatacagtaagaggcaagttcgttcttgacgatcgcgagttgttcttccaagtctttaatctgactaaggaggttgtaaatgatacccagacagccattgaccggatcattggcttgaacttgtgcctcccaagcgagcgtgtccatggcaaattctctttggcatgggtgaagactgttgataagtgtagccacatggcttgctccaaataccttgtgaaccgcttcgtagttgtccagtttagtcgacgggaagtaaggcgcaaacacacaatcttctgtgcattttctcctcaggtgcttgcatgccgcgcatggtgtcgatattctgtccatttgatgaaacatcataatctgtgaaagaaagaaagaaaatgtaattgtacatttctgatcacttctagaatatatacaaaatacatttaaatatag

SEQ ID NO: 3217 - DNA, 604 bp, Arabidopsis thaliana columbia
  unsure (1)..(604): unsure at all n locations
ataaagtgcaacgctttataaattgttttctcccatcttgtgctaactttttcctcctgctgaatggaagtaaaggcagtattgttggtcactgggtgaaggcagtgcagcctgtacgatttatacagggaaacaatgatttacttctgttgactcaaacagttggtttacaggttaatagctactacctaatttctctttttatcttttttcttacagctaattgtgatcactttcgactttgtggcacagaattatggtgctttcttggagaaggatggagccggttttagaggcaaagctaagcttactggattcaagaatggagatttagacctgtcaaaatcgtcatggacgtatcaggtgtagttagcgtgcatatggtttaaaattatatgtcttaaaaaaagttgaacgttgtggattcttttttctttctctcgctttatctgaaatatgaagattattttggaagcattgaatgtttggcgtttgttataggtgggattgaagggcgaggctgatanaatatatactgttgaacacaatgaaaaagctgagtggagactttggagaccgtgcttcccttcgatcttcatgtggt

SEQ ID NO: 3218 - DNA, 994 bp, Arabidopsis thaliana
ccttcaataaacctgtttctgggaaatatatgctaggggaggtggtcgctgtgagggttccgcttctccacctttctaattttcagattaatgactggcctgagctttcaacaaagagatatgctttgatggttttgatgcttccttcagatagtgcaaggcaatggcatgtccatgagttggaactcgttgaagtcgtcgctgatcaggttttacattgctgagaatttctcttctttgctatgttcatgatcttgtctataacttttcttctcttattataggtggctgtagctctctcacatgctgcgatcctagaagagtcgatgcgagctagggaccttctcatggagcagaatgttgctcttgatctagctagacgagaagcagaaacagcaatccgtgcccgcaatgatttcctagcggttatgaaccatgaaatgcgaacaccgatgcatgcgattattgcactctcttccttactccaagaaacggaactaacccctgaacaaagactgatggtggaaacaatacttaaaagtagtaaccttttggcaactttgatgaatgatgtcttagatctttcaaggttagaagatggaagtcttcaacttgaacttgggacattcaatcttcatacattatttagagaggtaacttttgaacagctctatgtttcataagtttatactatttgtgtacttgattgtcatattgaatcttgttgcaggtcctcaatctgataaagcctatagcggttgttaagaaattacccatcacactaaatcttgcaccagatttgccagaatttgttgttggggatgagaaacggctaatgcagataatattaaatatagttggtaatgctgtgaaattctccaaacaaggtagtatctccgtaaccgctcttgtcaccaagtcagacacacgagctgctgacttttttgtcgtgccaactgggagtcatttctacttgagagtgaaggttattatc

SEQ ID NO: 3219 - DNA, 560 bp, Arabidopsis thaliana columbia
attttttgagtttgtagaagagatgtgtttttaacgttgggattctacttcttacctaaaccagtattcgaattaaaaaggttcatgatttgagcatgaccatgagagatgatttatggttgataacgagtatgggtattgataacgattaacgagtataggtaatggatattttagtaacctaaccctagtcgtgagaattgttttaagaataaaccataagaagaaggttttacaaagaagagacgagccaaatgcttacacaatctgatcaatcacattcactcgagatacacaccacacactcaagaagaaacaaagaagtaagaaaagaaaaagaaaacaacaggggaacgagacacgtgtgtatgttttcaggggacgaccgagggagatgcggtggtggagcagcatttattaggttggacgagacgagagattgacgcggcggagatgatgagcataaggattacgccggcgaatgcggcgattaatgctccggcgccgtgatcacagtaagtggcgaatctatcacagattttgtcccactcgcgtgtttg

SEQ ID NO: 3220 - DNA, 559 bp, Arabidopsis thaliana columbia
gccagtgtgctctaaacaatggaaagacttttaaccaaatcgagatcaaaccggagatgattggacattaccttgcggaattctcaatcacttacaaacccgttaggcacggcaagcccggtcatggtgctacacactcctctaggtttatccctctcaagtgaagccatttcaagacttcattctgcttttacaatttcttttgttttgctcatctaaatctatcttcttatcatcatgtctctgacactctagtgtctttaaacttttcttattatcgtaaaaaaaattcttggtgattttctctataatacttaataccattatgagtttggacttgagttagtctttaatttttttttttttttatctcagtcttattttttattttattttataagtcttaaaattatttgattttgatccttatatattttaataatctacataatgcgtaaaaatacacttttcacttgaaacggttacaagatgaaataataaaatcatatgtaaatgtattaataatgaatggtcacaggtatagaaggggtgatgcata

SEQ ID NO: 3221 - DNA, 1053 bp, Arabidopsis thaliana
cgaaagtgagaatcttatccacacggaggagtgaggaccttctttctttcttataccccctgtagagtaaatgactgttatatccctcaatccttctcgcgtgactaaaccctccccttcttctctctccgtcaaaatctgcaaaaccctaacttttcgaatcagcggcagataacgatggtgccttcctccaaagccgtcgtttttgctaggcagatggcgaacgagattcgtgttacgacgccgtcgatgtccgcaacacgctttctctcaacgggcgacaatggtcaagtagacgagcagcagaaccctccagagcccttacccaacagacccttgcgaggggagagatcttccaactctcacagagaaccacccgctagacaagcccacaaccttggaaagagtgatactactctgtctgacgatggcttcctcgaacagttcaagcttggagtcaatcaggattcacgggaaacccccaaaccggaacaatacccgcaggagcccttaccgccgcctgaggattccgatgagatcttcaagaagatgaaggaaggaggtctcatccctaacgccgtcgccatgcttgacggcctctgcaaagatgggcttgtacaagaggccatgaagcttttcggattgatgcgtgacaagggtacaatccctgaggtcgttatctacactgctgtcgttgaggccttttgcaaggctcataaaattgaagacgctaagaggattttcaggaaaatgcagaacaatgggattgcccctaatgccttcagctacggtgtgttggttcagggattgtataattgcaacatgcttgacgatgctgttgctttctgtagtgagatgcttgagtctggtcactctcctaacgtccccactttcgttgaattggttgatgccttgtgcagagtaaagggggttgaacaagcccagtccgctattgataccttaaaccaaaaaggatttgccgttaatgttaaggctgtcaaggagttcatggataaaagggctccatttccgtctttggcttgggaagccatc

SEQ ID NO: 3222 - DNA, 535 bp, Arabidopsis thaliana columbia
cgatatccttatccattcacgtattggccgtcttagtacgaaaaaataaacctaaactaatatgaattcaggtaaaggtcaaatccgggattgaatatttcggctattttggagatattttcattaattttacaaggttagttagtcctaatggataattaggatatctgctacatacataacatgttccattatatatccttaataaatagaaaatgtatcgtgaaatggataacctgtctaaattggattattgatcaattaattaaaactactatcaggtggattacattcttggagacaaccctagagcaacaagttacatggtcggatacggagagaactatccacgacaagttcatcatcgtggttcgtctattgtctccttcaatgtcgatcaaaagttcgttacttgccgtggtggttacgcacatggtttagccggaaaggaagcgatccaaatgttttaaccggagctctagtgggtggcccgacgcctacgataacttcgctgaccaacgggacaattatgagc

SEQ ID NO: 3223 - DNA, 595 bp, Arabidopsis thaliana
gaaaaaaagaaatggcggatcatcaacaacatcagcaacaacaacaaccaataatgaggagtctccatgaatcatcaccatcgactcggcagatagtgagattcgtaacggcagctacgatcggcctatcactcctcgtgctctcaggactaacactaaccggaacggtgatcggtttgatcgtagcgacgccgttgatggttctgttcagcccggtgttggtaccggcagtgataacgatagggcttttgacgatgggattcctattctccggtggttgtggggtggcagcagctacggcgttaacgtggatttataagtacgttaccggaaaacacccgatgggagcggataaggtggattacgcgaggatgaggatagcggagaaagccaaagagttgggacattatacgcactcgcagccacaacaaacacaccaaaccacaacaactactcattagagtttaataattatatggatctatatgttgtattaagttttatgattacctacgtatgtttttttaatctgttcttactttttgaaaagatctactaaaattttatttctattttcgatacaattttttgtgtg

SEQ ID NO: 3224 - DNA, 532 bp, Arabidopsis thaliana
gttgcgccagtgtgctctaaagcacctctagaccacttaacgccaacggctggccatctaacagcagccgtggcgctatctccccttctgacgcctccggcgacttcaatccgccgcgctcaatacgtaaaacggcatcggtatgcgccccggcgtgcggctcagggtcatcaccagtccattatgatcgcccgtattacgcgccacgcagaaattttggttattacaggtgacctgccagtcggaaaacgcccgttgcgctggtgccgcccacaccaaagacgtcggcaacaaagcgaaaaaaaagagaaggaaaatgcgatacgcagtggacggtacgaccccagaagttcaaacaaacagcacaagtcgtatcttcgttgcgcaggtagcgcggctcaatcggatttgtcggattgagccaataataaacaacgaaatattattgttatttttcagtccattaaatgtgacgtttgcaaatagttaagcaataacgacgtcttaccgtcacgtatctcgccggttttga

SEQ ID NO: 3225 - DNA, 555 bp, Arabidopsis thaliana columbia
tcgttgcgctcctcgactgcactgatttgtttttggtgttaagaagtactgaaatgagatggattcggcttgagaaaccctcaactgcttcatgtaaggagttattcacttttagaggaaggttctatgcaactttctttaatggggacacgttcgttatcgatccttcttcgctggaacgactcccctaacacctcatatcgactccaactttctggttccatctggcaatgaggagcttttcctggttaagacagacttcctaagatgtagagtaagtaggctagatgaggaggctgctgaatgggttgaggtcagcgatttgggagaccgtgttttgtttcttggtggacacctggggaatttctactgctccgctaaggagcttcctcatggttgtggtttgactggggactcgattttgttcaccgttgggtcacgcaatgtaacttacccctataaatatggagtacatacaaataaaagaaaggctgaagacaatatcaattgttggagatctcaagggagaatcgtgtgttgttcgcaacagatatg

SEQ ID NO: 3226 - DNA, 567 bp, Arabidopsis thaliana
caacaacgttttaacaggtgatggtggggatagtggcctcagcaaccggggcaggaggtggagtagcttaccttggtctgaagggaaacaaagaagttagatggggcaaaatctgtcatatctacgacaagttttgccgtcatgttggaggagcaatcgccgtctcattgtttgcttcggttgtcctcctcctcctatccatcatctctgtcctctccctctacaagaaaatccgttgagtcactctctttgtttcgttgtttctctcaaggtaatacaaattgatgatgtttttgtttttttatttggtataatctgtcgaagttgacttgtatgcgtcttagttctgtaagtgttgtattatttaaatttcgttgattttgtataattgtgtgattaaagtatttgtaaaccgaggtttctagtgaatctttgaattttattgagtgttttgtataattgtgtgatcgagcattctgactcgatatctttttgcattcataaagaaaactattttggtccaagatggcaaaaataattgggatttataaattttagtgacaatga

SEQ ID NO: 3227 - DNA, 598 bp, Arabidopsis thaliana
gatatcgttcaactaattctggtgttatgacatgaaagcattctgtatatgattggggatatcatatacccaatcacccattagagcaactgccagtatcatcaagatacgatatgtagtaatgatctgtttaagatccttcaataaagctagaaagctccattttgagtagtagtcttgttcatcgcttaaccagaagagtaaaaaacagatattcgttcactattttctatcgtaagagttgacacagctaaggatacagaagtagatactatttcaaacaaaacttcagtcactaaaatagtcaaccaccaaacaccaaacattgaggcttagtagctagctcacctcgtaatacgcatccataccaaatggacgatcctcttccaatgtgaacgtccccaataactgaggcgcttggtgccacaaaagcttccttgtccacaatcggagccttatcaaatacattcatcagtgtccgatgccttgacactacacagagaaaaccacaattacatataagcaaatttcgtgaccaggaaacaaaaaaaaaactaagcagcaaaacacattccacatcaattaatcccttgtgcca

SEQ ID NO: 3228 - DNA, 475 bp, Arabidopsis thaliana
gttgactaataattatttgatacaaatattttaccgacatatgtaagaacaatagtgtcaaaattgaagcatctcaagggtattttagaacagatacccaatttatttatttttataatttgtcaccttgtttttcacacacaaatgacaatatgacgtcattttccttattagaataatttttttaacaaaaaaaagaattatttattttcgtctctcttattgcttgctacgctcaacgctgtgcataagcattctctttctgtggacgaaactaaacctgagagaaaaagccagaagaaccaaactcagaccgagagatagagattgagggagagctctagctctgtagaaaagaaggattcattcatcatatccagaaatggctctaaagtttaaccctttggtggcatctcagccttacaaattcccttcctcgactcgtccgccaactccttctttcagatctccaagt

SEQ ID NO: 3229 - DNA, 607 bp, Arabidopsis thaliana
  unsure (1)..(607): unsure at all n locations
nnnnnnnnnnnnnnnnnnnnnnctaaaggtgccactggaagacaccaaaatcaaatcccttaagatcgcctttttcatcccagttcagcggcccaatcacggtgtttgcaccgttagcttttaaatctttcaccagcgccacgctcatcgctgccggtacgctcaagggcagtcgccagagattgcaccgccgcgtaggtgatccagacataaggcccggacggatctttcttgtctgctttcagcgcatcaacgatgccctggtttgccggatcctggtcatagcgttttggcatagtgaccaacatgccttcggcggcatcaccggcaatgttcgacaacgacgcattacccacaccttccggccccataaactgggttttcaggccaacggaacgggcctggcgcacgatctgccccatttccgggtagtaaccgccgtagtaaacgaagtcgatgttttcttttttcaggcgggcgatcagcgcggagaaatctttctccccggcggtaataccgtcgaagaagacgacgttggcgtacgcatttcagcccgtcctgcacgaacgcgccagccttcgccatactgttgtttgtcgtgaatgat

SEQ ID NO: 3230 - DNA, 611 bp, Arabidopsis thaliana
gctaaacatagctgacgtatctccgtctcagtaatctgtgcttgcttcaccgtccttccattattcgtcgccaaaagccgtcgtattatatcgtcaagtaaagtctcatccatcgtagcaacaaccctaatttctctctaacgcacagaaattagataccggaaacttctcgtctaacgaatccagagagatccgacgattgttttaaccgccgacgtctctgggttcgtatcgttgacggagaagaagatacagagagcgttaagtagagagagggagagagacccaaatttcgtaaaccctagaaacttttataataaacgcggtaataattatttttcatcatccaaaactcgaagccaaagaaaggagcggagtggtcacgtgacaagttctcagacgcacgtgcgattgttgttgattagtctgcatccagttatgtggtttcacttggttcaatttaggttaggatcggttttggacaaaaacttataataaaaataaagataactaactaattttaattcatattatagttttaatatacttaaatttaaattattatatctcgtgacattagttaaatgggttggtccaaaaactttatatca

SEQ ID NO: 3231 - DNA, 683 bp, Arabidopsis thaliana
atcctctaggccagtgtgctctaaaggctgaccactttgcgctcctgttcccaaatcagatcatcctgcggcactccagcaaaaagcggctcggctccgggcgcaccagttcgccgtactgacggcgttctttacacagcgtaaaggtcaattccttctgggcgcgggtaatgccgacataggccagccgccgctcctcatcgatattatcttcatcgatgctgctctggtgcggcaaaaacccttcttccataccgaccatgtagacataaggaaactccagccctttcgacgcgtggagagtcatcagttgcacctgatccagctcttcttcactctcaccacgctccatcatgtcgcgcaaagtaaagcgcgtcaccacctgggtgagcgtcatcggctcatccagttcactgccttccagcatctccgtcatccagctaaacagttggttgacgttcttcatgcgcatttcggcggctttcgggctgggcgatgtttcgtacagccaggattcataatccatgccatggatcagatcacgcaccgcggcaatcggctcccgctccgccagacgctggatttctgccaaccagtgagtgaagcgggtcaatgcttcataaccacgtccgctaagcgtctgactcaggcccatatcaaagctggcggtaaacatgctttta

SEQ ID NO: 3232 - DNA, 839 bp, Arabidopsis thaliana
tctagcttagcttaacttatcaaagaaagattttctttcagttggtgaggaaagatgttctcttctggttttcatatgaattcaccagtgattaaggagatacgagctatgggaaaatttggaatgatggatctacgggtcgatgaggctgagcacagcatggaaatgcacttaccgtatttggccaaagtatttgaagggtaatcacaggggtagtagtgatgttaaggttctgaataactatgaatgacatggcggaatttgctgagactggctccattttaatattttgatcaggaacaatgtgaaagttgtacccatcttggttggagcagtaagtccagagaatgaagccatgtacggtgaattgcttgctaaatatgtggacgatcccaagaactttttctcagtgtcctctgacttttgccactggggctcaaggtttgtcttagctcttcatctcctttctctcattgaagtaccacattctgatgtaacgttacttttgatggacattgcttgagaaatgatatctttttctctttatctctttctaaaattcgccttaactgcataaccagattttctgaggcccttccagtgagctaattgcgctctgttatgtttatattcatatgtttttggttataggtttaattacatgcattatgacaacactcatggtgctatacacaaatcgattgaggctctagacaagaagggaatggatataatagagacaggagatcctgatgcctttaagaagtatcttctggaatttgaaaacacgatttgtgggcgccaccgatcagtattttctccatgtaagtagtgctaga

SEQ ID NO: 3233 - DNA, 284 bp, Arabidopsis thaliana
aaaacctaaaaggcacaatccatgagaaaaatacaaacatggattactcaaaggtgatggtgttctaccatccatttaaagtgcgattttatgaatactattcacccagaggcattccggatggtgtttctgcagccttactgccagtgactgtaacgctggacatcattactgtaccgctgcaatttctggttgtatatgcagtaaaccaataatcagtaagcgggcaaacgcgtttatgctgtatgcccgcccacagattcattcagcacatacttctcaat

SEQ ID NO: 3234 - DNA, 667 bp, Arabidopsis thaliana
tttccagtgttcctcgagggagaaaaaagctttggctctgaagttaacttacattgttggacttagccattcacctccatcgcataattgctgatccccacgttaaaccggctccaaaaccggatgtcgctatggtatgtcctggtttaacttttccgcttctcactgcctcatcaagagccagcggaatcgaagcagcgctcgtgttaccataattagccaaattcgatatgactctctctggtgggaaatgcagccttgtagccacagagtctattattctctggttcgcctgcaaatatatttcaaaaactatccgtttaaccatttttccagtacaaaagtttaaaactttcgccatttcaactcgaatttcaagtccattatcaatggaaactgaagaaatgatgagtatacttatcgacatacgaaagctctaaactttcccccatttaagcttgaattcatatctactatcaacgcaacttgaattaacgataaaattctgataagaaaataacctggtggaggaggaccagtcgatggcagaagcaggaagaccagctttttgtaaagcagattcaatagattgaggacacatttgacagcaaagcgaaagacctcttttcgattcatctgaatcaagaatatgaagattgttttgggt

SEQ ID NO: 3235 - DNA, 709 bp, Arabidopsis thaliana
catcgtgaatttgaaacatttttaagcgcaaattctcagcgagataaaaacgacgttgttttaatagttattggctttacaacttcgtcgtacacgccggttaccaaatatcgctaaggctcagaattatctctgttcaaagcttttgttttgttcccaattctgaagttttgaatcaacaaatcttcaataaagttttctcctttcactatctttccatattcttcttcttagtaaaactttgcattaatggcttacccaaatttgtaagctctttgtttcctcccttcttcttattctcttcttcattctccaaatttgtttctaggtttcttcagtttgagcaatgaagaagtctaaactcgataattcttcttcacagattcgattcgggcttgttcagttcttattagttgttctgctattttacttcctctgcatgagcttcgagatcccattcatcttcagaaccgggtctgggtccgggtctgatgatgtttcatcatcttcttttgctgacgcattaccgagaccaatggttgttggtggtggtagtagggaagctaattgggttgtcggagaagaagaagaagcagacccacatcgacatttcaaggatccgggtcgggtacagcttcggttaccggagcggaaaatgagggaatttaagtccagtctctgagatgttcgtaacgagagcttcctcgac

SEQ ID NO: 3236 - DNA, 505 bp, Arabidopsis thaliana
ccaagaacatcccaatttcacacacagacagatcaaccttgtcaatatttaattatagcactaaggctaaatattaaattactctttcacatggcatcatcaatacttaattcatgattatgtgtacacacaaagaaaacttagccacatagtgtacacaaatattaaccagaaccatatgaaaacgatgatacgaaattcttcaagcacacgtttcctaaaccaaatcagcaccgagaatttttcatttccgcggagagagagaacgaaaacagaacctggtggaaggagaggcggtttccgttttcgccggcgagtttcttcacgcgctgaagcgaacgagcagaggaattgtcgtaattgtcaacaacgacggcggagtaaccaccttcaagcagttgaagaacagtatgacttccgatatagccagcgccgccggtaaccaaaacactcttcgccatcgttaagagagaaacaaaatatcttagaagttcgagattctgga

SEQ ID NO: 3237 - DNA, 540 bp, Arabidopsis thaliana
caatagattacccacttctactcgatagttttctctataatatagagacaaaagaagagagcatttaaattctaaagaacaaaaaaggaaaaacagagcagccatgagagcttctgtttattcattgatcctactcttcttctcgtgtttactacatctatcaagtaagttctacaacagtttcattgtttttctttactatataaaactttctctaactcggattctttcacatgtatcaaaacagagtctcaaccgttcctcggagtaaactacggcctaaccgccgacaatcttccacctccgtcagcgagtgcaaagctccttcaatccacaactttccaaaaagtccgtctttacggatccgacccggctgtaatcaaggccctagcaaacacggggatcgagatcgtcatcggggcgtctaacggcgatgtacccggtctagcatcggacccgagtttcgcccgaagctgggtcgaaccaacgtggtaccttattatccacgagcaagattgtcgcattgccgtgggaaatgag

SEQ ID NO: 3238 - DNA, 678 bp, Arabidopsis thaliana
gacttgccattgggattcacgtggaggatgatcctgatgaagtcgatggaacattgaaaaatgttaatgttccagagagtgtgctcaagagcatcgactttgttggtcttgagagagctcttaaatatgagtttaaagagaaaggtcttcttgttgaagctataacacatgcttcaagaccatcttcaggtgtttcgtgttaccagagattggaatttgttggtgacgcggtcttggatcatctcatcacaagacatctatttttcacatacacaagccttcctcctggtcggttaacagatcttcgagctgcagcggttaacaacgagaattttgctcgcgttgcggttaaacataaactccacttgtaccttcgtcacggttcaagcgccctcgaaaaacaggtaaacaagattaagaaacaaagtatattgttctcaaagagtttcaaatgtttgactgtttggttactttttgtttttcagattcgggaatttgtgaaggaggttcaaaccgagtcatcgaaaccggggtttaactcttttggtttgggagactgcaaagcaccaaaagttcttggagacattgttgaatctattgcaggtgctatttttcttgatagtggaaaagatacaactgctgcttggaaggttagttagttagttatttcggttgaaa

SEQ ID NO: 3239 - DNA, 786 bp, Arabidopsis thaliana
cacaccgcgaatcttgtttgcttctgctacttgtgggactgttgtgtttgtagctggtgggttgaaaattgaaggaaacgggaccatggaagttgtggacagcgttgagaagtatgactctaagaccaaaacgtggacgcttctacgcggaatgcataagcggcggaaattctgctctgggtgttacttgcgtggcaagttttatgttctcggaggccgggatgagaatggtcaaaacctaacttgcggagaaagttacgacgagaagacgaacacatgggaactcataccggacattctcaaagacatgtctttctcttctgtccaatctccaccgctcatcgcagtggttggggatgatctttactcattggaaacctcggcgaacgagctccgcgtttatgatgcaaatgcaaactcttggaagaagcttggagatgtgcccgtgagcgtaagtctaatggaggatggggcgttgcgtttaagtcacttggagataagttgcttgtgattggagcatcagccggtccgtctagggccgagacaatgtcggtttacacgagccgtccatccgcaaatcctgcgaacaagctgtattgggaggagtctaaacgttgctgtggcgttaggttcaatcattttatcctaaactgttgtgtaatgattgcgtaagggcaaaaactttgcgaacgtgtggttttgtgtgtgtgtgattgaatagaacggtgctattgtgggttacttctgatcagagtctacttgagtttttggtgacgctagtgattg

SEQ ID NO: 3240 - DNA, 599 bp, Arabidopsis thaliana
  unsure (1)..(599): unsure at all n locations
gtggttgcagcaacggtaatgatccaaggagccgtgttgctaatagtctgagaagagggaccagcgttgccaccggancaaacgacgggaattcccttggcaactgcatgaaacgctccaaccgccacaccgtcttgagtgtccacttccggaaacagaggaaccgagaagccgttggagatcgacaaaacgtcgacaccatcgtgaatagcttcatctattgcttttaccaaatccgcagctgaacaagtagttgctcctgtaactaagtgccaacaagccttgtacatagctatgcgtgcccgtggggcccgcctctagcggttcctctcccaagtcctaagtagttcgtgtccgggacaaatgagccagcagctgttgcagccacgtgtgtcccgtgaccgtcgaagtctctaggagagatgtattctggattctccgcgtgtcccagttgctttcgtcagcaccaagaaatccattgatgaagtatttggcgccaattaattttctgttgcaaacggttgagccgttaaaactctgttttgacacacaacttcctttcaacgttttggtattggtcaagacattgcactgaatga

SEQ ID NO: 3241 - DNA, 987 bp, Arabidopsis thaliana
tccctcaacatattcttaatttgtaattctattattgtattgaccaataaatttcatatttcttcccaaaatatgttgttttcgatatgtattataactcagccgtaaagtgatgaactcagtcgtaatatctaaatcattacaaatcagccgtaacatataatttacacaacctttcgtcttctctaaagcatattactaactgtgacatgtaattaccaaatgtttcatcttccgtgaagcatataactcagccgtgacatgtaaatttaccgaacctttcgtctttcccgaagcattattactcagccgtaaaatatcatgtacacaacctttcatctttcccgaagcatataactcagccgtgacatgtaaatttacggaaccttacatgttatggctgagttataatccgtacaattgatttgtcacgaaacgttaaaactcaatgagttataatgtgttatggttcttagagtctacaatgacaggtgatttgtcacacgaactacatattactgctaacaaataatgaagaaaaagaaaattcttgcaaacaatactttgtctaacaagttttagcattatgcccaacttgtttagatagagaacatgcgtgttgctttctaaggcgtttatttccaataccaacttccaaagataatttaatcctaattttcttgggccttcttgggttgtttacaacaattagaggcaagcatatcaggagaaggatgaaagaaaatgaagaagaaatgaggaagacgatgatgaattagaagttcttgtgatgtaaaaaaacataggttaaggacaactcgggtgaagaacaacacagcgaagaagaagacgagttgaaaaaaattagggacgtttcgtatttctgttgatgatgatgagatggaatgatgacgtcgaatgttgcatccgacttcattttttaattgatgaattggcaagtaagccccaaacgaacatgtaaatttg

SEQ ID NO: 3242 - DNA, 1110 bp, Arabidopsis thaliana
atatttcagtctctaagccagttgtatgttagataacttgccattcacaacatcaaaagaaagtataacaaccataacacgaatctaaacaacctaaagccagatgctaaaaggaacaaccaagttgagaattctgaaacatcaaagtgaagaagtaaaacccacaaataccttaggaacaaaggaagagaggcgagagtgagcttcggatcctggaaccaaagcaaaatccaggaaggaagagagcacagagccggtgagtttctgcctaagccctatagtgagacgcacagcacgagcaatacgacgaacctccttcgtgtaagacccagtatcgatgagtgctgcaatctccttcaaatctgggaaacaaagaaacaaagcgtcaaaacccagaagaaacttagcaattatgaaaacagttcgagaattaaagcattcagatcgagatttactctgcatagtagaggtagaagaagagataatcgattgagaaggggtgttgttatctttcatctccacgtcctgagtcatctttgcacaaatctcgttactcttcacaaagacaaaaacaaggttagggtttttgcagaagtatgcaactaagccggtgagatttcaaggaaccgattgaagtttcaaccaatttgttgactgagaaagacggagagataaagacagagagcttactaaatcgataaaacggaattcgccgggagaaagtgacgatgatggatcagatttaaggacgagctgatgctgctgagactcttttctttcctaagtattttcctttttttggacacaacaaaaaaagtatatttctttttgttcaagacagcttttttccatattagtatttatatcttctacattacgattgagcaacaaatgtcgttgtagtatagtggtaagtattcccgcctgtcacgcgggtgacccgggttcgatccccggcaacggcgattaactttttggttactagttttgtttggacctctctcacttattttcgtacgctttcttcgaatagcccaaaacacaaccagcgcaagttgggttaatttctttttgtctcaaaacacgttggaacttggaattacaatttta

SEQ ID NO: 3243 - DNA, 852 bp, Arabidopsis thaliana
gtttctctatgttttccagttatgagctttgtcatgtttttggaaaaggaaattgagcggaagtcaacccgtaatcaagtaaattcccattttcccagttttggagaaaatgcaaatattagtgtttctcggaaaaggaaagagaatttccagatcgcatttaagaaaattcccaattcgatttctgtatttgcttctataaatacttctttgttgatcaacaattgcttcaccggacttttcctcctatttgcaagatggagagtgctggatcgtcttcctttgttggcaaaaatgttccgactttctcgaatgctgaggcgattgaacgtgggatgccgttcttcaataaccttcgagttccctggactcttcttttccaggcgagctcgaaggaaagacgtgaagccgagggtttcttgtcatgtgtcgagtcaagacataaggaataccgcgagatgttgaggtactatgacgaacgaaagtctgatatcgctcgaataatggctatgctagagagagtcgcatcctcgccattggctcaagaatggttttcagcttctggctccgatgccggacattcttttgtcatattgtgaggactgtgatcgagatgctgctgccgcctcaaaggagacgaatccaaccatctgagctgatggtcgatgtccatctaatacaccacaaaacactgatcgtctctcgaacaaaaagttctggaaattgaaatggttttcacaagatagaaatttgcagagatagaatataagagccagtttgacgcccggacgagagtctttctcattcaaaaccaaccaatttcgccgaggcagaaaacgttttcgattttat

SEQ ID NO: 3244 - DNA, 962 bp, Arabidopsis thaliana columbia
tgacattgcggatcacttcgggtatgtaacacacagaaaaaagctgatgactcaagaatcatccgtccccacagacggcgacaaaatgtgaatgtcggattcacacactcaagtatttatttatttagtgggtaggattattcttgaggacaaatatactagaaaatagataaatgatcatagagaaaactatgagtattgtaaaagaatgtgtatagctaatttgcaccaagaaatgcgtgtgtctttacatggtctttgacccacaatttatacccaaagaatacatttaatacctatttactcacaatcattatactttaaatatatccgtttttagtctttgaattaactatttgaacgtttaaaccgagtccactccgggccttctggacctcacctctcggcccattcggtttctccaattcgagtaatcctgacttcgatgctgccttcacctcgcaaaccaacatctcgcccatactctcacctcgaggatgcttatggccctccctcttatgggcttcttctacttgtgccgcaatctttggctggatccgaatccatggtgcgggatccgacaccaacattaatcaccctgaatttttgttttaaatatttattttcagttaataaaatgaatcaaatcttatattacaatatatgcttcaatatttttattaaaaatttttaattacgtaacattttaaaaatttgaaaccctaattatttcccaatccacattttctgttttaaatttgcaattgtacaaaataattatcacttcctaaaactttcttttctgatttttattaaaattttttttttctagcaaaaataaactgtgcacgtattaagctaatattgctgactcaaataatattaacaaaatgcccaaatttaggctattgaaataataataaagttagtaaaaaacacaagtatatcaatctagaattatg

SEQ ID NO: 3245 - DNA, 568 bp, Arabidopsis thaliana
taattctttttcattgtgaatattgaaagtagtattttagttttcctttttcctagcaaaagtagtatttataaaaagagaataccatgtttgagagtgtatataataaccatataacattacttctctttaattagaaaaaaggattttaaataacagatcaaaacattcatatttcaaccaaatacagtattcccaaaccagatacgtattataacggaaattaaatacacaagattcgattccaaacttgtaaatagtgacatctagcgaaaaggtctataaaaaggtcaaactcatcatcttctaattgctctttatctctctctccaactttacctttaacaaaaaaaaaatggcaagcgcgaatccagaaaccgccaaacccacgcctgcaacggtggacatggctaatccagaggagcttaagaaagttttcgaccagtttgactccaacggcgacggcaagatctcagtcctcgaactcggcggtgtgtttaaggctatggggacttcctacacagagacggaactcaaccgcgtgctcgaagaagtcgatacagatcgc

SEQ ID NO: 3246 - DNA, 489 bp, Arabidopsis thaliana columbia
cttgatggctccgagccttcgatcatgaatacagtttcatatctctagaggattgaaatacataaaatatgacttaaaacttacattcactcccaaaccataatcagatttttttttttaattttggattattataactaatgtcttctacgtcccacactaacttctgttgtacttcttaatttagttatgatgtgttttttttactattcgttaaaaacaaagggtaaaagatacaaaagagtcttcacacaaaaacacaacaatcactagctcagaagagcacaaggcaactaaacaacaaccccattagccctaaaccagccattactctcacagacgtcgccttgccagcagcaacaccagctgtaaagcttccacctggagtacttgtcgtcaatacaaccaccatccactctttctccgacccaacaccagccccgacatacctcgaatcattaagataccgagcataaccagtttgggtgt

SEQ ID NO: 3247 - DNA, 542 bp, Arabidopsis thaliana columbia
cttttgtaccagtgcaaatgtctcacctgtagagtgtggatgaagaattttcatacatgcctattccatcaaataactagcggatcatatctctatatgcatcacagaacaattccccgaaaaagtacacgttgtaatttgcgaaaggtacataaaaagaaatgctagatcatataagtcacaaaccagaaatgtcctatgtttcattatcacatgagtcttagcaccattcccatcatagacataacatgaaccttcatctgggattgtcccaagaccacttatagttccaacaagaagtctggcaccactttcatttcccggaggcgattcagtgccatgattagatccttcatctgaattgaggaaaacgtgtataagatcgtgatcaccctcaatttgtttcttttcatgatacccttttgggggaaccctaatggctgtagcaacaactcttccagatacatgcagctgaatatctttatacgcatcagaaacatggtttttacttcttgaagattgtatatgagatatctgaagac

SEQ ID NO: 3248 - DNA, 557 bp, Arabidopsis thaliana
tgctctgaaagcaagaaagggtcgagcgtcctcaaacatggcaataaagaccgatattactaaagcctatgatcggttggattgggattttttggaggaaactatgaggcgaatgggatttgatgacaaatggatatcttggatcatgacctgcgtgacattagtgagacactcggttttgattaatggagcctcacaagggcactataaaccggaacgaggtatacgttaaggagacatactctcaccatacctttcattctgtgtgcaaaagtcttatcgcatctgaagaaacaagcagaagctacgaagcaactacaagggataaaaatctgcaacagaagtccttctttatctcaccttttatttgtagatgattcgttattcttcactcttgcaaattatcgatctggcatggcaatacagaatatcctaagtaatatgaggaggtttcaagacaggctgttaatttaagaaaatcagctataacctttggtcgacttgtgaagtcaaatacaaagagacaaatccgtcatatactaggaatcacagtaccc

SEQ ID NO: 3249 - DNA, 949 bp, Arabidopsis thaliana
tgttggcttaattttcaaattcggtccaagtatttgattatttcaatttggaaaagaaactcacaaattaaacgtttaagatataagtatttgtgaagatagtatctgcatcccaaaatattcacattctccgtacaaaaacccaaagatgctttaaaaagaaattaaaggaatgaatatgtattctgtatatgtatagtatatcactgaatcgtggtcaaagtaggacacacatcatgtaaaggttataaagtcacgaattattagttcattacccgagagaacattttaaaagtcatgcaaggaaaacacaagtagcatccatcatacgaattataaatttaagaaaaacacttacacagagaccaaaaaaagacattaaatatttatatttaaaggaaagtaaaataaagaatttaacgaaggctaagacttttcttttttgttaaaaggtatccaaggctaagacttataaggggaatatctatgaaatgatcactcatcacatcgtaaaatcgtggacaaggccggtccggtcggcgacgttaagcctccaagacaagaacgggtcggttgtgacgtcatgatcaacaactctgacatcatcaacgtatgagtattcgttattggccggcgagtaatatggaactctctgcgtattatgctgatggtgccaaggcgacgatgaagcatattggttattattgttataataataatttgcacttgcttgatgatccaaagttggaactccagctgcagttgatcctccgccggaggtcgagtttctggcggtcgatgcacgtctctcttctttcttgaatcggattccacacgcattacacaacgactgaccaaattaaaaatcatataaagttattatcaatatttgttttgttgtacagagagaaatattagtccacatcaagaaatgataaaatatttgatg

SEQ ID NO: 3250 - DNA, 605 bp, Arabidopsis thaliana columbia
gttcagcgaattcctcgttgtaggcaataacatctgctaaggaccggactggtgatttcacaagctctttaagatatgcattgagagacatcttgaactcagccaaaagtgctatctcttcaccactatcagtcccacccacaatgacttcgatgtttggtatcgtcagattgttaatgacaatagcgccttctcgtctttatccaaggaaaaccagaactagaattagatatggtgttctcagatgatgaaaattttcttataacgcattttaccttaatgttttgatgtgatgatcaagaagagaagaatgcttcattacaatccctaatctcttacctttgaggccactagttgtcagaaactgcttgtaaccgccttcaggtatgaactcggacgcagttttcgtggcctcgtccaatggatcataacccacaatagcatcaaggagatgaacagcatccgacactgtcctacaaatcggcctaacagcaaaacatagagaaacactcggtaaaatggtaccaaatcaaacagttagtagtggttgggtgcttttagagtcttagtctctcaccaatactgtcctgtctcaaggagatagg

SEQ ID NO: 3251 - DNA, 603 bp, Arabidopsis thaliana columbia
tttctcctttgtttgtcggttttttattttccaacaaaatgatatttgttttatttattattactaaggctgatcggaaaaaattaaaaaccctaatttgagcagatctttccaattgaaagcgaaccgtgaattttgagtctctttaccggcggcgaaaaaatgcttggtggattatacggagatcttcctccaccgaccgatgatgagaaacccagtggaaactcctcttccgtctggtcaagcagtaccaaaatggctccacctacacttcgcaaaccaccagcttttgctcccccgcaaacaatcttaagacctctcaacaaacctaaacctatcgtttcggctccgtacaagcctcctcctccttcgaattcatcgcaatcggtgcttattccggcgaacgaatcagcaccttcgcatcagcctgcattggttggtgtgacttcatcggtgattgaagagtacgatccagcgagacctaccgattacgaggagtataagagggggaagaagaggaaagctacggaagctgagatgaacgagagatggataagagaagcgagaaggatgagaagagttagagagaaaggaagagaggag

SEQ ID NO: 3252 - DNA, 550 bp, Arabidopsis thaliana
taaaaaattgattaaaaaatttacttctaaacatatatatatttctttccattatcgtattaccaattttgatatccctaaaaaggtatgatatatatatggttgaactgagataaattttgcttaattccaacaatcagatcttctatataaaaagcacttctccattcaaaagtataacacacaaaaaaataaagtcatgacgagacagaaagtgaaaatgactttcatagaaaatgaaacagcaagaaaatcaacattcaagaaaagaaagaaaggtcttttgaagaaagctcaagagttgggaattctttgtggcgtcccgatctttgctgtcgtcaacagtccgtacgagctgaacccggaggtgtggccatcgagagaggctgcgaaccaggtggtgtcccaatggaagacgatgtcggtgatggacaagaccaagaagatggtgaaccaagagacctttctccaacagaggatcaccaaagcaaccgagtcttggaagaagttgcggaaagagaacaaagagttggagatgaagaacattatg

SEQ ID NO: 3253 - DNA, 518 bp, Arabidopsis thaliana
gttgctgcagagagaactattgtttttagaaatcttatgatcatgctataaccttacttcaagatacccttaaaaaggaaatttaccaaattttaatttaaaatgttgtacatatttagcagtaacaagacagttgtgtttttgtaaattacgaagatttggagggtagctgaaggtacacacgacggatgatggaacatttcattttgaggtaatgagagttagaagaagaagatcagcctacagaactaagaatcgatgataaaatgaaaacaacaatagaggaagatcccaagtgagaaacttctcatatttcttctaatggtcataattgaatgctagatcgaatatcttctcatattcatccacgaagtgaacatcaagcccttctttcatgttttccgcaagctcctcaaagtctctccgatttgcttccgggaatattattgtcttgatctgactccgtcttgcagctatagtcttctccttaacctgagagagagagagatattttgtgt

SEQ ID NO: 3254 - DNA, 797 bp, Arabidopsis thaliana
ctaaagcaaatatacgctgaacgatgccgtaataaattgcaggtaggcatcggaaatactgctcaccccttgccagatccccacctcatcccagctatactgcgccgccagcagtttacgcatcatgatgtaagcaacaggcaaggtcaccgacgtaatcaacgccatgagcgtaaatttgctcaactgccctgccagaccgttatcccagctgggtttcagatagcttaacgggatgacaccacgtttgatcaacatgatggcggcaggaattaccaccagcgcgggaatcagcgccagacccagcaacgccccttcataaccgcccaaacggtaactgacgtagtacgcgagaacgccaatcaagctgccgacaatcagcgataacgcattacctgcggcatcgcgaagagcctttcatcagcgccagtaacaggttgccccaggcgatccccatttgcaccagcgccactaaacgcaccagcccctgatagtcggtattaccaaacaatccctggctgattggcgcactgccagcacaaaaaccagcgccatcagcgtagagaaaccaagtaccatcgctgatgaagtgccgaccacgcggcgcacgtgttgcggattatcatggtactgggcaacgtatttggttacaccgttaaagatgccagcccggcaagcacgccgagcacggtaatcaactggcggaaatttgccgccagcccaagccccgccggaccaaatgacaccgccagcaacttaccgaccagtaacccggcaccaatcttgaccagtgtact

SEQ ID NO: 3255 - DNA, 562 bp, Arabidopsis thaliana
atacagctctgaagtgaaatcgatggtttaataaaatttttgcaggggtttccggatagctataagttttcaggaaatataaaagacaaacataggcaggttggaaatgcagtccctccaccattagcgtttgctcttggtcggaagcttaaagaagccctacaccttaggaacatctaaatctatatttaatccaaatgaatgatagattatatattgtcacttcatttgattttagaagtaaaaccctcttcttgaaactcaaagtcgttggtttaggatgacactatagaaggatctagaatattctctagtatatttgttaataattactatagtttgtacttaaggaaactagattaattaggttaccattctattctctatataaacatatgtaactgtatctcttatgagagtaaatataacttcttctaattcctaaactctcatcacattatcattgtatcagagctataatgatctaacgatcgactttgttcctgaatctctttttttttttttttagccgagggcttccaacatttattgttgtctttag

SEQ ID NO: 3256 - DNA, 630 bp, Arabidopsis thaliana columbia
ctaagttaccatttcacccatggagatgagttttgctttcttcatttgcaaagcagctacgccaggcttatagccaccattgatgtcctcaactccataaatcgtggactctttactcaccagtcgctcttgttttgcgccgtggctaccgtttccaacattgacaatctcatttgagtaattcttgagccgctttcaagtagatcggagccaaagccctgaagactcctccgtttgaaaaagtggagatggaagaatttccttgttctatatgacctacttcatctcgaggtctatattgttgggaaccaaagcacaagttgtagaagtgatcgtcatgagcattagtggtcgttgtctgctcgcgaaacggattcagagtcatcataaaaagatcagaagagtgttctctcatttcagattctccaagaaagaaagcagccattattctgacaattaagcaacaaaacttgcgattcaagaaaatatcaaattataatataaatcgatctaaaacattaataatatccaagagcttaggaagaaaaggtaagcaaaagatgatgagataaagatgtgacaaatcaagatgattagattacagtttttatttaataattagaaatgatg

SEQ ID NO: 3257 - DNA, 1038 bp, Arabidopsis thaliana
tcccctcttactcttttaccattaaaacattagctttatttatctaaatatagctaaatatgattgattgtaaaaagtatttttaaaacattgggaagtatcacagccgctcagaattcatcaacatgactacatgagaccgtcctgacccaaaaaaaaaaaaaatgaaaagataatatactatcataaaactttcctcttatcgatctcataatttcttcttccaaagtcaaaacatttatcaaaaatgtctccgatttcaaatctctttcccgacaacacaatcaatctcactccttacgcaattgtcattctcaccactgtcttctcgattctatggtatatctttaagcgctcgccgcaaccgtccctaccgcctggaccacgagggctgcctatagtcgggaacctcccgtttcttgatccggaccttcacacctacttcgcaaacctcgctcaaagtcacggtccaatctttaaactcaatcttggctcaaagctaaccatcgtagcaactctccatcgctggctcgagagatcttgaaagatcaagacatcaatttctcaaaccgagacgtccctctcactggccgagccgctacctatggaggtatagacatcgtttggacaccatacggtgccgaatggagacagcttagaaaaatatgcgtcctaaaactccttagccgcaaaactttggattctttctacgagctccgacgcaaagaagtccgggaaagaactagatatttgtacgagcaaggtcgaaaacaatccccggttaaagtcggagatcaattgtttttgacgatgatgaatctaacgatgaatatgttatggggagggtcggtgaaagcagaggagatggagagtgttggaacagagtttaaaggagtgatttctgaaattactaggcttttgagtgagcctaatgtttctgacttttttccttggctagcgaggttcgatcttcaaggacttgtgaagaggatgggtgtgtgtgcccgcgagcttgatgcggtacttgatcgagccatc

SEQ ID NO: 3258 - DNA, 809 bp, Arabidopsis thaliana columbia
ttgaattaagctaaactaaatagattataaaataaaaaacaaagaaaagcaataaatatcaagatgaaaatcagatgggaaaagagtcaggcttagggtattctcaggaaacaaatgattagtagatctagtaatagctaggttattatcgaaccattcttaaactcaaactctaattttagaataaccggtggtgttccgcgaaactcactatgcctaaagctaagattcccggtggagccgtgaaatcctatacttaaacatgcattattatcaagtttgattagttcacctaaatatctaaactgcctctacaacttcaaattcgtcactctcctcaaccttcataaactcatatccactttccatcgaagcagcatgccaagtagtagtgaggccgctcttagtccatctagggataggtctctctaagatcctctgctgaccttccagaatctgttccagcattcattctatcttgcttctaggtgcgggtggaagggggcttggtaagaagccagatcatagttccttgtgaaggtaaaactattgctattctgtagcggttgctggaactgagaattctgagtgtagctagttggaacattcccattgaaacttcttccaccaacataattgacatcctccacaagtagattgtggactgcgttaagcttagccattaacccggcaatcctattctcgttcgtgtttctcgcttgttctcggttctgtgattagacaaacacctgaacacacaagaaaaagaagagagaaaaagtaagtaccaaaaagaggaagagggtccg

SEQ ID NO: 3259 - DNA, 727 bp, Arabidopsis thaliana
  unsure (1)..(727): unsure at all n locations
taacagaatgaacaatagtaaacgaaatcaagaataaaagctgaatactgaatactgaatagataaagagaaatccggattacaaaagtctagaacacaaggtctgcggaaataaaactagataaaacaacttcttgtctgcgaaaatgtgaagtacatgctacttatagccaaatattttgaaaccctaatactcaaaacgacaaagtattggaacagattaagatttgtactcgacctatatggtcaagtgggaggtcaagtgaatagctggagtcttcttttcttccttgtgctcgagtgtctggttgagtgcggaatgaagaaggctctgaagcttgtcatcgagtatgcagtcgagtggtgtgatggtgatactcgagttcaaggtagagtgacgaggtcgagtagatatctgacaatgggatgaagtcactcgacctgggggtcgagtgatgtgatcgagtgatggtcagaagatggagatgaagtcactcgacctgggggtcgagtgaggtgatcgagtggtggtcaagagatggagatgaagaaactcgacttgggggtcgagtgatgtgatagagtggtggtgtcttctactcgacctgggggtcgagtggtctcttgatatcttgaagctcctcactcgacctatngggtcgcagtggtttgtcatgatcaggtccgcttcttccagttagctcgtcgacagctccaaatcacctga

SEQ ID NO: 3260 - DNA, 2034 bp, Arabidopsis thaliana
tttgtctttgttcttcgacttcattcatccaatctgaaagccacaagagtcccttatagccatagtatgaaacagcagctagcatcgccactaacatcacgaccatcagtatcctctttgtggtgacagcaagtttctgcagagaagaaaccaaaaaaacagatggtgtcttaaggagaagttaagacatacgagacatgtgtgttctcggattttttctaatcaaaagacagtaattacctgcagccttgtggtctcctgaatgtcctgaccccgtccacgccttttccttcgctttgatgcatttttcccgctaggctcctccttctcctaagatgtttgattagaagaaagacttgtgaaagttgctttaagagtgagattaattctgaaagctttttattgtttctgtttacctcaatctctttgacattgcgctgtgttaacaccgattcagccacctgtagtttgctcttacagttggaatcacaagggaggaggccaaccccgaactggttctttggtacttctttaggatcagaacctgtggccctatgggtgcttgaacatcctggcatacccattctttcttcaaggttaggcacttgcaacgaacaaccaccttgatccatgataaaatcgagacaagtaagatctcacttgtaacagatacagcatcccaaatggatataaactggcaaatggatacctttttaccacacttctctggcaatggacactgcccaggatgacatatctccggacacaaatgggtacagtttggcaattttctgcaacagcaatatcctctagtttcaaaagtgtggttttctaataatgttattcactaaaatataaaaataaagcttgggaacaagtgagttaccacaaggaaaccatcagttgttcaaattgaaaaatgaaacacaataatacagtaccagcgtgttagttacctgtgacaaggtccacggcatgagcgcgccttcatttggtccttctccgacattgtattgtagtatatgcactcgaatgcatgcaccatcgcgccacagtgacatgatctctttactagagttttgcaaggtggacaatcttcaggatggcatcgccgaggacatggatgttggcatcgtggtgttctctcctgtacaatggtatgaaagataaggaagactggctaattgactgactcagtagagagcttttaacagcttcatggagttaaatatgtttatcaaaaaaaaaaaaaatgtgtttatcagaagctatcggaacaatgcaagttattgtgaaaacagattcccaactgcaatcaagacccgagcgtaaagatgatcgagtaagtggtgagatacaaaagataactgataccttttgacagcggagatcacacttttcacaggactcacttcttttatccaatgatgaacttcttatatccagggcatgacagaaatacgaacagtaatggttcccacatggaagagggtttccacataaattatcgcatgcaaattgagttctgtcagagcaaatcatctaagccaatgaaaagagaaaaacatatcaaatgtcggaagaagatctcaaagtccacaaataaaaattaacaagttagatattggacatgcatctgaaataactaatataaaagagaattgagactcacccttttctctgctgccaggtggtggcctacacagggcctccagacaggctctggacaacgagggcagggagaacccggtgtagattcagcctgaatatgcaacatctttttcgttggtttcagtataaattcacggttaggaggaggtctaggtccatgacacctatgtcataagaagcacacaaaaaccaatgtttataagaagggaaatgatcagagtaggaaagaaaatggatgaaaaagacaccagcatgagaaaccttagtttgcacttgtgccacatgggtattcttcatcacaaaggagtcgacatggaggacaagctccatagtggcatttatgaggctgcatataaacatgac

SEQ ID NO: 3261 - DNA, 451 bp, Arabidopsis thaliana
gcggttttgcaactggcaaaatgttcaacagaaagggagaggtacgttgttgcatcgaagaagaatgaagaatctaatgtggtttgcaaaaatcgagctcttattcttttcaaacgttaatatatagtttgataatttgtgtgcagctggtggtatcattgacgcaagaagctgtgttaagagaagctgtgactattaagccatccttcggggccaagctatgaagccataggattttgatagtgagagaattgctgcatctgttactcctcacggtcacattccaaagagtcgtcacttatactacatttgcatatgtttttcgatccacaattattattttcccctctaaaagggtctacacatatgtttgtttgtaccacgataatgtttcacagcaatgaaaaagcaaacagtggttcattttacaggttaacgacgtcgttttgga

SEQ ID NO: 3262 - DNA, 785 bp, Arabidopsis thaliana
gttcttacggaacaatgtcttattacgacgatatgaatgattccgtcttagaaaacgacgatgacaatcaaaccaacatgtttttcgaccatatcgtaattggaaggcatctgcattgtcttgacaatacagacataacaatctttcgtgggttgtccaaccagataacatgccatatgcgggaaagtcacttacagtccgcattaaaattgcatgcatgttaaaattggtcttcgtggagacatcatatacccaaaccccttggcccattgatatatccctattttcactgattttatctatgttttaggtataggatcttgagtctttatgttatttctcgagtctttttagtgtcttattcaagtattttatgcagtgggacgacaatggagataagaagacattttggagcaagagctaaaggaaaggaagctaaggaagattttggattcaggaatcaagaggagtgtcgaccgacacactcttggtgtcgatcgacaccagtttcggcctagcaaagtcctagacgctttcaagtctacagaaaagggaatttgccccagaaaactttcctatttgcattattagtccctagacgttttatagggtttatatacattgtttagacctaaattttgtttgatctagtttttatcatcaagttttctatcaagttttctatcaagttcttacgaagctttttgcaaaccctgttagtgagagacataagctattcattgattgttttcagagattgattcagatcttaatacagtgaagat

SEQ ID NO: 3263 - DNA, 438 bp, Arabidopsis thaliana columbia
acgaatgcttttttcagttgatactttttttttttttttttttttgtcaaacaagccttgtatttcattcaatgcatctcctaaaggtaaagtttacaagatcttcaagcatacaaagggttaaaaaaactccaaataacgaaagctaacaaccaggaagaaaagataggtttgataagccatagaggaacggagacagtagcaatcatgcatcaagccacatgcgacctcatggtgtgtcatagacacttccgcgaccacgtcggggagtttcggattactcatgatcgagaagacttgatcttttgactttaaaaaaatgtccttggacttatggcccgtcggcaagaaatgcattgtggacgttgggaccaatggtcagaactcatggaaggtaagagttttttcgggtatgagttggagctcaagctttagggt

SEQ ID NO: 3264 - DNA, 1288 bp, Arabidopsis thaliana
cttcaataatggtatctttgcctacaacttcgtctagctcttgttggctctcttcatcaactccggctttcttattagttcggccattgcaaactctattgtgttggtcgatgtatccgtaccaccaaccaccaaatccttcacatatatataacaaacacattgtcacgactcacttctcatgaacaaataagtaaataaatatattcttaccccaagatcttaagattaatctatatatcctccgaagtttttattctaaattatgaaaactgaaatcatttcattaccacgagtacggctttgacatggttaaccgtaatgggaacctccgagtcagcttcttggtcctttaacttcatcaaatgttgcaaaaagtctttacattcaccatcatcaccatccctagttcttagtagttgcatctgctcgatggctcgatcaagtatggcatcgagctcccgagcacacacatgcatcttcttcacaagtccttgaagatcgaatctcgctaaccgtgggaaaaagtcagaaacattaggctctcccaaaagcctagtaatttcagaaatcacttctttaaactctgttccaacactctccatttcctctgctttcacagaacctcccccataacatattcatagttagattcatcatcgtcaaaaagacctgttctccaacattcaccggtgattcttcttgacctttctggtacaaatatctcgttctttcccggatttctttacgtcgaagctcgtagaaagaattcaacgttctgtggctaagaagcttaagaacgcaaactttcctaagcatcctccattcagcaccgtatggtaaccagacaaggtcgagaccgccataggtaacggctcgggctgtgagagggacgtcatggtttgagaaattgatatcttgatctttcaagatctctcgagccagcgatggagtgttgaccacgacagttagttttgagccaagattgagtttgaagattggaccataactttcagcaagttttgtgaagtaggtgtgaaggtccgggtcaagaaagggaaggtttccgacaataggtagccctcgcggtccagggggtagatgcggttgcggcgagcgtttgaagaggtaccatagtatcgagaagatagcaatgagaatgagaattgcgtaaggagtgagattgattgtgttgccagcgaagagatttgatatgggagacattattcacagctgttttgtagaagttatgagattgaagttgttgccctataatagtaatttttaa

SEQ ID NO: 3265 - DNA, 938 bp, Arabidopsis thaliana
atttatagcgttctctcgtgataagaatgtgatatttgttgtagtgcacagaccgttacgaaggctgctatcgctacctctttgtttaggttcgcaattttcgatttgattgctttgaattttttgacgtaagatcgcagggattcgttctgaagttgagtgagactccagaggtcggcttcagacgtcctgtgttcgataagtaccgaatactgttttaagaaagcggtggcgagctggtcgaaggtatcaatggagttcccttcgaggctagcaaaccattcgagggcgtgacctacgaggttttctacgaagaaacggcaatgacctgcttcattttcttcgtctgtcaggtacgctcatgttatagcgaaacggaaggatctcagatgagcctttgggtcgctcgttccgtcgtactccgggaaacggagtctcccgacgtctcggaggcaaaaacgagcgatcctattcgtgaacagggtgcgcatggtatcttcgatcacgcgatctatgtcgggagcatcactcactgctaggtgcattcgcgaatgcatttgagccatgttcgcatttgtttgagctgcgtaattgcggaatgtttccatatccacgacgttatgcggatcgaccggtgcttggggatcggttggactgttaaggaggtcgcttcctggtatccgggaaacggatggcggattagcgatagaggtctgttgttgcgttgagctcccgggaatgcgggaactggatgcggttgtttggtttctcgtccacgtgtacctagggggcgaacagcgatcgatagtaaagttgggaccggtagccttgggaaggcaggcgttgtgcttgtttcgtttcctgttgccaggtttttgacgagagcattcgcaggtgcctgtaaaaaggcgaccctaccggttgataggatgtgagac

SEQ ID NO: 3266 - DNA, 523 bp, Arabidopsis thaliana
taaagggcatgttaaggttcagtgaacaagtcgctttagtaaatttatgatgtttaaccttaagcatctcctctggttcttcattatcaagcatatgtatgagacgggctactgaattttgttcctcctggaaatcctcctcgtcaagctaaaaaagacacataaaatccatcaggaccgaggtgttatagtagagctgatcagagtttctcactgcaaaccacacggaaaaaaaaacaaaggggaaatgacagcacctcctccgcgttggtttcatccaaatctttaataagtccttttatcaattcaaacagcacctcaacctagtgaacacaaaattagcatattattagtgcaaaatatttacatctttaattgaagagagtaagagtagtataccttatcagcagttgatatacacgaatcagttttcattatactttgaataattagcatagccattactttgttcgttccatcatcaagatgatccatgacacgcggataatttgacaatgtaaga

SEQ ID NO: 3267 - DNA, 548 bp, Arabidopsis thaliana
catagtcacggtcatggtgtagtgctagcaactaaagatgatggacagcttttgcgctaccaagtcattgccatggttagtacatatgaaaatactacaaaacggtcttgagttcaaatcataaattaatatgtataaccatactcaagctatttttgaataccatgaataggtattggaggttggcattttatttcattctgtggtcattggactatctctaggagcaactaatgattcatgtaccattaaaggactcatcatagctctttgcttccatcacttgttcgaaggcataggtcttggtggctgcatcctccaggtacgaatatacattcatactatatagtttatgtctcttatatcaattagaaatttacgttcatatgtatataatttatgttaacaggcagattttacaaatgtgaagaagttcttgatggcattctttttcactggaacaacaccttgtggtatctttcttggaatcgcattgtcgagtatctatagagataacagtccaacccgcgttgattacgattggactg

SEQ ID NO: 3268 - DNA, 944 bp, Arabidopsis thaliana
cgaatcttacgccagcataaaggacgctcaagtcgagaacttcgtgtggaaacatatcctatgtcgtcacgggataccttatgagattgtcacggataacggctcgcagtttatatcaacccgcttccaaggcttctgtgataagtggggaattcgacttagcaagtcaacaccacgatatccccaaggaaacggccaagccgaagccgctaacaaaataatcctcgacggattgaagaaacggctcgatgctaaaaagggctcgtggtccgacgaactcgaaggtgtacttttgtcgcgtcggacaactcctcgccgagccacaggagaaacccctttcgccctagtctacggaacggaatgcgtaattccaaccgaaatgatagtaccgagcttacgccggagtctatctcccgagaacgatcctgataacactcaaaggctcctcaacaaactcaatctgatcgatgaacgaagagcatccgcttcggccaacctgttgaacgcctccatgttgttcctaacggtcgaatcgtacgagtgcaccattcggttcatcgaggcaacagcctagaaaacagaaaaaaatacagatcggagatccagacgcgatgaatgaaaaagttgaataggcacttacccgcaggaagtgggaagccgtttcagcatacttccgcgactccagaagagtatccggaggaggaagcaaaggaccgacaccccccccgaggaggtttgcagaggctacccggtcctcaaagatggggatctcttttcccgcctcgtcactcgaggccttattcttcttgcttgtcttctttagcgatgaatcatccgtccgcagacgcttacccgccgcgttgtcgctcgcaggcagcgcgacaaccgcttctgtcaaaggagcagcagcagtaggatcgacctcgtaagctttataaggcgtc

SEQ ID NO: 3269 - DNA, 470 bp, Arabidopsis thaliana columbia
tcaatgatcgaaacaaataagaaagctagttggtcagagctttgtccagacgtgttgcgatgtgttttcgaactattgagtttctcggatcttaatcgaactagatcagtttgttcatcgtggcactctgcttcgagacactgcgtcccaacacaaaatcagattccatggctaattttattccctcgaaacaacgtcaataacaacaacaacaatagttgtgtgttgtttgttccagatgatagagatagtctttacaaaaccaaagatcttggtgtcggctttatgctgagtaattgtctagctacttacggtagttggatcctaatgatggatcgtctctgtaatctcaacattttgaatcccttaaccggtgagaagattgatctaccacgtacaaagtttgatctaccaaggttggaatctagtgtagcatgtcgtcggatagacgagagtgcaaaagattatat

SEQ ID NO: 3270 - DNA, 901 bp, Arabidopsis thaliana
cagtatatcacgttgtggtgtggttaggaagcataagacttggtccactaacgcgtagaaagaaagagtgatatttcaatacattttatatatcaaacagagcacacaattgaatggacaaaaagcttaaaagaataatgatatagatttgaagtgaaagaataagatagaactaaaagagtcaaaactcggaagtcgcagtcgtgttgagcacggagtcacatggaatcgttggcaactacttattgtgttgcatgtttatcttaatttatcagacaaattatagactgtccgatcaaacatgatgacacattacgttagatcactactattactaagaatgcttgcaataaaatatgtgaattgtgtttacgttcgattcttgtttaatgttagggaaataacgaattgtgttcataattaagtagtgaagagtgaagacattaaatcggtaataaataaaggaaaaattatgcaaagtctttatcacaattatgaccattggattgtgttttacataaaagagtttgtagaacttcgaaaattataaaaaaaaaaagaatatggtaaaataaatggaaatagattcaatattgtagatgactttgtacatcgttacacaaatctatctaacctatctaatcataatagacggtgaatattgattcctggaagctcagtttacgccacgtgtccttgggcgccgaaatcaacacctagacaaaagcctgttgacttgtagtaattcctttttttactcccggttaacattaaaccaatcagacaccaacacgtgacaagtcacctactctcttctcctccccgttcgatatctgactcggtcatctgtatccggcagcttaacgtcggcgatctgagcggcgtccggcgataggagacg

SEQ ID NO: 3271 - DNA, 529 bp, Arabidopsis thaliana columbia
ccaaatctatttgagtgagcttagaaaagctgctccaaaacatatatatgagtaatctttcttgaagaggtcattagatggcggatggttttggatattgagacgctaatcttgccgaaaagggtttcgaaatttcactaggatatgtaacttggtacaagaatctgagcaaaataaagcaactgaataaattcccctgccttctctttatctctctgtttgattcttcaaacaggacggataacgaaaaacagatataatgtacaatcatagaaaacttaaattacacactttaatacatagcataacttaagatacacgcaacccaaaagcaaataatcttggttccaatgcttgagatcaaccatcgatcgttccagagttctatcaaacctttccttcgattcttgcgtgagtaaggccgacacaggcatcaacgaaatctccttcgatgaaatcagtggacaaaatctgcaacttatctccacatcccttggaaacacactgagaaataaatagtctggcgtgt

SEQ ID NO: 3272 - DNA, 454 bp, Arabidopsis thaliana columbia
caatgttagggatttctccaattttcaagctttacccattcaaaagaatcgtccttttttcctatttctgactttgagctatgatgatggtccattcgatgagcagagatatgatgaacagagagtcgccggataaagggttagattccggcaagtatgtgaggtacacgccggagcaagtggaagctctcgagagagtttacactgagtgtcctaagccaagttctctaagaagacaacaactcatacgtgaatgtccgattctctctaacatcgagcctaagcagatcaaagtttggtttcagaaccgcaggtgaaatttcatcttctttccttatcaaagttgttaccttttgtctgtattaattgttttcttaccattagattatctttttgtttgtatatgagtttatgaagatgttaaatgtttttctttctttgactggtcagttgt

SEQ ID NO: 3273 - DNA, 1040 bp, Arabidopsis thaliana
atcgagtttctatttgtagatctaattagggtttcttgattccggttgattttcattgtagatctaattagggtttgcttgtattcgaatattttcgttgtatttgtagatctaattagggtttctatttgtagatctaattagggtttgcttgtattcgttaattttcgttgtattttcgttgtagaactaattttccttgtatttcgaattctcctttactaatgttctctttttttttgcaagatgtcattcaatggcaacgattattcccggtttcggtctcagcaacaaaatcaacgtcgttctcctagtgaaggaaacggttcggccactcagggaaatctccaaaccccaatcaattccaacaatcaggccaatggtgcttctcctccgcctgtcaatcaatctcctaccggttctgccaatcaatctcctcgcggttctgccaatcacactactccactacatgctcggctcaatgacctgactatagaagagttgcttgctagccctggtcgtgcagggttgcctaaattagaccccaatcgacctcctggtactctctggtaagccactagggtctgttctcttcactatttagtttgtagacacatttagttttgtttgtctgatggagtctcgatttgtaggtttgacgatgacacctcagttgcagccactgtccgaagcatttttgaaaaagatttcaaagagcctcatgcaaattggtcacatacatcaaaagcagtggccgatagatggtttgaaacatttgctgtaagtgaaataattttgtgttttgtttggtacagcttttggtcttgtctatttctaatgtgtcttgtctttgttttgtagcaagtatataactgggaccctgcaataaaccagagagttagattggagtttgaggcaaagcttaaggataggatgtctgatcaagttggtcgttggaagggaaagtggaaggagaagggagatgagctaaactgcggtggatagatcagaagtttggaaaggctggttagctttggagg

SEQ ID NO: 3274 - DNA, 921 bp, Arabidopsis thaliana
agcaatgttgattttgatgattgtagtctgcggcaaaatagtaaaggctcatcatggcagaaaattgcgacaccccgcgtccgaacctacactaaggtaaaaagattatctctcattcattccacaaatttcttgtgtcacaatctgacatgaaactttggggttttgggtaatgttttgacttggcaggttcaaaaaaccgggtcagtcgggagatcaattgatgtcacaagctttaaagactacgaggagctaaaatctgctatcgaatgcatgtttggattggaaggactactaactcacccacaaagctcgggttggaagcttgtatatgttgattatgagagtgatgttctgcttgtaggagatgatccatgggagtaagtctctctctcactgttctgtgaatccattaacttcatctgactatcagtcttacaatagttttccttacataactacataaactggtgcagagagtttgtgggatgcgtaaggtgcataaggatattgtcgccaactgaggtccagcagatgagtgaagaagggatgaagcttttgaacagcgcaggcattaacgatcttaagacttctgtttcataaatgtaacaatataaaaatgatctcatgctgatttgtaagaaaaaaaagagtgtaagaaatgttcttttctccaactggtagaggagaaaccatcttgttgtaagcatttgatgtgttgttccgatttgagacctgaaactatattcatattatgtagtagagtgatgaatgaatcagtagttgagacagtcttagaaatcttgtgattattttactcttttttctgcacaatgttaaagataaaagtgtagaaatcatcttaaaaacactagggatagtataagtactactgtgatggtgagcaaataatactcgcta

SEQ ID NO: 3275 - DNA, 575 bp, Arabidopsis thaliana columbia
tgagttttaccctcggtatctccaacatgatgattcgccttctttccacgcctctcgataatcttcaactgggcatctcggatttgaatcgggtcacgggttttcaccgcttggatccaatcgagccgatccctaagcttagttatatctggaaagtaatcacgctcgatgatcttctcgattgcttcaacataagcgtcctcatcgagaactctcatccgttttctagggtttcgaggaatgatctccgaggaagaactgcgaggcgttgatcggagggtatcatcggaataagaagacggcgatggagaagaaatctgacgaggagaatgaccaggtgaaagaaacatcttgaatcagaagaacgcgaattcaaaaagcacgaatggaatttggagccgatgaattttgtcgagaattcggacactagggtttgtttttgggtagacaggaaaacaaaacgatggtcgatgattgcatcggcgatgatataatattccttatcaatccgattatacgcgttttgttccagaatattcattatttcccaaacgttttgatccttttgctttata

SEQ ID NO: 3276 - DNA, 605 bp, Arabidopsis thaliana
gtcctttaatcgctagaattctaaggtttattctgttttacaatcacacacgttagacattttgaatttcaaagttggtgaattctaaaggaatgtttaatctgggtgtttattgtgtgtttggaccatctgtgatttgatagtcttgtctccacgaactgtcaggtcgatagcccagcagcggtcgagaagaaagcacctgagcctgagccagcgtttgagattttagtgaacccagctcgagtagtcccagctcaagagaaatacataaagttacttgatgacagcagatatgtaccagtgaagctagcaccgtcaggtttcgttcttctcaaagacttgcgtgaacacgagccagaggttctctctctgaccgacgcaccaacttcaacagcttctcctgcaactggtacagcagcggctgcacaaggaaccccggcctcagctatggccgtagatgatgagccacaacctccacaagcctttgaatacgcttcatgattttatttcatttaaaattagtgggaatttgttgttggttttattggtttctgttgaaagacaaaaggcagagagaaaaacagatctttgaactttgagatact

SEQ ID NO: 3277 - DNA, 1154 bp, Arabidopsis thaliana
ctccacctcatttctccggtttcatatgtaagaatttactgattatcaggaccaaatggataagccatgcacaataccttgaattgcttgtcaattggatcaaacccgaaaaagcttaattcctttctgtaccttttcagataaggtaaggatgcataccggcccgttatagggttacatatcacacgcacttcagagtacatatcatagaaataagtcaaaccagaggcataacagcaagatagttttcggttctcactagaagaatacatctgtattttgtttggaaggaacttcatatgaaagtcggccgctactacaagagacgacgatgaattatcatacggactctgatgcttaggcaaagagaagaaacaccataaaccatttcttttgatggcgaataagagacgcggctgagttgaggaactggtgagaaataattctgtgaaatatggacgactaagcattgatgcccattgcttcgacacgcaatgaaacctcgcgattgactttgcaggcaatctcaacattatctcgaggatgagttctttagggatggaatctgaaatcatgattgcgtgataataaaaatacaaaagtgtgtaaatacatataattgcataatagagttttcattgttcgctattatttacataaaaaaggtctttgtgttaaaaaatatcaaaaaggattaaactctaaatctctttatatagatttctttgcttttgtaaccaacacacagattaggtaaaatttcctaagctttgaaaaatctacatatacatttttttgccgtcattttagcaaataaatcatgtacttgacacttatttacaatggcatgccattaacattaaatattttctgttgataattaaatacaagatattatattcaatcatagttgccaaaaatctctcaagatatctaattggtattaattattcagatttaaaaatctaaatattttatattgcgctcaacaaacgttttcaaaaacctctccaaaaagttctacacgggtttattcacatatttataatccgagatttttttcatcaactaattactcccaacatacattttccgagatttcttctctacgatatatgttgaattatatatgttttaaattgatttgaattata

SEQ ID NO: 3278 - DNA, 923 bp, Arabidopsis thaliana
gctcacggtgaaatcatgttttaatcgttttatcgagtaaatgagtcgcaaaagctgttaggaaactggtatgatcattttgcttgtctttagatagttaggattttggacttacattttattttgttgcttgtgatgtaggtcgtgatacgtgggcgtggtcgaggccgtggtagaggtcgtggtcgtggacctcatggtgggtggattgccgattcgaccgtgggtagatccgagtatcggcctattgtgcaggcgagtgtctcggaaatgttccaggtggatagggaggcaagtccgagctttccggtatctattcttgagtcattcctgatcacatcaaaaaggatggcgagtttggatgatgttgagtctgagacaggtgtggagggcgtgaggatgatggagtcacctgtgattgagattgaggaggaggaggtggagctaatccaggcgcctgttcccaatttcttcatggatgactatgttttgatcgagtcagagttggctcaagctgggactagatgggaggattatgttgttcttcccaacagtccagtctcgatgctcgttggtgcagaaacggcgtttaatctcgtgtcgtcgtctgatgacgatggggatcagattgtccctagtacgccagtgatgaccccgatcgttccatcattcgcatacccgacattacctgattcgccactgacctcgttatggcgagactacgatcgtatccgacatggggacactattgagaccgaggtgggagttccttcgactctggcaccgacactctgagagccctatttgttatacgtgtggggagctagggcattatccgaggatgtgccgctactaccagccgtacggggatcccgtgattcgatgtcttgcatgtgatgggacagggcactatgcaagtgaat

SEQ ID NO: 3279 - DNA, 1059 bp, Arabidopsis thaliana
cattcttctcccgagggtgtcgatcgacaacgagccctactgcatctctggcagctaattgcgcgttgaggcggcctaagtttgcatcgacgtcctcaagtaggatgattccatgataatccaatctttgaccagcctcattgtaggcttggccatcctcatcagctcctatgactctttcagccattgctaatctctaagttttcccaagtccaaaatagacaagttgataagctccttctattgtgtgctccttgtttgcctagccatacacctgaaacacagaaaagaagaaaacaagaaaagcgtgagtaacaaaataaaagtaaaagctagacaaaatctctaaactaaactcaatgaatgattcccaagaacttcggcaacgacgctaaatttgatatggttcaaattacctagaactactctaaaataagagatcaattgcagtatttaaggatcgaattcacagagttcttttgttcaaacagtgagttgaatgtcgagattaagctagcaggtgatgattaaaataataagtacacaaagtaagaaaacagtagcatgattgtgttgtaaacgattaaataaattgctaggaacaagatattctcaggaaactattggttagtagatctaatgaaagctaggttgttatcgaaccatttttaaactcaaactctaattatggaataacaggtggcgttctgcaaaactccctatatctatagctaagaataactggagaagccgagaaattatcaacctaaatatgtgatagtaggatttttactcaattaatcctaaaacactatcctgtcgttgtagtattttaggatgtcaatccaatccggtgtgatgcaaacagatgagatatgatcagaaagctctaagtcaagccaagcagagagttggttggttctaacagtcctagtatgcaataacagaaatgaaatgaaactaaaagcagaaatggcaatagtaggcaagtgaatgacaaagcataaatgataacaggaaatcaaatggataaacgattcctaaggatagggtaatcga

SEQ ID NO: 3280 - DNA, 578 bp, Arabidopsis thaliana
caggtatgcaattttttcttcacatctctcactttccaccttcttatatgtaagaaaatcgaactagatctgcgattttttggttttcaatttttgagcgatttggtttgtttgtgcagagctaatcgataggtgtatagggtctaagatttgggtgataatgaaaggagataaggagctcgttggtattctcaaaggattcgatgtttatgtcaacatggttcttgaagatgtcaccgaatagtaagtctgattttagggtttcgattattgcttcatatcttgtttaattggaatgttgcttgatctattacactttaggaggtgaatcatagacattgaaccatggatgtgattatgcagaacttagccttttggattttgtttttgggtaattgatctcaatactgatttgtgaatgtccatcacagttcattcatttgctgattaatgacatttattgtgtatgcatagagtctatttcagcggggtcatatgtggtttcggtgacttgagttgtctgtggttgtgtgaggattagttaattgatgcttaaacccgtgttgctttggagttag

SEQ ID NO: 3281 - DNA, 694 bp, Arabidopsis thaliana
cactgacatctgcacttcagggagtggaaaactactgctgatctcttccagcgaagtggtcaacgtgcccagcagcatcgtaatgttattaatcggcaaaggcggctggcgtgaaatttatcgcttataccagcctgctacatgcagatacctccccgctcggcctcgccgatgagcacatcgagacggagaaaatgctggctgattctggcatcgtttacaccctgctgcgcaacggctggtacagcgaaaactacctcgccagcgccccggcagcactggaacacggcgtatttatcggtgcggcgggcgatggcaaaatcgcctcagcaacgcgggcagattatgcggcagctgcggcacgcgtgattagcgaagccggtcacgaaggcaaggtttacgaactggcgggcgatagtgcctggacgttgacacagttagcggcagagctgaccaaacagagcggcaaacaggttacctatcaaaatctgagcgaagccgatttcgccgcggcactgaaaagcgtcggactgcccgacggactggcggatatgctggcggattctgacgttggcgcatcgaaaggcggtctgtttgatgacagcaaaacacttagcaaattgattggccaccaacgacaacgttagccgaaagcgtaagcatctttttaatgttaatactagttaattaaagt

SEQ ID NO: 3282 - DNA, 481 bp, Arabidopsis thaliana
tagtaactcccgccagtgtgcactaaagctctatggcgtgacgtaaatagatcagcatcaccacgccaaattcggcggcgaccccggcgagggcgataaagccagtgcccgtcgccacggaaagatgaaagcccatccaccacagcaaccagatgccgcccaccagcgcaaacggtacgctgctgataatcagcaacgcttcgcccacccgacggaacgccagatacaacagcacgaagataatcatcaacgtcatcggcaccatgagtttaagcttatggttggcgcgctccagtagctcgaactgcccggagaatgccacgctggtgcccggttttaactgcactttttcagctatcgctttttgcaaatcgtgaaccaccgacaccatgtcacgatcgcgggcatcgatataaatccagctcgtcgggcgcgcattctcggttttcagcatcgacggtctggtagagactttaatgtc

SEQ ID NO: 3283 - DNA, 557 bp, Arabidopsis thaliana
gctgctattcgttttgcacagcacattgcagactgtccgagtttgttccccgaggtaactcattacactcctcaatctctctttgttaaattgaacacaataatgatgggctataatgccttttaacaaatatcctcttacaagcagatattgaagacactgtttgaaatagttttattcgaggattgtggcaatcagtggagtctcagcagaccaatgttaagcttgattcttataagtgagcaggtatgtgtaatttatacatttatctctcttgtgcagttttctgttccgaatgagctttgttgttcattcatctaacttatttcaattgatttcccagattttctctgatctgaaagctaagatcctctcatcacaggtgatgatccaaaattctatatctatatatattttacccctgagtgttgctttttgtgtatgcttagagcattattctaatggtgcagctgcggatcaacaccagcgactctctgcctgctttgacagtcttatgacagacatatcgcggggattagatcaaagacagagacaag

SEQ ID NO: 3284 - DNA, 436 bp, Arabidopsis thaliana
gctatggatttgcaacaatccatggtttctggatcattgatggctcagctactcttcctcaagaactttccaaaagctacaaactacggtttatcgacttcgtacatgccattatgtcgtttctggtttttggagccgtggttttgtttgatcagaatgtggttaactgtttctatcccgaaccatcagctgaagtagtggagcttctcacaactttgcctgtagctgtaggagtcttctgcagtatggtgttcgctaaatttccatctacacgccacggtattggtttcccctctctgctaaatgatgttctgaatcaaaatgtataaatcctcataattcttttggaatttatgaaattctctgttgtattttgtgatttccatttcttctgagatgatctcttgattagaatatctcgatgtttgtgtaagta

SEQ ID NO: 3285 - DNA, 695 bp, Arabidopsis thaliana
tagactcgatcctagatgcaatgcaactacatgagcactctattgttgtgaaatcattttttgaaatttttcaatttttttggttttttctatgccttagatgaatgcagactcaagattatatacaatgcaacacacacttcctgagccctcccccaaacttaaatcacacagtccactgtgtgaccaaatttggaagagagtactcaggacaaaacacatcacagaaacaaaataaaaacaggagatgttatattacaatggtgaagtgaggtgcttacctcagtagaagaagaagcggagttggtcatcaatagctgcctgtgattgctcccaggccatcgaggagtctccctgttgtgtctcagcttccccttgggggtactcgacctctgctccttcgtcgcggccagcaccgctctgatgatattcgacctctcttcttatgctgcggccagtaccacggtcgagtggattactaacatgcagaagttgtgattgcatcattcgctacactcgatcacatcatcattcggtccttgtaaggtgtggtcgagtgatttcctggggtggagaaaccagaacaatgtcaagtgtccttgattgctctgtggtcgagtgtattgctattcaaggccagaatccatttccctttgctcttcatacatgtctcctgaaaacactaacaaaatgca

SEQ ID NO: 3286 - DNA, 946 bp, Arabidopsis thaliana
tacttgaaaatggaaaataaatataataatcattagcttgattatccaaattcacaactaataacttttcttctggtctgaatcaacaactgtatcatagttctttcaaatatatgttcagaatttagaatctaatatatttctagtcttatagattaacgaaactttattttaatcgtgtaactaacgttgacttgttaccgatacatccaaaagcatgaatgaagcttaaatccttgatcggcgtgatcctggccatgatgaaattccatggaatgaagtacacaaagggaatatatgatactacataaaaaataataatgtcaattatatttggcatatctatatgcatatgaagtttaaaatgttcattttaaagataagattagattacatttcacataactatacttctaatctacattaatattgactcgtgtgtcatgcgttattttttgttcgtagatataaaacgaataatatcccatgcatgtcaatatcaacaagccggaacattatatataatccgtatatatatgagtcataaacttcatatgatttgaggcaaaataacacattattttcgtttactaacaaaaccaaaattgaaaaatggctacgactactcaacacatgaatcaaatcttcctcgtactcctcctaatctccttcgcaatctctccggcgatctcaacggttccaaaagaatgcgagaccgattcaacagactcttgcatcgataaaaccaaagccttacctctcaaaattgtagcaatcgttgccatcctcgtgacaagcatgatcggagtcgcagctcctctctttagccgatatgtcacattcctgcatccagatggtaaaatctttatgatcattaagtgttttgcatccgggatcatcctaggaaccggcttcatgcatgttttgccgattctttcgagatgtt

SEQ ID NO: 3287 - DNA, 570 bp, Arabidopsis thaliana columbia
taataaactagttatcttccaaacacaaacacagaaatgggcgtttgaaaaagttgtataaaatgtctttatacaaaatggtctcacctcgtaaacaataatctcgacggtttgtttagtagttggtttaacagtaatctcggtagcgatatcatcgtgtgtgaaatccgagttacactcgcaattatccacacttagtccaccatactgaaccgggacatgttcgggtgatatgtacctatataaccaaagacaagagagacacttaacacttccaatagttaatctaaacaattccaaaaaaaggattttggtaattacttgagaagggtttctgcagatcttgaaggacctgcgaaaactagtttgctctttgacctttgtgacataaaaggactaataattctatagaacgcaaggtaccaccatggaacattgatgaatatctgatcaaacattcaacattcaacaacatcagatctgagcaatcataaagtcattggtcagtgtaataaagattcatacctgtttagagacaaactcagggtaattgtcttgaagaagatgaag

SEQ ID NO: 3288 - DNA, 1083 bp, Arabidopsis thaliana columbia
agtaaactctttcaccaaaaaaaataaagaaaatttattgttccatctttctgataatcggatcttacagagagagagctccatggatcgccgcatctatggtggctccgcgtcattcatctctttctcttcttctccgtcctaatcttctccgccgcatctgcattatccaagaaccagtctccttcttccgggtcgggtcagatcaactccaactctgtcctcgtagctcttcttgactctcgttacactgagctagctgagctcgtcgagaaagctcttctccttcagacacttgaagacgctgttggtcgtcacaatattaccatttttgctcctcgcaatgaagctcttgagcgtgaccttgaccctgagttcaagcggttcttgctcgagccaggtaatctcaaatctctgcaaacactcctcatgttccacattatacccaatcgggtcgggtcgaaccaatggccttcagaagaatcgggtcgggtcaagcaccacacgctagggaacgatcaggtccgtttgagcaacggacaaggaaaaaagatggttgatttagctgagattatccgacccgatgatttgacccgacccgacggattgatccacgggattgaacggcttctcattcctcgctctgttcaagaagatttcaatcgccgtcgtagccttcaatcaatctccgccgtcttacctgaaggagctcctgaagttgacccgagaaccaaccgtctcaagaaacccgcagctccagtacccgccggatctccaccagctcttccgatccaatccgctatggcccctggtccgtcgctagctccggcaccagctccgggacctggaggcaagcagcaccacttcgacggtgaggctcaagtcaaagatttcatccatacactgttacattacggcggttacaacgagatggcagatattctcgtgaatctgacgtcactcgcgacagagatgggacggttggtgtcagaaggctatgtgttaacggttttggctcctaacgatgaagcaatggcgaaattgaccacggatcagctgagtgagccaggagcaccggagcag

SEQ ID NO: 3289 - DNA, 500 bp, Arabidopsis thaliana
ctttctattcctcggtaagcgggccgtgggagcatggcgggagacaaagtccccttttgactgatagaaagcatctctcttttgtctctcctgaccgaacccgccaaaaaaatcacaatagaataagttgttcttgccgggagagtagcgtctgagagatctttatgtgacgagtaggcgtcactgtcttcaggtaacaatctgtgacctttgagaccacaatttctcgctcttcgaagctcttggttatcaacttcgccggagcaatctactcaaccacaaatgcctccggtgagttcttagatcgatttcgatgtgatttttattcaaaagttttgatttttcgatgtgggttctgttttcagagagtaccaaatgttattggaggttcttttgttgagtctcaatcatcttcgtttatcgatgttataaaccctgtaagcaaactctcttatgagtcctatactgttgtttgattacttaaaggttgaactttgaag

SEQ ID NO: 3290 - DNA, 733 bp, Arabidopsis thaliana
ggcaatcacaaatttaagttttattattttagaaaacaaaaatattgatttatattataggggaaagaaaaatattgatcgccaaatacggggggctgctgcgcatgcacgcatttgtatggtaagagtttatgatccgactaatcgatataacgacgtattacatcgtgtcctgaggcatcgcgatgccacctcatactaccgtgggttttttaaaccttccgagttttgttgatgttattccgagaattagcaaaccgtaacgaagatgttcttggcaaccatcttttgatgggagtccggctgttcgaaagccggccaagggtgatgaacgaaatgtgaacccttgtctcgcctaggttggatgcgcgtgcttcgtgtaaggacattgtgttgttgagcttgttgtggttgttgaaagaactctggtggtggattatgctgttggtatcctccattgaactgctgcttgagacataaccttggttgtactggaaaaatcgcttagagtggttatgttgtggtggatacacttgatcttgggggttggctacattagtgcttatgtcggagaggtttgggttgggcttgtagttgttgtagcccttgttgaaccctccttggttttgaatgtagcacatctcttcagtttgatcattcccccttcttgcatttagaagtgctcttcatcagtgatgtagtatatctgcttttgttaagctaacaacagctt

SEQ ID NO: 3291 - DNA, 378 bp, Arabidopsis thaliana columbia
tcaaaattaatcatccatcttgaagccttgcaatttggacaatagtcaagatccttcaactccttcctgaataggcagcaatagttgatacacgcatgaatcttttcataacccaaatcaaaagacttaaaaaacttatttacatcatacaatgatgtatgtaacacgttgccatctggtgacatctctaacagtgtcccaagcagatcgttgaagctcttatcagaccagccattatgtgttttgagtcgaaataatgagacaatagatgataacttgctatgctttgcacagtttggatacaaagggggttcaacatctgctaactttttcatgaaagcatcttctctactgtcctctacctcttcagtctcacaa

SEQ ID NO: 3292 - DNA, 620 bp, Arabidopsis thaliana
gcttaccaacacaagtatgacattcatttcaaccgtaattgccccaaccaaattcacagtagtggttattaaagtgaagaaattactgacgatctctgactatctcatatcaaacatggttaacccgactcttctcgacgatttactctcgaagatagctaagaacctggctgaccaatgctggtccaaccttggtccactggtacgatccggcacccgtggaagagacattgtctaccgtccggatgtcctcaaagatgccaatattctcaccttgtgtaactcgcccgatgacttccaagctggagggggccacaatccctccggatccgctgatgaaggccgacatcgaccatttttcttacggtgttttgcagctaataatcccacggccgtgtattacgaaggtattcgtgttctaacgaatgatcgaaacatcaatggagccatcaggctcttacagcgtcatgctctagtacgagcaaatgcaacacttgcatgcgccattgtattctatatgctgggtatgattatatgggcggcttgtttctacagctcttcacctagcatctttcttcctcctcgatgcgaaccatcgcattaggacatcccgaatgaac

SEQ ID NO: 3293 - DNA, 588 bp, Arabidopsis thaliana
gaggatgacgaccccagacaaaggagcaatagagtgttgatactcaattctctatctcaccaatggagtagtctcccaaacattgcgcctacctcgagtttctccagccgctgatgtaatcgacggtaagttgtacgtgattggaggctcttcgtccaaaaatatcggggattggggagaggtttatgatccaaagacacatacttgggagccaatattgcctacaacactagatctcacagctcaaaagagtgtggttcaagatagattagtaatgggtggaaaggtttatgccatggatggtttgaagattgagctaaagacgaatatttgtttggtagagaaatgtttgcgtctagtgtcgtattccaatcatagtctttattggaatgatccaacggaagattgtgtgtggaggttggttcgagggcttgaagaactttgtgatcattatccatatttttttaataatcataattcgcttgcaaactccggcggagaaagaagcgtgacattgtggtggaagtcggtggtgattcaacctccaaattaccattgcactaaggagtgtaaaacagagatttggtg

SEQ ID NO: 3294 - DNA, 447 bp, Arabidopsis thaliana columbia
cctctctcgcgaaaagagtattccatttaaccagcttccaatgtgattcaatcgtcttctgtaaaccggtcttcaattctcaataaccaagcattaaaccgaatgcaaagttgaatcagaaccaaataccacaacatgtgtcaattatataaaggttaaaccgttatcacaacctaatcaaacaaaacaaataaaagcaattctcccacaaaaaaggatccattcctattaaagtcttgtttgcacattttgtctttgttattttcgcatgctcctttgaaactttttgtgcatggatgtgaaactcttcactggagcatacggcgataacgaaaacaaggtgtgcatataaactttagtagtaatggaatgaaataagaattataagtggaacggccaagccgactctacttgcgttttctgtcaagacccactagaaacaagagc

SEQ ID NO: 3295 - DNA, 683 bp, Arabidopsis thaliana
tgaaggtagccgatggaatagtgagagttcacctggagaagatcaagaggaagagaaccatagctgtagcatcgacgatgataaacgcggattctggtctctgaaggtcgagattctgtttcggacggtagaatcaattaggcgaacgagagagtcagcagatctgaaggtgttgcgatgaagccgattgttcctttctccccagaggaagtacatcgagcattgccaagctagaagagagagtcttctcttatctttcggaccttgaatggcttgcatctgagtgacagttgcagaccaagaacgcaaaggttgaagttgacatctcagagcaattgaagaccaaactgtccaagacaaattgcaattgaagaagaggtgatcacgactttcctgagagaagttgcagagtaagcaagctggatccgtttgaagaccccatccaagtatccgatctcgtgttggacaccggttcagaactagtagccaagtgaagaagctatgtttagggatgcctccataggtccacaccgcagtacgccaagggactagtggagagtcctcatggagaagatgatacacaagcccagttgagtagcgttgataaatcttcccattcacttctcattcataataatcagcatgatccgagagagtcaaattagtgagaaatatgtgtaaag

SEQ ID NO: 3296 - DNA, 547 bp, Arabidopsis thaliana
cggcagcgaggcacggctcgcagcgctggtcgatgcctcgccggcgcgatgatgtcgttcgacagcaccgggaaggtcgcgacctggaacggggccgccgagaggttgaccggtcatgccgccgccgatgtcgtcggccggacaccgccgctcggcgactcgaacgaccgggggcgatctcggcggcaatcgtcagcgcagacctggccggccagtcggctgtcggggtcgaagtgaccgcgacgcatcgcgacggtacggtgctgcatcatgctgctgtcggcagcgccggtgcgcgacgaagatggcaccgtcgacggggtgatggcggtggcgctcgacatcgggccgctgcggacgatcgagcgtcagtgcgccaggcgcagaagatggaagcgatcggccaactgacgggcgggcttgcgcacgacttcaacaacatactgggcgtgatcgtcggcaatctcgatctggtgcggctgaccctggcgaaccggccggccgaaatcgaactgctcgacaacgccaccgcggcggcgatgcgcgg

SEQ ID NO: 3297 - DNA, 504 bp, Arabidopsis thaliana
cagtgacggagccacgtgctgacttgtatgttccacacaagtggaatctgaaccgcgctcttagctagttcaacaccgagaatatctacgttcttggcacggtcccatttgggctttggtgaagcatcatcagtccaaccactgaaacccaaaccagagatgataatagaagcctctgaaattgaccagatgaagtaatacttccaacgagccgtgaatccagccatgtattggtaactaaattttctcaagaatccccattcttgatacactggttctgtgaaccgagttaacggatattgaggcactaaatagagatacagagccatgcaaatcgcagcttgcaaaatagctcggattgtagctccataaggcgatggcttctttcttttctcagtagtatcccaaatctagaaagcacaaagtttacatattcacaatctagtctattaaaacttcagagattcttgataatgataaaagctctcaagaagaagaagaaga

SEQ ID NO: 3298 - DNA, 411 bp, Arabidopsis thaliana columbia
ggatcccctgatcagggtggttcacaagcgtgaccataaaggactcattccacaaacgcgaggaagtgagagacgcatgaattatttgttctcgactccctttggttataactggtagtatttggcgaaagtctccaccaaatgtaatagttgttccaccgtaaggtgttgtggttgtcggcttgtactatatctttcagagtacgatcaagagcttcataacaatgtctatgcaacattggagcttcatcccatataatcaactttgctcggagtaacaaagaagcaaggtcactatcaggtgaaatcgagcaagtggaagtttcgttcacctgtagtggtattgcaaaccgggaatgcgctgttcgtccgccatccagcagtagtgctgccattccgcttgatgctaca

SEQ ID NO: 3299 - DNA, 511 bp, Arabidopsis thaliana columbia
ttttagtacccaaaaatctctgcagcttcctcgttaaaatctgttgtggtgtccaaggaaagagtttgtctgagtgaccaacataatgatactgaactacctgtcatctgattaagaacaacatagtaaacatcaccatacgcattgtatctctaggtttatgtatttgcagttgtcgtcttattgcgtaattttgttatagaactcaaatgatcttgactggttttgttcctgacttagacatagaatgattgtgtatgcttctgtagaatctaaagtggaaaatgaatgatacaggtgcatttgatcgagggcatcatagaccaagtgaacggaacaatttatgtctcatgggcgcaaccgagagtactagggatccacagatcaaggctttgagcgatcaattagacagttgggttgacaaagttcaaccactttactatctgttgaagccgagacacgagatcttgttgcagcataagagaaaagaacaccttcttcctccttttga

SEQ ID NO: 3300 - DNA, 314 bp, Arabidopsis thaliana
tgatgatccaagatcatacacatcatactccaagaaattcgctattgcggatatcatcgtcgatttccctgtcccgggaggtccaaacaagagataaccgcgcttccacggcttagcaaccttcctataataatcttttcctttagtagacttaatcaaatccactttaatctccgcttttttatcaagattcatgcacaaagtctcgaacgacgcatggtgattataaggaacgttgctccatagtccttctcaccaagacgattatctactactgtcattggtagtgtagaagcttcctctctctgttcttt

SEQ ID NO: 3301 - DNA, 2075 bp, Arabidopsis thaliana columbia
ggactagtatttttgattaatcgatgcactccgatgctagtatttttccagtatttttgattcaacaaacccggatcttgcatccgcacgcaatcaatattacatacatgggcttttcgaatttggcacattactttgttgtgttcccttgtgtttttttcgttgtcgagttttgtctttgtcaacggaggagactctattctcacctctcttttttttcgtcaagactctattcttagtttcatttcttgagaagaagtctatgataattacgtatcttattaaatgataactactgcacgaattcaattcttcatgcgtagtgactacaaaacaaaaaaaaaaccaaaatataaaaaattgttttcttgtcttcttcatgtctagattctcagggtattggtggaaagtttgtaaccttagtcggctaaactataactaaaagtgaactactaaaaaatatattaatggtttttcatattaatcaagttgggtggactaatggtttttatttgaagtgtgaagtttttacatgagtttacatcagagatcaattctctttagatattttggatcaatatattgcgagtttgctccgaaaaattaggcctgggagttcggttaaaccgggttattcggatcgggttattcggtttggtggaaattcggttttctaaaaatctcaccgaatagacccgaattgaaattcggttcgggtcggttcggacgtcggtttgttcgggtcggttatagcctaaaaaatatgttccgaatatgaaccaaattcttttttttcttcggtttatccggtttacacattaaaaaagaaattggtctattacaaatacaacaaaataaaagtccaatacacttaacaaaacccaacatacaatcaataagcccaacccacaattaataagcccaaacttgtaaaaattttagggttttgaaaaagctgtgtgtagtgtgacggctgcgactccgactatgaggctcggacgatgacggcctcgtccacggcgatctcaaactttcttaatccagctttaagcgagattgcattaaacaaggttgatgagtcggtttctcgctttctcactgaaacaagaaagaaaacaactaaattattgaaataaacacaagcctaagatctagagaacaaagacacgagactacaaaaaaaaacaagtaacaccaataatcaaatctgaacaaatcttacgtttaagttcgtcgaggacagatttagacaagaatgattgagtttttagaggataaagatgaattgatgataatgaattgatgaaggagaagagatgtgatgatgaatagattggagaagaatgttttttagatcggagaagggctcacttggtttgcaagaggcagtgaagaagcaaaataaaacaaattagggttattgactagggttaagcttatatatgattgcatattttaataaaccgatcggtccgattaccgaactaacccgacccgaaatccgaacaccaaaattaaattcgccgaacggttagttacagtatctttggttttcgccgataaccgaaattatcggtttaatcgggtcggtttgctcggttcctgccgtaatcccaggcctacgaaaaactgtaaaagttggatccacatatatatccacaatacacatatatatccaaagtattgaggaaggccaattgctgtgcggtatattcatggtaacactattagttttcttatagctttttccgtcaaagttgcttctttagttgttttcattttaattggttttctttcgtattatcatttgttttgaagatttttagttttctgtattttttcgttgtatttcaagagagtcaggactttagtgttcttgggtaattaccaattagtagttcaaaacaagtaaaccaaaatttactgatcttcaaagatcccagaagtgccaactataataaaatattgataatttggaaattctgctttcttagttgccatgaataaacaatataaaaactcatgaggtttgctcacaagtcataaacgtgcgtacacaatggaaatttctaaaa

SEQ ID NO: 3302 - DNA, 987 bp, Arabidopsis thaliana
cctctagtaacgtcctgcttaaactcagcgggaaattatatgtatgtgtgtatatatgtagtgcacgagtttctttagggtttgattaagggtttctttagggtttgatttggggtttaaatcaatttagggtttgatttggggtttaaatcgatttagggtttagttctatgttttctttctctgttttgtgaaagtttacgtttttttgcctctgttactaatgttttttcctttgtagatcttcgccgatttgttttagggtctgatttcgtgttttaattcgaaatagggtttctttaggttccattagggtttgaattcgggtttgaatcgattcagggtttagttccattacgttttctatgtttagttctatgttttcttactaacgtttttttcttttctcgtagatggtatctgaaaacgactacactaggtatctatccactcaacaagtacctgttcctcctactcgtggttccatatctcaagggaatgcatctagaaactgtgatccaccctcacctgcgagtcaaaaccaacaagccggtttgtctcctccacaatccaattcaaactcgcctaatccatctcattcagctactcaaccaccaactgcccgtctcaatgatatgacattggatgagctcctcgacagtccggggcgtcagtctttgcagaagctagatccaaatcgtcctccgggaactctctggtaaggatgattttggttatactttaaatttagtttcagttttagattttcggtatgtagattctcattgtattttaggtatgtcgactaagtactaatttggttatacattgtattttaggtatgttgattctcattgtaatgatttttttttgtaggtttgacattgatggttcaattgcagcttctgtccgaaaggtttttgaaagagatttcaaggcacctcatgccacttccaccaaaccttgcttgatcagcctttgatcagc

SEQ ID NO: 3303 - DNA, 1181 bp, Arabidopsis thaliana
ctaataagatatagacattacatttgatctctgatctcaaagtcaatctttgttgtaggcttattgttagcctcgagttcctccaactcaccaacagtaatgatttggccaatagcatctgcagtgaaacatgactgtgttcataatctaatgatagcaagtgaatggaataaagcaaaaatataatatagaatcggaaaactcaccaaccaacatgtgagggttaagctcaccactttggatttttgaaaatgacgccaaagtcaagaagttggagtcagagacagaagcacaacccatgacttctgttctaacctgaaacgccattttgtatagatggttggttggacgaaactggccagacgcataggtaagaccaaagatctcaatgaagacccattcgccaacaataagtttgtgaacaaacttagaaaccaactccttcttcacggtagcatgcatttttttccccttatgacaaagacaacataaatctatattagtacttgtgtatctgtaagcgttgattttgcatagataagagtaattcttacatgttcatcagagatgaccaactcaatggtttcacgggtgttgcttgtgtactgcttccaagagtgaagaatcttgacctggactctccatgcatttttgtaaggctcacgtctttaaggtatgcgaatgtagcagccatttctcaaaatgtataattgctttgatctctcgtttgcggtgtgagtgatgatgaaatgaaatgatatgagaagcgtatttatagtagccgagtgaatctttaaacatttatttgcaaagatttagagcgtaaattctttagaaacataatgattctgaatggtttagaataggaatatgcttgagtatcataagtgcaaaataataatcgaaatgccgtatttagattttgatttgattctgaatcaaactgtcgagatatggtagatgcatttgcccttatttttacgcttgtacattcaaaacagaatgatttggatggtttagaagatggaatattgcgtgatttagattatgtcttgactggcaagcgaatgttaaaagattttgtagttaaggtgatatatgtaaatcaggaaacagaattgctatgaatgaggaatggagaaaatagatgattgaatcggatagaattttgggaaggcaag

SEQ ID NO: 3304 - DNA, 653 bp, Arabidopsis thaliana
gagaggtggaacacatagaggaagtggaaatgacaacctcggaggatggagatcatggtttgaatgttcccgctaaacaatgtgttgatgcagcttttgttttttgttttctttttttcttgtttcagaaccaaataactcatcatgttttgttttgtcatgtttggtattatgacattgctaatttgtttcagagtgtattaagacatgtttcaatgttgcattttcataacttttgagttcaaattaccttacaaacgattagttataatccatacaacattacaaaagttacataagattgcatacactcaataaccaattgaaagtttcttttggttcccttgaccaaacataacataagcaaccacaattgtgattacacaaagcaacagaaaacacacatacaaccactctttacacttgacgagttcctttttcctcgctatggcttcttctttcagctcttgtatctgattaagcatctcatttgtttctgctttaactttgctaatctcatttgctacgatggctagtcttggtaaagcatcttcgacttcttcaaacacgggatcctctacccacttaaacaaatgaccctaatgcacaaacacatagatacattgttagcttgtcaaaaaaatgtcgactca

SEQ ID NO: 3305 - DNA, 744 bp, Arabidopsis thaliana columbia
ctcaaatcgtgttatggctgagttatgataccgtgatggctgagttattgtagtttaattcgatgtttagctaagttattctaacgtggtgggtgacttatcatcacacaaatcgtgtgatggcggagttattctaacggcggacttatagtagattattcgatgttacggctgagttattctaacgttgtggttgacttgttatacccaaacttcgctgtaatcaaagaacccaaacgtgagtagcggactatacttacaccggtttaccttcttataaatatatacacttgttttctcttgtcttttctcttgtcaagaacccaaacgtcgttagaggactatatatacactggttctctcttctcttttctcttgtcgattcttagcaactaaaactcttctcttttctcttgtcttttctcttgtcttttctctaatctctgagcaacaaaaactcttctgagatcatagatgcatcaggttccaacaagaaaccgtgtgtggataacggttccaacaagaggccgtgtgtggatgacggttccagcagaaggctgcttgaaacgaagaaacgtttcaaaggcattatctctctcatcagatgcaacataagggagacggaggaagcacacttcttggatctcaaactgcgtgagaaagaaggagaacttaatctcctaaagaaaatgaagaggatggaggacggatttaatgtggaggaggagtctagaaagtggagga

SEQ ID NO: 3306 - DNA, 877 bp, Arabidopsis thaliana columbia
ttttatcgtaggtttcccggttatacaaaccgcttcagacacatgtgatgtgacctctctaatcttattgctttcaagtttcaaagtgtggtctctgaggggaacacggccagccgtataataggacacgtggtgaatactcagagaaagctccacaaccaaaccgcatccttggttgccacgtaacctcgtgcaaacacgtggcgaacagtaaccgcttctcggaaagacctctggtctttggattcgaacgtctctctataactataacttccgaggacattggaactaggatcaaaactttttaaaaagggacaaaactaaattggtcatagcaaattcaaagaagtttgattcggaatcactggttaaagagatgatggagagaagaagaacggcattggtattgtttgtggtagtggtggtgttgacgtggcaagagggtgtattggggaaatggttagagtcgacggcgaaggaaaagaccggttcatgggctggttgggtctccgacaaaatcaccacgtaagtgatatctaatatccgaaactgaaacacacctgtggttgaatctgtcctttacgtaaccatcacgttgatccaattcagtctatactttctctcatttggatgttaagtacgtgtttagtgagattagtaatgtcttattgcgttttttattggaatctttagattcgttcactacattggatatttacgcatgtatttggccgtagttaagtgagtgattgagaggtaacgttttacttcttttcccagtggatttggtactaagaaagaagaaacaggaatttatcaaaaatctaaagatgaagcaagaaaagctgctcaagcggttaaaactatgcttatgaca

SEQ ID NO: 3307 - DNA, 1094 bp, Arabidopsis thaliana
atgtatgtcgatcgatagagaaaaggatccacaattattgctccatctcaaaagcttctttagtacacgatacatgtatcatgtaaatagaaatatgaaagatacaatacacgacccattctcataaagatagcaacatttcatgttatgtaaagagtcttccttaggacacatgcattaaaactaaggattaccaacccacttactcctcactccaaccaaatatcaatcatctattttgggtccttcactcataagtcaactctcatgccttcctctataaataccgtaccctacgcatcccttagttctacatcacataaaaacaatcatagcaaaaacatatatcctcaaattaattagatctcatctatctctaccctcgacatggatcatgaggaaattccatccacgccctcaacgccggcgacaaccccggggactccaggagcgccgctctttggaggattcgaagggaagaggaatggacacaatggtagatacacaccaaagtcacttctcaaaagctgcaaatgtttcagtgttgacaatgaatgggctcttgaagatggaagactccctccggtcacttgctctctccctccccctaacgtttccctctaccgcaaggtacatatgtacacattctcattacaagtacactccatataaatcatgtttccaattcactgagcattgaaccagtacatatatgtgcttgtaaagttgggagcagagtttgttgggacattgatcctgatattcgccggaacagcgacggcgatcgtgaaccagaagacagatggagctgagacgcttattggttgcgccgcctcggctggtttggcggttatgatcgttatattatcgaccggtcacatctccggggcacatctcaatccggctgtaaccattgcctttgctgctctcaaacacttcccttggaaacacgtcagtagtttaatcttatttgttttaacacatttttggatgttactgagagaaccacatgaaatctatagacatgcacatgcatgttgtattatgaattgaattttaacatgggtaataaaagtatatataaaatctgatca

SEQ ID NO: 3308 - DNA, 740 bp, Arabidopsis thaliana
tctggaagtcttcgaagacttagtgtcctcaatcaaagcagatggtgtccaagctgattatcttctttgaaaagtcctcccccactctctcgcgggcagaggaacatcatggttgtgataactcgaagcaggttcattgacgaattggacggacacaaagaacgcattcatgaaccacttccttgatgattcaattacagaattattgcgggagaagatctcttcgttttctcaagatccaacagaaagtttgaagggaacttggatcagattcaaatcctatcagagggattgcccacaacatggtttccaagaaggccagctcatcaacatattcttccgcgaaatcgataggcagtatcgattttgttttgatggtgcgagtaatggcaatttcatgacaaaatctccaagtgaagcactggttcttatcaacaatgctgtcacaagtctctcaacacaggacatagatagtagttggagaaaattggctaaggatcccatcattagtagagaggaacaaggatctacacacattgcttctccagctatccctgctttcatccaagcccacccaccacccattgctaagagtagaactgaagccatactagaggaattactcggactgctaaagaccgatattccgcaactgcgaacagaaatcaggaaacgcgagaagtctgcttttacaaaagaatctattaattcagttgaatcagtgtagatcatatataacc

SEQ ID NO: 3309 - DNA, 1122 bp, Arabidopsis thaliana
tgcttttcttgctcagctccaccttcttcgtcgcttcttctcctttgttctcctccgtcttctcaaccggcgagtgtgacgaagccgcaacagacgccacggggctgtgatttgctcggagctgctcaaagtagagaacttgcaccaccactcgtagtggaagtctctcgttctgtgcagcgtgcgttgatgcttcatttgtcagtttcctcacgtccattaacccacaaagcctcttcttttcggattttgttagttcgggatgttcctacaaaaaccaacttcaccgattacaaaaatgtccaaaaatatttcattcttttcagagaaacaagaaactctgttttaccttcatgaaagtgtcaatggctttgtagagaccgtcgtgtatcggcctagctgattccgggactaactcagataactcaacaaagctagagagtgtaagttcagagttaagagcgagataagcatcaatcaatcttcctacactcaacaaaattccatttcctaaaacaaactccttgtaccggtcatcttcagatacacgtttctcatccgccatgaactgatcaacaatccgatggactaattcgacttcatggatcagcaaatctttaacggacgcttcatgaagcttcaaactcacgttctcaaccaaatcttctctcaccgtctcatcagctccaaccaagatcgaaactttaaggagttttagcaagaagctgcaagaagagtagctcattgctctgtttacttcggcaacaagaaaacaaccgtctcaacgagatctttgtttgaagaagcttctgatgtcaaagactccatagattctggtaaccaccttgcaacatagtatctaagagcttcagcaattacgccattattcatccttccactagatttcacaacacttatcaccctcttgaacatatcaatctctagctcacatacatcttcgacccaccaatctttcggaatcacattctcttctctcttctcccgatgatattcgactatcttatcaggtccagataacttcctgttgaatgtataagaccaagtgatagtctcagggttcaccaagatcttagctgaaacagaatctatgcatctaccaac

SEQ ID NO: 3310 - DNA, 546 bp, Arabidopsis thaliana
caactattaatctatgtgttaatcaaaacacatagactaaacaccataccaatccatctaaatagtcacggggagaacaaacacaaccacaaccctagctaagtacttaaacattatcagctgtacttaactatgagcataaaactaacaactaaaagacttacgaaagcaagaaaaatgaggactattgctacccaatccatcacctcttggagatgatgagagcaacaacctccaagcttccattgagctccacatgcatagcaaaacttatagccacacctacacatcaaccacgaacattacagtagccgaaaacataatccaattccaaagaggattcggaaatcataatgactatagaatgtgattatagataatacctgcaagttacaggcatgcgttcttccgatagttttatcttgtgtaggcaacttctacattgacgccacactgttgtaataggctcacgaccggaactcttgtgttccttgcacgacaagttactatgccacggaactttgcagttaataccaaagtgtttgc

SEQ ID NO: 3311 - DNA, 766 bp, Arabidopsis thaliana
attttacgattctggcgggaaaacgtgattttacgattttggcggaaaagcgtgattttacgggtttggcgaaaatacgtgattttcaaatttggtgggaaaacgtcattttacagttttggcgggaaaacgtgattttacgatttgggcggaaaaacgtcggtttacgattttggtgggaaaatgtgatttttgattttggtaaaaaacgtgattttgatgggaaaacgtaatttgatgggttttagcgggaaaacgtgattttacgttttgttttaaatatatttagtattttgctctttattttagttataattaagttatctacattttaataaaaataagtaatataaaataaaacataaatgggtttaatgggtacccatttgtttgtgggtaaacccatttattaaatgggtttaatttattaaatgggtttaattggggtaaccatttaaccccatttaatatttttctctaaatgggtttaaatgggttaattttttttgcacatacccatttaataaatgggtattcaatgcccaagttaacatcactatatctgatgttcattaaaccaaatggatttttttttgatgatcgcatcaagcattggtaataacgagtacttccttgcgttgagaaacacactattcaaagattccacacaattgcttgtttctaagttgtatctttctccggagaaacaacatcttgcccatttttcattcactcttgtatcctcaaatacttggcgcaaaaagat

SEQ ID NO: 3312 - DNA, 1309 bp, Arabidopsis thaliana
atccggagatatctgagtatgttctccggtacggcgaagaaacagagctcgtcggagttccctcattttggtcggaattcgaagaactctccatcacgattgtgtataatgatcaatgtttttggtgagtttcaagttcttctctttcgttgttggctcctctggctctgatgaacgtgacaaagattaatacatggagtctcttcctcttcagcttgagttattatttaatgactaaaaattaagttatgattgtctccgacgaatgatggccgtccgatctgattgtgggggagagacgtgccttccacatttggctaatcaaatctcataatgaacgttagttgctatatatgcgttaggtgtataattaataagtaaaggttgtcccattcatttctaattaaattctaaatgacatttacaccatgttattgcaattttcagagagtaatgttactattggaattattattttcggttcacatgtttttagttacaaattattaatgtagacataacaattagaatcacatcgtataaatgtcatttactaatttttttttgtagacattaaatatttttagatcattttaataataataatctcaaatttgtaattgtcatcaaaattaaatcggatttacaacatcttttaatgacatttgagtttgttttgtaacgaatgtttttggtcaacttttagttgacattcaacgtaaaccctcgagacaaggaagaaggttcaagccaatgaagccatggtcaatgtctaagactttactttggttttaaaaccgggatgaagtccacgtctacaagagtaaaacggcacgcagtttgtgaacactgttttcaaacgaccataattagacatcacatcatgcgaactgtgtctggtcaggcaagtcacgtgactatctccctgccttgccttgtgcgccgcagagtgcatcgtaatctcgtgatggtggtggtggcacgtgcttcccttcacacgtttaatgagcccgtctctactcttcaattggtttacgcacacacgcatagttcgtgccaagccttagcttcacacactcctctttctctcagacacgctcgagcgctacacacgcgcgaaagctcgtcttccaattcacgctgcacgctccttcacgcgcttcctccatctcacggccagatccgcctcttttcacccgccggagatccacgtcttcttctcctctctcttggtttcgctgacggcgacagagggggaaacctttgatcggaagctccatttatagggttttttagtattgctcgatga

SEQ ID NO: 3313 - DNA, 520 bp, Arabidopsis thaliana
  unsure (1)..(520): unsure at all n locations
tagtaacgaccgccagtgtgctctaaagcaacgcanttacgttttaaattaaaggatgaaagcaaagcgcaacgagaggtactgaaaaagacccccggtattattatggtggtggaaagcggtggccagtttcaggtggtcataggtaaccatgtggccgatgtcttcctggcggttaacagtgtggcaggccttgacgaaaaagcgcaacaggcaccggaaaatgatgataaaggtaatctgctaaaccgctttgtttatgttatttcaggtatttttacgcctctgatcggtttgatggcggcaaccgggatcttgaaaggtatgctggctctggcgctcacttttcagtggacgaccgaacaaagtggtacttatttaattttattcagcgccagtgatgccttgttttggttctcccgataatcctgggatacaccgcggggaaacgcttcggcggtaatccatttactgccatggtgattggtggagcgttagtgcatccattaattctgactgc

SEQ ID NO: 3314 - DNA, 880 bp, Arabidopsis thaliana columbia
ccttgcccccatctacctctttgttaagttcacaagtcactaatcacttcatcacttgacaaacataaatttcctcataactttttatacaaagttaaaagaaagaattatcccaactgattcattttttatagcaaaatttgaattatgtatggattcatcattctaaattcaatattccttatgatcatgcttttaaaatcaggtgtaactttttttgtgacaagttaaagatcataaaaatctaggatgaaacatttacattttagaccaaaattaataatataaaaaaaaacaaataaagtcttcaaaagaagattttgttcatttctacatttttaatttgctcttcaatctagtcagagctaggaaatggtcttaagagcttcatcttgaaacagaagtccaaacctatggacgcaaacgcaaatatcaagacgctctgagacaccaaaacggcgccgtctatcccatgtgaaaacaagctttcccagctcagctccaatggcggtcctctgctcaacataccaagtcctatataacacattaaaaaaaatcgaatctataataaatctgtttttaaaaaaagacagatccaaataatacaggtcagagactaataatcaactcatcaattatttagaataaatcaaatcgttgattagtaatctattactggcagattataatttaaaaacaaccaaagggcgggacaacgatgggaactttgccagctcatacttccacacaatatataacatgacaaagacaaagaaagtctttttcttttaccatttctgttaagcttattcaatcacaaaacgcaattgcttttgaacaattcaaagaagttagatagaaacagtaatcaaatgtgttg

SEQ ID NO: 3315 - DNA, 991 bp, Arabidopsis thaliana
tcttctaattgttatagtccgcaatacgcatatatttgatctactctttaatctattggatcgtcagtcttctctaatgtcaagaatcttcgtttgtagccttttatcactctgtttgtgccgacatttttaagatcatggtcggagaacaacatatgaagagaagagagaattggagcgtcaagaaataataatccaatatattaagatacttttggtttttagactttagagcattctatgaaagatcataaaacaatacagaataaaatttatggttttctaaaagaggaccaaaactccactcttctaccaagtggtccacgtccttccatattcctccaatgattcaaatgtaaagtttaagaacaaaatgtataagctgtctttgtagagcttgtgggatcatcagccttgtttttgcagcttgttagggcaagctgaagaaagatgacctttttctccgcactcgtaacagtttctctttttgatcttaccagtgctaaccgcagatgttaagcttgcatcattagctccatttgtcacatcaatggatatcggaacagtagcatagctctcatccatgaacgaaccaccattgttttcagtgtctcttgttttcttttgaagactatagcttgttacctgagtcggtcctgcctcaacagtttggtgatccagcgttgagtttgtgtgagaagtgttttgaagctttatgggacaggctgtagaaagatgacccttttctccacactcataacagttcctccttttgaccttaccagtgccaacagcagatgctgagtatcctccattataagtttcatttgtagaagcgtatgtctcattcatgtagtaagaatcaccactattctttggaagaccatagctttgcatagccggtctaccatcaacagtctcttgacccagctttgagtttgcctgatcatcagccttttgaagctttatgggacaggctgtagaaagatga

SEQ ID NO: 3316 - DNA, 876 bp, Arabidopsis thaliana
ggatccccaaacccacttggaacctaacacattcattgcagcagtccacttttcatcttttaaagcttcagttactgttttgggcattggatgagagactttatgagcaagcatggcataccttttatttggtttgctaatacctgccttggatcttgttaccataggatgagttgagtctgtagctgtagtagctcttgatgcaagttgctctagtctagaaggtaacggagaaacgatgttgcctataggatcaagatctaagctagccgtacactcaggacgttttccatcacttctagacctttgctccggtgttgtttcattatcttgctgaagaactgtttgtaacggtatagcacttattggatctgcaatcgttagttgcatattttcagagttctcctcactcaaaccatttccaaaaattggttgattttctgacatggactcttgttgatgattctctgtagaagcagttgttccattttcttgcgtattggtttctgatgacgaagtagtggaaaaaccttgaagccaagctgcaaacaatggagttggagatgcagtctgctgattgatgtaagtgtctgcgaatgggaaagattcttcagcaaacaagacatgacgactcagataaactctgcctgttggtggatagaaacatcgatagcctttgtatttatcagtgtatcctagaaagatacatttcagagatcacggatcaaactttgtgcgagcatagtctcgaagtgttggaaagcatgcacaaccgaaagtccttaaagctgagtagtttggactttccaaacaaagcttcatatggactaatcttggttgctagagctattgttggtagaaggttgctgagaaagt

SEQ ID NO: 3317 - DNA, 546 bp, Arabidopsis thaliana
gtcgtagttcctccacttacaatgcgcaactgtaccgttcttgctctcatcaatctcagcttggatagtatcgtaaataggtttaacgacgccggttaagaaagcgttttcgcctgagagagaaggcaagtaaggttggccggtgttctcatcgaggcaatcctctaagattttgttgagctcagaggccatgttatggaagatgtaacagatacattcaggcatgaaccgaagattcgcagcctctccccaaatgagaagatagagtccaacatagagaagctctcgtctcgaatcagggttccgatctgagatccagatatttgatttttccccaaatacgaacaccagctagagtagttagcgagaagtttcgacgaaaccgacgaacaaccgcggaatcgagagaatcaatattatccggcggcggagagagacgcatctgagcatttgcgagatgaagcaccatatgctcacgctggttacgaacgttatctttctggaaaccgaagaacaaggcgagccagtcgaggagatcgtagtgag

SEQ ID NO: 3318 - DNA, 949 bp, Arabidopsis thaliana
cccaatggctcttaagatcaatcggattcccaaagttaaacccatcagaagcaagtttctcaagaaccttcttaaacgcgccttgactcatcttccttcccgagatcctcgctccacggcgtttagtactcattggtaatggatgcattgagatgtttgtggtacaacaagcagactgccaaccgccacatccccaacggtagcattgctgaggagctccagtgcaagtgcagataggaacaggaagacccgaaatgtccatactcactccattgatcaccaagtcaacacttttcttagcgggtttaactcgagtaacattcgtgttgttgttgttgttgttgttactgttctcatcctttggtttccttggcttcttagcctttggagtcgagccagcttttgcattggtctttctcttcttagtctgaacaacaatctcttcttccaacttaaccggattctcctcggtttgaagatgatgatggagattcatctgcatcgacggagcagacgaagtttcgggaaggacattaccgtagttaggagtggctgttgtaacaggcaacatattgaagaacttatccttctgttggttaatccaattgtagctcatgtggataggaggctcttggtggtgatatgacccgttaggccccatcattagattcggatcccgcccaggtaaaaacggtttagtgttccgatcaatggtagacattagctgcaaaccgagattacctttaaaggtagcagcagctggttcatagtaaccccaattacgaaacccatcgtcatccatttcaaagatctacaaaaaacatcattacaaaacaaaattcaactacacataacaattaagagattcagatccaaattcagacagaaccaatcaaactcaagagttctctgtcctaaatgcacagaaatacacaaagatctatatctg

SEQ ID NO: 3319 - DNA, 427 bp, Arabidopsis thaliana
gaagtacaaggcgattcatggacagatgaatttattgctatggacacatgcaatgttgtacctgccagtatcaccagagcccaacggttttattggtttgaaatgatgtagtcccactgtttctccactcgcttggatctacaaaggagactgtcagaataagaacaggatgaatgagaaaccaagtaaaaagtaacatggttcgatgcatgccttttttattgctttccaggacgtactctccttattgtgaggcagaggatagacaggcttcgagtgtgcagcccacaggtcttcgggccgctaaaatacattgcaattcgattgcatttatacttttccatctttgttaagtaataatgaactagtacacctttaccgtattagcatctggaagctctctgacagcttcatctacatttgttgc

SEQ ID NO: 3320 - DNA, 464 bp, Arabidopsis thaliana
cagttttgagtctccaaataactacaacaatttggtctaccaagtatatgacaaggttagtttctttttttctacttacaaacaaaaaattctaaacattcacaaaatcatattgtaaaccatttccctaattttatgtcttttagatgttagatttataacacattatactaatatatgaagcagacatgggatgcagttgttggagatataaccatcacagcgaacagatctttgtacgctgacttcacgttaccgttcacagagtcaggagtgtctatgatggtgccggtgagagataatgagaataaggacacatgggtgttcctcgaaccttggagcttagagctatgggtcaccaccggttgtttcttcgtcttcattggttttgttgtgtggctattcgaacacagagtcaacaccgacttccgtggaccgcctcagtaccagatcggcactagttt

SEQ ID NO: 3321 - DNA, 490 bp, Arabidopsis thaliana
cttcttggaatccgagaggaaaccttgctactgctcttctccaccagaggctaaagccaagaccgagaagatcatagtgtcggaacgaggcgggtactcaaaggttgtatctctaacaagaagtaagatccatttcgatgagatctcggacacgctttactcacgtggcccttcacttctaacgaggctctctaagctcgtgaggtccgtgaaatgttttaattataagggtttgatcatgagaggcaatgtggtggaatcttgtgatcatcatgagtctaagaaaaagattagcaaaggtaaaaagagattaatgactttgaattctaccgtgattgagaaatcttcgacagctccaagatggtcggattgccattgcagtttctgcacttcttggcattcttctaccaacagagattctctgtttgttaaagttcaacaacccaaaggtaattagtttatccacttccatcatttatttgtatgtata

SEQ ID NO: 3322 - DNA, 936 bp, Arabidopsis thaliana
aggagcttattgaatctatatagaaataatttgattattgtatacattatttcacattcattttgtttaaatactcgttttattttggtattattaggagctattataaatgtacaacgccaaattgtacggtccgtaaacatgtagagagagcttccacggatgctaaggctgtgattacaacttacgaaggtacacacaatcacgatgtccctgccgctagaaacggtaccgcggcacaaccgcagctgcgtaggggccgtctgaccaccatcgtatgagatcaatgtcggggaacaatatgcaacaacatatgagtttcggtaacaataataacacaggccaatctccggttcttttgaggttgaaagaagagaaaatcacaatttgacttttaagaaccaaagatttcgagattgatatttaggattggtttagccgcttggtgattgattctgaaccgggctactacttattgatgacttgtataacaacatgtgtgatgtgaattgagtgcatgcttttgactaaacgaaagaaatttgttttgtttttttctttttcttcataaattatgaatttattattttgtacctaatcattgtttgatgtaacatatagattatttttttcattacagttttttcccttcaaaaatttagtaaaaaaatatcttcatttttttgttagggtgtaagataaatctattttaaattacaaaagagagagattaaagatttgctttcttgtctcttttgtcgtccaaagtttaaggaggattgtcgaattgtccgtgattatctcactctctcgattcggttctcttctctattttacaacaaaaactattttccttcaattttttgtttttatttctcctttattttcgtttctctatggtctaatgcggggattgcctccctgcgttggcccgtt

SEQ ID NO: 3323 - DNA, 539 bp, Arabidopsis thaliana
gaacattgatgacggctacattgcagtgggaaggtatacctacatatatcatcggtataggcaggggaataagtgcaacggttggactagcggctacattagtgtatccgctaatgcaatcgcgtctctcaactctgagaaccggcctctggtccttctggtctcaggtatatcaacttgaaaacacacctatggtttgattcatctgattggttacaggttataacaagtctttttctcattcttcactagatattaagtgtatcatatatgtacttgaccatgttatggaactcgagtaaaacaaaagagtcataaaagtagggttgttgttcatacagtggagctgccttttggtctgcgttggatcgatttgggttaaaaaggataaaatagcatcttacatgctaatggctggagttgctgcttcaaggcttggcttgtggatgtttgatcttgccgtcatccaacaaatgcaggtatgtttacaatttctttagcttatatagtgacagcacacgtattctttaaagacttat

SEQ ID NO: 3324 - DNA, 498 bp, Arabidopsis thaliana columbia
gaattttaagtgagatttttgttttactttttttttttgttttatgttcattttcgtaattgaggaaagaaatagtcttctctactaaggaacatactcctctattctctgttgtcttctcctattttttttttttgattgggacctccataatactgatctctatcatactcatcattgtaagttgactgaatagtgaaatttagggtgggcattcgggtaagcgggtcgggttcaagtaaaatccgatcgggtagataagtttaggatccaataagataaatctaaaatattggtttggttttggtttgggtccaatcgggtttgggtcggttcgatatgaattttcaggccttttttgaaactgatactcaaattttggataaatacctagattttttaggataaatatgtggattttcggataaaattttgggttttgggtaaaatttagattttcgaataaaatattcgggtttggttcggattcgggtcgga

SEQ ID NO: 3325 - DNA, 1235 bp, Arabidopsis thaliana
gattcgatgggattgataaaagtgacagatactctaatcgtaatgttgtattcttcgatgtaagtacaccattctctatcaccacatccttttcttgagttattcatctgctcttacttaccaaatttttgatcttgcaattgtcgaaacagattaatatgaaaggtttggatggattacaagggcctatatacgtgggaaccgggtgtgtttttaggagacaagcactttatggatttgatgcgccaaaaaagaagaagactaagcgtatgacttgcaattgctggcctaagtggtgtttgttttgttgtggtctaagaaagaatcgtaagtcaaagacaacggataagaaaaagaagaacagggaagcctcaaagcagatacacgcgctagaaaatatcgaagagggcaccaaaggtaaccagaataaatcctctgtatcatttagtttcagttcattgctgaacacttttttgtttctttctttttcttaggcactaatgatgcggcgaaatcaccagaggcggcacaattgaagttggagaagaagtttggacagtctcctgtttttgttgcgtctgctggtatggagaatggtgggcttgctaggaatgcgagtccagcttctctgcttagagaagccatccaagtcattagttgtggatacgaagataaaaccgaatggggaaaagaggtaatgtagagctctttaaaacactttttagcactttatctttcattttgcgatatggtttttgatttctttcatggtgtttgtgaaatttattcaagattgggtggatctacggttctgtcaccgaggatatccttacgggtttcaagatgcattctcatggctggagatcggtttactgtacacctaagataccggcctttaaaggatcagcacctatcaatctttctgaccgtcttcatcaagttcttcggtgggcgctcgggtctgttgagattttcttgagcagacattgtcctatttggtatggttatggaggtggtttgaaatggcttgagagattgtcttacatcaactctgtggtttatccatggacctctattccactccttgtttactgttctctcccagctatctgtcttctcaccggaaaattcatcgtccctgaggtaaaacacaaccccaatctatgagttctccaaagtatgaatctttgttctatgttttgtctatcatctttgagttctctaaagtatcaatc

SEQ ID NO: 3326 - DNA, 579 bp, Arabidopsis thaliana columbia
ctcgctccggagtcaaaatcaaactaagtaaacactacgcattctctttacaattatcatatcttctttaatatttttaaggttttccaaaaaagaacactttttttttagtctaatgtttcttattaaaaaccaagagttaatagtactgatacaatgaaaaacagagctattgtatctcaaaacaaagcatatatgttcttaaatctcatacgagaaacatatggagggtatagagttttagtccatctatatggttgtaatgtacatgcttaagtgtaatgtacatgtttcttggattaatgatgctcataagtgtggaagagcctgaatcattcggaatgaccatggtgatattatgttctatgcgagagagatgtttctacctgcctcaaaccgcattgccgcagaattgcatgggatcttttggtactacaaagtctgagtgatttacatcaggataatattgaaatttggtcagattgtaatggtgctctagaagccataaatgattacctcaattggccaatgtattttcttacttatacatgattcatcgtttaactcaaaatttgggag

SEQ ID NO: 3327 - DNA, 367 bp, Arabidopsis thaliana
tagactagaggatcccctcattgactgatgctcttggttccgaagctgtatatatgcagaggagcagtggcatcaataatctgcatatcccgacttcgccaatgtctttctcttcgaatggcattaacctgcctggatcaatggttcttgatggatctccttcaatgcaacacttacctcagcagcagcagcggcaactactagaacagcaagcaggacaaggttcagttccaatgagggaaaacagttattcccatgtagataagaaactgagattagaagtgaagcaagaagacttgttgcagcagcagattttacagcagttgatccagcgccaggaccccacgggaagaaatccgcagatgca

SEQ ID NO: 3328 - DNA, 364 bp, Arabidopsis thaliana columbia
tgattttgtcttttaaatgacttttttttttagttttgcattacaagttttcaacgaaacagagtatgtcatgcagagaaaatatgcataggggttgtcttgaacagagacaacagaaatattaactataattcatatttataaactttttgatttattttgacgagtaagttggttaattattaccagggattagagcatgacgaggctctgtatagtgaccgttacaaacaactacggcatcataaatctcgtcggagatatcaccggaatttctagactcgactctccactttcaaggatttcccgccgccggctcagacctcacaacctccgtctcgcaccgaatcatctcgtccatctt

SEQ ID NO: 3329 - DNA, 891 bp, Arabidopsis thaliana
cgtgcgtagagtgtaggtaagaacgggtggtctagcaaggagaggatctcagcttctgtttccacgtgtgaaatcttcttcgccgtaagaacatcacgatcgattactttaagtgcgaatccggtaggttagggcaatcacggaggtgacagaggaaaacacggccgagatttcctgtaccgaggtgtcggacgagtttaaagtgacggagatggagtcttccgtcggaggagagagttgttgcggctctgattgacgtccagtgaggatcgtaacgacggtggtggagtgttgttgccgcggaggaagtggtggttgaaggtgttgttgcggttgagagtctgtcgttgaagcttaaggttaggcttgagcgtgcgagactcgatctagcgcttgatgaggtgaatgtacggtcggtggctgtggaggtgaagctgagatcgagatcagtgtcgaggtaataaccgtcgtcttccatttttccggtgaagcttttttcgttattgtgtgtaatgatcttgaaggtgacgatgagatatatatagaggaagattaactagttaaatgattgattactgtttttttaattatgaaatttttgagtaaattagggttgacttgtctgaaaagacaaatatgagatggtggtttgacctcccaatgggtcacttctttcatttaatttaaggactggaattatcattgtttttggggcaagcacatgggtttttttctccgtaaaaatgaaaaattcttataattttttgatgttttcccctcaatgatggactattggaaacggtaagagaaatgttgagtgttttgttaaatgtaagttcgaaagctttaaacaattacaaagtggtagcctcgtaggagtactaaaaaaga

SEQ ID NO: 3330 - DNA, 969 bp, Arabidopsis thaliana
ttcttacagaaacattaagattgactcgaaaccaaactccaattggtacactcaagaaatggattcaacaagccaagctagactcaaatgggttcagaagaattacatgatctacaattattgtactgaccataggaggtttccacagggagctcctaaggaatgcacaacaagctcatagaatctcaaattatattctatttatttatctacacttcctctctttcttttatgtgaaaattgtgaatgctctgtttatagcttgtctattatgtccgagaatttctttttctgtttttgattcttttcgttgtatatctttgtccaataaaggaaatgatgtgtctttactcttatagatatgtataaaaagatgtccctgttttatttgttaaaaaaaattgtttatgataatgatagttctttcttcttcttcttctttttttctcataaaaaaaaaatgatagtttcatttgctttatatatatacataattaatttacttacattgtaagaaatatgataaacgtgttgaatgcttctttttcaaatccaattattgaaaaaggtcaaaatatcaaattttatttattatagaatgtatcaaaaacttacaataaaaaactctctacctgagttttatctcaattttattaaccaatcgcatgctttcatagaatgagatattatgaaacgacgtcgtttagggtaagaacattacgtcacacgtttattttaatattattttatcatcgccctctttgtaatttcgacttctcttcttcgtcagatctgaatcttaatttcccccaaatcaaagcttttgacctaaatccgtttcccgggaaaaataaatcaacaaaccatcaccggaatcttcaatatctctccggtgaagaaaaaatgtcgcacaacgatacgattccgctttatcaatcatctcaatcagacattgacaagattgagaag

SEQ ID NO: 3331 - DNA, 574 bp, Arabidopsis thaliana
taaaagttttattttgtgactaatgaatcctatttgcaatgcattcctcaccatgaaataacgccgttagcgaagatatcaagacaggttaaagaagtcatcttcttcaatggagataagacatctactaacctggaaactagctttcagtagctgcaaagaacaaactcttcccaaattaacatattaacaaatatagcttacctctcaggactctgtccactcttttaactcacagcgagaagcatgaatatttgcctgtcgttcttcggcttctgtgtcattaacaacaccccggcatcttgggaaaccacagtaacatgcaaggcgctcatcaattgaaaagaacctgcaaatttatagataaagaatcaggtaataatggaatttcaaagtcacccgagaactaaagggcacgaagataaacctataatcataggtcagctcctcccattttgcgacatctctctttgcaaatatgataatatgctcatcaccattaacactgatgactcttgaatagcaatttggctgtacagaagcatatccataagtaatgtgatgatattgcaga

SEQ ID NO: 3332 - DNA, 571 bp, Arabidopsis thaliana
cgccagtgtgctctaaagcgggtaaacagcggttgatgcggataacgtccacgcgccaccagctcctgcacggtgatatcgcccggcgtggtagcattttgcgccaacagaccaatccggcgtgcaacctctttactggcgtaatgttgaatgtgctcgccatccagccagacatgcccatgagcaggcgtcatcaggcggcttaaggtacgcagtaacgtggatttaccgcagccatttggcccgataattgccgtgaagtgaccatcaggtatttctacagtcagattttccgcaacggtatatttgccatatcccagggttaactgttcgccgcgcaaacgggctactgattcggtcattttttgcgagactcctgaattaacaagacgataaggtaaataccgccgaggctgacggtaacgacgccaaccggaagttgatacggcataaacagttgttgggcgcagagatcggccgccagcagtaacagcgccccgcatagcgccgcctgggttagcccccagcgagcggtgccgcttaatgcgtcgggcaatgtgcggtgcgacta

SEQ ID NO: 3333 - DNA, 254 bp, Arabidopsis thaliana
tgccatacacacctaagatgcatgttcttggaagcaaatgggtcttccggactaaactccacgctgatggaaccttaaataagctcaaggctcggatagttgcaatatgtactcctcaagaagaagggattggctatctcgagacccacagtgcgggagtcagagcatcgacagtccaattggtgctccacgtgacgactgctttgtactgggagtttgcgcatatggcggctacacacgccttctgacatggc

SEQ ID NO: 3334 - DNA, 418 bp, Arabidopsis thaliana
caatgctgggttgatgtttctcctgtccctggcgcccttgtcattaacatcggagatcttctccaggttaaaaagaaaatattgttgcgcttctagcttcatttcatctatggagtgggtttaaccctctgttttattgtgtgcagcttataagcaatgacaaattcattagcgcggacgatagggtgatagcaaatggatcttctgaaccgcggatttcaatgccatgtttcgtcagcacgttcatgaagccgaatccacgaatatatggacccatcaaagaacttttgtcagaacaaaaccctgccaagtatagagacttaaccatcaccgagttttcaaacaccttcaggtcccaaacgatctagtcaccctgcgttacaccatttcaggatctgaagcaattatattggtggct

SEQ ID NO: 3335 - DNA, 455 bp, Arabidopsis thaliana
aaacaagttctgcacttgataatggagaaggagactgaccatttccaaagctcctctaatgactccacttaagacattgcagtagtaaagaccttggcaagtatcgggaagctcgacgaaatcaactaggggattgtcctctaagattatactgcagcaagtcccgtccgagtcccagcttgtcactgatgcagtgactcctaagaacatcttgaaacccacctgtgcaataaggcaaagccctgttactgctttctcaataccatgaaaccaaaggagtgatatctactagacattaagaagcttatgctctagtttgatatataaggttttatctatggtgtcaagtggaataagcattcatatatcttgcagtttaattcctcgttgtttttactcccggaggcacttcaaactgtaacgtcgtgatactacacaagtcactggaaattaca

SEQ ID NO: 3336 - DNA, 672 bp, Arabidopsis thaliana
tcaagcctcttgattaaaagacagtaatataacggacttgatggtaataagttggcatccatgttaagagaatgaatgttccccagttgtgacaaaagtggcaactgatgagagcccaaaccggtggtttcgacaatatcagcctccacgggatcgacttcactggctctttgctagcacagttgtctgcaattagctttctttcttcagggagcaatgttggatcttctaatggtgaactctctgcctataacaagtaacaacacacgtcaaatcgtcaatggtaatgagatatgggatctacaaatagttaagaacagtagaaaaagtctgaccttagttagccacagagtcaaccatacagttccaagagacccgaaagaataaaacacagaaggccatccaaattgatgaatcaagaaaggcgaaaaggctaaaccggtgacagatccaaggtacattccgctgtaaacaagcgcgagtgatctgcttctctcttgcacaggaacccacttcgacaatatattattcatagcaggcattgcaacaccctggagaacacaaatgagaacttacttctccttatcaacacacacaaatccgagactgatatctaacatcactaagagtaatcacaaacctctccaactcccatgaaagcacgaacaacga

SEQ ID NO: 3337 - DNA, 1124 bp, Arabidopsis thaliana columbia
gctttcctaattatcttgttcatgattttttaatgataggattgccttgtggatggtgatgttagctccctttggcatatcgcaaaagccatacatgaacttgaggtttaaacattttcgttattctttacatctcgtcatcacaactatcatctcattactaactcttcctatagttctcttttggagttatatcaaaaatgagggcaaagggcaaagcatcagttcgtgttgcagacattctaaaccgcatgcaagtggaggaacctgtcaattcgaatgatgtaaaatacctgcaatagtttgaatgtcataatcaccagttatttcgctatcttgtttttgtatccttttttcactattctaaatgatgtttgttctatttcaggtgggaaggcctgaagtggatacactcattctattggatagagaggtaagattacaatgtgtgtttcctgttatttgtaatccttaaatacaaagatatccttcaaggattgaatgttaaagagttggtgtgatgtaatcattgggaagtctgaattatgttttatatgacacaaacgatggatttggaaatgtgcatataaaggttaagagatatagaaagtggttaaaatcccacttaatctggaattgggactggctgataccttgttaggcggtggttaccttttacttgacatggcgctattagtttccaattttacgtttctgtttcaggttgacatggttactcctatgtgttcccagttaacttatgagggactaatagacgaggtaattgtcacaaattttggatactgcagttttgactagaagtagcttaagtagattttgcagtcactgcaactggtggactttttactctctgaggaagtgacactgacttcatgtatcatacttttactagtaattatgttgagtgttttcggtttctcttctcgtaagaaagtcttacacaagtgtgagatccagattagcttctgcgggctttttcattatcatgctgagttgatgtacttttctggaatttggggagggacataatggtgtgaactatttggttcattggatcaatgatacctacacacacaattttgacttagtatcgggctgatgag

SEQ ID NO: 3338 - DNA, 1540 bp, Arabidopsis thaliana
gtcaagtaagtctttcatttacaacaatcttaatttatttggcatccggtttagattatgatcggttttttcagttggttaaagaaggtataactaccgaactacactatcttcacatatgtacacattaagcataccagatgttacagaatatagatacataggtccggtctagtcgggctgggcaacggggtcctctgggacaccttactcgactaatccgattccaccatgaattgtccttaaatgggcataacaaggttcttcttgagtgaagacgtctaagcaggtccaacaaatgtgctttccacaccggcacttcatatggttacacccatcagtcttctctatcgtcgacttgcaaatcggacactcctttacgttcttcccttttgcccagtcctttagcgacaagtccggattctccttgaactttttgtacctttcacaagtgattaacgggtgatactcgaggtgacaccttgtgcatgtttctgagtgacatgctccacagatgaatggctcaccggattcttgaggtccagctacacggtagatggaagggcaatcaggtgtggagcaaaacctcaactttccatcactggatgttacaaaagcggacaaggatgcactgatgagttcatcgagcttctcttgtgataagagggctctcatatcagcgagtactattggagctccacagtctatgtgagaacaaagtattgggaatgcgtcaaagtttctcatcgatgcctcaaattgctccaacaaacaagctttgcagaagaggtgtgaacatccttcaagagagtagccatcatcaacttcagacaagcaaatggggcattcaacttcaatctcatctggtttttcacccagtgcactcttttctcgtgcaagttcattgaccatcttttgtacttcctgcctcatttctttgctcccatgaacctgaataacatggtaccgggtgttgagcttgagatccacaccatgcaccttttctttgataccttggagctccggaccaaaccgcttcacaacttccttcatgaggtcaggacggatctcaggacctcggaggtggatttcaagttgcttgctctcatgataatccataagtgcctgaatcagttcttgttctgccttggcaattttctcacttgttccacaaatgcgtactgtgagattgtgcctatctaatagaatgtaagtttctgtctcctgttggatcttccgcatcagattaataccatctctggacataagatgctgcaggactctacgtgtgaagcctggatggtttatgggtcttcctcttaagagttcttcaagttctctccgcatctccgcaacgggtcttgttgcataagcagtaattttaacacgataagccccgttatgagttggttccagacagcattcaccccctacaaaaatataaacaaacgttaatgcacatcaaaatttggacaagttcacaggaaaaataggacacctaagcttatgcatccttcaaatatgaagatatcaaatggga

SEQ ID NO: 3339 - DNA, 753 bp, Arabidopsis thaliana
agctccttgtctaaatgagccatgttatacacaatctcaatcccatgaatcctacaataatcaatcttgttcttcaccgatttcagcaggtaatgatcaccaatagggttgtcacaaggttttggaggcgaacctgttaaaagcaaaaccttagctttaccattgatgaaactggggaaatctgggttttgcgttaaccaaagtttccgtttttgatcccagttagtgatcttgggtccgagagtgtacgtcatgttgaggtcaagatccgaatcaggtggctcgtttgagtcggtaggatccgaatcggatcggatctcagctagaagtcggttagtctcttcgataatgttctggtttacgacgtcggcgtcggaagttccgaagttaatgccgatagtgccacgtaggacgaggatggtgacgaagccacaaaggattgtcattttcacgttgttgaacgtcttttggatctgtctaccacgtggtggtggtctccttactccaccactcgccatcgtcgtcggaagaacgccggcgggcgtgaggaagctgttgatacgcgcttctgagtcctgaaaccgtcctcctttcccatttttgttgtaacttggataaaacagtttgatcaaagagccattgttgttgttgtaatgttgttgttgttgttgttacttgttttgtctgtgagataaagagagaggaacggacaatgacaactttacagagatcaagttcgacattaattgattt

SEQ ID NO: 3340 - DNA, 612 bp, Arabidopsis thaliana columbia
gaacggagagaagaagatttgaaaataaccaacctcgcagtaagagtaaagcagtgatgatcagaaaacatcgccggagataataacatcggcggtgacgacgccttcacggtgagaagaatatgaagaagaaagaagttgcaaaaagatttggggacactgaacagtttagttaggccggtgggttcgattcgaatatcgaattgggcttttaattaagggtaggcccatcaaatgtttttttgactcttaagttaaggccattaatggcgatgtctctgtatgttaggaagtagttttctttcaacttagtaaactctctgtagacatttacgcgtaatcagtgatgtagcgagtcaagtcccaagtctttcatttacaacaatctttagtttatttggcatccggattagaatatgatcggttcagtcaattggttaaagaaggtactataccgaactacactatgttcacatatatgtacacattaagcaaaccagatgttacaggatatagatacatgggtccagtccggtttcaaagcctgtgaacaggctgggcaacagggtgctctgggacacctaactcgactaatccgattccaccatgggg

SEQ ID NO: 3341 - DNA, 889 bp, Arabidopsis thaliana
actggggaaatctgggttttgcgttaaccatcagatactcttctagtacctcacaaaaataaaatgaaattggaattgaacacgccctaaattcaagtactatacggtctatacccatttgagtatatgaataatgcatattgtgagtgaaagagatagatacgatacactcttttctttgtttttcaattggacaaaaggaaacagattttgatctctgaattgaacggtcaagatcgtatataattatttcaggagattaagatcccacgtgcttaaaaactctctgtcagactctttatgtataaaatcctcggcccactcttgttttgatagtacactcaatagaaagacacaaagaaagaaagaaaggacaaacagaaataacaaaaccttccatttcaagaaagcatcatctttgtgtgtccgaaaaatggaagatctcgaccatgagtacaagaattactgggaaaccacaatgttcttccagaatcaagaactcgaatttgacaggtgcttactagaatcttggtccattttttttttttttgtttctttagtttttttttccgataaagattaatcttgctttagttggtaattaatgaaaattgttataaattataaaatttaagttggccgatggaggaagcgttttcgggttccggcgagtcgagttcgccagacggagcggcaacgtcgccggcttcttcgaagaacgttgtctccgagagaaacagacggcaaaagcttaatcagagactttttgctctccggtcagttgttcccaatataagcaaggtatgattaattattccattacttctcttatttgtttaatcaactgtctcttttaaatttaatttgttatccaaataatttagtaata

SEQ ID NO: 3342 - DNA, 1258 bp, Arabidopsis thaliana columbia
agtaaactctcacctactccatagcatttcctgctctactggtctgaacattcccgtggcgacttttggctcacttttgtcttcctttgatgcagcgtttgttgttgttggtggtgttagtggtattgttttctggaggaactcagctgtgagtcttcccatctgcttctgcagatcagccactgagtcgtttgagactttgccttttgaagtcttcttcccgtcaacaagcttgagctcgagcctgtacaaggcacaagcatcacacttgttgatctcatattcgtaaagatgccattcgaaatggtgcagaggctgtggatccatgtagtaagatctcttcagccctccaaactcgaccatgatctgtttacgtgactcgtgccaaccacgaccattgtagtctggtaaagatctttgctttctgttcccgctctcaaaggccctccttggcttgtcaaagaatagccactcccttagtgtctcactctccagaaccgtgagatcaaagagctctacagtcatcaagatttgagtatgatcagctcaagaatggtgatcaattaacatacttgtgaatgaattccaagagagtaaagcctacctggagcattccatggagatttagcagttgcagctccttcacattcgggaataccaacatctttccctccagcctttgcactaagagcagcaaaaagcagaccgtcttttaggccgatacctccaggacgcaccaccggattcatacctggtggcccttcattgaaagccagtgcagcgtggaagctgctgcagtaatcctggaaccaatcaaatccctgagctggcctagggcaatcccaaagagcacattttggacccaagaatgcagagggtggaggacaaatagtcgggataaaattagagatatgtataggaccctctactacaccataactgggacaattgttgaaaccaccattgaagtttggttcaaactcttgttgcagatcatactgctgatgatactccaaaggagccgttccatcgaaattgttaccagctgctaaggacaaatctttgcaattatcaaccaatggtaatccatgttctgacttcccctgaaccaaattgtatccctgaaaactttcaccacgatctcagtatttaaacaggataatggactccaaacacaactaaagcaccattaaaaactggttctaaagagcaactcaccctgtggaagacagcagctttgccagcttcgagattctga

SEQ ID NO: 3343 - DNA, 795 bp, Arabidopsis thaliana
tttgtttggtagattataaagagtattgatatttataaaacatgacatttatgcagattaaagagctgaaacaaaacttaacgtggaaggggttaaaggtatagaagagaacggcgctttaaaagcagtggaagcaaatcaatcggtgatggctaataatgaagtcttagagctaagccaccgttctccatcgccaccaccgcatattcctacggacgctccgacatcggagctcgcattcgaaatgtttagcatttttccacgcacggaaaacttcagagacgatcctgccgatagcagcgactcaagcgcggttttgaacgaagagtatagtcccaatacggttgaagcagctggcgcagtggcggccacgactgtagaaatgtcgacgatgggttgttttagccaattcgtgaaaatggaagagcatgaagatctgtttagtggagaggaagcttgcaagttgtttgcggacaatgagcaatggtattgctccgatcagtggaattcgtaaaatgtgggggcagaattaaaagcatagaaaagctgaagggggtatgtggaaatattactgaagtcatattgggtcggaaaatgcattactcaaaatattggggtttttctgacgaaaatggaatatgacgcgagagggtagtaaaaacgagcgtgtggtgttccatgcacgtgtggccgtaatcttttcaaggttgaatgagagaggacaaaaaagtctgaaatcatcgggaataaaaaaaatatgtgacgaagaaatcgttttttcgtcgtttataatat

SEQ ID NO: 3344 - DNA, 1324 bp, Arabidopsis thaliana
tgctcacagtccattcactcctcttcctttaacaactagacccgcttgcttctctccatctccatcatcttcttcctccgaaatcgaaaccctaacgcaccacactttcttctctaattctacttccaccgccacagaagaggacgaagtgatttacaacaagcttaagagcagtgagatttttgatcaagagcaaggtttgattatgatgaggaagatgactcgtactaatgatgaagctagggtttcgctttgttctcctcggattctttctttgttgaagaatatgattgtttcgagatacagtttagtgcagacgaacgcgttacgtcgcttgtgaatctgtctttggataagaagaacaaattgacgattgttcggttaggatttgttccgattttgatcgatgttctgaagtcggggtctagagaagctcaagaacacgcagctggaacaatctttagtctttctcttgaagatgataataaaatgcctattggagttttaggagcgcttcagccattgcttcacgcgttacgtgcagctgagagtgatcggacgcggcatgattcggtctcgcgctttaccatttgacgttgaatcagacgaatcgatcaaagctcgttaggcttggagcggtaccagcgcttttctcgatggttaggtccggtgaatcggcgagcagggcattgttggtgatctgtaatttagcgtgttgtagtgaaggaagatcggcgatgcttgatgcgaatgcggttgcgattcttgtagggaagttaagggaggagtggacggaggagccgacagaggcccggtcatcttcatcggctcgtgagaattgcgtagcggcgttgttcgcattgagccacgagagtcttcgattcaaaggactagcgaaggaggcgagagcagtggaagtgttgaaggaagtggaagagagaggaacagagagagctagagagaaagcaaagaagattcttcagctgatgagagaaagagtgccggaggatgatgaagaagatggcgaaggatcaattgattgggaccgagttatcgactccaacggctcaattaggtctagattccgagttggtggtagaaacagagtggtcactcaaaactcctctggcttctaaagttccattccatttgttgttgtatagtagacattcaaaatgttttgtgattgaaattttttggtaacttgacttgaaatatgtgagaaaaaaagcatgactgatgtatatatattttgtacaatatataaaagatccatttgaaacaaacgcatactagatataaatgtaacgcagatacacaatag

SEQ ID NO: 3345 - DNA, 572 bp, Arabidopsis thaliana
catgtactgttcttttgcatgccatagcttcacccataacattgagtgctaatggtaggccacgacatttcctagcgacttttctagcaagtccgggaatgtctgggtgacttcccagtgaatctttcccaaccttcatgtgaaacaaatcccatgattcttcgggttgtagacagctaacttccatcggatcatcaacccccatgcgcccacacacatctcgagaacgagtagtgaatgctaccttgcatccgttatctttgcttggatacgggactccaaccgcttttaaattcactttctcccatatgtcatccaacaataaaacaaactttcgtctcctaaggacattgtggatgtcaacggctatctggttatcgtttttctcgctccactccattcccccaaggcctaccttttctgctatgtctctttgtatcttacggactgttgaacttctagacacaacaacccatatcacaacatcaaatctgtcatctattttagaaaacttattgttgatcttcgtgagtagtgtcgttttgcctactcccccataccgtacagaccaa

SEQ ID NO: 3346 - DNA, 862 bp, Arabidopsis thaliana
gagtaactttacctgttcaacagactctggattgttgggagtgtcgaagataattggacgacaacgcatatcttcattcatcaagcttgagttctgaaaatgggctataagggcagattttccttgtatccgagcatatgccaatgaagctactttctcactgttgaacttctcccacttcttcccattaaaagcctgcaaatattggatgtttgttagttcacctttcgagtgatcttagctaaaagtataagaaagaaagcggagagggaaggaaacctcataaaatggaatgatgagttctggattgagcatgttgatgaatgcatagcccacattgcatttgttctgcaaaaccaaagatttattaaccgctcgttgtatcagttagtgattttggaactttgaatctctaatcaatttttaccttgaaatcaatgggcaaatagagaaagttgtaagttccttggttcttttcatcgattgcagctaacaacatcttcgaggtgtatctgttgatataaaagaaactcattcagtaatctggctgcatcatattccaagtatatttcaagagaagtaaagataaagaaaggaaaagcttacttgtttggaatgtttttaatcatcaaggtagtccgagaatcctctccattaagaattttctccaaatcaagttgaaactgtttcctgctctcaacctggttcgaattgttctcaactctacgaggcctaccattttcatacaaactgtcaaagccagagcgaaccgccctgggtttagaccgctgcttaagaacatggggctgaatctcggtgaagacatcattctgtaacttgaaaaaccgttttcggccatgct

SEQ ID NO: 3347 - DNA, 1576 bp, Arabidopsis thaliana
ctaaaccgagagcgatctcatttagctccgtttgactcagtttagcttctgaaccaaaagctacgtagacaatggacttacttttccgtgagtccaaccattttttaacagacagccacgtgtcggtatcttcaaacttttcgtccggttttggaggcaaaactccgaccggtataaccggtttccggtgaagttcttgtgtaagtcctaaccactccgcttcatactcgtaacagctccgtacgaagatgacgtcacagccgtcaattacgccgccgacacggtggatgtcgggaacattcccttcggtggtttccgccataaatcctttgaaaatgaacctgcattcaaataacttgaaagctaccgaagtttcaaacggaacccacttaggcggcttcataaaatccgccggcgaagtacggtactcttcgaaccccggcggtttaagaataccgagcgtcgcgccgttgaaagcgctaaagaatccggttttgattccgagacgacgagagattggaggaagccaaaaccccgcgaaatcttgaagaacccaatcgggtttcgaagattcaagaaactccgtcaccggaacttttaacccgtcgtaagcgatttttaagtaaggtatgagttcgaaagggacgtctgtggtagcttcaccgtcttccgggagtttgttgtcgccgacgggaagtgatagcttgacgaagttaatgacggaggagagattttccggtaaccgtgggaggagacggtcgatgttacgtggagtggaaatgaaagagactttgtgacccttttgagctatgagtttagagagctccaagtatggaaccatgtgaccaaaggctaaccatggaaacattaccacgtggagtttggttccatctccatcgttgtctttgaagtttgtcattttcactttgatgatatcgagttatcgactcttgactatcttcatttataggcaagcatatagatatatatacgaacgggtcagagtgggttacgttcgataaaataaaggtattaaaacattacagcattacaagtatagtgttattttatttgattgtgaaaacagatgttgtaggtacgattaacagctgagattaagtttaggtcggtaagatgtgtggtagtattaccgtacatatggacacccaatagtatcagattactataagtgatctgtttccataatcaccacatatagttagactacttttgagatctgattctttccacaaaaagttcatgcatacgaatttttaaattcgaatatctattttgctaggacaaagaggttgcgttattatagtagtatcgtgcatagtcattgatagtttagcatttcattggaagacgtatcattgttttcttcggtaggcgtaaaattttattcaaacaaaatgatcaaggttttcctacaacgaccccatataagattttgatttcgcttttgctttaaatttttgatttggttggcctatcaattcaacatgtttctaccgatatgttgatacaggaatcaaacaagtacaaagaatgggatctctggagaagtaagaag

SEQ ID NO: 3348 - DNA, 692 bp, Arabidopsis thaliana columbia
ctattagttcctaatgattgtacaaacatttgattttggcttaagcattggaccttgtacgtaaggagagaggcaaccaaaaggcaaagccgacatccaccacatagtcactccaaccccaataacttactcttttaaacaagataaaactacttgataacaaaagtcacaagatgttaacaaaaaagcaaatttagtagccattttagactattagttcctaatgattgtacaaacatttgattttggcttaagctaagcattgaaccttgtacgtatggagagaggcgaccaaaaggcaaagccgacctccaacacgtactttgcctttatataaagatttaacacacttttaaagtcttgacatcattcattcacacaaacacttcaaacaatgacttgccttcttcttcttctcctcctcctcctcttctcctctgccgactctctgacgtcaccatccgacgtgtcagctttaaaagctttcaaagccaccgtgaaacccaactcaatcccaccgtggtcttgtctcgctagctgggactttactgctccgacccatgtgcttcaccacgtcgaacacatttcacttgcggcatcacttgctcgtctgactccacacgtgtgacccaactcactctcgacccagccgggtacacgggtcgtctcacgcctctcatctccggcggcgg

SEQ ID NO: 3349 - DNA, 740 bp, Arabidopsis thaliana
tgttgtagctgtcatcccagtacaatgtacatatcctataaagttgctggacactaaggatctgcaaaattgaacacaacattcagattctgatacaaattcttatgcagaatatccgtctattgtcgaatgaaaagagtcaggccgatggagggactcacagggcataaatcatgggcgatgtcatcgtacgagattctgtactttttatggatgacctgttggtaaatgccaaatcaagagacaatcataagaacgcacaaacctcttaccaccagatataagaaataaggaaaatagaatagtggattttttcttataatcagacaagagtaaaagaacataccatgaatccaactgcttgcctgatgtgtttcagttcatcccaggaagagccagcatactgcaattaaagaggacaggtataatgagccaaattgtgctgcgcataaattaatcaattcaaaaatgtagaaagggagattcactaagggaatacttcttctgttgtttcgttgcaccattcctctaacaatgataaaccagattttacaaattctccgttgctaaatgtacaacattctagtcgcaaacacaaggttacataaaaaatgaactacgcttatattcaatgcctacatagacatggatagctgctgatagaccataactaaagtgtcaagtctctacataattggacattgatcgaacgagaatgtccgcataaatatactttggat

SEQ ID NO: 3350 - DNA, 1749 bp, Arabidopsis thaliana
aaacactctaaacggtgtcggattaccggcaaaacagcagctcccaagcttctcaaagctgaattcgacgaagtaaatcgactgccatgaaacccaccaagacgtcgcacggagggagaacagcgagcgagcaataaaggatggaggtgtctggcgccggtaaagtggcggttaagtgctttagaaatagtgaggagaggtaatgaaggaccaccactacttcgagccatcgctgttgccttgacggttgagaaagctgagagtgtagactccatgaaagtgggtggctccgtaatctcaatctctcgagtcccgttatctttcttttttccaggcctcctgcgtttgtttaagtgttctctaaacgaatagtgtccacgtgtggaaatggcattcagagttttccaattttcttcatacaacttttggtttgtcaaaaggtttatgctttgtggtatttgagtcaaaaatttacaccttaatgggaggacttttctgtgattgaatcaaatatcgaatttttgttgcaagcgtgacgtagagatttacgggtttataaagtcagccacttatttcagacaaaatcataacccaacacacaaaaacaacaatatcttacttttaacagtacacaagctcatttaacttggcaacttaataagtagagatcagcctctatacacacacatcctagctcggataagtattttcttgttctctagactccaatagatgacggaagattcccggaaccaagccttctctttcgcagacgctctgcaatgatgaatgcaagctccagagactgagatgcgttgagtcttgggtcacagtgagtgtggtagcgtgacgttagatcgttgtaagtgatggtgcgtgaccctccgacacattctgtcacgttttgaccagtcatttctaaatgaaccccgccaggaaactcccttcttgatcatggacgtcgaagaacgctctcaattccgcctgatacaccatataatttaatgggtaactacatgaatcataagcaagattatgcatagagttggatgaagaagtaagttcgaatgattaccctgattgcatcgaaagaacgagtttttagcccaccaggagccatgattgtgtttccgtgcattggatcactaacccaagtcacaatctgaccggctccacggactgctctgatcaaattaggaagcttgacccgcatattctcagctcccattctcactataaccgtaatccttccaggcttgttctgagggtttagtatctctatcagcttaaccagttcactagggaccattttatcactcacctgcatcaaagtacatcaatcaacatctgtcattttctcatacaaaaatctgttgtagcctctttgtaatggttttccaatatctttaataccaggcaattgagacctgcagggtatcctatagagttaacaacagttcttgagtctacatctcagtgtttttttctatacgaacaaagctatgaaacttactcctattccaattaaccaaaccaagagacttgatgatcacataccttgattccgagggggttagcgattcccctcagaaactcaacatgagcaccatcaagttggcgagttcgttctccaacccaaagcatgtgcgcagagcaatcatagtaaagtccagatgttgaatcctctcttgtgagtgcttgctcataaggcaataacaaacactcatgggatgtcaaaactcagtagta

SEQ ID NO: 3351 - DNA, 403 bp, Arabidopsis thaliana
acacccggagattttcggatacaaatcagggttttagggtttttgttggaatggaagaggattatcaacagccgaggtttacgattggtaggcaatcatcaatggcgccggagaagattccggagccgtcggttcactcagaagaagaggtgtttgaggatggagaagagatcgatggtggtgtgagactaatgtatttggctaatgaaggtgacattgaagggattaaggagcttattgattcagggattgatgctaattacagagacattgatgatcggactgccttacacgtggcggcttgtcaaggattgaaagatgttgttgagcttcttcttgatcgcaaagctgaggttgatcctaaagatcgttggggaagcactgtaagaagaaactagaccaa

SEQ ID NO: 3352 - DNA, 792 bp, Arabidopsis thaliana columbia
caggaaacttggataaccgtcgggcatccaatcctgtaatgtatttttgagctgcttgaacattttctgcgcctgagaccaatcaaagaaattagtaatatgtgaccctgttgctataaaaacaactgcaccgaaactttgccaacatattgtgggcataaaaaactgagagaagttcgacagattcaataccttttgttaattggaacacgtgcaaagccatctttctgcagcaagtctcactggtgtgttcccatccttcaaacattcagctagaggaggtccgataacacttatatttgccatggttgctgatggattatcctgtaaaataacgtcttgcattactactgcacgtatcattgacgaatcaatccacacgaatgactacttctctagcttacacttacttttgcaaaagctttaagtgaagagagtgctcttcttcgaacctcactcgaatcatcatgcaaagctgagacaatcgatgaaaggacatggataaccacttttgtgttggaaggatccgtcgcaagttgttttagcaaaagccttcccaaggcctttgtcgagctttcacgtaatggaaactattaaaaggaagatgtcagaaaaccattatagagaataagaggtaaacaatatttcttacgaaggtaccttctcatccttcaaagagctcttaagagaatttaacatagaggaaaagagcgatgacgtcataatggtggaaggattgtgtttcacaaggatgaaatgcagagaactgagccatgcctacaccccaatttt

SEQ ID NO: 3353 - DNA, 1013 bp, Arabidopsis thaliana
agtcccaaagcagctgggctttctcagtagacacaacttccttcttcactgcacaccacacacaacatcacatttctttagtaaaaaccctattctcaaacccttgatcattcaatacggaagatgaaagaaactaaaacccaatactaacaaacatatgcattgatgataactgaaatcaatttcaactttttgacactgacattcataaaaatcgcatctttagaaagtactaatatcggtccaaattggagaaaattgagtaaaatcgtcaccagaagaagcagagacagagagggaagcgaaaggaggagatctagaagacattctgaagagagaaacaccagcgaatgttgcgcagccgacaccagcagcgaccaatggggtacgagtggagcgaagtgcggtggagaggtcgagtgttggagtatttatggatctgaaaaccgaccaagtcatctcactctctccggcgccgacaagaagtatagaatagcgaatggaccacgagagagagagagaaaggtaggtgaagaagaagaagaagactgagtcgatgcgattggattttaagcagatgattctcgtgcttcttcttttgtcttcttccttctcttcgaaatgtttttttgtatttcccactttacccttagttaggtacatatattactgagaatttaatttttatttttgtgtagtttagttggattgcaaattttaaaaatttggacccgttgggtcatgtcggtccatagctttgtgaagtttatccacaacatattgttatgtagaagttgtgttatgtgaaagatggtctctacaaatggggcaagtttcttgtctaagcaaccactcatctatgcaattcatatgaaatgtgtggccacatcttgctagctttcttcctacttccccttcttcccaatcctacacaccccaaaaatgaacattagaaatatatatgatttaagtcattattatcatatattaaaatctgattcctagatgattct

SEQ ID NO: 3354 - DNA, 866 bp, Arabidopsis thaliana
tcactatcgaatatgtttttcgttatttggattatttttttaataataaaagccacatttgtttattcgccctaagctatatttagccttagcacgacactgaaaatagaaagagaccagagtcgttagattttacgagtgacttctaacttacgagattaaccgcagactggttcaaaagaccatcctcactttcctaagatccaagtaatcaaaattcactttcactcaaatcacctctctatttaaacaacaacaccactttttcaatcctcattaacaaagttaaaaaaacaaaacaacaccatcttcactttttttttttcttcttattttttgttttctttctctatacatattgtatcaaaaaataaatacattttcctgtattttattttttttgtgagtattaaagaaaacacaagacaagaatgacatacacagcggtaactatgctctctctctgcctaataaatatcttttcatcttatggcaaagagtgtcgagttttggcccgacttgtaatgtagtttcatcaatgagactcttaacattatatcatatcattgcctcactttattacattttttgtaacgttacgcgctgttagttctcttaattcattatattaagcatgccaaaataccttgatcagaatgacgaggagaacaaaggaagatcaacggacaataacaatcaccgtcaaatggattacaacgattggttaccagtcacagcgtctagagaagccaaatggtattactccgccttccacaatgtcacggccatggttggcgccggagttcttggtctcctttcgccatgtcacaacttggctggtaattttttaagaaatgtttaaattt

SEQ ID NO: 3355 - DNA, 517 bp, Arabidopsis thaliana
tgcatgtgtagagagattgttggctgtttcaattttccttatggagctgactcatttttacaaagtgactttcatgtttgattcaattcattacctttttgcttgagttaatgtgtttctcagtgttgttcatgttgattctcagttttgggtttggttaatggtgattagcttcattcttcagtgtatgatctcatattcagataagtcaaacttgaaaaaatggaagggactgtgttcacgccttgtttggaaggaatgaagcatgtcaaatctgatcaaggcgagatgcttactaagccatttttagagctttgcaagaccatcttgcctgttataggtaataaagggagaagctttttctaattgtttctttgtctgtcttaatactgttaatgaggttattgacatttgttattgtgattgttccttgttcttcgaaacttcgaagttcacgtatagcttgtgattgttcatttttcctatgtaacacaaatgttgtggttctacatgatga

SEQ ID NO: 3356 - DNA, 668 bp, Arabidopsis thaliana columbia
ggtagactcgacaggagaggatcccctacttaatttcttgatgtgttgtcacaggttctgaatgatcaaattttcgctataatggttctaatggcgatattcaccacattcatgacgactcctctagttctggcagtgtacaaaccgggtaaatccttaaccaaagctgattataagaaccgaacggtggaggagacgaaccgttcaaacaaaccgctctgcctcatgttctgtttccagagcataatgaacatccccacgatcgtcaacctcatagaagcatcccgaggcataaaccgtaaagaaaatctatcagtctacgcgatgcatcttatggagctttcagagagatcatcggctatactcatggcacacaaggtcaggagaaacggtcttcccttctggaacaaagacaaatctgagaacaatagttcttcttccgacatggttgtggtcgcattcgaggctttccgaagactcagccgtgtctcagtgcgtcccatgacagcgatctcaccgatggcgactatacatgaggatatttgccaaagcgcggaacgaaaaaaaccgctatggtgattcttccgtttcataagcacgttaggctggacagaacatgggagacgactaggaatgactaccgttggattagcaagaaggttatggag

SEQ ID NO: 3357 - DNA, 611 bp, Arabidopsis thaliana
ctaaagccttaagctttaggaattttttattatttactttggggcctggagacaggaaaaattatgctgacattcattgagctccttattggggttgtggttattgtgggtgtagctcgctacatcattaaagggtattccgccactggtgtgttatttgtcggtggcctgttattgctgattatcagtgccattatggggcacaaagtgttaccgtccagccaggcttcaacaggctacagcgccacggatatcgttgaatacgttaaaatattactaatgagccgcggcggcgacctcggcatgatgattatgatgctgtgtggatttgccgcttacatgacccatatcggcgcgaatgatatggtggtcaagctggcgtcaaaaccattgcagtatattaactccccttacctgctgatgattgccgcctattttgtcgcctgtctgatgtctctggccgtctcttccgcaaccggtctgggtgttttgctgatggcaaccctatttccggtgatggtaaacgttggtatcagtcgtggcgcacgtgctgccatttgtgcctcccggcggcgattattctcgcacgacttcaggggatgtggtgctgg

SEQ ID NO: 3358 - DNA, 1192 bp, Arabidopsis thaliana
tgattacactgttgatgttttgctccatcacttcttggttccaccaaggttcagttttagatgagtcttggctctcgagtctgagactgttggtttggtgtattcagggtcattcagttactaggaagctcaactcaagtggtggtgtagagtcgacacagactcttcacaacctcgatgaaggtcctgcagaatctacacagccttatcataacttaaagttctttgaaagaaaactggcaggattctaaaagatcgtttctttaatttttttgttttagatgaattaagtggctttgaagaagcatggaaaggcaattcatctcttggcaagcatgaattcactggttagtaaactcttcatctcaaaactaatctttgatctcaagagtttcagtccattatactgtattgtttttgttactgtacaatgttacaggctctgataatagttttggagggtgggtacttccatctcttgaccaaattcgtcgccaaacagaccaaagtcagactggttcgagccgatctgcaactggagctaagaaggttgttcgaatcaacattgaatgaatcatcagaaaaccatatatcaatctatgtgcgtgtaaatcaaataattttgtagttgttttgaagttgtagtaattggcaatattttacattcgtgtaaaaacacaacatacatacagtattagacttttgattatgggaaaagtaaaattattcaagctttgttaacgtatttatacatctctacaatgaagtggtggaaaaagggtaaaagaggaaatccaaatttagcgtctgaacaaatgctcctctcccgacagatgatccacgtgtctaatccaacggctacgaagattcctcgagtccccacgaccagtagctcccacgtgtacaatatccaacccactaccaaccggtaaaaacacggatctcaccacacgtgttcctcttttcaacacatcgtgccatttaaaaccagagattgctctatgcatggcgtttttacacaccaaaacggcacccttgttgctcagttcgcaaacctcagcgttctgacgaactctcgccgcttcgagtccaccaccaagaaatccacaccgggaaactcctccatcgtgttctcaacagattctccgaccaccacaacctccgtcgtaacaaatcctctcatggccaacac

SEQ ID NO: 3359 - DNA, 817 bp, Arabidopsis thaliana columbia
gaactgtagacgattacgcagaagaattttatcttcttgttacaagtaatgacatctatgacagtgaggtacaattggtctcacacttcataggagtactgcaaactcaactccaaaacgcgttatcactattcgatccttccactgtggcggaggctcacagacgcgcatcttcttttgagcaacagttttgctctcaaacaaactctatctttccacgttcacgaccatctgagactaaatcaaattcagctggttttggtcatcgtaaagatacagaacaaagtagccttaacaccactcgtgtcactgcaaaagaagaagatccacagccccaaatacgacgatcgacccgcccgaatgccttacgttgctatgcttgtggggaacttggtcacagacaaacagcgtgtccaaaccaaacagcgtgtccaaaccaaacagaggaagcgtttattgaaacgcataacaccaagggtgatgaaggtcatatgttggtagcacgatttttcggtctcactccacagcatcgtgaaaaacattgcgttcgcactaacatttttcgttctacttgcacaatcaaaggccgagtctgcacttttgttattgattcgggaagttgccgtaatgtaattgccgaggaagctgtgcgaaagctgggcttaccatttgaagaacatccaacaccatatgcaatgacttggttgcaggatggcgtttcgttccgcgtttcacgtcgagtcctagtttctttctccatagggcaattctacaaggaccgcacttatttcgatgttacaccctatgaatgtcactc

SEQ ID NO: 3360 - DNA, 610 bp, Arabidopsis thaliana
ggtttgtggatcacctaaagaaggatttggagttaggtgtgggtaatggactgacagttatttcggataagcagaaggggttgctcaatgcagttgctgacttgcttccagaggctgaacataggcattgtgctaggcacatctattccaatgggaagaaggtttacggggactactgtcatgagagttacttctgggccattgcctacagctcaacagatggtacttacacatacaacatgagagctttgaaaagttatgatccgcttgcttatgaggatttgcttaaaacagagccaaagacgtggtgtagagcctttttcagtgggcattcttgctgtgaggatgtttgcaataacttatcagagagtttcaacagggccataacggattaagggatgctaggaagaagcctgtgattagtatgcttgaagatgtaaggcgacaagcaatgaagcgtatttctaaaagacgtgaccagactgctaaatgtaagtcaaagttcccacctcacataatgggagtacttaaagcaaatcgcaaatcagctaagttatgtactgttctcaaaaatagtgagcatgtatatgaggtgatggaaggtaatgga

SEQ ID NO: 3361 - DNA, 1083 bp, Arabidopsis thaliana
taacccgttcatcatcgctagattcactaccctctgtgttcctcgccattgattacgaagagaatatctcaatttcaaaactggagatagatgtctgaggattaattaccctaagtgttgttgtagctaggaatgttgaccagagaggatatttatatttgtggagttaagagaatgatattaaggaatgcatgcattttactcgccataagttaaaaatggtaaaaaaaattaaacaaccaatcaatattaatgttgtacatccaatcgagccacatttctgccgtgtgtcacacttacagacattagtacttttacagcaagaaacttaattcaagtaacctagcggagagtaatcaaccatccccaaaaaaactctatacaaaatgagtatacataagatataagtctatacacaaaatcaaacatagccgaattcatatgcatttataatttaatggaattcaatgtttaagaaagtgaaatttgatttattaaacaaaaatacatgtgcgtaaatcttaaaacgttgtccataaatgtacaagtcttcaaatttatgtgcccgtttacagctataaatgttcatttcttggacttcctgctgttacttatatatatggtcaccaatcaacctcttttactatatatataaatggggctctcaggttgacaaacaaacaaaatttggagatctcatcgaacagtgtcaagaaaagggtaaatctcatatctaaagttacaactcccactcaaaactctccctccttctttaccatcacaacatttaggaagctcccctataatcttatccaaacacgtcttacaaaccgtaaaccataaatcccgtctacactgcaccattccgtaaagcttcatcttcccgagtttcatctcccctgtctcgtacaacaataacttatctgatctgcgagtagcctttgcggtcagctcagtgagtagagcctttgtcttcacattgaacaacgctggatcgcttactttctttgtgctgtacatatagaacttgttcttgtcatcgatcttctcgaagaaagcggttggagaaatcttgagaagaca

SEQ ID NO: 3362 - DNA, 473 bp, Arabidopsis thaliana
taataggatctatcctatagcttgggctgtagttagggtggtggacaatgagtcatgtgcttggtttgtggagcacctgaagaatgatttgggtttaggtgtaggtaatttgatagtgatttcggataagcagaagggcttgctcaatctagtcgttgacttgcttcctcaagctgaacatatgcattgtgccagatacatctatgccaattggaagaaggtctacggggactactgtcatgagagttacttcagggccattgcatacagttcaacaaagggttcttacaattacaacatggaagctttgaaaagttatgatgcatttgcatatgaaaatttgcttaaaacagagccaaaaacatggtgtagagcttttttcagtgggcatgctagttgtgaggatgtttgcaacaacttgtcagagagtttcaacagaacaataagggatgatcggaagaagccggtgatgt

SEQ ID NO: 3363 - DNA, 1694 bp, Arabidopsis thaliana
aaaacgaagtccatactaacatcggtccatggctgcgtgggaatagggagaggaagatagaggcccgcattggagggtttttcctttggcaagttggcagatccgggaacgttccacaaaacgttcgacgtcacggcgcagtgaaggccaaaaataagatgttgtgacgagctgcaatgtcctgtcacgccctacgtggccttcattatgtaattcacaaataatctgaagtcggaggctgcaatctggaacacaaagccgcaaacctttgaagaggaatccgttttatagtgtatattcatcgtttaactcattctcgacgtcgcttaatatccgagagaagaaggtgtctgtagagtataagtccgagaagaaccaagattggcgctgtcgttaacttgtgcttgataagtgtaaacgcttcatccgcttctttcgtccatgtgaccttgccatccttaatgcaactcgtgattggtgctacaatgctgctgaagtgatgaacaaaccggcaatagaaagaggctaattcgtggaagctgcgtacctcggttactgtttgtgaaccggccaagagcgaactgcttcaatatttgtttcatcgactgataatcccttatccgatatgacatagcccaaaaaaagaacctgtgagacaccaaactcgtatttatggcgagctgcaaacaacttctccttccgtaaattgctagaacagcttggatgtggttctcgtgttcctcatgtgacgagctgaagatgagaatatcatcaaaatacacaaccacgaatttcccgatgaaagtacttgattcatgacgcgcatgaacgtacttggggcgttggtgaggccaaagggcatgacaagccattcaaaaaatccttctcgtgtatagaaggcggttatacactcatctcccggtcgaatccgaatataatggttcccgcttttaagatcaatctttgaaaagagagatgccttgccgatttgatccaataggtcatcaagtcgtggtatggggaagcgatagcaaccgtaattatgttgatagctcgactatctacacacatacgccacgttccgtctttctttggaatgagaagggcaggtacaacgcaaggactgaggctttctttaatgtgaccttttgctagaagttcttcaacttgtcggcgcaactcgtcatgttcttgcggactcatgcaatagtgtggtcggtttggtagcgttgcaccgggcacaagatctatgtgatgttgaatatcttgagtggtggtagctcctggtaactcttgcggaaacacgtctgcaaattcttgaattacgttatcgaatatggtgtgagctacggtggatgtagtcgctgtaattgatggtaacactgctaatgcaaatccttcactttgcagctctttctcaaacacaaaaatgaacacaacatgggagtgtgtacatggcctgtcgaagttacatggggcatgagagttggcttgcgtgccggtggaggtgacggattgggagaaagcggtgtgtctggagatggaagcagcacaatcttatgagtttcccagataaattcatatgtattcgcagccccatcatgcataatctttcgatcatactcccaaggtcgtcccaagatgaggtgagtgacattcataggtgtaacatcgaaataagtgcggtccttgta

SEQ ID NO: 3364 - DNA, 1058 bp, Arabidopsis thaliana
taaagaaaaggaaaatagatggaggcatacccctctctgctggcatatacgaaggtagtcgtctaggatcatatgtactttctccctttccttttccctgaaaaccctgacttcttcctccttcacagcaccaactggaaatttggcgcccactaggatgaatcaatgtgaaaaaacaagatcagtgaccacaaacaagactaagtggaaaaaaagcacagagacaaggtgtaagggaacatactaagtgggatcatttgggagggctgatgaacatgaataaggcaaatcttcttgcctccagtgttttgcaaagcccaaatgagtgtagatttgctcttggccacgtgtttatccactgcaacgaagatcttctcgtcaatcagccgcgagacaggttcgtccataatcccgctcctactagaccttgatcctgggctaccaattccgtgaaatctcatggatccagctctttcacccattgctggaattggactcaccaaagccattgctccaatatcaaatccgacaaaccagatcgtttgatatctacaaccacaaaacaacgaaacaaattaagaatattcaccaagatcactccggaacacgaatcaataagcagtgatttaaaatagcagtttcacaatccaaaagggaaagtttctaaccagagtgaaatttttgactagagagcaaacagacacactcgaatcgtattgaaaccctagagtctacggataaggaagaagaagaagaggaagaaagagtttgattatcaaatttcgaaacgtattgaccaaataaaaggactcttggtcagaccaaccaaaactcacggcaagaagaaactgatattttgtcggaaaatttcacgagaagagggaaagacaattaaaattgagatttgtgtgcaaaatttattcgattttactttaacataccaaaacgaagcttcttggggatttgtgtgctttgctgctaaaaaatctgacgtggtcgagaacatgaaagaagaggtttatttatctgctgtggacacacacacagtagtacttatc

SEQ ID NO: 3365 - DNA, 1402 bp, Arabidopsis thaliana
ccgccatgtccttataatgtatgagactctctagagcttccacaactgcaagcattttgggccggtctttagggtttggctcacacattgtaaggctagaagagctgtatctttagccgccttgacggagtattgtccagcgagcctcgggtccataacacatcggagtcggcggctgcttgttagataaggctttgaccagtcgatgatgttctgctggttttttggccgtgacttttctgtggctcttcttcccgttaggagctcgagtaaaacgacgccataactatacacgtcactctttgttgttaaatgccctgaaaataatgctcacatgcgttagataattaatcaaaattagattctgattacaccatgactatgtccactcttattaataaagctctgttgagttaagaaaagaaaaattaatcaaaaattagaatcccataaaattaattaattcctattcattcaaattttgacgcattacagatttatatgttttacttatttctatgttctgtgtaatcctcaaaatgactctatcaaaatggtctctttgtaagagaaagcaatggaagatatatatatgagaaggaaactatatccttttttttaaaaggaccctaatgatttgaataaatactgaaaaaacagacaatgaaatcattgtgtataaacctgttgaaacatattcaggagcagcataaccataagtgcccatgactcgagttgtgacatgagatttggatccttctggtcccatttttgccaacccaaaatctgagagttttgcagtaaaatcctgaaaacccccatgtaataataagaaaatatatttttgaagaatgtatttaggataattttgtacgctgaaaaaaaaaaaaatcaaactaaaattagtaaattaccgaatcaagtagtatattagaagttttgaaatcacggtaaatgattggactctccaaatcatgcaaaaacgccaaacccttagcagctgcgaccgctatcttcagccgcgtcgcccacggcaacgatagtgatatccctgacaatttaattacgttaatatgaaagtaaaatgaaatactgatcacttaatacagtaaaaattacattaagatacgaattaaattttaattattaaaaatgttcttacgtctgaagaggtgattttctaggctaccacgtggcataaactcgtagatgagtactcgttcctcttcttcgcagcagtaaccaataagtttgactaaattcgggtgttttagctgtccaagaaatatgacctcagactgcatatgaaccaaaaacatattatgtatcagatgtttttaattaattatattcttagagactaaattaagatgataggtgtatataagagtatacgaaagtg

SEQ ID NO: 3366 - DNA, 557 bp, Arabidopsis thaliana
cccgctctggtttctccatccaaacaaaaacaacacccaaaccttgtccacaccaaaatgttaaactcaaaatccaaccacacacacacaatttctcttcctctctaccattaacatcgatcagaaagaccgagagagagagggagaagctgattgattatggctgctgcttcgatttctgcaataggatgtaatcaaactttgataggaacttccttctatggaggatggggaagttccatctccggagaagattaccaaaccatgctctccaagacagttgcgccaccgcaacaagccagagtctcaaggaaagcaatcagagcagttccaatgatgaagaatgtcaatgaaggcaaaggcttatttgcacctctagttgttgtcacacgcaacctagtaggcaagaagaggtttaatcagctcagaggaaaagccattgccttacactctcaggtttgcttgtcttataatcattctcttaagaactagtcaaagaagcaaagttttgtggaactgggttcttttgttctttcaggtgatcactgagttttgca

SEQ ID NO: 3367 - DNA, 293 bp, Arabidopsis thaliana
gtaacggtctcaaggatctcccatatttcagggtatcaaggtacatgtagagagctgaaacagatgaggcatttcttgggaaatttgaaatgtcttgaaactgtcaatgttggtgttgaaatgaatcaccgagaagacaacgatgttgacaacaaatacctcagaatcactgatgctcttatgaagcttcccagagtttcatcaaactgtagaatccatttcttctgatttatcttctcctcatctatttacttgttagactttgtttatttacgtgatccaaacatgtgtat

SEQ ID NO: 3368 - DNA, 712 bp, Arabidopsis thaliana
tgtcctcctctcagatattggctgatgaaattgaagcagaactgaaagaggctgctgtgatatctatgggaactgaagtcagtgaccttgatttattgcacatccgagaactctgtgaccaggttctttctcttgccgagtacagagctcagctttatgactacttgaagagcagaatgaacacaattgcaccaaatctaactgcccttgtcggggagctagtcggtgctcgcttaatatctcacggtggtagtttgttgaacctcgcaaagcaacctggaagcacggttcagattcttggagctgaaaaagccttatttagagcccttaagaccaaacacgctactccaaagtatggtttaattttccatgcatctgttgttggccaagctgcaccgaagaacaagggtaaaatttcacggtcactagctgcaaaatctgttcttgctatccgttgtgatgctcttggtgactcccaagacaacactatgggagttgaaaaccgtttaaaggtatccttcaatttttttttttccgatcttcctctcgatctgatctaaaaatactctaccttgattgatgtttaccatgcgggctattttcttctgacagcttgaagcacggttgagaactctcgaaggaaaagatttaggacgtctatctggctcagctaaaggcaaaccaaagattgaagtatatgacaaagataaaa

SEQ ID NO: 3369 - DNA, 680 bp, Arabidopsis thaliana
  unsure (1)..(680): unsure at all n locations
ctggataatacaaaacaccatcgatgcatatcgcagtatttatcagcactaacaacagaaacgacatcacttctggttttggatctctgaagaaactgccattgggccgtgagccaccaagaaatctcctttgggccacgaaatgtcaaagccgaagcccatgtcgcagcaacggtcttcttctccaaatacagacaaaaccagagctggcaccatgacgtcttcgagctgtacgaactctgcttctcccataaaactcagcaatcgattctcagcccttgattcaagctgatgttcatctatccgttcaatcttagggtttctttatgtttgtccctttgtataaatagtaagcttaagcattgtaaaacatttaagccgtaatgcaaatcaaagcttcaactttcgtttctatgttttgattttgccttcatggtatcagagctcatggaaataagatccatggcgccgtatactgtcccacctctcaatatttccaactgtgtcacagtcacactcaatcaacagaactacatcctttggaagagntcagttgagagtttcctgtcaggacaagggttgctcgggtttgttaacggctcgatctctgctccggcgcagactcgttctgtcacacacaacaatgtcacttctgaagagccgaatccggagttctatac

SEQ ID NO: 3370 - DNA, 595 bp, Arabidopsis thaliana
ccttttgctccttttgctccactgcaaccacaacaacatccaccaccatcaccacctctggtctggtcaccaccttcttctgataatggaggaggagatccctggaactctgtgtcagggcaacctaccttgcaaatatcacctccttcaggttcaggatcaggaaaattctggtccactcaaagaatcattctagtagtttcttcagtggccataattgttcttgtatccggtttgtgtgttacactttggagatgttgcagaagtaaaatatataaccgatattacagtggagctcgtaaagatttacaacgaccatacttcaataagcctccatctcaaccaacccccactatgggaaaaggtacactgattcttttccttccaagaaaagaaaagaaacttgtgctttggctcattacctaacggcaaactgctgtggtgttttcttttgttgcagtttctcgggagcctatggttaagcctttcgatggatatggagctggagacaggaaatatgggtatcaatgccacagcgggctgaagagagctggagagcaatgcctcctacttcatattataataaggatggtaa

SEQ ID NO: 3371 - DNA, 1313 bp, Arabidopsis thaliana
tttattacgcttagcgtaaaactgacgtggcaagtgaagatacgccctttctttctcccataacggcaacgttatgcgcgcgtgacggtgcgtctatcagagaatcaatttgcattacattagttttggagaatttaggttttgttataaattagtaagaactacgagtgtatacagatttttgttaacccaaataatctaaacaactttccagtattaaaaacatgagtaatcgatttcttcagatttttcgatctaatgatttggtcgcatttgattaaccaactctttattattttgtttttcatgccaaacaaatgtcctgccggatctcaattatctcatttgactaatcaaattaatatagcataattttcatcaattctcatttattgaaatttacaatgaatcaacaaataaaaacccacaaaaaacgaattcaattaatttgatccggtcttttaaatttaaagtattggaaaatgaaaataattaattttctttaatcaacaatataagaaattaaagaatatgagtattgaccaaaagaaaaattaatatcaacgaaagaaagaatttggacaactttttcttgtcttcatatgccttttctccgaccacattagttgtgtccaggtcacgccgaaaacgcatatgcttagccagcaaggtaatagctttaacaggcttcaaaaagcccatctaaagcctaatcaaaagcccgtattctaacatttgaccttgaacagtgtcaactagttggggaagctgacgcactaaattattatcgtccattcactcgctcttatcaaaaaaaccgaaacctagccacgcgcctcgtacactcaacgtgggtttcacgctgttaatccttatttcaactaacgacgtcgtttatcagagtgtgttaatcacgcgcgagtgaagagaatttccttttacagctcattatgactcggctttgaagctttttattcttcttctcaatttctttttttcttccagaaatttcctccgatttcaaaattttccggtgaaatcgaaaaaaaaagcgagatcttcttctctaatggcgacgaccttaagcagagatcaatatgtctacatggcgaagctcgccgagcaagccgagcgttacgaagagatggttcaattcatggaacagctcgtaagtggagctacaccggccggtgagctgaccgtagaagagaggaatcttctctcggtcgcgtataagaacgtgattggatctcttcgtgcggcatggagaatcgtgtcttcgattgagcaaaaggaagagagcaggaagaacg

SEQ ID NO: 3372 - DNA, 1255 bp, Arabidopsis thaliana
ataacaagataagaatcaaaaaggcatatccttattgttttttgcagtgataaagagttgtgaaagagaaaaagaaaaagaaaaatgagttgtgaaagtccaaagtaaaggccgaaagaaaacataacggccgagagacggagcttgttcccatccgtcgatgcaaaaaaaaaattccttctggactcacggtgacggttgaccacatgaacgtattaaaaagtctcctttctcggactttgtctttttatttttcacttttttcctttgcagacgacactactactaactattgatttccattttggttaatatactttaatattaaaagaatatatactttagtcttttaaattatgtactttatttctctttaagaaaaagttttcgcattttatgcaacaacaaaaaaaaaggtgtgtattacaaacttcataagtattggaattcataaggcccatattaggcctaataaaggcccaatcagagttctgactttaaaactagtgactagaagctgactcactaaaaaactattatcgtccattcactcgctcttatcacaaaccccaaaccctcccaaccatcccactcgccaacacaaaccacgctcctcactctacgaaagactataacatcaaacgccgtcgtataatcgaaagtgaacacacttgcgcgtgggtttaatatacatctatttttaatagcccacctgactctttgccctttattcttcttctctctttctctttcccattttcttcaaattttccccattaaacaaaaaaaaatcaaatctctctctttctctctctaatggcggcgacattaggcagagaccagtatgtgtacatggcgaagtcgccgagcaggggacggttacgaagagatggttcaattcatggaacagctcgttacaggcgctactccagcggaagagctcaccgttgaagagaggaatctcctctctgttgcttacaaaaacgtgatcggatctctacgcgccgcctggaggatcgtgtcttcgattgagcagaaggaagagagtaggaagaacgacgagcacgtgtcgcttgtcaaggattacagatctaaagttgagtctgagctttcttctgtttgctctggaatccttaagctccttgactcgcatctgatccatctgctggagcgagtgagtctaaggtcttttacttgaagatgaaaggtgattatcatcggtacatggctgagtttaagtctggtgatgagagga

SEQ ID NO: 3373 - DNA, 571 bp, Arabidopsis thaliana
aatcattaagtaagaattcaaaaaaaatgtggaattaatatatgattattaggcttacttattgccgagattagcatgaagatctatgacaagttgttcttcatcatgcgagagaaggcctcgttttaagtcaggccggagatagttagtccaccggaggcggcacgtctttccacagcgacggagaccggccagcttcggcaaagcacgccagcaacaatggccattggttagtatgaagtttataagcttcttatcttcctccaccgtccacggccctttcttcacccctagcttgtcacagcatggctgtctccccattaaatactatatagaaatgatatgtgtgattgtatattatgttatatggggatgtgaaatagagagcgaaatggaagagatatggaagaataaagttatcgaggatggaaaatctcaacagcttgcaagttatgtcaaaagcttaccaaagctcacccaccgtatatataaccttctcacaccttttccccacaattggtttcaggaaaaaataactttacatcttaatattttcgaaattgttttagta

SEQ ID NO: 3374 - DNA, 597 bp, Arabidopsis thaliana
atccattggaggtgtcttggctttagcttctctagagagctaagtccagtcatcacatcgattgttgttgctggacgaatgggaagtgcatttgcagctgaactagggacaatgcaagtctcagagcaaactgatacactccgtgttttaggagctgacccaattgattatctaatcactccaagagtcatcgcctcgtgtttggctctaccgtttctgacactcatgtgtttcactgttggtatggcttcaagcgctctgctctctgatgcagtttacgggatcagcattaacataatcatggactcggctcaccgagcacttagaccatgggacattgtgagtgccatgattaaatctcaagtctttggagctataatatcggtaattagttgttcttggggagtaaccactactggaggtgctaaaggtgttggagaatctacaacttctgctgtcgtcatgtctcttgtcggaatcttcatcgcggactttgtgcttcatccttcttctttcaaggtgatggagattctttgaagaactgtgtttgacatattattttctgtcttcatttgttgtggtttagatgggtttatg

SEQ ID NO: 3375 - DNA, 1180 bp, Arabidopsis thaliana
tatattaaaatattatggattaattttcaattgtacatcacaaatacattttctacagcatttatcattagtcaacatatatgttaatagtttttttactgtgtttcacaaaaagtaacatcttagaattgactaatttttattattatttgtatataagtataggtgaacgttatttaacctcgggttatatgactataatgatgacaatcatatgattatatgtagaagattaaccatttttggtaaatacataattagctaacaacatgcatatgatacaatatattggtgaaatttggcatatagtacttaacattcctaccgaaaattgttttttggaatatagccttgttgtttatgataatatcctcgtgctgtcgatatttggatttatatccgtaattcatgttgttgttaaaaaaaagattactaacaaattcggcttagttaatgcatgtttaataatgtgtagtaaaaatatataacaaatgatcaattacatataaacgaaatacaaggttaaaacaagctcaaacctgttgccgagaagagcatgaaggtcgatgacaagctgttcctcggcgtcggagagaagacctctcttcaagtcaggtcggagataattggtccaccgtagacggcagctcttcccacagcgacggagaccggccagcttcggcaaagccctccagcaacagtggccgttggtcaagataaagtttatcagtttcttgtcttcctccgccgtccacggccccttcttcaccatgagcttgtcacaacatggctgccttcccattaatttatatttgactgtttatatatgttttgtgtgttaatttgagagagagagatgagaccttaaatattttgaaagtagaaagtatataccaaattagaagatttctgtcaaaagcctataagcacctaagctcacccacctatatataacccaagtatttcttacatcattcaccacatattttttattttagttagaaaattagtatctcatttgacccacttaggtgagtagtgaaaccaaatagttaatgacgctatatgttttgttaggaatttattgttaaaatcatcttctttaattcaatcattattgttcgtgggaagtaatcattataattgcatagattgcagttaattgaatattttataatat

SEQ ID NO: 3376 - DNA, 1537 bp, Arabidopsis thaliana
atccccaaaacccagaaacgaagaaacacgtcacaggaaagctataaaaggaaaggcaaagagtgtgtacgtgggaagggttctcattttctgatggagatcgctcgtccacgtctcacggacaaagacaaggctcagaaataaacacaaggctctctcttttactttttcaacaaataaagttccaagctttcgggaacgggttggcggaaaaatcgaatctttaagagaaaaaatggtaatttcaatttaggtttcctcatgccggcggatagattcgttgctttaccgttaccggaattatttatgagtcctcctcttctccaaattgggctttcatgggccttatagtttgggctctcaactataaagtttgctccactagtcagtgactaaagttgtttgctacataaggttgaaactcaattttgctactgatttggagagtgtgatactctcaagtctcacacaattcatactcccagaagccaaaaagagctaaacaaacacataaaacgttgtcctttattggtgtagaaaacaaagaactttattatcatctagaaattacagtacagagcaagattggttccaatcttaacataatcaaacagttccaatcttaacataatcaaacagcacacaaagatcatctggagacgctgttgacaagcctagcaccaacattatcaagcttcttcacagaagcaacagatttcaaatgaccaactttccaaaacgcttccaccatcttctctccaatgacttgacccttctcctccgaatcaatcaccgcaaccgctgttggtccagctccgctaatagtacatccaaatgctccagcttctaaagccgccttcttcacagcttccattcccggaatcaacggcgctctagtcggctccacaatcttatccgacgacaatgccttcccaagcatcactgcgtcaccttctaacacagcagcgactaaagcagctgcttggctactgttccaaacatgatgaaccattggaatctctgtaggcaatgcagctctcattttcttagttggagcttcaaagtcagggcttactagaacaaagaagagatctttatcagatgggaacctcaatggtttcaaatcaagtggttcgtagtttctaatcaaaacgaatccacccatgatcgctggtgcgatattatcagcgtgataaccggagactttcgcttccgattctaaaccggctaataccaattgatcactccctaatttccggccaaagatctcattaaccgccacagcagctgcggcggcactagctgcactagaacctaaaccgctacctaaaggaagacctttatgcaaatctaatgataaaccaaccgatctgatccctaacatcttcatcgtagcaatagcagcgattccggcgcagttccggagagggttcgtgctgagttttgttgtggttccggtgatctccgagattgagacctcaccggctcgtacagagggatctacacggagagtcacatggtctccgagaccatcgac

SEQ ID NO: 3377 - DNA, 816 bp, Arabidopsis thaliana
cccagccatgattgagtggtatttcattcacagaacattaatttttcaaatgttaaacatgattgcgacattctaatggtttgtttacctggatagttacataccgaagattactaaacgtcttcgggatccttgtgaagttgttagaaggcaaaccttcatacttctctcaaggttactacaggtattgctattctccacagattctttatcttctgtttttaaaaagtattgaattgacaatgaataagcaggcttgttttcttgattcagagagactacgtgaaatggagaggagttctcttccttcgattccttctatcgctagtggatgaatctgaaaagatacgtcgacttgcagactttttatttggaagcatccttaaaggtatgagaactcacgtgagcaaccatgaaatgcattctttcattcccatgttattgaaaattcttacagagagacatgatctctaggattttgattattgttacgccccatgttgcttatagtaaaggcgccacttctagcttacaacagtttcgtggaagctatttatgtcttaaacgactgccatgcccacactggccatagtaatccagattctaaacaatcaagaacaaaggatcaagttttttctatcaggtacttgtgttaaagttatatagtctatgctcatacgcaaacttgacattttggtgtgaatgatcttagtgattatctttgtttcatttgttctgtagagggaatgatgaaagggctaggtctaaaagaatgcagatctacgttactttgctaaacaaatggcccagaacact

SEQ ID NO: 3378 - DNA, 708 bp, Arabidopsis thaliana columbia
aatcaagtaacgcttggaaatggagtcctatggaagaatcctagctacttgatctatgcaaaaccattccactctcctacaagctaaaacgaagcagagttcatcaactagagagatccgaattgagctcaggtaaattcgaatttgttccgctaatcaatccaacatttggaatgtatataaacttactcgatagaatgcgacgatcgaggacgtagagaggtatgacggctctgtgcttagacgcagcgaggaggccaggatgatcatcaacacgtaggtcatgtttaaaccacacaaccgccgtggaaccttcattcgttgccgaagacaaacaacatttgcatcggtttttccgatcattccgccggagacggagatgcaggaaatgcgggagagcgaggaacgccatgaggacggtggaagaaaaccagaatcagtgggttagtactagtagtatccatgaagtcgaagcagagagagagagagggattgtggtggagaagactctttccaagtgtgtggtcaatactcagtcccacagagaaacacctaacattcaaaacgacgtcgtacttcacttttttcttgctttcgtttgttgtgttcaactgtgactgtcttcattagatttgagactatctatttacattctgattatttcttaagaagaagcggccatggaagtcaaaggagcaacccggagct

SEQ ID NO: 3379 - DNA, 623 bp, Arabidopsis thaliana
taaatatttcttattagaaattgactatttatttatatgtaaataccagttttgtattcatgatctcaaatcttgattctctttagtactatatggaaattgtattcatgactcatgagcccattatctcgattatctttctccatgaatgtgaataaagatcgtatattcagacataatcacacggaataagagaataagtttaaccaaagaagaaaaaaaacaaatcttttgcaaagtaaagatcaagactcttggacaaggctcgtggccaccacagaacagctcacttcaaactcagcttcatcttcatcaacccaactcaccaatccataaaccacgttctcttgtaaccctcttggactctccaatctcacagtgtagcttagcttctcgtttttctcgctgaacattagtttctttggctctacgacgacgtttagacccttcaagcctctcactctcacgatgtagcttctctttgcttctccacgtttgtcaatgtctcttaaagatcttgggactgctttgatcagacgtgaagtaggcaatgattgaagggtaattgagatatggagatggctttttcaagcgtcggagatatcagatctcgtgatgatatt

SEQ ID NO: 3380 - DNA, 1555 bp, Arabidopsis thaliana
tgatgttttaataataaacaccaaaatttagcaattgtgttttgaaacaatctccgtcaaattgttaatgagttttgggtacctgtagtttcatgggaagtctggccgaagaaggcggcgacctccttcttcctcgtggcggtgtctccggtggtgccaaaaccggggaaggactttgcagcggtgataaaggcgttgtaagtgtagaaacctctagcaggacaagcggcatcattcctatgcttaagcatatcatcgaactgagaacttgaaatgatgcccgaaagatcgccggtgggtccaggaggagtaccaccgggagtgcactggctttggcagccaggctgcttacagtatggttcggtgttaccgcaccagccgaactcgctgcagcatagaccgttggggcagagtgctcctccagcttggcgaccacattgctcggccgaggataatgataggagaagtgaaaagatgagaaagagaaaaagattagtcttcattttgttcaatgttctatggttttctttttgtggaggcatgaaagatatatatagatccaattaatgaatgttttatcacatcaaattctatctttttccatagtttattgtttgttatgtctatggagtgtggctatggggaacaaacagtatttggtaggtttgtttttgattatatttattttccttccgtcattgttgctaggttagatattgatttgtttttttgggggattatcatgttaattccaagtaatgagaactttctatgtatgaaactgtgctaaatgttggtagaagaatacaaattttagaagaccaaaagcataacaaattacactctttttgagttttttgttctaaagttactatcgacgtagatagtgggacacaaaggtcgtaaaattttgggtggtctgaaaacacgtttactcgagttgcggactaatcgatgatctgagctagtgtgcactaattaatcaaacacacacatattcggatattccctatgatgtatacacaatacttgactatatctaagacaagatcacaagagttgcatgaatagtcaagaaaatgtataacgtggagaaaataaaaatagacgtgtctaaatatttaactatgatcaatgttgacaaaaacaaaatttaactttaattatgaatatgaggcggcgggttcgtgatcaactttttcaaaaagcaattgagacatttagaattcattataaggtaacgtatagcattagccaggtaatgatataatgactcaagaccaaatcataccaatatttaatatattcattattccaactactcatgatgactttccctatttcataatgttttatccaaagtacgtgtcatgtttacaaactatataaaatccaaaacctcgacgaaacctgcgtgctattcttatgtactaactatgaaaagtaacgttaatcatcgttgactgaatctctaatctccaatctcactgtgggctgcgttgccgtctctttcgggtagaaataatcgaccatggaaaaaaataatattgtaggg

SEQ ID NO: 3381 - DNA, 770 bp, Arabidopsis thaliana columbia
tgaattctccattcccttaattaaaagacaaacatagaaaatataaccaaaaagaccagacacatgtttaaaagatcaaagtaaagaacatggtaagcttgaaaggacaattgaccagccttagttgtcactttacgaagtaaattacgagtaaccgaattaaacaaacatataatgctgaccaattgtaacgggtctattgtatatccgtgtttctggaaactacaaagtacaaatgaacaaatacaaactctagacgctctttacttaatctcttattaaggtttcaataccttagctctgtaaacacttgatagaaatgtagaatcgattaagaaaccacaacgagaagataagaatcgtatacttagatcaagatagatctaagtaaccgatattgatctcttcctctggcacatcaccaggccaagtctctctcgagagtcgagaatctcacaacatcaaaagcataaaactcaaagatagatcacagtagctatatatagaagaagactccgtaacagcaaaacctctggcttatccagagtctttattcttctttgctgactcatctgcctgtgccaactcgactgccacctcatcttcttactgacgaatcgtatcagtatcggtggttaagagcgtcgttacaatgttatcaaccacacctttagtgaagtggaagaagtggccacttctcggaacctcatgatagtgacccatggaagctgatgagcaaggtaacgctgcagcttcacaggcactaacat

SEQ ID NO: 3382 - DNA, 811 bp, Arabidopsis thaliana columbia
caatatcaaagagctttaacttaacaccctaccctaacttgaagcttctaaaaccgcatctatttaacaacataacttcaagctgaaaaacacagtttaaatcacataacttcaagctgaaaaatctttctcttatctttttaacaaccaaaccaaacaaggttatggattcctttaaatctttccctaatcatctttcaagagaatcaaaccattccaccaattcagtttgaacgttttccacctaacatagaacttggatcatctgatgtccatgtgtttagtacattggtttgatgatcaagagaaagatgaagcgccaattgcagagaggaaatcaagacgcaaatggtctctaatagaagatttggtcctgataactagctggctgaacacgtccaaggatcatgttgtttccaacgggcaaaagtctagaaccttctggcaacgcataactgattattttgctacaagtcagaagctcaaaggtttttgaaaaagaagcacattatgctgtaaacagaaatttgcaaaaataaatgagggtgtgaacaagtatgtgggaagctttatgcctgcaaccaaacaccaaacaagtggccaaaatgatgatgatttggtgaacttggctcatcagattttctacgaggactatggcgccaatttcacccttgaacatgcttggagtgcggttcgctatgagcagaactggttaagtgagtttcctacaacaggaacagcaaagagaagaaagtgcaaagaacaacaaagagaagaaagtgtctgtgttccagctggcattgaagagaac

SEQ ID NO: 3383 - DNA, 861 bp, Arabidopsis thaliana
tcactcttcgacgtcaagtcacagaacgagttcacttcgataatgttgaccaggactcatgagagaagttgctgcttgtcttacgattacgttaccgatgatgccactgatctcctcggcgatcgggatttggattctatttctcagctttggagcctgatggtttctcgtccggtggattcaagcttatctcacaagaacgctttggagcgttgtgttgagcacgctaagctatggttagctaattccgagcagccaatcgaatcaaactgcaatacttcatgtaaaataaaaattcctaaatctgtttgtctcttacatctctgtgttttagtttctctgtgttgattacttagatttgtgatgcagatgctgcattgagagagaagttgaagaagattatggcgtctgactatttcaccactactccggaaatgaaagctccggttgatgtggcggctgcagctggtaactatacttcttaccaggtgcctgtggacgtggaggcttcagggcattaccagcaaaaggtatccactttagattaggttttgttgatttcctgaagtctctgactttcatcaaattggtagtgaatttcgcggactagttgttctgattcattacatactatatagttcagggctttgtggtatgcaaagctcttacttaatctgaaggaggaaattaacaatcacatttctttagttgtggtgagattgagcttaattttcaaggattcagagtttattattgtttccctataaagtagaagatgtctgaagttgaattatgcagcattagagtgagatgtggtatgagatcattagtgagttaagttgtttggataggatggagaag

SEQ ID NO: 3384 - DNA, 1394 bp, Arabidopsis thaliana
cacaaaccttccaattcaccagaacagcattgggaacgatgatgagatgcggtccataattccctttaaactccataaggtaagcaatcagtgccattacctgtacaaaacaattagtatattatgataggacaatataataatttattggtcaccaaaggcgaaagaaaagtaaatccaggaatccctgcaaatcgggaacagatttaacctgaacagtttttccaagacccatctcatcagccaagatcccgtttaatttgttattatacaacgatagcatccattgtaatccaacctgattggcacagagcaaaaaaccttagaaaccatcaaaacgtggcatgacagtgagaaaaaagcaacaacatagagtatagatggaggagataccagctggtaatcacgcaaagttccagcctgaagcattgaaggttgtcttacaaccacttcatttacagcatgagccagagtatagtacctagagttggacataacagagttagacatcacccacggcgcctattcctaatcttgtgatctgtagaattctctcacatatggatgtgcaggattatcagcattttacagataagcacatactttttaagtattcagctgcattggtaattatgagttacaactagtactttgctaattccctattataatcatttaattgtgtgactaatgcgcttacttgttgacagatgaattttcttttggcgcattcatttccgtaaatctatatctgatcacaacttcttctcgagcataagtagctgctgacctgaactctacttctgacaagccctgtgtcaaaaacggatacatgtaaggtactatatatccactatacctttgaattagacaagttctatttgctgtagctcgcgatagtctacatttaagttaaagtttgaagaattatctacagagtgtaatggatattcgctgtggagtagagaaagcagtatgtatacctgcaatctcgctgctactgctgcagcatttgctgcctcctccacttcctgttgattttttgtggcagtaatcttacctccaagtttatgaagataatcttcggtttgggtcaaaaatgaagagagaacagcatatctttcagcagcatcaccaggcatattagtttgctgttccagcaacatctccctgtatctttctacatcattattcttcaaggcctccatccttttgttgcggccatcatcttttctctttgaaaactctctcaacatcttttcatggtatttggccactcccctgttacgagcagtgcgtgcatcacgtatagcccaatgagcctcaaggagtttcttacgccactgaaaaatggttttcagctgcttctctctgacagctttctgattggccag

SEQ ID NO: 3385 - DNA, 1047 bp, Arabidopsis thaliana
caatctcaaaaacacaaatctatacaacaaatcataacctaagaagaaagaaataaaaaccttatcttaaaaaaatcatctaagcaaaccatttcttatttcatcgttctcttgcggtcacaccgatatctttatcacttgtcttttgatctgctctatgcacggattgcttgaacgctacggttggagcgattctgctatttctcctttgatgctcgagaacaagttccccagctaaccagtcaagcttctcgaagttgctctgttcatcgattcttttacctccaaacaaaacagattcaacattcttttgtttaagcatctcctctgctactcccatcagcatattcacattgctcccactagggtctgtgtccatgttaggactccaaggtcctaagttcgacccattcgcctgcacaaacatattactattatttgtgaaaaacctacaagtgcatactttatatcatccaacaatcctactaagctcatatacaacaagtaggatttggaaatgaacttatataacacgaagattattacctatcacaaatttcattaaatcgaaagaaatactaggtattcaagaaaatcaaaaataatttttgaagttatcaaatgcaattctgcagtgtggcccatacctgaatccggacatagttactactgcggcagtgaccaaaagccatggccacagcttgatcgacagtgtcagcagcaccgtcattagaaataagagctgcggggcgagcccaatgcttagccttccacttgataatccgatcatactcatagctaacatcaagcaactgacccataccaagagacaacacaagcaaatcctcaacacctcgcacaaacggaaactcctgcttgttgtgcaggacatgcgtgattgcagccgctgtgggattgctcatggctaatcctccaccaacagccacacacttggtctgcccatcaaccgacttcatctccacgggctcaaacacacccggctcagcccaagtcgctctacaaacctccgagagcctaaaatcatag

SEQ ID NO: 3386 - DNA, 993 bp, Arabidopsis thaliana
ctaaaggggcgtagttgaaggaaaactgattccagaattgaagaacaagttaaaatctgtgcagaatttctttaccaccctgtctaacacggttaaacaagcgaataaagatatcgatgccgccaaattgaaattaaccaccgaaatagccgccatcggtgagataaaaacggaaactgaaacaaccagattctacgttgattatgatgatttaatgctttctttgctaaaagaagcggccaaaaaaatgattaacacctgtaatgagtatcagaaaagacacggtaaaaagacactctttgaggtacctgaagtctgataagcgattattctctccatgtactcaaggtataaggtttatcacatttaaaaacacagacgttttttaaagattgagagttacctgttgataataaggtatcgggtactctcattatgacagagcgctttcaaaaacagggctacgaaatggcgagcatccagacgtatattaagaaagcccccatcagcatctattaaatttatcactgcgcccagtcaggtttatttaagatatgatcctgccagtcaatcacttctgattctttcactgcgatatgacgcacagagatacgttcaccatgcattgccgctttcgaaccagtaagtagcggatgcacgcaggtaaatctttaccttccgccagcaaacgataagcgcaggtcattggcagccattcgaatgttggcagattttcacgggttaatttaatgcagtcgggttcaaactcgaaacgacgttcgtagttccgacattgacaggttttaatattgagctggcgacaggcgacgttagtgaagtagatttcgtcggtgtcttcatccatcagtttatgcaggcaacactgaccgcaaccatcacacaacgactcccattccgcatcgctcatttcgtccagggttttactttgccagaaaggtacatcgctcatcaggtgttccgcgattacgttaa

SEQ ID NO: 3387 - DNA, 560 bp, Arabidopsis thaliana
cttcatgaatcatgattgagaccatatgttacattcgtctaaaccgtctcactgcttagaggatgttgtatataataaatgtcctctacttcgtttgtaattggctgatcgcatgttcaaagcaacgtgaactcattttttttcctgtttaacactaatagggcattacaacttatgaatatgttgtggcaatgagagcaatgagcgaggcaccagctggagcttcgattgatgaggaaattcctaacgtgctgtattctccctctggatctgccacgaccggctttagtggtggaagctccctcggtctaccatacaaaggagcatggtgcactcctcctagagtgtttgttgattatcaggtattatttgctttccatgaaccctaaatagaacaattttcgtagagcttccactgggtctctgtttagttattgatatgtccgcttgatacttgttatctatgttacaggacgaagtgattcctcatttggatcctcggatggttccatcaaccgtagatccagatgcagctgaaacagcagagaggggcaaccaag

SEQ ID NO: 3388 - DNA, 596 bp, Arabidopsis thaliana columbia
atcatatagaatgaaattaaaagaacatttccattatcctttataggaaagaagtacccgcgaggccgtgatgcaatagattatgtgagatagtatctctagccttcatcgcattaaccgatctcaatacgttttcaggcaaaacctcatcatcaatcacttcaaccatcagctctggctccatcttctcctctctcatttcacatatgttgtgaagcacacaacaagcacccaaaacggtaggcaaatcctgcagcttcacttcagtccgtttctgcagacacgcccaccgccctttcaacctcccaaacgcttccttagccactccctgcacttcgctcatcttctcattaaacgcatgctgcgtccacgtcaagttctgttgcgtatacggaaccaaaacccagtccaacaacggatgacccggtccaccagcaacccacatccccttcaacaaacctccattgttagctctttgatacaacaatgacttctctaacaccttatcatccggcattgacccgggccatccgatgcacaagtcagtaaaaacacctttcgggttcacaacggcttgaattgtaatcgaatacgac

SEQ ID NO: 3389 - DNA, 1749 bp, Arabidopsis thaliana
aaagcatcagcagctcaagatcttatagcatagaaaagaatgaagagaaacaattacctcgactcttctatacaaaagatcaagacttctgatggcgtccttctcatcctgaaagtaagcaacacaggatctaagggaacatttcatcatgaaaacgcataactcacaaggaaaaaaatgttacatcgcgcctagcaaggtcaagccggttccatatgatcatgaggacaagctcgtcaagttctcctttctcggctgcttcttcaattctctacagaaattgtcttatacataataataataattgcctgcttgtataaggaaggaaggggactttgatttttacctcttcgacttcctcggcagctctgatgaagctggagacgagctttctggctttccttaagtcttgctcgggaaattccttcaacctcgtgccaatttcacggtattcttcaatctttctctcctcttcttcttcttcctcccgctgcatccgccgcagttctttggtcttctctctctgtcgagcttgccattcctggtatcaaaaaaccaaccgacttagaaaaaatcagactgagagacaaaaaaaggatgaggagacgaacatcatcgtaatactccggtggcattccttctagaagcacttcatcattgtttcccgagcatcttcttcggaatttagctgagacatcggcagaggatcattttagatgaaacaaactaattttggatttcacaaattaaaccccgcgaaactgacctgtagaaatcgacaactctgtagtcagcttcttcgtagcagaaataacccgagggctgctgaatagaggggatgcgcacgtcagaaccagcgacgtcgccgccatagtcgagcttcgcagtgagtgggagtgattttgttgcagccccgaatcccttaggctatctatatctattcggatttagtctccctagtttcggatttcacaaattaaaccccgtggtgtagcttagtactagtagctcaattgaaaaatgtctcaaagaaatctgaaaaatcttggcttcatttcctttcataatctaatgttgtttccccagtcagtgtctgtgacacatagcgaatcatgttgctctaaataataaatataatatacaatatagacaaacaaaaaaaaaaaagagagagctaatctcaggaacaaaagtgatcatgatcacagtttagattagtcgagaaaagaaagttgaaagacgtcaagctaatgttgatggcaagtctccacaatgagttctgtagctgcacccattgtcccaaggccgccggcacaaagcagagccagagccaagtcttgctcgttccactgcctcagacttttgcttagtctctttattacttcaacatccacctctagcacccaagccggcgtgcattgcaccatcaggctcacaaagcctgtcacgtaagcttgccatgtcgcccaatcacagcccagtgatatcttcccttccaaggcactcaccataaactccaaatgcagccacagaacccttggccgacgttttgatgcaggatatgaggagtccactccccaggcaaatgcactgctcaggattgcaaagtaggctaaagcatagcctcttagcatcggaaccatacctcccaactcatcttcttctccgtgaaccgagatgaaccaagacggtaatgtctccttgatcagtgcctgaaccaggtttaggccacggagatcacaccagaga

SEQ ID NO: 3390 - DNA, 568 bp, Arabidopsis thaliana
gtcgactcatccctatcaagaggtgggggtgcatacagcatgtaccgtggagagatggatactaatgagttgttcaatcccatccccatttttgagaatgctacgggcgacataccagacaatgaaagttaccagaggtactcggatgtacttcatccaagtgatgaaattatggagcagactgttcgcaatcaggaagcgttggcaataaagaggggaaaaaggaagcgggaggatgagttatgtcaagaggattctccgaccacacataagcaggtgatccgcgagaaaggtgaaggaagcagctctcaggctgagagcgaccagtgtggaggtgtggtgggccctaaatcaccattttcttcatgattacaacctgctggaactgtcaaggccttggcatagaccttacagttcgacgcctaaaggagatcaagcgtttgtatctcccggacattttatgcttgcttgaaacaaaacaacaagatgacaagatccgtgatgtttgtgtggagttgggttatgagaagttcatctcggttccacctattggtctgagtggtggtgt

SEQ ID NO: 3391 - DNA, 930 bp, Arabidopsis thaliana
atatcaatatcatcataacttccgataaacaaacgcgagctgaacgacgtgtgcgacgaccgccggagtcaaacgggcttttacgcaccagcggtgaacgccggtttctgtacgcagccagccgtaagcgtaatcgccggagattttgatcgtcacggatttaatacccgccacttcaccttccgactcttcgatgatttcagttttgaaaccacgcgattctgcccagcgcagatacatacgctcaagcatgctcgcccagtcctgtgcttccgtaccgccagaccccgcctgaatatcgaggtagcagtcggcgctgtcatattcgccagagaacatacggcggaactcaacgtgcgccagtttttcttccagggcgtcgagttcagcaacggcttcgttaaaggtttcttcgtcgtcagcttctacagccagttccagcagaccagaaacatcttccagcccctgtttcatttggtcgagggtgtcgacaacggcttcgagggaggaacgctctttacccagcgcctgtgcgcgttcgggttcgttccagacatccggctgttccagctcggcgtttacttcttccagacgctctttcttggcgtcgtagtcaaagataccccctaagaacgtcggagcgttccgtgaggtcctgaatgcgattatttaccggattaatttcaaacatggtctgatttcttttattgagctagtcaaaatgcggtgataagagcgggattgtaccaatccacgctcttttttatagagaagatgacgctaaattggccagatattgtcgatgataatttgcaggctgcggttgccgcgaaactcgttgatatcgagcttataagccagttgcacttcgcgcacgccgttatccggccagagggcggtatcgacattataagcaataccatccagcag

SEQ ID NO: 3392 - DNA, 1190 bp, Arabidopsis thaliana columbia
tatcaaacaatctagtcagactaatcttctctcatttgttaactagcttctctctcaaagccaaatatatctccttaatatcccaaataagttgtacctctttcagattgccatttttttcaccaaacataatacttggcttagctttggcttttgctgccttaacaccaggggaacatatttggctttggctttggttctcttcaatgccaactggaacagaggatgatgactaaatagattgttcaaagcactttcttctctttgatgttccattagtagtatactcactgcaccatttctgctcatggcaaaccaccctacaagcatgctcaaaggtgaacttggtaccatagtctttgtaaaagatctgatgagccaagttcaccaaatcatcatcattttggccactggtttgttacttggttgcagcaaaaaagcttctcacatgcttgttcacacctcatttatctttgcaaacctctgcttacatcataatgtgcttctcttttccagacctttgagcttctgacttgctgcaaaatactctgatatgcgttgtcaggaagctttgcctttttgctcgttggaaacaacaaatcctttgacgtgttcagctagacacttataaggaccaaaagttggagaccatttgcattttgatttcttctctacaattggcgcttcaacttcgcttggatcatcagaccactgtgtactaaacacatggacgtttgatgatatggttggtgaaaaacgttcatattgaattggtagaacggtttggttctcttgttgactagttaagaggtttaaaaagcttgaaagatgattacgaaaagggttgaaggaatccataaccttcttatgagttttaaaagataagacaaatattttatagtttgaagttatgtgctttaagcaaagaaaagctttggttttaatagcttcaaaaaatggttaggtgttaagttaaagtattgaaattaaacatagagagaaaatcaatcacagagagcttttacttaggctccgagtggtgacagtggatgatgcggtgcggaacaagcggtttagcagaagcggtgaggtttaattgtgattcgttctgaagaaacgcatcatgcggaacaagtacggttagtgcggcagaatgtgcgaatctaatattgaatggtgaaaacatatta

SEQ ID NO: 3393 - DNA, 2268 bp, Arabidopsis thaliana
aagaatatcaatctatcacaaattatgaagcatctacatccatcaaattaagtacttgagatgaaaatcatcaacaaaatctatgatcatctacaaattgcaatcagctacatttagacgcttcatttatcaccaactactaagcaaatgtgaactaaatccctattaagggataatcaaatcattaaaagcagagctaaatcaaagaactctacagctaaacattatcaaatgcttcaaaaaagaaggatcaaaatcaaaccttgacaaagtttccaagggttttggtagatcctcttgaagaagtaaagacatcatcaataccagcgaactgaagaaccttcttaggaaccctagcagcaacaataccagaacctctcggagcaggaaccattctcacagtaacagaaccacatttaccagtaaccttacaaggcacagtgtgtggcttcccaatcttattccccaataacctctcctcaccggaaccactgatagcttagcaagaataatagctcctctaatggcagtagcaacttccttagaacacttgacacccaaaccaacatgaccatttccatcaccaacaacaacaaaggccttgaatctagtcctttgaccagctctggtttgtttctgaacaggcatgatcttcataacctcgtctttcaacgtaggaccaacaagatgatctatgatttggtactcctttactgggagagaatgaagatagatctgctctagcttcgttattttattgtcagccactagacgacctagtttggtcactggaacccatttcgtttcttccgaggcacggcctccacgtcttccacggcctcttggaccacgatcacggccacggccacctccacgtccaccgccgaatccacgcccgaagtcaccacggtcaccgccacgctctgcgccgctttctcctcctctttccgccattttcgatgaagtaaaccctagcggattcacaagttttagtttatataggtgagcataagattagggttttcgaaagtctgaattatgggcttgtgggccgaatgttgatataattgttttgttgagatacaaaccaagaagcccggcccaataacataacttattcaataacacccaatatagtacgtgatatgcaaattgagtggaattgctttgcttatcttgtgatcttaagaactatgtgcgtattgttttactatttagagactttatgcaaattgagtgcaattggtttgcttgtcttgtgaaacaaattctcaagacatttgttagacatttatgcaaaccattgtgaactcaaagatcgtaaacaaatgtaattcgtttgttgtcagtaataaataggtcatacattttaaagctgaatctcattgtatcatctctcaaatggctagaattttcttcggctttttagtgtcgcatcattctcttatttaggccactttccaattggttatgagggcgaatacaaccaattttaacatctaacgtgtttgtgtttaaaagagtagtgagaattttttgattagtgagtctcaaagttaataatttgatgagtaaagatatagtatagtacattaaaaaattgagtacatgaatgtatacataagagaatgagaataaaaagaacaaaaaaacaatattcagatgttcaacatcaatagactttgctcaaatatttgtcgagtaaattgtcgacgataacttgataagctctttcagatggatgatagctatcccaaaatatgtatgctgaagaattagaacacgtaaatgggttcaatgagttacacaaataggatatcgcaagcaatcctttaccgcaacatcctctatcagctacctcaaaacctgaaacaaaacgagatcatttgaataaaatatagttttaaatatataataaaattaaaatataaataatttctatgtagataaatatgttagatgaacttaccgtattttttagggtgttggatcatgtcgaaaagagtatcataaacattaatgtaaaggataacaccatctagctctttatctaaagaatctaaagctggagaaagtcttgcgttaaattgttttgccatgttgtttagaggttgattacatcctcttgtaaaaaaacctccaaaaactgttctttggagtggaacacaaccgacggggactgcactaaacactcctattttccgagctccaagcttatgtaattcctaattatcaattatcgataagataaagtattacatcctagta

SEQ ID NO: 3394 - DNA, 585 bp, Arabidopsis thaliana
taccttttatatcccaagtaatcccacattgagcacagtggaccatgtcaaatgataaagctggatatggaagctgtttcgaaaagaaatttccaatcattgcaggaaggcctctctctagagctaattggacttggcttccacttgtctcatactctgctatacatataggcatcacgttcaaagacactagatgtgcaccaaagctaccaaatccgcaaccgatgtccaacacagtccgtatctgcaagaaacggtagacaacttaaggaggtttcagtgaaaacagaactaacaatcaaatgataagaggaattagcaaaagaaggaaaaacgacttacaccagcttgaggaaactcagtatcgcttcctaatccaatcatctcagcaatttgaaaagcgtaatctttaaccccatcaaagatcaagccatcatccgagtgaaacgtaatttgattctcttcaagcaacattagcctgatgataaatattaacaatagattaagatggcacaacactagctgctgaaactgcataacaaaaggtgatctcagttaccttttagtcatagttcctgatgaaag

SEQ ID NO: 3395 - DNA, 625 bp, Arabidopsis thaliana columbia
ggtcgactctagcttctcagatcatcgtccggttacagcgatatacatggctgaagtcgaagtgttttctgcgaggaaacttcagcgagcgttgacatttacggatgcagagattgaagacgagggacttgtagccgttctcgtttaaaagaagagatttggtgcttgtttgtttgtttgatcttgcatatgaagtattggcgaaagagacattctctttctacggataggtttttgaatctcatgtcgttatactgatgcatcacactgagaaaacgttcatattcttatagtttttatcttcttgttttgtgtgttggtttactcttgtaaatttagttgatatatataatgaaatcaagaacattttacatccatcaatattgttatcataattattaaaaataaacaaaaagaagagaaaaggcctttttctttatttgattttactgtgaaggcaaaaataattgtaaaaaagataaattgcaccagccgggaattgaacccgggtctgtaccgtggcagggtactatcatgccactagaccactggtgcttcttctattatcatataatactttgtttagaacaagttttactcaatttaactgttttgagagttacaa

SEQ ID NO: 3396 - DNA, 1730 bp, Arabidopsis thaliana
gtcttactttatgcccaacaacagattgctttgcaggtaaaggattctgattcactctatctaaatgatcagtaatgctaaatctgtctcaaactttgttgcagaggcttatgttccaaccaggagtactcccaccaagattgtctgtttgactcaagtggttacagctgatgatcttagagacgatgaagaatatgcagagataatggaggacatgcgacaagaaggtggaaaattcggtaagcaattagattttcttattgtctgttctgacattataccaatagcacattactgaggctcatggtctaaaatgaactttgataaatcattgttgtgtgtgtaggtaacttagtgaatgttgtgattccgaggcctaatccagatcatgacccaacaccaggagttgggaaggttagatttcagtcctcagatacaaatgtctaccaaattcatatataaattgcatactctaatggtaatactaatgcaggttttcttagagtatgcggatgtggatggctcatcaaaggccagatcggggatgaatggaagaaaatttggaggaaaccaagtagtggctgtgtattaccccgaagacaagtatgcccaaggcgactacgaagactgagctatctatcgtcttcttcttaagcttttttttgtttggttctcttaaatgtttcttgcatgttaaggtctctctactctactaaatagagatatctgtttgtctagaatctgactgcgatagtacttatcgagatacaatcaatcaatgtgtgcgttgctaataatagctttttgtgtcattaaacacttttaagtttgtattctttttacatgccaaaataccgaatgttcaaaagctctcatgaaaatccaccactttcactttataattattcaaaattcagtggacaaatgtgaactatagcatgttaagtataaattgttaaagaaggagcatattgtcaaatagcaccagtggtctagtggtagaatagtaccctgccacggtacagacccgggttcgattcccggctggtgcatttatttttttaaatctgtaattatggattggtggcgtaataaaacaattcatgattatagggtaatcattttccatttgatcttttgctccacatgtaatgaaactaattcatctgttaagcgtagagatttttttaccaattcttgttgaataggcccgggaagacaagcacaagtgaagttaatggactttgtacatctaatacaagcccaaaaggaacataaaaattgggtgaaactgtgaaagtgaccaagaggtgcaacttgttgattgattcaaaattacaaatggatgatggaaaacaaataataattaatggggctgtttttcttctttctgcacttttctaaaataagattgggatgtcaaaaaaaaaaaaaaaagaatgtatacttaagagatttttcattttttctttctcttgccatatttttgcctaatataaatactgaagaattaaatgaaattagttgaatttcagcaaaacacatccgttatatcttttttttttggctttttttttggttttatgaaaaactagaaccgtcttaatcctagttaggactttttgatgatgataagactagactttaaattttgaacatcggcgataaaaaagtatttcatgtgcagagtggtactctctactcttcggatgaaaatacagtatatttaa

SEQ ID NO: 3397 - DNA, 666 bp, Arabidopsis thaliana
  unsure (1)..(666): unsure at all n locations
tattctcgagattgtctgcaaagtcagttgggaggcttcgttgcctgtccaagctatggaggtccatgcttggccttccatattttacgaagttattcttgaccaggtcctctgatcatccacgtctcttttttggggtcgaaagaaaaggtgagtggttcttcttctcgtcgcttcagcctcaaaatctttatgagaagccgtttcttgtagtagccgcagattttcatatgaagttctctgaagacatgagccatgacatttatagctatgcttctggtttgatctattttcctaaaatgttgatcgaaaacgagaaatcgggtgcaatacgtgtgatatgtaaccctatcacgggtcagtatgcgatcttacctaaactgattacgctacaagcggcgagaagttttttagggtttgatccgattgacaatcaattcaaggtattgctcgtgaacaacgatatagttaataatgacatggatattctaacattgggaattggagaattgatgtggaggaagatacaatgtgccttaacacatgagccttattatgagcataactgaatatgcatcaatggnggtttgtattacttagctgaactanatgatggacatctgctgtggtaatgtgtttgatgtaggcagagaatttgaattatga

SEQ ID NO: 3398 - DNA, 236 bp, Arabidopsis thaliana columbia
ttttcactgatcatgtactcatcttcactgttctgttcctttctcaagtgaatcagcaacctatggcatgttcgttaagtgtgagttagaatccaggaacaggcatgtcgatagaaacactcaacaactaattgaaatttgaaatcgccactcacctttccaaacaacactttccacacagtactgtgaacgacagacagaattcccagtaaccgtgtctctcttctgtctccctg

SEQ ID NO: 3399 - DNA, 627 bp, Arabidopsis thaliana
tgtttatcacaccatagcggtatgaaccttgtgggtttggccttggtccgcttgctgtaaggttggtcctacaagatcatatccatgaaacaaacatgtttgcaccatgaagtgagcaaaccaacaacaagtgaaactacaaagcttttgcttttgatgtaagcctagagcgcaaaaattcaaaaatatcatctatactagtaaatgaactgcttcgaaccccataacttttaagatcttgaaatagttttctccaaccactagcactgatgaaatgcaaatatatatacaaaagtggtaattgtcactaaattgaagaataaaacaatacctgatagctcgagcttggttaaaagaccagcttaacttaattggtccatctggaataggtccagaaacaggtgcaacagaattactgtaatgaagaactccagtagtagtgagtatctttgatgtaaacctactagagacgacaacgtaataatcttttgcaggctgatcggctgttataaggaccgagtaagattgccaacgtgaacatcaagcgaagagaaaagattctgaatagtgtactcgcttcgacctcaacgacttcatcgtatggttttggattcggaagttgaggga

SEQ ID NO: 3400 - DNA, 526 bp, Arabidopsis thaliana
cattgacttctgtctctatctcaaaatcacatgtttttagttatgtcttctcaccggttcattccaacccaagaatctttttattttgtctgaggtgattgttctgatggaaccgcgtgacatacaaaattatgttctcatatgaattatgatagagtaaaatgtgatagagtttgtcatccttcgaccaaagaatacaaaagaaaattgagatgtatcaattagtgtgcgaggaacctataaatttaatctttggaaacgcctggacatcgaagcaccagtggtctagtggtagaatagtaccctgccacggtacagacccgggttcaattcccggctggtgcaatttttttaacaaaccaacgcccaacatcgtaatgaacctatgtgggctttaacggcccattttgcttttcagtccgtaaacactaggccttttttatgtgttatgttgtccttcctcccaaccacatgattacactccttgagttcaaaaatttctcttatgtttcttttagagattgtt

SEQ ID NO: 3401 - DNA, 533 bp, Arabidopsis thaliana
aatgtagctattagcgaatgtagcccttttttttgaagtgttttaaaagtcttaagatcaatatttatgtgcaagtgtttgatgattactcgatattattcttctaattttaggaaaagaacaagtttcttataattaataaagttaaaaataaattattatacagatagatatccttgatagttttctaaactaaaaataatgtaatacttattacaaaccaaaataatgaattatgttgatgggtttgcattataggtactacttttgcatgggtgcagcagttttactggcggtgacggttcttgtgtggatccaagataacgttgggtggggtctaggtttaggcattccgacagtagctatgttcttatccgttattgcttttgtcggcggttttcaactttaccgtcacttggttcccgcgggtagtccatttacccgcttgatccaagtgggagtcgcggcatttcgcaaaaggaaactgaggatggtttctgatcctctcttctctattttacgacgagattgat

SEQ ID NO: 3402 - DNA, 553 bp, Arabidopsis thaliana
gtcatctcttgtagattttcatatgaacttctctgattttcatatgaacttctctggagacatacgcagaaacgagtgtacatatgtttctggtttcatctatttccctagaaagcggatcaaaaattatttgtgtgatttccgtgtgatatgtaaccctatcacgggacaatatgcgatcttacaactgataacattccacgagaagagaagctttttagggtttgatccgattgacaagcaattcaaggtattgcgcatgaaatataatgatcgtggtattgttgttcaccatattctgacattagaacctggcaaaatgaggtggagaaaaatctgatgtcccttagcccatgaacctttctgggaagagatatgcgccaatggggttttgtattacttagctgaaccaactgatggagggtcttatgtgatatgttgctttgatgttcggtctgagaaattcaaatttattgacgcaaaatgctttggtgattctctattcaattgatcaattataagggtaactaggtgggattagttggaagtatga

SEQ ID NO: 3403 - DNA, 489 bp, Arabidopsis thaliana
tcaatgccagtagcgtctaatgtagtcatatggggatcactgatgtcagcttgtagaatccatggtgagcttgagttaggcaaatttgcagccaaacgtatcctcgagctggagcctgatcatgacggggctcttgtgttaatgtccaatatatacgctagagaacagagatgggaggacgtaaggaacataagacgtgtaatggaggaaaagaatgtgttcaaggagaaaggtcttagccggattgaccaaaacgggaaatcacacgagtttctcatcggtgacaagagacataagcaatcaaatgagatttatgcgaacgtagacgaggttgtaagtaaactgaagctagccggttacgttccagactgtggtagcgttttggtggatgtagaggaggaagaaaagaaggatttggttctatggcatagcgaaaagctcgcgctctgcttcggtctgatgaatgaggaaaaagaagaagagaaagac

SEQ ID NO: 3404 - DNA, 855 bp, Arabidopsis thaliana
tagtaacggtcgccagtgtgctttaaaggctgcgtatggataaatacatcgacatgctgatcccgcgtggtggcgctggtttgcataaactgtgccgtgaacagtcgacaatcccggtgatcacaggtggtataggcgtatgcgatatttacgttgatgaaagtgtagagatcgctgaagcattaaaagtgatcgtcaacgcgaaaactcagcgtccgagcacatgtaatacggttgaaacgttgctggtgaataaaaacatcgccgatagcttcctgcccgcattaagcaaacaaatggcggaaagcggcgtgacattacacgcagatgcagctgcactggcgcagttgcaggcaggccctgcgaaggtggttgctgttaaagccgaagagtatgacgatgagtttctgtcattagatttgaacgtcaaaatcgtcagcgatcttgacgatgccatcgcccatattcgtgaacacggcacacaacactccgatgcgatcctgacccgcgatatgcgcaacgcccagcgttttgttaacgaagtggattcgtccgctgtttacgttaacgcctctacgcgttttaccgacggcggccagtttggtctgggtgcggaagtggcggtaagacacaaaaactccacgcgcgtggcccaatggggctggaagcactgaccacttacaagtggatcggcattggtgattacaccattcgtgcgtaaataaaaccgggtgatgcaaaagtagccatttgattcacaaggccattgacgcatcgccaggttagttttaaccttgtccaccgtgattcacgttcgtgaacatgtcctttctagggccgatatagcctttagag

SEQ ID NO: 3405 - DNA, 803 bp, Arabidopsis thaliana
ggctcgtgcttggtcaaaagaccagcgcaactgaattggtgcttctggaataggtccagaaacaggtccagcagaattactgtaatgaagaacaccagcggtaataaggatcttcgaggtaaacctactagagaccacaatgtgataatcttttgcaggctggtcagctgttataaggaccgagtaagattgaccgacgtgaacatcaagcgaagagaatggagtctgaatagtgtgtgtcccttcgacctcaactaacttcatcttgtggttttggattcggaagttgagagagttttgcaatccaacatttgatatcctcagtctataagtcttacctacagaaaaactcacatcataacttattaacacttacagtcagagaatcaccaataaacaagacaagaaaggtgaaaaagcaaaacctggttcaatgttgagggtggcgccactaccgcgcccattgatgagaattccatccgggaatggaagctttccaccattatcgagttgtgctctcaagtcgtataaggagagattacaatttttaattccaaaattccaacaagcaacaacgtttaagtacagatatacatcatgcatgcagctttccaaatttgttaaaaacacaaacactttgtcccattctctaagtctacccgacaacaaaatataatcattttatcgcctactatttcttcccggttttcttgcgccatacgtaagaggggaatcgtacgttatggttggttttgtacagtcaccgatgagaacggtgtaatcacagcgggggctgggaatgg

SEQ ID NO: 3406 - DNA, 507 bp, Arabidopsis thaliana
tgtcagtagcataaaatgcctcctccactccatccccgtggtgatatcaatatcgacataaagaacacgctgcaaacgagagaggaagagttagagattcagaaacgacataaccatccctagcatatatcaaaacggtgcagtggacaaacctcatgctgcttaaggagctctaggatagctaagacgatatcattgacgtaacagaagccagaggcctcgcacttcttagcgtgatggagaccaccagcccagttgatggcaatatcgcagaggccgtggttaagcttgacagagccaccaacagatcctccagcataggtctggcaaaaggaataaaggccgtcaaagacgggacagtcttcaccaacattgaagcgcttaagttggcgaatctgatcttgctgggtttcaggggtaatgctgcggagaaaagagacatagtcgtcggcgtggaagcggcagagatcacggtcgcgggcagggaagggcttgagaacctgcata

SEQ ID NO: 3407 - DNA, 635 bp, Arabidopsis thaliana columbia
ccgttcctttgtcttcttctccgccgtctgttgcggccgacgatgttagggttccagcaaagcatcttgattctgattcttctcctccgactgcaatcggaagaactatggttttagtaaaacaacgaatttctgcttctgacaattctgcttcttcgtctgcaagtgaagggaccaaggtctctaaaactgaaaattctggtgaggttttgccttttaaagaaattatcgaagctcttcttcgtaacagtggagagaaactcaatgaaagagatgataaagttagctatgttgagattctcaagcaatgtggtttgaaattccctaaatgatcctgattagtaagtattatctttctctgttttagtttgttctttttgtttctgtttcgggattacgcgttcagatctttccttttttgttgatatgaatgcgtcggggtaaaaagagttgggagctttttaatgttctgtagcttcaactacaagtaatgataagtattttgttcgaatgacaaaggctatatcctacaaagatgatttcttgttctactgttattgcattcgatagcattgtctgaggaaatgacgcctttgtgtgttgtcgcaacttgcacgcaaggaattagttatgtg

SEQ ID NO: 3408 - DNA, 448 bp, Arabidopsis thaliana columbia
ttccgtatgagcaagaaatcttgcggtccaagacaaaaccggtttacgtgttaacttgtttaatcagtctcaatctttattttctagttcaaatgtcgagaaccaattttttccaactaaaaagtcaatccataagaatccaagtaaaccctccctgacgacaaaaaaaaaagtaaaccctccctctctatatatttaactcatattcatatctttcaatgcgacacaaaagagtaaacgaacttactacaaatactttttagtacaaagaaacaaagttaaagtgatgattatgaagaattaagtaatctttggagtgattatgcttgccatttttgtggttttcttggactccacaaaagtagaagccacgaggatgttaagaatcagcttcgatagtgatatccggttcgtgttcgagtccttgcagaagggtacggtccctgga

SEQ ID NO: 3409 - DNA, 506 bp, Arabidopsis thaliana
cagttgatcggtgtgcaatatcagataatgttgcgacaacaccgtttaggtaatctacttatttttatatcattggttattttgacttcaatcattatgaaggactttgattttatcatttgaatttacacagagatacatctcggtatagtatgggaagcgaaacacctatgcatccttcacggactccacttcatccttatatgactccaatgcgggactctggaggtttgttttttagatccaatatctgtttatttttaatgttatataacacctcctctgtaatatgttctcaagttccttggtgattttatgtaatttcagctacaccaatccatgatggaatgaggacacccatgcgtgatagagcttggaatccttacacgcctatgagtccacctaggtaagtttgtgttgcgtttctattttcaaaagttgatttcctctttaatctcctcttggttctcttaaatgctgttgtaatttttgcatcaatgtgaggt

SEQ ID NO: 3410 - DNA, 591 bp, Arabidopsis thaliana
ccctgtcaaatacttattgacacaacttgttgaaatacgagcataagcgtaaaattcagcagctttatataacccaacaatctcatcattcctttgactgtgattgctttcaccttcagccattggtatcaattctccatgatgataccaatcagaccgcatcttgtaagcctcgtccattagccttgttatcagatgagcaactacaacactgcctgagtgaccatttatgttacgacaatcaatgcacgcacagacaatcatattaatgtctcccatcgccgcagccacattccggaaaaaaatttgtagatcttgattcatatgcaggatcaactctttaatttcataaagagttaaaaatggaaattaaaaaaaaagagccaaatctcataatttcctagcctaaaaaaaacaacaacttacatgtagaggtgcacccactccttgtcaaccattatacattgtaactgtgttttaaacctttatatagtccataaaaactatttgagatttaataaaatactcttatattaatacctattagcaaatatatgaacaaactcatatatgactctaacacatatataa

SEQ ID NO: 3411 - DNA, 584 bp, Arabidopsis thaliana columbia
ttgcctgctgctgcagaagccgttgaagttcgagtatcgacaactagattttccaaaaactagtgaataaagcgttacgatctagacaatcaaacccttccctttcatctacaccgggaattttctgcttcctcctgagcccaacagtgttcctaccagtttttgtacctttcctgccacgaactacttttgctttgccacctctcttgggttttttcactgcaacaacaacctcagatgggatacaccccccaccaaacattttattcgaaaatgccttcccttcttccgccatcttcaccaaattctccaccctaacgtcatcttcatcatctgaccaagataagtcttccgatggattcatccgggaatcgggatatatgataggatcaacataagcctgcagccaaataggatgaaccaacggcaaaaaaaattagcagcgcgttaaccacatgcttatcagctaagtatatcggtatggcgagtacacaaataataaaaaacatacacggtatgcaaaacattatcgcgatacgaggtcaccgagaattaaacttgttatcaacactaagcatatatag

SEQ ID NO: 3412 - DNA, 459 bp, Arabidopsis thaliana
  unsure (1)..(459): unsure at all n locations
nnnnnnnnnnnnnnnnnnnnnctaaatcagaaactgttctaaaatagataacaaatatatagtgatatttactatgagaacctgtgaccaagattatctaaattgacatttttgtcgacaccagagagagggataaactagaaacttaggagacaataactgtggcaaaagaaaactctgaaacttttgaagctatttacaaaccttatttttccgctttgagtcgaggaactgtgtaacagccatagctttctccacatctgttgtatgttgcataacctgataaatgcccaagagtttcagaagactcattttcttaattcaagtagaaacaagaaacgcaatatagtagtgtagaaaaccacaaagtcacaaacctttgttgctgtcttcttcataattgacttgtatacatctctatcaattttctttgctctatacggggccataagcaacgat

SEQ ID NO: 3413 - DNA, 1055 bp, Arabidopsis thaliana
taaagccttgatttttaattatttgtgtcgcctacattttaataaatcaacataataaaatccttgtaagaattttacaatatcggcaaataaaccatactgcgtcaaaatctaattatatacttataaaattctctatactttgaaaaattgaataattctaaatagatacactattaggcactcctctacacgtaacacccggttcagaactcggagccatcaactcatacggtaacactcccgcgccacagcgattcctacggctaggatcacgattcctcttgtcaatctccttctctatccgtccgatttccgccgagaatccataaaacgcatctacgatctcagcatctccagtccatatcgacggttgttgtctctctccgatatactcctcatccggcgaatgtgtcgacaatgtatcaaccaccgccataaacttcgtcgtttgcaataaactcggcatcgacgagaaaaaatacttttgaggatcttcgataaaactcgtgaactcgggatctgactcgtcgggaatcaaccgccgcattagcggtggtcggttcgggacgtagccaccgtaaggatattgtccgaagttgagtgccgcgtgttgtgctgaggcgagccagatgatggtggtgatgacggagacgagatcttcgacggtggaaagcttcggccaccactcggcgtcgcggtgatcagcgtgacctacgttgattgactcagagtaccaggcttggagctcagtatcggtttggattaggttcgagtttgcgtaataacgttccacgtaggttcggacccaagtttggattgcggaccataataagagaccgtcgttggcgtatgggtagtcttcaacaagtaatttaagcccatgtggttgtgttgggtctggaacagccatccccctaaaaatgaaataaaaaatttaacaaaaaaaattgttagattcaaattgtatatgaaaagaagaagaaaaaaaaatccaaatttaaccagacaacaaaatatctatctcactagtcactacagggataccctagagt

SEQ ID NO: 3414 - DNA, 997 bp, Arabidopsis thaliana
ttttgagatcttcactcttctcctttaaaagaactgtcaacatgtacctagaaaaatcgtcaataagaacaaatacacacctatttcctgccatggtgcttggttttatggggccaaaaaggtctctatgaacaagttcaagaatcttggtggctcgatatgctgtaccttgagtaaatatatatcttgcttgttttccaagcaaacacgagccacaaatctctttttcaatgttaacactctggattccttgaacaattttgttttgaatcattgatttcattgtgtcaaggtttatatgtcttaaccttgtgtgccatttgtttgactcacttatcactgcgagatgcgaacaagtagtgtcccttagtccatacaaactttagacagtcggttttgagaatgatgcgctttgacgatcaacttcccttcactggtgtgcattgttagatgctctcctttcatccttatattggaagaagaagagagataaatattattttttttaacaagaagaagatgtggcaatgatatcatcaaagacgtgacatctacgtcaccaacattattaaggacgtgacatccatgtcagcattaatgtatgattttgcaagattagagaagttaatgtatgaattttgaattatttaaaacgttaggcatatattagcacagagaaaactgttaggtataaattgaacactgatactttggttggatataaaaaagccgactttccgctgatgatgttactccgcaagtttggaataaagtacatgtcgctcataactcgagattctccgttcatgtcaatgaatgatattgaccctttttctttgatgtctatgcataggtcgtcaccaaaccttactttttctttgattgagttgtgaatcatcaaaaaatacatttggtcaccggtcatgtgattacttaccccgttatcaagataccaaatgttctcctcatcattgtttgtttcataatcacttgtttt

SEQ ID NO: 3415 - DNA, 544 bp, Arabidopsis thaliana
  unsure (1)..(544): unsure at all n locations
ctaaaggggatcagcatgtcgatgtatttatccatacgcagcatttcactgaccagcgcacggtcaggattatcaatcgcctgcacggcacccgccggtaagccgcaggatttcagggcgtcctgaatcaccgccaccgttgcagcgttagtgcgacacgtttctttgccaccgcgcaggatcaccgcattaccggttttcaggcacagcgaaganncatcaaccgtcacgttcgggcgcgcttcataaatcacgccaataacccccagcggtacgcgacgacgctcaagacgcaggccgctgtccagtacgccgccatcgattacctgccccaccggatcggcgaggttgcacacctgacgtacatcgtcggcaatgcctttcagccgtgcgggcgtcagtgccagacggtcaagcatcgcttcgctaaggccattggctcgcgcgtcacaacatcctgggcgttacgttgaggatgatttcgctttgtgcttccagttcatcggcgattttttccacacgcgatttttttcgcgctggagag

SEQ ID NO: 3416 - DNA, 723 bp, Arabidopsis thaliana
ccggagagatgccgccgaggaagttcactgcagcgagtggggcgacgaccacgaccgtttcactgccacctcttcgtccgacggagatggggaggtcgaaactcacgtttccagatccggtattgaagaagagcctgtgaaacaaccacatcaagacccaaatggcaaagagcactctgaccatgttaccacttcttccgactgctacaagaccaaattggtggtaaggcacaagaatttgaaggagatccttgacgccgttcaagactacttcgacaaggctgcctccgctggggaccaggtctccgccatgcttgagatcggccgggctgagctcgaccgcagcttcagcaagctgaggagtaagtctcacactctactaactagatgtagatgatgatgcattgaaacccatctcattctcttactctctctatatttgttgtctgcagagacggtgtatcattcaagcagtgtgttcagcaacttgagcgcaacgtggacctcaaaacccccattggcagtcaaatacaagctcgatgcatctaccctgaatgatgaacaaggcggcctcaagagcctctgctccactctagaccgactcctcgcttgggaaaagaagctttatgaggatgtcaaggtacattccctgtttttgttttcggttttcggcttaccaacggttacgaaataaacttgtgaattcgaatttaggcaagagaa

SEQ ID NO: 3417 - DNA, 1034 bp, Arabidopsis thaliana
atactatattaaagagaacatgaagtaaacagtaccccaactctgatggctccattctttttaaattcccaatccactatgtaatcatagtttccaagtgtggccaccattctaaccactaaacttatttcagcttccccacttgttatctgcaaaaattaattaaagtaactaatcaaagttcctagaaacgtaaacaaatcatttagtaatctgtattttgtaagtataccacttgtcctggaacattaatctcggtgtgtctaaaagaagcaccgtaaccgtttttctcgaatacacacatcacattggtcatcttctgagctgtcccatctggtccggccacgtgcccatctaaaaacgcagcgttttgcgggcagtcaatgagtggctgcagattcacggcggatctcccgaaaccatactctctagtgtccatgaacgtacggtagtccattcgtaggttgggccatgtacggaacaaaagtctctgacacgtgccctctatacatcactcgtcgaaaccttttggttctcgggtcaagaaccgaagccgtcgatatagttactcccgctcttgcgggaaatccgacgtggaatttccagttagcccacttgactctattgccgagtatcttgaagcctgtgtcggagagttgcaaaagaacgggaagggtctgtgtttagtcctaaagtcgttaccttctttatcagggataggctttcggaatctgtcggagtacttgatgacttgcattgagtcgacgtctatagttacggtgattccttcgatgggtcttgtgaagacgttgactgatccgtctctgtaaaagcaagaggctttgagttcacgtctcgtggtggtttctccgtaccaaccaacggtgaaagggatgcaagaaacctcggagatgtttagggatcgatcgagaatcgatttcttgaaaggtgggtaagttagaggaagcttgcttgctttgaaaagctctatgaatgtgaatgaggggaaccatggcctgtgtagatcgggagga

SEQ ID NO: 3418 - DNA, 935 bp, Arabidopsis thaliana
aaagcatgatttggtgaaatatagagaataaataacaattaaatgaacactagcgttacataacgtagaacacaataactaaacagatggcagtttcaactattgcatcccactcggtcaaaagaagccttagtaatgcaccggcgttggaagatcgttacaaggaggtgaaggatacatatatggttgcggtgacggtggtggcggaggatacacatatggtggtgatggcggtggaggatacacatatggtggcggtggcggtggatacacgtatggtggaggtgatggaggtggtggcggcggcgaaggatacacatatggtggcggtggtggaggtggaggtggaggtggaggtggaggtggaggtggaggtggaggtggaggtggaggtggaggtggaggtggaggtggaggtggaggaggaggaggaggaggcggtggactaggtggagagcagccaaaggatgcacaatcaataggataagaagaaaaggatttgcattcagcgagagaccgttgcattggccttgaaggtaaacaatttctacgatcatcaaactcttgaagcctcaaacaagccggtggtcaccggagaagaagttatacgagtaagtgaagttctcgagccttggtaatcggcagatactctccggaatgtagccggagaatttgttatgcgcaatgtttaactgctctaaactcttcatatcacctatagtctccggcaacgaacccaccaagttgttgtaactcacgtcgaaaaccgtcaactggttaagcaaaccgatttcccggtttaaacaaccggttagttgtgagttcgtgataatgatttcgtgtaatgttttcccaattttgtagacacttggagggtcacaagatccttggagatcgttgttggccaagacagacagacacggagagtttcgatg

SEQ ID NO: 3419 - DNA, 641 bp, Arabidopsis thaliana
gttggacaagatgagatgaagctatgccttttgttaaatgtgattgacccgaagataggtggtgtgatgataatgggagatagaggaactggtaaatcaacaactgttagatctttagttgatttgcttcctgagatcactgttgtttctggtgatccgtataactcagacccgagagatcctgagtgtatgggaaaggaagtaagagagaaagttcaaaagggagaagaattgtctgttattgaaaccaaaatcaatatggttgatcttcctttgggtgctactgaagatagagtttgtggaactattgatatcgaaaaggctttaaccgaaggtgttaaggcgtttgagcctggactactagctaaagctaatagagggattctttatgttgatgaagttaatcttttggatgatcatttagttgatgttcttcttgattcagctgcatctggttggaacactgttgaaagagaagggatatcgatttctcatcctgctcggtttatcctcattggttcaggaaatcctgaagaaggagagcttagaccacagcttcttgacaggtttggtatgcacgcgcaagtagggacggttagagacgccgagctgagagttaagattgttgaagaacgagctcg

SEQ ID NO: 3420 - DNA, 606 bp, Arabidopsis thaliana columbia
ctctattacatgtaaaacatatgttatacggacgatcatttgattattttgttacccttaatatataggctattgtttttttaatatatgatacaccttgtaatgaaaatatcaatctgtggtgtatcgcgggtcaatatctagttaagtgtaaaaatgatatataattaaacttaaatacaagtaaactaaatcaaaatactaacgaatctaaaccataactaaaccaactatatacactctaatatgatggtggagtcggatgagatgccgagaacttcagcccacacttgcttcctcacctttgatctcctcggctgattctcaagggagctaccgcttccactgccacttccaccacctcctccgttactactccgtataagctccgataaagttttaacatcaactaccaccgtttccgccgcttgtatagcgtcgctatgcgccctctgaagctctgcgtaacgcatacaatggaagttgtactagcgacgagcttcgcaaccaacgcttttaaaagggagtctcgtcgtcatcttcatcgtcgaaatttggtttctgtgacttaaacgtaccgactccgactccattgttggaggagac

SEQ ID NO: 3421 - DNA, 539 bp, Arabidopsis thaliana columbia
cacgcttggtgaggatgtaaatgtttcaccaaattcaaataaataaaacatcaatcgataaatatgtttagttaaatataaaattactaatcaagattatgctaaatctctttggactatacttcgtacggcacgcttaatactatggaattgatcaacatctaaactaatcatacatatgtacatagagatggagtacttatgaatcttacatcaaattaacgagacaatctaaaagaaaatgaaaaatatatcaaataatgccgtgtagttgttcttgttgctgcctaagatggtgatgatgatgtagttgttgttgttgctgcctcaccttgcgaagaagaagaggacccgttagatgaaggagacatatcgtcgccagcaggaatatcctgaagcgccgccagaatccgacggatgctgactgacctcatcggtcggaaactgtaagcccttttcaacgaattcgatctagcaaaaaccctcgacgatttcaagaggatgagatacaccaaaccttgaactagggcaaataaggc

SEQ ID NO: 3422 - DNA, 795 bp, Arabidopsis thaliana
ttttcgattcaagttgcaagtattttacaagtaacaagcaatatcaaattatttagcaagtaataagccaaatcaagttatttagcaaataatcatattttatatgttataacaagtccaaaattcatttacttgaaaggggcaaaacgggtcagaaggccatgcctaggtatttttgtgctcggtgattgatagtatagtcgtgtagataatttatttaaaggcaatagtatacataatttgttataaggggatatatatatatatgtatctatatattggttgttatatagagtatactataaataagattaattataaaattaaatagtataatatttacatgtgcataacataagttattacctagtataatttaaatattcatacatgtataaaattaaaattttccaaaaatatgtgataacttgacatgtaaataacatcatataaatgtttttaataattaatatagcatatatgaattaatgcttaacaaaatcattgggctgggcctaaagaagtgcactacgaggagtccggttcaaaagacacgacttgacccgaccgatccgacccgggtaagaggttagcccaccacgcaacgtccgtcggggaagataccacgcgacggaaacgacgaacacgaacagcggaaatcgtcaattcaatctctcagatcagttttggaatcacatataacaatgtcggcggttctcacagccggcggaggcttaactgccggggatcgcagcattattacggcgattaacaccggcgcttcgagtctctcat

SEQ ID NO: 3423 - DNA, 589 bp, Arabidopsis thaliana
tgtatattccattgctgagttttgcataactgttcaaaactaagtgtaccatgttgtcaaagagactctgagcttttccggttagtatgtaacggattccgaatttcattatgtctaatggaaaaaagaagatgatgttgtagagccaaataactccagcccaactccatcctattccctcgattctcgcagtttcccaacttgcgtataccgcgagtgttgttgcaatctacaaggtcaagtttatgagtcaatgaagacttctttataatgaaaaataaaaaagaagaaacagaatcatgtttttctatatacttacagtttgtactgtcacgaaagagagaaacaataactctccaggtcgttcgacaaaaaaccagcttcttgattgaataacgaagaaaagagcttggctcataatactcacttgtaagtataaagcacacatcatctctgcttcattgcctctcaagtctctcacgtggaacgttctctatataaaaaacaaaacaagaggttataactttatagtatgcttgtgttgttatgggagatttgaagagagatttgtctatacataccgggaaga

SEQ ID NO: 3424 - DNA, 903 bp, Arabidopsis thaliana
ttctctgtttctcagattaagtttcgtgtgtcaaacagatcaaaacccaaacaatggttattcctctgtttttttcagaatttttcaatcgatgttattttatagaaattgattcatgggtctgtgttattttcaggtgagttccattgtaaaaatggagaacgacgacgtaatgactccgccatggctaacaccaatgcttcgagctgattacttcgtgacttgttcgattcattcacaatcgagtaaaagtgaatgtaatctgttttgtttggattgttcaggcaatgccttttgttcttcttgtctcgctcatcacagaacccatcgtgttatccaggtttggttttcaatttttcattacccatctatctctcaggaattttgtcgaacacgtttgtttaatgaacctaattctatgttttttttttgttgttgttacagattcgacgatcgtcgtatcataatgtggtgagagtgagtgagattcaaaaacatattgatatctcttgtattcagacttatgttatcaatagtgctaagatcttcttcttaaacgcgagacctcaatgtcgaactggtaaaagcttaaacaaaacatgtcagatctgttctcgtaaccttctcgattcgttcctgttctgttctcttgcttgtaaggtaaatgctgcaatgttgtggtctttcttcaaactcaagtttgattatataggtttcttgattgtttcttattggtctaaaatagcttgaaggtgtgaagaatggagaggatccaaacctgactttatttcatagtggaaagagtgatgactcgtcgaagatcatcaataccgggatttgtagccgtttgatcgacgggatctcgattgcgggttgcgaccacgcagcgaaaccgcgggtgtg

SEQ ID NO: 3425 - DNA, 565 bp, Arabidopsis thaliana
tgattgattataaactctcttgaatgattgattcataaactttgaccttgtagattgcaacggctattgcggtttacggtaattgggaatttgcaagaatcaaaggaataggatggggatgggctggagtaatctggctttacagtattgtcttctactttccattagacataatgaaattcgcaatccgttacatactagccggaacagcctggaagaatatcattgacaacagggtacgttttgctttcttcttagttcttcttctgaaatgtgattttaagacttaaacaaaatctctctgtgtctttgaaaaaacagactgcgtttaccactaagcaaaactatggaatagaggagagggaagcacaatgggctcatgcacaaaggactttacacggtcttcagaacactgaaacagccaacgttgtcccggagagaggtggttcagagaactgtctgagattgcaaatcaagccaagagacgagctgagatcgcaaggtaaatgatttgtaaaaagtaatttcggtttcttgtgagagaagttaacgttagggtttttgt

SEQ ID NO: 3426 - DNA, 617 bp, Arabidopsis thaliana
atctacttgcaaaacctggaacgttctatccaaacatcggagctttgcaaataagcacatcggcaatgtaaccgcatcagggaaaagagatttgataatgattaaagattgtaaggtttattcaattggcgtcaatctccatggtattcagaacaacaacaacattattgatctatctataaagaataaaggtattcttcacctagaaaatttagatctaatattcaaggaaatattcaatgtctttcactgcaacggtttattgttgttatacggaagcatcactgatgatagtattaggcttgtggtttgtaacccgtattgggggaaacgtgaatgggtcaaacgcataaataattttgcaagttttgacaaacttgctttcggatacgacaaatcttgtggttgccacaaaatcttaagggttttcgatagttaccctaatagacttgaaatctacaatttgaggtctaattcacggatggtttctagtttccctcttaaatgggatatagcgtttatgcaagatggcgtgtctttgaagggaaatcttactggtatgcaaagatagaagatcagaagattgcatttaatatctttgaattactagagagaga

SEQ ID NO: 3427 - DNA, 597 bp, Arabidopsis thaliana columbia
tgtgcatcaatggtattttgtattatggagcttttattgacacaaattctaactgaacctgcaatcatgagttttgatgttaggtctgaaaagtttcttcttatcaagggactcgtcaatgccggtgttaactttcttacttcttaagagctaagaagatcttatgaggggcagctagctgtacttttttttgaaaattgagttatttgtatgtttgccttgtgggttttagaagatgttgtgaatgaggaatggtcatacatgagttttgatttctctagtttagctgggttgacaagagacttggaacttcgactgtttagtgcagccaacgcatgaaaagttgtttacgcaccatttagtgtgtatgcattgacatatcatgttgtttattatgatccacaaaatgagtttacttttgaaaatttgagagagaaagaattatagaaaaacttgttcctaaaaactctcaacctagattgaataagtattattttccagttttagcatcaacacacttacaaattgatacatcttaggtggataagaaccattcagatagtcaccagaatgtcacacgaattttttaagaatgaa

SEQ ID NO: 3428 - DNA, 837 bp, Arabidopsis thaliana
ggcttttgagtagattctaactttagattcattaaagtatttactaaagagcaatagtcataatattgagagaattgttttgatggacaataaaagctgaaagttaaatcctaagcatataaagaaagaatttgcatactagcaacaagacatgctaaacattgagggatcacaatacgtagttccttccttggaccggtatcgggatgtaacatctagtcatcataagctgttgctgatgctgctgctgctctagttgatattgctgatcatcagctcttcttccagtactctcctttctactattgaccaaatcgaaaatcaacttagtgaagacacgagccgtcaattcactgtctgagccagcgtgatgagcttttccaacacgtttcatctgcaacacatcagctattctctgtagtccgaattggctacttagtccgctgcatgattcagcgattttctttacgtcaaaaacaaactttcccaaaagctgctggacggtctcgtgaaactcttccttagtctccggtaacggtttccctcccgttaagcctttaacgagataagcattgtcgtaagagccttgaaaattcacccaagttatctttccgtccttctccgtgagaatctgagaaaagtctctaaagaattcatcgattccaataccttcctctctgatcttgtccagattgagaccattgcttttcagaaacgcaatggacttatcgtttttgaagcacttatgttcgtcgaaatctgacaagtttatttcccaggttttagcgaatcctcttctgtcgaatagcgtgaaacctaactggatgagatgggtgt

SEQ ID NO: 3429 - DNA, 1084 bp, Arabidopsis thaliana
tgaagatttgaaggagattgcagagcggatgattcgcgctggttatgagaaggagtgtgttcaggtttatagttcggttaggcgtgatgctttggatgattgtttgatgattcttggtgttgagaagctgagtatagaagaagttcagaagattgattggaagtctatggatgagaagatgaagaagtggattcaagctgtgaagattactgttagggttcttcttgttggtgagaaaaagatatgtgatgagatctttagcagttcggagtcgagtaaagaggtttgctttaacgagacaactaaaagctgtgtgatgcagttgttgaatttcggagaggctgtggcgattggtagaagatcatcagagaagttgtttaggattctggacatgtatgatgcgttggctaatgtgttgcagactttagaggtgatggtcactgactgttttgtgtgtaatgagaccaagggggtgttggaagcactgggtgatgctgcgagggggacttttgttgagtttgagaataatgttcggaatgagacatcaaagagaccgacgacaaatggtgaggttcatccaatgatacgttatgtgatgaattacatgaaattgattgtggattatgcggtgaccttaaattcgcttctggagagtaatgagtcaagtggcgtatctggtgatgatagtacagaagagatgtctcctcttgcgaaaagaatattggggttgattacgtcgttggaatcaaatcttgaagataaatcaaagttgtatgaagatggtgggctgcaacatgtgttcatgatgaacaacatttactacatagttcagaaggtgaaggattctgagcttggtaaactcttgggtgatgattgggttagaaaacgaagagggcagatacgtcaatatgctaccggttacctcagggcttcctggagcagggtgctatctgctttgagggacgaaagtatgggtggaagttcaagtggtagtccgagttatggacaaagaagcaacaattcttccaagatggcgttaaaagagagattcagaggttttaatgccagctttgaagagttatca

SEQ ID NO: 3430 - DNA, 658 bp, Arabidopsis thaliana columbia
cgtggacaaggaacaggtgaaagctgctataaaggctcagcaagaacatcaaattgataatgcaagttacccgttcccatccgtaattagatatactaatctgacttgagtgtgttaccgcttacgtatatgtctctgttccaggcgctgttagcagaagggagattttactctgaccttgagcttacggaaaaggaaatagagcggtcggtaatggaagcttctcgtgctgagtatcttatggaatggtctaagccacgaattggtccaaaggaatcatccacctcgaatgctgagacatcatcttctggagctagtaagtatttttttttttttttgaatctgttcacctagaatatacttgaaacaaagcattttgaggctttttaaattttgaagcaggaccttcaggcagcgattcgaaaccagcagaggcagtaaaagaaaagacggtgctgagcagcagtatcgagatggtattgtcgatgggatttagctacgcacaggccatggaagcttatagcatttttggggatgacgttgactctatggtctgttatgtactggagacgagctgtggcggcaacaaccgacgcaaaggcaaacccacggaatagagaatgtaacatgaattgctctgtattaatagtatatgata

SEQ ID NO: 3431 - DNA, 950 bp, Arabidopsis thaliana
ccccatggtataatgggctgcttatcagcatatttaatgtccttggaaacctgaattatgaaaaattcaccaaggattgagaaagaaaggtcatagagttcaagacagcatatgacaagaaagaggatacgatacacaccttaaacgaaccaaaagtcacaccctttttcctattcatcaactgggcatacatgagcttatcatatgccttctcaagctatcaaaaggtaaaacagagacgtgttaacaagaaaaaaaaaataaaaaaatcacttacaggactccaaagaaagagagaggtaacgtaacttactagagcagcagtggcttcatcaccgctcctctgagcatctttaagtttccttccataagtttgcttgatcttgtcaaatccctctatagggttaacaccaagaacctgagaaggtacacacactcatgtcatgagaaatacacaacgaccaacaaaacaagtcctttatagggctctaacgatcaattacctcatacggattaaagtcagcatcagactgtggattaccagccgcagacgaagcagcacgtatcacaatcctgctctgtaacacctttccgaggggaagcctgagaatttcaatcatcctcattacaatgataacgtgtaccaaatggtctgataagcacaacaatggaactctcttaagtgcaattgaaagttgtaaactttataggcaacagtaagaagctcatccacgaattaagccgtcggaattcaattgacaatgtttatgaaggaagaagataacggttacccacaaaatccgtaagtttacacaacaaaaagaactatcaaacgatgattcttcgactttaaagccaccgaagagaagtggaaaacaaaaaagcagcatcaagagaaagtacctgacaaaagaaggcgatttgggagcgcgaagagagttcctgagaga

SEQ ID NO: 3432 - DNA, 671 bp, Arabidopsis thaliana
tggataaacaccatctttaggatgaagatattgaacctcaccgttagaaacactctgtaaaactggtaagtgatcttgtacttggatctaagccttgtccccaaagctaaacactgctctttcctcgctagcttcagaagattcggaccttctctcatgatcgctgctcctcctgtcggcatctcaaagatctgttctttcggtgagttccacgtgataacgtagaactcttccacttgcgctttacgtagaagaccaccggtgcttccagcgaagatcggagacggtgtgtttgggtctagctgcggtggcgtgaatcccacgggagcttctttcgtggcgggggctgcagcagcggcggcggaggaatctgttttctcggcgcggattgcggttttggtgaaggagagggatttgggacggtgggttgttgagaaaaagtggagtttcttgacgccggaggttgcggcggttgttatggcggagttgaagatcccggcggcttgagttgccattgtttttttttctctgttctctaatgagcaaattgcttattggtatgttttgatgagaagagaaaagagataatattgcgaaatgagaagctagagtttgttggattaagtggataaggtaaccaataggattgaccattagattttctcttacca

SEQ ID NO: 3433 - DNA, 1029 bp, Arabidopsis thaliana
taatgataaattctttttgttgcagagctttagcatcactttaatcggcggttaacaattgataattccaattcacaattcattataatctggtaaggattttgggcaatttcattagaattgtttattgaaaatgattttcttgagcaagtaaagcttttcaattaaggatttttcagtaaggaggaataatgattctggtaattcagattatggtggccaattagggatgaatttattttggaaaaaaattcccgcctttctttgagttttaatattgattttggtgttgtgttctcacagatttaatcaattttcaggattattcggtgatagatttgttatgattttagtttgtcaatctcacaaggcacctaagatcctaagttatttgcttatgcaaccttgttttttctgtgattaggaatggcgtcttctagtcatacccgcagttatccgctttgcttgtatgaagaagaaaaatcatcgttgcaaaaaaggagtatggcccacagctgctatgtttctcaaattgggaagatcaaagacggattaggtgcagatgtgtgggatgagttgaagaaaactacacttggtctttttataaagtttactgaaagtgactttatatgggctacccagacagttcatttcttcctcacgaatcagttgcgagtagacaacatgcatgagatgtggtgtttgattgatcgcaggccaataagattttctctctacgagtttgagaacataacgggcctcaattgcgatatgtttgacgagtctgacactggtgaaactgattacaaagatttttggaatgaaatgggggtagcaatgtctgttggtccattgtttacagagttggaacgtgtctttgagattagcaagacatggagtttggagaagaggatgatggttggtagattatgtttacaatatgtgggagtacatgggattcatcacggttctagagtcccgttgtcgagtgctaaaagagtgcttgatcctgttgcttttgagaagtat

SEQ ID NO: 3434 - DNA, 777 bp, Arabidopsis thaliana
tgtattttcaccattcagcttcttcaataggcaaatcacttggcttttcaacaatatccaaaccattaaccaccacaaagcgaactcgtttctcttcatgtattaccaattctggaaatcttgtccttgtttcaactgaagttgccagttctcttctcctgtacatgcaagtacctgggacaatcacacatatcaaactagtgctcaaaaatatcacttttgcaacacatcagagcagatacaaaatacctttcttaggaaacttcttagttaatttcctatacaagccaccagcagcttcaagagctactccaatagtcttatcccttattccattcaatgaagcaagcctcacatttgcttcaccaactaaagtctcatacaaatttgcaatatacatcaacggtaacgcaaaactcggatcaccttcatatcgcgtatcatccgacttcctcttcactttactattactatcacgtcctcctgaatccacatcatgatcacgtttgctctcacagacttcaatcacatgttggctaataaagtagtccaatatgatttgcagaaacctccctcttgctgcttcaatcggtgaaacatctaaaacacaataagaagatgataacgaatcaagaaactcagtgcaagagccaaatccagtactgagaatgatgatccttattataccttcaatgtttaacataatgtaagcagatcctttgttctccatgttagatccacttcttctactccgatttgcatagagtttctgtatga

SEQ ID NO: 3435 - DNA, 515 bp, Arabidopsis thaliana
gtttcatcaatcttactcatgctgaaggatgttctcaggggacttttcttcctctgaactcttaacgcgcggaaacctcgttttcttcagtatctccatgacatcagagtttctctttagctcatcgccttctttttgtcccgaagtcaagtgcgtacaaacgaagcaaaagcttgtttgatggagcaacatgcttattgagattgatccctacaaataacaatagaggcaaaagcattataataacaaagtggctctaactcataggacagaacattatataatgaagaacaaagtctaaccttatttccaagataacccatcagtcccctgccaacacaagatactttcatgttcttgacgtgttctcttagctcacttttcacccaaatggttaagaagacacccaccgatttgtttgctagcaactaaacaatactgcgaagagttccatgggatcctatatccattctcgtttgctgcagaacctggtgagtacaagacagtgcttggag

SEQ ID NO: 3436 - DNA, 526 bp, Arabidopsis thaliana
tgtctttagtttcctcttgagacgaagactcttcgttatcctttgtctcggtttccttttcttcggttttctcttgggaagaagactcttctttctcctttgtctcgtcttctttttctttagtttcctctaggaacgaagactctattttctcagtttccttgtcttcgtttttctcttgagaagaagactctactttctcctttgcttcggtttctttgtccatagtttcctcttgcgatgaagactcttctttctcctttgtctcagtttctctgtctttactttcctcttgagacgaagattcttccttatcctttgtctcactttccttgcctttactctcctcttgagatgacacttcagaagtttcttgagaacctccgtctccagaacccgtggatttaccggtcacagaggactcaccgttagaatcattgaactccttctccaacaactcattcttctccatagattcacctcagattttattcctccaaggaatccgattcatgacctgaagacg

SEQ ID NO: 3437 - DNA, 556 bp, Arabidopsis thaliana
  unsure (1)..(556): unsure at all n locations
tccagaactctttgtaatcagtttcaccagtgtcagaatcgtcaaatatatcgcaattgaggcccgttatgttctcaaactcgtagagcgaaaatcttattggcctgcgatcaatcaaacaccacatctcatgcatgttgtcgactcgcaactgattcgtgaggaagaaatgaactttctgggcaacccatataaatccactttcagtaaactttagaaaaagaccaagtgtagttttcttcatcatcccacacatctgcacctaatccatctttgatctttccaatttgagaaacatagcagctgtgggtcatactccttttttgcaacggtgattttcctacttcatacaagcgacgagantaactgcggtatgactagaagacgccattcctaatcacaaaaaaagacaaggttgcataagcaaataacttaggatcttaggtgccttgtgagattggcaaactaaaatcataacaaatctgtcaaagaataatccagaaaattgattaaatctgtgagacacaacacaaaataaatatcaaaactcaaaaaa

SEQ ID NO: 3438 - DNA, 538 bp, Arabidopsis thaliana
gttctctagtaatgccctccagtgtttgcatctcgacaagtgcttttgcggatcggtaagagagtgctattcggtagttcagatccccgagccatattacccgactaaatcaaatggaaacaaagacaaatgagaaatgtaacaaatcatgaatcttaagcaaatgattcgattcttgtcatttcttgatgttcggtcttactcatgctgaaggatattctcaggggacttctcgtccgcagaactctggactcgaggaaaccttgttttcttgagtatctccatgacatcggagtttctccttagctcatcaccttctttttgtcccgaggtcaaatgggtgcacacaaagcagaagcttgtttgatgaagcaacatactaattgagattgatcctacaagaaccacagaagcacattatagcaatgcactaactaaccaactaagtcaagcggtaacaaacataagattttttaccttatttccgagatacccattaatcctctccaacacaagatactttcatgttcttgacgtg

SEQ ID NO: 3439 - DNA, 1366 bp, Arabidopsis thaliana
gtactataaaaagatatcgcaaatcttttttaacacgtatccatgactaatatctgtttggtattaaaatttgttcacctcttttttttgtaggaagaaaaacgaaacatgcaatcattttcgacctatcaaagaagtaaataaccaattaacacacacaataccacaggagaagcttgagatcttcaaatcaatggaaaattgggcagaacaaaaactactaccttatctcaaaccggtagaagattcatggcaaccacaagacttcttacctgcgccagagaacgacgacgaattctacgaccgagtaaaagagatcagagaaagaacaaaagagatacctgacgattactttgtagttcttgtgggagatatgatcacagaagaagcacttccaacgtatcaaacgacgttaaacacactagacggtgttaaggatgaaaccggtgggagtttatcgccgtgggctgtgtggattagagcctggacggcggaggaaaaccgtcacggtgacttactcaacaagtatctttatctaactggtcgtgttgatatgcgacatgttgagaagactatacaatatcttattggttctggtatggtaagtatttcacatttatcgttactattgatttggttacattattaatattttttttggcaacgttacgttttaggattcgaaatttgagaacaatccatacaatggattcatctacacatcattccaagagcgagcaacattcatctctcacggcaacacggctaggctagccacaacatacggcgatgttaccctcgcgaagatctgcggcacaatcgctgccgacgagaagcgacacgagacggcgtacacgaagatagtggagaagctattcgagatcgaccctgacggatctgttcaggcgttagcgagtatgatgaagaaacggatcacaatgccggctcatcttatgcacgacggaagagataacgatttgtttgatcattacgccgccgtggcgcagcggattggagtttacacggcggcggattacgctgggatacttgagtttctgttgcggcggtggaaggtggagagtttgggattggggttatcaggagaaggaaggagagcacaggagtacttgtgcaccttgccgcagaggatcaagaggttagaggaaagagctaatgatagggtcaaacttgtgtcaaaaccttctgtttcgtttagctgggtttttggtagagatgtgaaactatagatagatatttaaaataacaaacaaacaaaaaaaaaccagacaaatataaataaataaattatgtttgtgatcaggttgcaagttgtcacttgtgaatgtgagtaaccaaactatatagt

SEQ ID NO: 3440 - DNA, 593 bp, Arabidopsis thaliana
tgcagttgcaagaaaaatatctaaggtttggttgtcgattgctatcagaaatgctataaatatcacatctagggttagggttaacaaccgaggtcctcttgtaattgttttgatctttcactccctaactatttcgagccgtagaaattaaagtaaaagaacaaaaactttattatacatttttctcttcctctttaatatatatacattattacaagtttagatttcataaaaaaaagtcaagaagaagaaagagctgagacgagaattgaagtgagaaagcatgaggaagcgtcaggtggtgttgaggagagcctcgccagaggaaccttctagaagctcgtcgacggcttcgtctctgacagtgagaactgtgaggtacggagaatgtcagaagaaccacgctgcggcggtgggaggttacgctgttgacggctgccgtgagttcatggcaagccgaggagaggaaggtaccgtggcagcgctaacgtgcgccgctgtggctgccatcgcagtttccatcggagagaaatagaaaccgaggttgtttgcgactgtaattcacctccttctactggaaattagataagaaa

SEQ ID NO: 3441 - DNA, 1162 bp, Arabidopsis thaliana
atcaaaccagcatgtcttccgtccattcggtagataaaaagactttgtactttccatgcaaacaggacaagacaatttaccatgagtagtccatcctgataacatgctatacgccggaaagtcgctaatcgtccacagtagtactgcttttagattaaaattctgactcaatgaaacatcgtacgcatcgactccagtagaccacaactcttttaactcctcaataagaggttggaggaagacatcaagactagctcgaggatgatttggaccagaattcagaatagtaagaaataagtactctgtattcatgcacataccagggggtaaattataaggagttaggatcacaggccacaacgaatgattacgagacatgccaaatggattgaacccatcagtacacaacccgagataaacgttacggggttcttcggcaaactggggatgtaacccttggaagtatctccactctgctgcatctgaaggatgattcatttctccctcctttgattggtgctcagcatgccatcgcattgccgcagctgtcttatggctctgatacattctcttcaaccggtccccaatacgtagtaccacatacgactatatggtactttggttcttcgacggtcgtccttaggcttccatcttttcgcgccacaaaatcgacattgatcttctttttcgtcttctttccaaaatagcatacaaatgttctgacaaacatcaatcgtatgatatggaagtcctaaattgcgcatcaacttctcggtctggtaatgtgaagtggtagcctggtttccttctggtaaaaaatctgtaaacagttcgcaaacggagtccaccaacttttcactcatattatactccgccttattgtgcatgagtcaagatgataaggataactgcgactgcccttcacgacaaccatcgtacattggattatttgcaccttctaacaagtcgtagaacttatttgaatggttacgaaccggttcttccacattctaataattatcatcatgatgatagttatcatcataccccacgttaaaattaaatgcatcgttcacaatatccacatatggatcttctacaacattacccacttcttcatgattctcgactaaaatacgtcctatccgtataagtaagggag

SEQ ID NO: 3442 - DNA, 1299 bp, Arabidopsis thaliana
ccgaactcatgaataggatttgatggtgttgatggagattggttggtttgaggcacttggttctgagtagggttatcgtcaggagagatggagagaaggatacgagagttgtgacgtatctggcatccaaacatattaagatggtcttgaagtaccttgcgtttggaagataagtatttgcttggaaacaggggtcccttgagtcatctcgatcttccgtttaatcattaacactgtgtcccagaaagaaacatcaatggtgaacgatgagccactctgattctcgatgatcacctttatcattgtatcatgaatcggatttgatggagattgagggacttggttctgagtagggttatcgtcaggagagatggatagaaggatacgagagttgtggaagatgccgtattcaaacatatcaagatgatcttcaagaagcttgcgtttgaagaagagtgtttgatgttctcaagtaagtgagtcttattgggaataatattaactcatgttcttcttgcatttgatttctttgccgctctcttcttctatctcaaatctgtctcttcaatttcacagttgggctttttattagtctataatgggactcaaaataaggctttggcccacatcaaaaagataagtcaaatgaaaactaaattcagtcttttgtcccacatcgatcactctactcgttttgtgtttgtttatatattacacgaaccgatcttcggtacgtcgagcgaagtaacatgagcttgtaacccatgtggggacattaagatggtggaacactggttcgggtccacgggccggttctgttgttggcatgtttctgggctgcccagtccaagctgtgagtaagacgtgtgtgtcaagcgaaggcttggctcaaacggcttctaaagttggagggtaatgcgtgaggctggtttcacagagcagcgactacttcccgcttacagcagtggacggatcacagtttagcgtcgctcagaaccactatggcctgctggtccgatctcatatgaaccaccatttttttccttcttttgattttgttttccaaaactttctacgctttttgtttatactttaagagggaacaaaagcaaactttgaacaaagcaagagacgaagagttgtattatatagcttttgttctatgtatggaaaatatacaagttttatgctactcaaaactgtgacttaagagtcaaggttaaagagccacgagtaagatgtgtaggtatgatctcaatggtatcgttgtcatcaacaccaaccacccagaatgactga

SEQ ID NO: 3443 - DNA, 732 bp, Arabidopsis thaliana
gaagaagacacaactagagtttcaaaccagagtgaagaagcacaatcccatcagtcagggactaacaaatagagaactagaggtccatctaagatgcgtaaactggctaaacatctagatgataaggtcgatgttgaatttacagaattgggtgaacactttgggaatggttcagtcaaactgtcgtcctttcttggtgcactagtcagggagcatgtacttgtgatacttgatgattggaagcaccttgatgaacttacaagacacgcactttgggaggaaattcaggtatgtataacaatttatttagtttaccagaacgttcccttgtgactcttagttaacaatctaaacttatgtaggggaggtttaatctgcaagaagaatggcaaaaacaagctatttttaggcagatgggttgtttgtggaggtcccataaatctaagattctctcaaaggttaaagctgcaaagacaaagcttagagtacttgagctaagaccaagcaacatcccatatgtcgcagtttggagcaattgggtgaagagtaggactagcagcacttttaaggttgtattcattgtgaaatttgatttactaaagtaaatttacaagaaaatgttaataatgttgcattgggtttgatttgtaggtacaaagtgacaaatttaggcaattaaggagggcacaaattccacatactaccagtcgaaaaggaatgattcggccatcc

SEQ ID NO: 3444 - DNA, 923 bp, Arabidopsis thaliana
gatattgatcctatagggtgaatcacgttccttacccattcttggtgatttcttccttttaccggtaagattccatccatgggcgaccttttggtgtatttggatgcacttctccttatgcttcctcgaacaccattcccggtcttgtccgatccgtctcctcgttagatccgattcgtctgtccaatgatcggtctaccagatccgattcgtctctaagacgatcggtctaccccatccatccgctaaactccatcaaaccgttggaccgggaggtagcatgcacatcagttcgatcgagttatactagccgagccgtaccctctttccgaccaacaacttcgtggtgtgtttggactatttgtgatgtgtggttgatctcctaaaggccttgggcgtcctcccttatatatgggcgaatggatgcttcccgacgcatcacatccgttccttgcacccttctgaagtgttgcacctttccaatcgtagctgttcgaccaattccacccttggacgatgcaaccgttcgttggtaaccgctcgaccttacacattttggccgagacacctcttcacccttgatctaccacagtccaccagctcgagtgtcagctgactagaccatccacctgggttagtactcaatcagctcaccgagcccattcgagctatcggtcagctcacctagctgagctagctactcttccagctggtttagttcacctagcttagctagctagttcatccagcttgtccagctcacctagctggttcagcttgaactttctcgttcttccgactaagtcttttggtctatttctcgaccctgaactagtttttcctaaaacaaaccagcctctttatgaactcgggacacgtgcgttacactaaggtatcgtctcgacacgcatcgtggattgctt

SEQ ID NO: 3445 - DNA, 551 bp, Arabidopsis thaliana
gtttttgccattcttcttgcaaagtaaacctcccctacataagtttagattgttaactaagagttacaaagcaacgttttggtaaactaaataaattggtatacatacctgaatttcctcccaaagtgggtgtcttgtaagttcatcaaggtgcctccaatcatcaagtatcataggtacatgctccctgactagtgcaccaagaaaggacgacagtttgactgaaccattcccaaagtgttcacccaattctgtaaattcaacatcgaatttatcatctagatgtttagccagtttacacatcttagatggacctctagttctgtttttgttactccctgactgatgggattgtgcttcttcactctagtttgaaactctagttgtgtcttcttcgattggctcctgaatgctctcatgttgtgtattatcatcagcaggtaaatcttgatggctttcattaaggtctgcatcttcttcattaaggtctgaaacttgctcatctatatcatctcactcaactcattgttgtcgctctcacaggattaaga

SEQ ID NO: 3446 - DNA, 588 bp, Arabidopsis thaliana
gtttggggttttgatttgtcacaattttgcttcttttaattgtatcgatttgggttctcgatttagttaactaggctaaacatctagatgataaggtcgatgttgaatttacagaattgggtgaacactttggaaatagttcagtcaaactgtcgtcttttcttggctctctagtcagggagcatgtacctgtaatacttgatgattggaggcaccttgatgaactgacaagacacgcactttgggaggaaattcaggtatgtataccaatttatttagtttaccaaaactttcctttgttactcttagttaactatctaaacttatgtagggaggtttaatttgcaagaagaatgacaaaaacaagctatttttaggcagatgggttgtttgtggaggtaccataaatctaagcttctttcaaaggttaaagcagcaaatacaaagcttagagtacttgagctaagaccaagcaacatcccatctgtcgcagtttggagcaattgggtgaagagtaggactagcagcacttttaaggttctattaattgtgatatttgatttctaaagtaaagttgtttggagatat

SEQ ID NO: 3447 - DNA, 523 bp, Arabidopsis thaliana
tgatcaagttttgattcgttgaaaacctcagagactaaaccaacacctgtaatggtttgaagaactttctcgggactaactgttacaatacctgcaccttcttgaccacgatgttgaagtgcgtggagagctaagtaacagagccgtgaagcttctggatctccatagattccaacgacaccgcactcttctcgaggcttttcgtcgtcttcgtcgttgtggtaatcaaaaggggtatgagaattgtcttcggatggtgaaggagaggagaagtaggaggagactccatggatgagtgaaggaggaggagaggagaggggagaaggaaggagagagagatggggaggtttaaggaagggtttggggaagagagggagaggttgattggtgtaagaagaattgtttggtttagtgattaaagagagggaagaggagaagcttgttgtggccgccatggaagacaaaaagggttcgtaggttttctgttgttctggtctgatttttgggacttaaaacagttttt

SEQ ID NO: 3448 - DNA, 1853 bp, Arabidopsis thaliana
cgcacagtccaacatggtcaactctaggttcccaggatcgcaccatcccgccaatcaggacggcagaccatctatgccgcccctgatgtcatccggtcacatttttatgccagcagctttggaccatgacgggcagatagacgatatctatctgaaacttcgagagatcggatcacaggtccataaggtcatcagtttggctctagagattgatcgaatgattgaagaaactcagaagacttctttcaccgatcgaattacgtgcacgagagttcctcaagtcattcatgacctccttcatgacaacagtcgccaaagctcacttctcagatgagcagagggacatcggttgctaccaactcttcgttgaaggtctcgtcgggaaagctttgacctggttctccaggtaggaggcaaactccattgacaacttcacctagttgtcaactgccttcttaaagcattaccaagtgtgtattcagcccggagcctctagttccgatctttggagcatgactcaggagaacggcgaaccactgaacgtctatctaggtcggttcaaagaaatactttcaaaagtcactatcacagactgatatagctcaaattgccttaagcttactccctcaaataagagatcgccgttagcacttaagggtcgtattccactaagtactcgatgttcacacaatagacttatgatgttgtttgataagctaaataaagtaattgaatgttgaagacaaataagcaagtaaatgagttgtagattcaagtgattaaagcgtcgggtctaaggaattgtctcgggagatagataaattgtagatctagctaatatcaggattgttattgcaccgttctcaaactcagactatgattatagagtaaccggtgcggttccgcgaaactctcaatacttaaagctaagataacccgagaagccgagaaatcctatgctaaagtatgcattgttaatgagcttgattagtttacctagtatctaaaccagagcccttctatgagcctacatgttctttcttaaatgcctatgctcatctatgatagttcaaataacaagtacctatggcgagcatacctattatctaatatcaagttctaggtgatcaatctaaaactagcaaaaagaataatcaagatgaagaactctaagaataatcctaaggggtttcaatctactaatccatctaaattcgtattgagactccctaaaccctacaaggtatattactcaaacatgataacagaaacacaaatcataatctgaataatttgcattaaataataagaataagagtgaaaggagttcataatcctctatgcaaagattggattcttctctccaaaagtgtatcttaatatcaaaaaaaaacttaggtctaacgatgaccttaaaaacctaattatatgtttaaaacacgtctttggcctaaatattaacttcagggtcttttatggcgaaactgagcccgtgcaaatttcgtacagttttcgtgcaaacttcgtgagggacctgtgtcgaccgacacaagtttggtatcgatggacactacattcaagactggttttctgcttcgttttgctccaaagtgtcccataatcgcctcataaccccagaacgtacgagacttgtaaatacaccaaaaacactccaaaagcactataaaggactcaagagactctataaaaacaatcctaagtcatagataagatgagtaaaaataggtttttatcaatatttaacatcaaagaaggcgaagtcacacctgaaataaaatgaacatctttcagcaagatggatgtagtatgcaagttaaatagcccacgacgat

SEQ ID NO: 3449 - DNA, 1128 bp, Arabidopsis thaliana
tatgttgcatattttatagttcacaatctcatgagtcatggactaaaggattggacaaaggtaaactcgtaaaacttataaccatcgttgtatttaaatattataaccttgtttattcatcccgtaattcatactactttgttggaagataatgcatgtccaattcatactatttccacatcccgtgcacccagtaagagctccacatgctattagttggcaaacacaattactcttggataggccatggctactactgttcatctcagctcattctccctcttcatccaatccagaggaagaagagacaactccatatcttccgtcaagagtctcaaaaaacgcacaggtttgtctccctcttctgccctcacctcacaaggtggcagagacatgattccaccagagggaaaatgcaatgatcacaactctgcttttgatttcaagttgtatatgatccgcaaagccgaatctgtaaatgcggctctcgacgtttctgtaccgctccgagaacccctcactgtccaggaagccgtgcggtactcattgctagcgggcggaaaacgtgtgaggcctctgctctgcattgccgtctgcgagcttgtgggaggcgacgaggctactgccatgtcagctgcttgcgcggttgagatgatccacacaagctctcttattcatgacgatcttccgtgcatggacaatgccgacctccgcagaggcaagcccaccaaccacaaggtatgttgttaaatcatataaaggctcaaagaaatgctcactagatttgaatcgttcattgattttagtaaatattcactcgtgttggaccaatttttgctcaaacaaggtatatggagaagacatggcggttttggcaggtgatgcactccttgcattggcgtttgagcacatgacggttgtgtcgagtgggttggtcgctcccgagaggatgattcgcgcggtggttgagctggccagggccatagggactacagggctagttgctggacaaatgatagacctagccagcgaaagactgaatccagacaaggttggattggagcatctagagttcatccatctccacaaaacggcggcattgttggaggcagcggcggttttaggggt

SEQ ID NO: 3450 - DNA, 1039 bp, Arabidopsis thaliana
caaacttccttgaccaccaatgaatgtcccgtatccagttgtgaacgccaaaatgtaccttggatccgttaattaggtcaaacagcatgttgttatcttcttcaaagcaaacccgtttgtaaccatgactccaacagtgctgcattgaaatgattagcgcttgaatttcactctccagagcattgtccacctttcttcctatagcctgccccgccagtagataacttccattactatcccgaacaacccaacctgctttactttctacatcaccattaacgaatgagccatcaaagttgcatttgatccatcctcttcaggtcgtctccatctgtcatggttatcctcctctctcacccctctgctacgtgtatttatttgtgctactgtattcgcctcggtatactcatgagcatcagtttgagcaagacgcaaagtaatttcccagggaatatgtcttctttgaaaatataaaacgttcctgcttttccaaatcctccataggatccacaacggtagctgatggaattgacttgtccgtggtgaaagagccatatgaagtataacacgtattttattgactttttttaatgaaaatttcattatgaaaacttgccacatagacttcataaaataaataatacataattagtaattaattcaacataacaactaaaataggagtttttggactctaaatccctattcctctggcagctggatttggaggaagctttgtaaactgcgccctcttgctaggccctttcttgtttgtgagattggttcaggggaaacggcaagcttctggcaggacaactggaccgggcaggggcctttaattgatctgacgggaactaacggtccaagatctgtggggatgcctcttaatgccgtggtaagagatgccttgcgtggtgataactggtggttgtcttctagtagaagcagaaacccgtccattgctctgttaaaaagtgttctgccttcgagcgagagtatgattgaatgtcagcatgatgatgtctataaatggaagccg

SEQ ID NO: 3451 - DNA, 1517 bp, Arabidopsis thaliana
ggttagaaggattcgttgtaggtctacagctcttggcccccgtgtgttgccatcatattttgacttaattatgctcctgattaccctcgttgttgctcccctgtggtagttactccgttcttcgactgtgcaagtgtgctcaagtgttgcacttcgaatttgataattgtccgagtcctccaatttgacaatgtacacacgccaaaggcacaattcagaaatgcatgtcaaagtcattaatttcttgtaggagcgatcacggcgaaaatgaaaacggctatttagtgcgtgtactgctaatttgacattgcaatcttgtttgtttttgaatacccggccgacaaacagttcgtcaccttcatacacaacatcccgaattgctagttccatcccgtcacggcctgtaaaaaaattacttaacttagctatcaaatcagacaacaatgtgttccaacctaatgtatgatattacaatacacatgactaaatgaaaaagtaaatagaaagtacacgatataagtaagcatgacttgttagagttacgttatatcaaagtaaatataaattattgtacctatcaatccgatgtaacttagttataaaccaaaaaaacaatagttttcaatgtatcacatgctatttagcaacatacatgactatatggaacagaaataagtaggcccttgacggatacagaatgtgcaagatatgttataggtactcgatatcaaattatatataaattgatgtgtttatacggccatagcatgctatgcaattggtaccttcttctccttgttcatcaagggttggcgccgcatccctgttgaaagatgcgaagttaatgcacatgtcttcaagagcctgttgtagtgggacctgtaggtccaagtgtacacctagaggttcggtcaagattgtcgccgacggtccgaaaaagttggactccttaagagtttctcccccgtcatagtcattctcgtcgttgtacccttcacttccgctgtcaaagccgtaattatcagttgccagattaattgacggtagccctagatttgccaggaaatctgcctcaacaagatttgagtcttcctcctgcgtaaacagagttgatataagctttgtaccttcttggtaattagaatgtattgaactactgattgtttacctcatctgccttttcactcgctgtgtccatactttgatttgtttccaaagtcaaagctggctcaacagtagctcccgcaggttgtgcatgtacgttggaggaagagtcacccatgtttgcaccttctgtacctgtcaaaatggaggactcgtagttaggagatctttcctcattgcaatacaatggtgatttcccttagctggcaacccgtaactcgatgtctgactcattccatcatcaaccggaacaccatctaccgttagcttagagacaaacaaactcaagtcatccaactcaaaacgcatagctaggaaaacaccattgtctcatctgtcgcgatggttactgg

SEQ ID NO: 3452 - DNA, 509 bp, Arabidopsis thaliana
  unsure (1)..(509): unsure at all n locations
ccaccgttgccgttgtggggacgacggagtcaggtgactactaaagcggacacaatctcgagaccgccttctcttacaccgccttcacatccttttgtgatcccatctgaaaacttaccagtgacttcgtctcctatggagactccagagacggtttgtgcgagtgaggcggcggaggaaactccgaaaccgaagctaaaggcgttacattgggataaagttagagcaagttcggatcgtgagatggtttgggatcatcttcgatcaagctctttcaagtgagttaatgtgacatactcgtttatatgatactatatgcttttagtgagaatgtggttgttgagattatgaatgtggtttgcagattagatgaggagatgattgagacgttgtttgtggcgaagtcgttaaacaacaaaccaaatcagagtcagacaactccaagatgtgttctcccgagcccgaacaagangacagagtcatggaccgaagaaggctcagaatattgc

SEQ ID NO: 3453 - DNA, 857 bp, Arabidopsis thaliana
gtccgtatggtgtcgatcgacactggagggtgtcggtcgacaccatctctgcaactgcgagctccaactcgtcttcagtgtctaattcgtcccacacatcatctccttctctaatcaagatggcattacagctcttccttgggtttgcatcaggattacctggaagaaagccctcttgtctattgatagattgtgtagtttgagccacatgtacatccagcttcttcaagtgagagctcagattgtcgatcttcccattaagatctgtgtagacagcatcaaacttgccagtaaactgcacaacaagctttgtttggctctccagaatctactcaagcatcgattccatttttgtctctgctgagggtggagagggggcatggtaagctgaattaccataggtcctctgaaagctgctttgaggaaaggtcttctggaaagcaggctttgaggaaaggtcttctggaaagcaggctttggagtgtagttggaggaaccctggttccctgtaaacctgttgccactgaagttgccttgtggctgcccaaacttcctgtatccctgaccatctatgtagaagactccttcctctgactcaggctcaggctcaatagtctattcctcgctgcaaagtagacatgcttcttccctgtgagcaagttatgaaccgaatcaaacttagcattcacatctgccataagattgcctgaaatagctccagaaatcttcttcctctcaaaatcagcagtcttggtactgttgctgcaagcgagattctctatcatggctgtagcatcagctgggtaacgtgtgttgaagttaccattgctcgctgcatctagagccatctggtatct

SEQ ID NO: 3454 - DNA, 940 bp, Arabidopsis thaliana columbia
gtctaacataccgcttctatttcgttgttacaatgaccctccgcaacatttggttgattttctttcgaagtttcttcttttccgttgaacgttttttgtgttgagctgcgagagctttgataaaggccatcgcgatatcttgatctctgctcgaaaggtccttgattaatgcacctggagctcggatctgggatctaaagttgtgaagtggggagcatcggaagttgattaatgtcctcgtcgatcatcttgatcctcgaaaagtctggcatggattctgagcatcgtaggttgaaggccataactgcacaagaaaaggacaatacttttagtgaggaatgaagaaaaacctagaggggtaatttatagggaggtttcttagctttcaaagatgcgattccatttaaagccggagtgattcgcggaagcattcacgtcgccttgttcgcccagcattcaaagagtatctcccaaaccgaattctttgctcgaatcacaggaaagttggaaagtttccttaaataaaatgggccgaagcctagtaggtaagtccatgcgaaaataaaaagagtttaagtttcagggaacatttagggaaggggctcaggaacaggctcctttatcgccggttcggggttcgaagtggacgcctcgtttttaacattcacgtcgggttcattattcacgcgcttccaagggttgctatcctccacgtcgtcgtcacagtcctcactgtcaaacaggatcacttggaccggagcgtttacaggaccaggtacttgacctcgagcacaaaagtacatccggagcatgtgcgggatctttgccacgcagtcgaagttcctccactcccattaaaaatggtcgctctccatagcccttaccttccgttcaatatgggcaattcgggccttgagcgtttgcctcttgaggccaaacg

SEQ ID NO: 3455 - DNA, 1351 bp, Arabidopsis thaliana
tttggttgtgatttgcaggatatcttcaagttgaatgtcttggagatgaggcaaaatattgagcttggcaggatcactaagagtggttatggacttgcggctttttatgtaatctcaatcataactaaatatactatctcaatcgaatataggaatcatacatatttggttgtgatttgcagaatatattcaagaaacaaactttccttgagcgaatatcttggagaggaggcaaaatattgagctttgcaggatctttaggagtggagaatgacgtgttaatgggccaatcctgttaaaaacacgttaataagcaactgaatagaggcccattttgtttaaatcaggatccgcgtgtcttgcaaacggatcgggtccatacgcggctcgggtcagctcgaaaatagagggtaaatgacgcttataaccttaattctctggttttttttccctataacgtgaaaaacgaatacggctcaaatggctcgtcatttttctgcccctcattctctcttaatagtatagattagggtttagtaagagaagttttcataccagacataacaactgaagatgtatccacattgatctacaaaacggagaactagaagacatcaatcatgacagttccgaagaagaaaaatcatatgacaaatttggcaaatctgatgatggcgttgagtctgaaaattattgtaatgaatcagaaaatgaatcataatgaatgttattattgtttactttcgttgtttttaccaaatataataaattaattcagaaaatgatttatatacacttccaattttctaattttaaagtttttaattgttcagaacttatgaatatctaattttaaaatttttaattaaaattttgaattttgttggtattattattattattattattattattataatggtgattattattttaaattttaaattttacttatttgcgagagaattactactgatcgagtcggcctcgctaatccctagcaatttgcgaggcacttactacgaagacacacatctccctcgcaaataagtgcaaaaccctaatcgagtcagctgcaaccctagaattttgcaagggatttactacggcgtctcgcaaatccctcgcaaagttaacgtcttttgattggtttgtttgtcggttcctcgcaaaacactagcaaatgttgcaggaagtttaaccgaggaaacgtctcatttaacgttgtattacttagtccaaacgttagaattaaaaaaacttatcctcgacgatacaacgatggaggcattgcacctacatataacgttcctgatgttccagatacttttgcccaaataggtagattcgg

SEQ ID NO: 3456 - DNA, 824 bp, Arabidopsis thaliana
aagtcaagttcttgatttaatcaagatcttggtggattctgatagaattgcgtacctggtgcatgaacacactagtcgtcatgttacttgaatagtaaccaccagaatttggatctacaaacatggccgatgatactcctccgccaccgtcggtcacaactggaggattaaacggatgtcctcctcctccgcctcctgcggatgagctctgatgatcgttccgccactaccgccactcatgtagctgctttcagggccttggtcatacagaattcctttgaagagatgacctccaatattgaccgtcgtttgataagcgtactgaccatctcctccatcatctacgccactcattttaacacaccgaaaaagcgcatctgagctcacttcccccggaaaacttgcctcccccatttctaaccctaaaaacatatatacacaattatacacattaatcaacgtccataaacacaagattacgtttatgttttaatgttatgtttcacttcaaaacagaacacaacatttaaatgttttttatcaaacattttttcacactgaaatttgattaaaaataaatatagaatgttgtatttttaaagtaaacaaaatttgtgcaagtagtgaaaggaaaattaaactcacatatatttttgtgttgaaaaattcgtgtttcttctaacaaaaacatatggttcgaatatatgaagttgtctggatatcaaattgtttataaagacataaaaaaaaaaaacctgctgagtgggatggcaagcgagaagaggaggatgtcctggaagagtagggccctatggcgttttggg

SEQ ID NO: 3457 - DNA, 804 bp, Arabidopsis thaliana
tccttcgcatccttcttctccactagcacagctccggtgatccaatctttacgctcctcctggcaatggaagaccttgaaatcgcagttcggagctgctatcttctctagaagcttcctcgccgtgtcctcttgccccaccttcgcatccttcttctccactagcacagctccagtgatcttatcgaaccctttgccttcgccacgagctatgaaatcaaccagcgccgcttgtactggccccaaactaatggtccgatccactgtttcaatgtaccatcctgcatacacttccccttcgcaaaacagcgccacccctgacggacactttctgtatggcgcgtatgatttgttcgccgcctttagagcctccaactttagaaaggaacaaaggtccgcattggaggagatccctccggcggcggaatcttcatcgatgagggcgagacagttatcgcgctccatgagaaggagagagggttctgccgagaggatactttcggagccgaattcgtctggcatgtggctctcgaggctcttgaatgatccgtctcggccgtgagcgtttttgatcagaatttcaatttgatgtgcattgttgatctccttaagaaagcgggtgcagtcgtagcacgggtcttggaagacggtgccattatcggagacggctaagtgagtgagttttggctcggaattgagggcaaggttggcgatcaggaattgctcagcgtggatggaaaaatgaggaagaagacctttaaattctacattgacgcctaagtagaatcgaccagatgatgcgcgt

SEQ ID NO: 3458 - DNA, 823 bp, Arabidopsis thaliana
atcactaaatttttctatgcatactttatttttaattaatcgttaattggactatctatcaatttttataattaattgtttccaaaccctataaatattcacactattttttttaaaaaaaaaaaacaaaggaacaagtagtatcaaacataacatatataaaacacttaagcaactatgtctgcaaaacgtgtcttcgagaagttcgataagaacaaagacggtaaactatcattagacgagtttcgtgaagtggctcttgcgttctctccttactttactcaggaagatatcgtaaagtttttcgaagagatcgacgtggacggtaacggcgagctaaacgccgacgagtttacttcgtgcattgagaaaatgttgaaggaagtgtttgttttctgtgatgttgacggtgacgggaagataccagccagcgagtcctatgtgactatgactagcctcggaaagaaattcaccgaggagacttctgccgaaaaggtccgagcggcggatgtcgatggtgatggctatttgaactttgacgagtttatggctttggttattggtgacatataaattgcttgtttactaagtgtcttttatcgcttatacattgttctatgaataagaaaggtttattcatgtttagtttcttcggttttagaggtttctctcgaccgtttatatataaaaagtttaaataaattgaaggtgcatgttgttgttgaataacgtatacgacaagacaaatgttttgggtcattagccatatgtactggtcttataaagtatattgaaatctgaaataatagtaaaatttgttgtt

SEQ ID NO: 3459 - DNA, 584 bp, Arabidopsis thaliana
tggattttcttttttttagttgtagtatgtaactacgtaaataaatgttacatacctaaacaaaaacaaatatgactaaaagaaaaataaaattattgttttagtgtgaatccttagaaaagttaaatcacacttcactttgtaatacattttatcaaacagaataaattaaatgaatataaaaattatataataatacaaaatattaaatatagaattacactattgggccccattttgttttgtatgtggccccaattttctccggactggccagttagtttgatgcatttggtaggcaccgggaggtaaacacctcccagaatttatttatgaaattaaaattacatccgcactagtcttggaaccgaagttcctaactcatcatctctcaaaatcgagtctaaactactcgggggagaagcaaaaccatgataccctaaaggtaaatcgaacgcatagttagccaacccgtccgcaagacggttggcctccctatacacgtgcccaatccggactatccagtcccttgataagaagccatggcacatacgtaccaggaatgacagcgggtgggaagacca

SEQ ID NO: 3460 - DNA, 1843 bp, Arabidopsis thaliana
cctctaaaccgttggtatcgctttcgtgaaaagttacttcgtcatttggctcgttaaatggccgcgcccagttatgattcgcgtcaccttcctttgataagcctttattgatgccgccgtgtcttgacagaaagccgaatcccctaaatttgtgaagatccttccccgagcagcttttggctcatcgtcgtcccttcgcgattacctctgcctcttgtgggtccttcgaggtttgccgcgggggctgcctgctcgggattggccacagggttgacctgctcggttttacccttttctgcttctaagtcttcgatggtcaaacctccaccgatttctccagctaggaattttgcagccaactttgctccgaggctacgacatctggaagtatgatggccgtaactcttatgcaactcgcaatattcgtgctcgtttcctgcgggttgatcctttgtccaagtgtaggattctcgaccgcggcctcgtcctcggcctcgggcggcttcgcctcgaggtgtatcagcttggtaattatgggctccggaggaagtctcgaagtggctcattaggctgctgagatagtgaccataatgtcggcgtctgatgtgcccggatcgattagcaccgaatattgcttcaggaagagtgttgatagctcctgaaaactgtccacagaatttccttcgagtctcgaggaccaatacagagctggccctttcaagtgctcgacgaacaggtgacagagaccggcgtctctttcttctggtctgaatttggctcgggccacggagatgatgaatgacttcaagtgtcctttcgggtcggaagatccgttcaagtactcgattcttagttttcctggatctgagattatcgcgttggagatcctgtgtgtgaacggtgtgttgtgggactcttccagaatgcggtcgatgttcggggccgaggagactgcgttatgcatttgggatctcacgagcttcatctcgttctctgccttggctagggagagcttgatggcgcttatttcctgttctctggcgtattcctcagcccacctaatgttctcttccgaatcttcatcgtccgagaccccgatctgatcggccccgacaacttctgctcggggaggagggagctagtttctttctgttcgatatggtatcgtcatcatcatctcccccttcagactctgaatcagtggcaactaagcacacgaaatcatcgtaaacgacacgtaaaaacatattatttacgatattttagattaaaattagtactatcattgtattagccaaaccatcatttatcaataacaaacactttacctcttttgcgcttattttctcttatagttttcaaaacctgcatcctcttcagcctcgccaaaccgcttggagttattggtgccatcaaaatcttgcaataatacacaacacataattcagtttgtataaacaaatatatatacatgtacatgcttactggtgattgataacttttcagtattgtatattacagcaagcaatatatcaaatcaaattaaaaacacggaccagttaacaaccttttgtctaacgaagataatcaaacaatcaataaccttagacccaaaccacgttctgattgaatgttctttgtaagaagtcaggaaatatttgcataataatcaatcatgattataccaaaatatttgctaggttctatcctaacattttttttatacataaaattataacaaaaggaaatattacatttaatcgtgctaaatgaaaatagaagaaacccaaactatttgaaattcttttgtacgtggtgataaccaacatatatctttacgatc

SEQ ID NO: 3461 - DNA, 961 bp, Arabidopsis thaliana
cgcacaagcatcgctcaaaactctcgttaggataacacaattgagaacaaagctacctagatctggaagtttctttggaatcttgttctgaataatgtcgctaacctgtgtagatatcttcatcacagctttcttagtaagcaaatctttagtaaccatcctcttcacatattgtctgatcataggagaagacttcacagcatctataagttgcatctttaccatcaacttatccatcatagctttgcatctagcatcatctagctcctgtttggacttcctaggactcttgggaaaaggaaccttgggtttggttacctttgagacagatgaaatcgggtttaggagaattcgcagggctgtactgggttggtgtcgatcgacaccatgttggtgtcggtcgacactatcgggttctgcagtgtttgcgttggctggtgtcgatcgacctggacctccatcggatcacgaagcccatctcggcccattatcattctatgggccgggcgattaggttattggtccgtctactattattttatttcgttttgtataaacagatgtcttagggttctgtcttgggacatctagtcgatattgagtttttgcttcagttttattttctgttttactcttctgcgccgcttttgcttctgtaacctgtaattcgagatttttccaagttattcagattccgcatttgatttcatctgtcatcttgtttctctactctttatctctttacttatgcaatattatcagttacctgcgtttatgtctttgagcatgttgtcttagtagtgacttagaattcttagggatgggatagagtagttggggaatccatagtctgtagaatggttaaattttagaattgattgaatcccttcaggactagttgtgtttaatgcttatttatttttgatcaactggaattcgatcccaagcattcccgcaccca

SEQ ID NO: 3462 - DNA, 1654 bp, Arabidopsis thaliana
aaggccaccaatctgaagcgtttatatctcaacgggtgcaaaagtttggtgacacttccttctacaattgggaatcttcatagattggtgaggttggaaatgaaagaatgcacagggctggagcttcttccaaccgatgtcaacttgtcatctcttatcatcctcgatctcagtggttgctcaagtctgagaacttttcctctgatttcaactagaatcgaatgtctctatctagaaaacaccgccattgaagaagttccctgctgcattgaggatttaacgaggctcagtgtactactgatgtattgttgccagaggttgaaaaacatctccccaaacattttcagactgacaagtctaatggtcgccgactttacagactgtagaggtgtcatcaaggcgttgagtgatgcaactgtggtagcgacaatggaagatcatgtttcttgtgtaccattatctgaaaacattgaatatacatgtgaacgtttctgggatgagttgtatgaaagaaattccagatctatctttagctataaagatgaggatggcgacgtatattgggtaaattgggacttaatgatgatgctgatgttgatatagagaatatatgtcataatgtcttaaaggacatgtttgtaattaatcaatccctaatcatatgtctgtatcttagtataaatatgtacattacattcttaataaagtcaatacattctccttccatatggtatcagagcaaacgataccctaattttttttttcaaaacacaaacctagccgcctaacatgggctcctccgcaaacggtctcccagccaccactgatgaagcaattgtcttcactccgcaaacaatcttcaacattaacacgtctaatgtcacgaaactcacctccaacaattacctcatgtggagccttcagatccacgccttgcttgatggatatgaactcgcaggacatcttgatggttctatcgagactcctgctccaacactcactacaaacaatgttgtctccgctaatccacaatacacgttgtggaagagacaagacaggctcatcttcagtgccttgattggcgccatctctccaccggtgcaaccattagtgtctcgtgcaaccaaagcctctcaaatctggaaaaccttaaccaacacgtatgctaagtctagctacgaccacatcaaacagctccggactcaaattaagcaactcaagaagggaaccaaaaccattgacgaatacgttctgagtcacacaactctccttgatcaattggctattctcggcaaaccaatggaacacgaagaacaggtggaacgtatccttgaaggtcttcctgaagactacaaaactgttgttgatcagatcgaaggcaaagacaacacgtccctctattacggagattcatgaacgactcattaatcatgaggccaagcttttgtccactgctgctctgtcatcctcgtcgcatcccatgtcagctaacgttgctcaacaacgccatcacaacaacaatcgtaacaataaccaaaacaagaatcggactcaaggcaacacctacaccaacaattggcagccctctgcaaataacaagtcaggtcagcgcctttcaaccttacttggggaaatccagatttgcaatgtcaag

SEQ ID NO: 3463 - DNA, 1101 bp, Arabidopsis thaliana
attgaaggaaagcttaacacaccgactatcaccgagattcatgaacgactcattaatcatgaatccaagttactctctgatgaggtacctccttcatcctcttttcctatgtcagccaatgcagttcagcaacgtaacttcaacaacaactgcaatcaaaaccagcacaagaaccgctaccaaggcaacacacacaacaacaacaccaacaccaactcgcagccgtcaacatacaacaagtccgggcaacgtactttcaagccttacttaggcaaatgtcagatttgcagtgttcaaggccatagtgcacgccggtgtcctcaacttcaagcaatgcaacttccagcaagctcctcagcccactcgccattcactccttggcagcccagagccaacctagctatcgggtctccttatgcagctaatccatggcttcttgacagtggcgcaacacaccatatcacctccgacttgaacgcactctctcttcatcagccctacaatggtggtgaatacgttatgattgccgatggtacaggtctcacaattaagcaaactggttccaccttcttgccttctcaaaatcgtgacttagctttacataaagtgttatatgtacccgatatacggaaaaacctaatttcagtatatcgcctatgtaatactaatcaagtctcggtggaattctttcctgcttcgtttcaggtgaaggacctcaacacggggaccctattgctccaagggagaactaaagatgacctctatgagtggccagtgactaatcctccagcgacggctctgttcacaagtcctagtccaaagaccactctctcttcatggcattcacgtttaggccatccatctgcctccattttaaacactttactatctaaattttctcttccagtttctgttgcttcttcaaataaaacttcttgttctgattgccttattaataaaagtcataaactcccttttgcaacctcttcaatacactcttcttcaccacttgaatacattttcactgatgtctggacttctcctataatctctcatgataactataagtattatctagtgcttgttgatcactacactcga

SEQ ID NO: 3464 - DNA, 909 bp, Arabidopsis thaliana
tgggaacaaacagagctttaattcgtcttcactgacaccattgatctttgtcaggttgtagagcctatcgaattcatctaggtggtcgagtggatcctccattggcagaccatggaatttattcccctgaatattcgagatgagaccactcttaatctcgaagttgttgttctggatagcaggaggtgcaattcctttcctctgacggtgatcacgtggtgcatctccagcaccaatgttggcatggccattttgttgattctgttcgtcagccatatcgagtggttgctgagatacagggttgactgtgtttctcctttctctgagttcacgagctatgcggtcgatgttgtcgttgaaaaggaggttctgattgccttttgatcgagttcgcatacaacagaggtgtacctggatcaagaagacaacaagaaaaacacacagttagtaaccgaaaagaaaattgaaaaagaacttgatctaagcaagtctgaaatctcaaatgtaacaaacaaacacccaattggcaacagcgccaaattgataataggtttttaatcaaataaacctaaagcactatcatgtcgttgtactattgaaggttgtcaatccaaatgggtgtgatgctaacaatcaagatgtgatcagaggtcactaagtcaagccaagcaataacaggttttggtgtgttctagcagtcctaagtgaacatgcagaaaacagaaaatcaaacagaaacagtgaaacactcgaccaacacagctctttgcagagcactgggtgaggtcgagtaacagacagaaaataaaacacagatactcgactgcacagtctgttgccagacaactgggtggtcgagtacgaggtcgagtaagaagaaagaattgtagaaattaagcgacagatagg

SEQ ID NO: 3465 - DNA, 1002 bp, Arabidopsis thaliana
tgcatagtttactagtttaaatattgcatatatcattttcatatgcattagggacattacttgttggtggtaacccacacatgtattgttcgattcgggagcgacaaatagttttgtaagttctgacgtggccgataagttaggccacgggtatgagagaagggaagtgaatgttgtggtacataccgcaggaaaccagccacctttgcaaacccaaattttgttagtaggagttccagtagttatccaggatacaatcctaccggcaaaccttttggtgatgccgatggaaaggttcgaagttatccttaggatggattggttatcaggatatcatgcccatttggattgcgggcagagcagagtagtgttcgaattaaggaatcgaccacaactcacttactgtggaatcaaaccaagtaagattgcttcgttcgtgtcagcattgaaggttgagagtttactaagaaaaggagaagtctaccttgtcactttaacagctattggtggagaagttgaaagtgactcaaggattgaagagatccctgtattgaacgaatttgaagatgtgttcaagcccttggaaggattacctccgccgaggaatcactcatttaccattaatcttgaacctggggcaactccaattgcaagggcaccatataggatggcgccacggagacttgcagaacttaagaaacaattggaggatctacttgaaaagggattattcgtccaagctcatcgccatggggagctccggtattgtttgttaagaagaaagatggaagtatgcgattatgtatagactaccgaggtcttaacaacatgactattaaggacaagtacccattgccgcgagttgatgagctattggatcagttgaggggagcaagttgattaaaacattgatctgggttcgaggtatcatcaaatttcaatctcggacccggatataataaagactgtcgttcagacaaggtatgggcaatatgaatttgt

SEQ ID NO: 3466 - DNA, 919 bp, Arabidopsis thaliana
ctgcaaataacaagtcaggtcagcgccctttcaaaccttacttggggaaatgccagatttgcaatgttcaaggacacagtgcgcgtcgatgcccacagctgcaggcaatgcaaccgtcttcgagctcctcggcctccacgttcacaccatggcagccacgagctaacttagcgatgggagcgccatacacagcaaataactggcttctcgatagtggagctacccatcatatcacgtccgatctgaacgctcttgcccttcaccagccctacaatggtgatgatgtcatgatcgctgatggcacaagtcttaagattacaaaaactggttccactttcttaccttctaatgcccgtgaccttactttgaataaagtgttatatgtacccgatatacagaagaatttggtctcagtgtaccgcctatgcaatactaatcaagtgtccgttgaatttttccctgcctcttttcaggtgaaggacctcaacacggggaccctgttgctccaagggagaactaaagacgagctctatgaatggccagtgactaatcctaaagctacagctctgttcacaacaccaagtccaaagaccactctttcttcctggcattctcgcctaggccatccttcttcttctattctaaacactttaatttcaaagttttcacttcccgtttcagtttctgcttcaaataaacttgcttgttcggattgtttcattaataagagccataaactcccattttctatctcatccattaaatccacctcaccgcttgaatatatattttctgatgtctggatgtccccatattgtcaccagataactacaaatataccttgttcttgttgatcacacacacgatatacatggctttacctttgcagcaaaagtctcaagtagaatccacttttatt

SEQ ID NO: 3467 - DNA, 605 bp, Arabidopsis thaliana
tcttttcatgtacaaacgtctcaaattttgaagattcccaattgtagaaggaagtgtcaccaaacttttgcagttgttgagtatcaaagactcgagcttggtggcctttgaaagatctagaatttcttcaatggcggtgttttccagatagagccatttgatactctttgaaatcagaggaaaagttctcaaacttgagcaaccactgagatcgagggtttcgagagatgacaagttgacatcggttggaagaacctccagccctgtgcattctttcatttccaacctcaccaatttttggagattcccaatagtagaaggaagtgtcaccaaacttttgcagttgttgagatataaatgcttcagattggtggcctttgaaagatctggaatttctgtcaggttttcagattctgacagatccatctcttcgagacttccaagcgactgaaaaaaacattatcgatgataatcattttaattttatacctatatatgtttaaaattataattaaacattattacgtatgtatgtaagacataaccgtggatcgaccacaagcgataaaaacaaatttgggtatacttaattagttatatacaga

SEQ ID NO: 3468 - DNA, 568 bp, Arabidopsis thaliana columbia
cggatgatcttcgcttagctataacatcttgaacaaagacccaactcccaaatgtgtttattctatatttctagcaaatgtcgtgagaatacatgagaatcattgtaatttgtaaactaaagattgtaacaattattacaattacaagaaaattcaggctcaatatgaatttagaaccgcatgatcatccatttatgaggttcagttccgggaactgctgccgttaaggttctggaaaagctcgggaagatgggcattggtgagtttggttctcttgctgatctcttgtttcttcttcttcttatcctttggtttattcgatatgccatgcgtctgtgcagcagctctcctctctgcagtgtttgtcgccggcttcaaaccgattttcagcagctccttctccacgtccagcatgtcgttcgggatgtttatgtcacggaatagagctttaaattcgtcatcaaccttaatctcacacttgaaatcatttgggtatgcaatgtcctcttgtgaatttgatagcaagtagatgtccctgaagcactcagagcctgcaaaatacaagaca

SEQ ID NO: 3469 - DNA, 871 bp, Arabidopsis thaliana
caggtcttgggtcgatcaagagggaagcatcacaaccctacacaaccattcaaaacattgcttgaacaatgtgttgtctaaatattagctagcttatgttaatatatatacacatgtacacacaggagaagcttacggaccctgacaaagcaatcatgaaactgcatacgaagaaatgctgcagtaatggacttgtcacttctgaaacggttggcaacaacactagccacgatagattcggcacgggggcatgagcggctgtagaacccagttcggagctgcgccaaagcagaaggagcaaggaaacagaaaaggaaaaacaaagctgtgattgacctcatttcgtatgatgagctctcccttccctctcctgtgaatgatacttgcaagttttgtgatgaaattctaagcccccgtaaatgcatatttatatgtagttttggggataagacattggcaaagtagagaatgtttcaattagaagacgtgcataattgtaacggtcgatacattgacatttgacgggttagaggaatctattaggtatataggtagtacctgttctttaatatttgttttcattgacaatagaatgattccacgcgtcaaagatttgattaatggccaacttgctgcgttcaacataattctgtcgatatcgaaaggataccacgtctatgtcgataggtggattctcttttgtttaattttgtgatacatatacctcttttcagccgtccttatttattatatttgctctcttaaaaacaagaagctgtaaaaatgaaaatatagcaaggattgtttcttgacgaaaaaaagaagaagaagcaaggattgtttcttgcaaggattgtttcttacggtttga

SEQ ID NO: 3470 - DNA, 744 bp, Arabidopsis thaliana
ctctagtatcggtaggcttggattggtcgattctgatgagtcaaaatcttgaaacagacataaattgatgatttttcgtggttgttttaggtcatttgagggtttaagctttctttgtggatttgcaggacctttggttaagctccatggtgtggtatgcgcaaagtggacaatacctagatgggtgtttctcttctgaaacaacaacatcgtattacaaatcaagctgatactttttctagattcatggaaagatcaccagagaataatctaagcagaaatgagcacatcatcattgacattccaagaaatgccgccattgcatcatcatcatcttctcatgatagaatctcaaatgttttggaacctttacaacatgaggaagagagaccttctactgtttctcccatggctgctcctcagccagctacagctacagcttcttcttcttcttctatgcgatcaaatcctagaagtgtccgtcgtagaagaagtcctttgaattctggcttatggatttctattgaactattcctcactgttggtcagatcattgcagctattgtcgttttgtctttgtcaaaacatgagcatcctcgtgctcctttgttcacttggattgttggttatgcgtgtggatgcgttgctacactcccgcttttgtactggagatattatcattcgaatcaggcttctgaacaggattctggtcagcaacgtcctaatcttaatgttgcagcagga

SEQ ID NO: 3471 - DNA, 1139 bp, Arabidopsis thaliana columbia
aaagctgagaagagataaaaaaagccttggagaagaggttttcttcttcttcttcttcttcttcttcttcttccctcctctcctcttaacgatgtcgtatcacgcttcttcttatcttctccgccgtcgtcttacttccgtataacctcgatctctcaccgttgaatcttcctcagctttcttccgtggagatctccttcgcgctcgaggtaaatccttctcttacgcctccggatttgatgttttcacctttctctgtttgttgtttcggtgaaatttctggaaattttcgttatggtaggtctgaatctcgagagattcgattcattttcatcggcttgacctattgttagcttctagattatcagatttgtgatttgattttgctagcttctttttttcgtgcgagaattgaatcaagttttgtttaggtataccgatgattgtggtttgagcacgcggtgtttgctttgtaccttcccaatagctaattctcacttatgcgaatgaccattgttggttgatttctgattcgattgaaatgaagaaacgctctttgtggtttcggtttttttttattactaatttgatacttgaatgattgcagagccatgcctactttttctgctattgctttggatagaatgctagagccaggggcttccacgtctgtcgagagtgttccaagcacaactaatttgttttattcaaagccaccgatatcaaaactggagaaaggtaaaggtaaattacctaatgagaggacagttactcgtcctctgatgtcacctgctctctacgccacacctgatgcgattccgcttcctaattcgccatcgtctttcccaccgtcgccttatatcatcaaccacaaatcacgtggacctccacgtcttcttaaaagctcttctgaggctaatgttgtgtcttctcccaccagaagacgctggaagaggaaactattactgctgaaacagatgtaaaggtttccctcggaggaggccacttcttctcgttcctacactgaggttctgaagatgattatccaatggagtcatgctcgtacggttggaactataattttgatggtaatgtgatggtcctgtggaatggagtccgctgatggaaagtgggatggg

SEQ ID NO: 3472 - DNA, 671 bp, Arabidopsis thaliana
agaaccaatgttgaagtatatttatatgtagttttggggataagacattggcaaagtagagaatgtttcaattagaagacgtgcataattgtaacggtcgatacattgacatttgacgggttagaggaatctattaggtatataggtaggtacctgttcgatactagggcaagacatcttgagaaatagaaagagccggttcagacacataaagaactcatccctctcagtgtcaattctaggactttgctacaatgacaaagggaacaaaaaaatacttaatcagaacttagtggttacttgagtgaaaagcgccttgaaatcctttgttggggtgcctgttccctcgggctttgaggccaggtcaagagctttgaattttgcctcctcaagctgcaatgcctgctcaaataataaacaccatggattaggagaagcaaaactggtttaaaagatatggtaactgttgatggattatgcagtttacgaagcccttttggtcataatgaacacacacctgaacacagacttctgcaacatcagctcttgcgattgttcttgtttctgtctcaagtagctcgtcatctttcccacaagtaattctcgaatgccacgtccttgtcctgcagacatccagcctgaaccaagagcaatattgcaagatgagaata

SEQ ID NO: 3473 - DNA, 831 bp, Arabidopsis thaliana
attagactaggaaagaacctcataaacggttagggccgagtcacttagtggcttgggtcgagagaactcgcccggactttaggcagtccggatcgggccctttcatttaccccgctcaggcatagttcaccatctttcgggtcccgacaggcatgctcacactcgaacccttctcagaagatcaaggtcggtcggcggtgcacccgcgagggatcccgccaatcagcttccttgcgccttacgggtttactcacccgttgactcgcacacatgtcagactccttggtccgtgtttcaagacgggtcgaatggggagcccacaggccgacgcccggagcacgctgatgccgaggcacgccgttagcggtgctgcagaccacgatcacggcagcgacgtctccacaagcgtatcaatagcactgactaacgtcgacagcacattgcataggctgactaggccggactcagtcatttttccaggctttccaacctttggtaacagcacaacaagggcgtcatttagtctactcggtaacacggacgtttcaaaaaactccaacacaagcttaaccactgattcccccactacctcccagcactcttgataaaagactggctgatatccatcgggtccaggtgcttaaaacttacccatacaacggaacagccttctccacttcaccggcagagaaacaccgtagcagctctgttttatctgcttgggacaggctcataaatccttctggtggtagtttggtaacacaggctcaacatcgtctaaagaataaagcttagaataataatcaagggcgagctattccaattctcgag

SEQ ID NO: 3474 - DNA, 764 bp, Arabidopsis thaliana
gtgaccaccaccaataagtgcaaccatgttggtgacattcaaacctttaccttcaaaatctttgattgatacagccacggaaattagtggtccgggcaaaatcacagccctaggacttgatataaatcacggaaattacctatcctgtttgtactgtgaaacgtggaccacccgctaatgcaatcgagtcttttgtggctagagttacaatgtctgcgcatgagactgtttttgggcaaactatctcaagctctttcttaacctcatcgatgatctcgaagcctctcacgcttacgtttgcctccgcgcttttctcagatggcctttcgggcgttgagtcgatcaagagggaagcatcacaaccctacacatgcagcattcaaaatatttgcttggttaatataattagctagtttatgatacatcatgcatacatatacaaacacacaaaggagaagcttacgaacgttgacaaagcaatcatgaaactgcatacgaagcaacgctgcagtaacggtttggttaagggagtgatgtttggcaacaactctagacacggtagattcagcgagagggcatgaactgtcataaaacccacgtcggagcttcccgaaaacagagggaacaaggaagcagaaaatgaaaaacgaagctgtgattgccctcatttcaaatttttctccttcactcttatgtgaaaacttagaaatatttttggattgtgtttaggttttaagttttggtgatgaaatagttagtgcccg

SEQ ID NO: 3475 - DNA, 1343 bp, Arabidopsis thaliana
tctagagcatgtatccattgtggaaccgaaaaatgtcaaggaggcattagaggatcatttctggattttggctatggaagaggaattagaagaattctcaagacaccaagtctgggatctagtgccacgaccaccacaggtgaatgtcattggtactaaatggattttcaaaaacaaatttgatgaagtcggaaatatcaccagaaacaaagctagacttgttgctcaaggatatacacaagttgaaggacttgattttgatgaaacttttgctccagttgcaagacttgaatgcataagatttcttcttggaacagcttgtggaatgggtttcaaactgcatcaaatggacgtcaagtgtgcctttctgaatggaatcatagaggaggaagtgtatgttgagcagcctaaaggttttgagaatcttgaatttccagaatatgtgtataagttgaaaaaggccttgtatggtttgaagcaggcacctcgtgcgtggtatgaacgacttactacctttctgattgttcaaggatatacacgaggaagtgtagacaaaactttgtttgtcaagaacgatgttcatggcattatcatcatacaaatctatgttgatgatattgtgtttggaggcacatccgacaagttggtcaaaacgtttgtgaagacaatgacgactgagttcagaatgagtatggtaggcgaacttaagtattttctgggtttgcaaatcaatcagactgatgaagggattactatctcgcaaagcacctatgcacagaatctggtgaaacggttcggtatgtgttccagcaagcctgctccaactcctatgagcactaccacgaaattgttcaaggatgaaaaaggagtaaaagtggatgagaagttgtatcgaggaatgataggaagtctactttatttgactgcaaccagacctgatctatgcctcagtgtaggtttgtgtgcaaggtatcaatcgaatccaaaggcatctcatctcctagctgtgaagcggatcattaagtacgtgagtggaactataaactatggactcaactacaccagagatacaagcttagtacttgtaggctactgtgacgctgactggggagggaatcttgatgatcgtcgaagtaccacaggaggagtgttctttttaggaagtaatctcatttcatggcacagtaaaaagcagaattgtgtgtccttatcatcgactcagtcggagtacatcgcacttggaagctgctgcactcaacttctttggatgagacaaatgggtttggattacggtatgacttttcctgaccctttacttgttaaatgtgataatgaaagtgcta

SEQ ID NO: 3476 - DNA, 833 bp, Arabidopsis thaliana
ttgagaaacataaggatttcaaaagactattacgttgtacagctcagctaacacatgaaagcaacagagagtgtttgcataatgagaacttacattgaagattttctccacaacatcgtaatataaccctgttttagcccaaccacctgtgaatatcacaccatttaccaattctagcttctgcaactcaaaaatgaaattcactaagataacatgaactaattttgacaagcaatagccaaaacaataacatggtaacatcaaccttgaacttatttcaaattgcctgtttatgtgatgtaaacaaatcaggtgtagccaagttcaagtagaataaatagttgtaagattagtgattaaagaaggctacatagtgaacggaatccataagagcaaaatcatcagagtaaacctgaaacaagatttcttcaggctcgttgtagataagaggaatcacacgagctccaccagtctcagctaacttcacatacgaagctgcgatgtacgatatgttcgtcgcgtaggcgtagtttttcagagagtgaagacgagcgtcccatcgaccttcgccagggtgggtcagaatcccgatgaccggcttgtagttgaggtttggatcagccgcggagatacaggactaagactaagagattcaaagacgcgggaatcttcaactccgatttgacttgggaggaaaatcgattctgcagatttcaccgcgctaacatcaaagaatagtaacgataagaagaagcagaatctccacatctcagaggatgaagatggcacgtctccaatggtggattgttccgattttagcttttttgtttcat

SEQ ID NO: 3477 - DNA, 802 bp, Arabidopsis thaliana
catgcaaattttgtctgatcaatatgaatgaattcagttttttgatagtgcaaaaggatcctgaaaggttgtgattcttgtggttacgcttttagaaaatacacttgttagtatcattaaccaataccgtaaatatagaagtgatgatactccaaacttctacatggttatcatttatatgacgtaaaacaaatatacattcgttgttttgccttggctacacaaattataataggacaaaatttaaggatcatgaacctgaatctgtagaagagtttctagtttcacagtcaagtcatgatgccaaatgacagaagaagataacaaactttatgcaaaaaatgaggcagaactgcagaagcatgcgcctttctaagcaagtatgacgcttttgaggcggagaactcgtgttccttttcaaccaataatggcttccagatccatcgctgccaattagttgcatctctgtcttatatctccactttgtgatctttcattgttttgaggttttatcctcagtagcttcttgttgggctcatcgggtcgtaatcataagcttcaccggacttgacaaaccgtcctttcacacgccgtctcacatcagccctttctttcctagagacataccttactcgcttgtcaaacctatttatacaaaatatgttaaatattagctataacaactttcaatgatgaattaaattcctttctgtgtgcgtttatacttacttgcgagccctcttcttttcattgtaacgcataacagcgttattacgtgttgttgcatgtgaggaacaataat

SEQ ID NO: 3478 - DNA, 798 bp, Arabidopsis thaliana
ccccgatgtaatcatcaacagcatccataagttcataaatcttatctacccatttgttatcacctctcttaaccttaggattctcagtaagagtctcaacggctaaaagagcagaaccagagataatcggaatatcatcaccgttaaattcataagacgagagaagctcacgaacctcaagctcaacgagctctagcaactctgcatcatctacttgatcctctttgttaagaaacacaaccatatcaggaacaccaacctgcttagccaaaaggatatgctctttagtctgaggcataggaccatcggcgccggaaacaacgaggatagctccgtccatctgtgcagctccggtaatcatattcttaacgtaatcagcgtgaccaggacaatcaacgtgagcgtagtgacgattctcagtctcgtactcaacagtagcagtgttgattgtgataccacgagctctctcctccggcgcagcgtcaatctcgtcgtactttttagcgacgctggaaccaatggaagcgagagccatggttagagctgcggttaaagtagttttcccatggtcaacatgaccgatggttccgatgttgacatgaggcttcttcctctcgaactttccacgagcggcgcggacggtgaaggagcgacgagtggattgagaagcggaggtggtggttaatgagtaagaagggaggaaggaggaagagagagttagggttttgagtttaccagaggtggaaatggcgggacagagagaaggagaaggagaggagtaggaacagagaattctag

SEQ ID NO: 3479 - DNA, 1202 bp, Arabidopsis thaliana
tgctttatgcttataacgtacgagttaactcaccgtgagacaggtcgaagatgtgtccaaggagaccaaattaggaacctctcttccaaaaactactaccaaaggcattggagctcagctttctgcttatggcacaactgacagcacctcttacgtctctagctatactagtggttttaacaatcccaaaggtccaggggccaatgcaacgaaggttgctccacatatactaacggacaagtcattgccaagggtcgcaaggcaaaagtttcttctaaaagtggttcttacgctaaaggaaatgcgtcacgtgcagtgaaccggaaagctgctgctgcacgtgcaaaaggtacagtaggttccggctccattgtgaacggcacttcctctgagaagaaaggccgcaaagggaacaagaattgagcgggaggtgctctcatgcatattgctgatcaatcctattaataatatccttaaaactacaatctcacaatctcttttgtgttcataaataaaatcacctctaaatattactatgaaatgctactcttttgtctgtaatggctttatttaaaacatataataaatgcattatttatgatcttatattaattttcttcagtattaaaaaatatttttattagactccaacgtcatctcttggtatgctaaacattatcttcgagacttgaacatgtggttcttggtgcattatattggttaatggttattcaagcgtattcaagttcctcgtaatttagaaattctccgaccattaagttcgtcggaaacaaaatgttttcttgtagaatcccctgttctcactttccacacagaattttttcgagcaatttaagttagcaacttcatgaagttctttaaacctagagataacgtttttttacactcgagaatttcctgaatatggtaaattcaaatgacaaaatcttataaattgatagaaatctacaacaacaaaagggcgcccggtccaagtttcttgtaccaaagctattgacacaagttctaataaaaaatcctacaaaagacaaaatatggaaatatttattgatatttgatttacacataagactttaaacctttgcggggtatcgggtagccaactctttttataatgttgaaaattaaaatgaagaaatagaaagtcacaatctcttggtccggtttactaaaaaacttcg

SEQ ID NO: 3480 - DNA, 783 bp, Arabidopsis thaliana
gatggagaatggagatgaagctcttgtccgtatgagaaatgaatttcctgttgggttctccattaggaagtctcctgtatttcagcagtcgaagaaggtaccttgttcctcctatgtatttctctgtatacttctccacgttatagctctcgaatagcatccttatcacaagttgctctagttccgcttgcattttcgcatatgcatgaacagtttcactataacatatcatattgttagtacatagtaacaaatacttgtgattgttttatgttatttgataaaaatatatatatatattaccagaaacggtcgttatcatcatgatcatcaggccacatgagacgagagaatccgcggcactgttgaacatcgttgacttgatcaataccaagaccttcatgaacaggctggccatctgacatcatggtgatgtagccgtgtccggccttgtggttctcgttctttagcttgatttcgacaggaagatcgagtagttccttagcggcctccaaaatcgactggtgaagtcctgttggaaagttgttgtactcggccacaaaccatccatggtgttccatggcttcacggacgctgtctctcgtgaagctccaaagctctgtgttctgttttaggttcttgtcagagaggttgatgatcggaagctctctagtttcattcccacccattttaactatcctaagcatcatagttagtttattagaaaagaattagaaaaaccaaacaatatagttaaccatgtattggacgaagaagataaac

SEQ ID NO: 3481 - DNA, 685 bp, Arabidopsis thaliana
gaaatgggtttccaagtttttttgcaaatgaaaagtgcaaagtccatgatgagcaagtggataattccctgaaagtccgcttgcaatagaagcagctcggtcagacacaaaaactaaatcattctcatcagggattatattcagcaaacacttcaaaaaccagtcccatgacgcgtcattttcagagtcaactattgcaaaagcaataggatacaaattaaaattcccatcctgagctgaggcaccaagcaaagtccctttaaactttgatgtcagatgggcaccatcaatagatatgacttttctcatcaacttataacctctaattgatgcaccaaaagccagaaacgcatacttaaacttattagcagaatcttttttgaaaaaagtgatagaacctggattcgtcacttgtaccctgtggaaccacctcggtaaaacctcaaaactatcatcaggtaaacccctcgcaagttctgctgcatgttcttgaactctccaagctttcgaataattgattccaactccatgatcttttctaaatatttctatcagctgtttaggtctgaggggaagttttcctccttcaaaatggttacttatcaatcttcctaatgtccttgcagatgcttgacgatgactaacattccttaatgaagagtcacaactgtgatgactaacatac

SEQ ID NO: 3482 - DNA, 1263 bp, Arabidopsis thaliana
ctccttaattgttttgaaaaatccttactcatgtatcttttgaactgtctcagctcctccgatgcacttcgctgatatgcttaggacacttgttcacctcggagcaaccattccgcctctaacggaactcaaggcaaccaacaaggagaactacctcctcttcgcggagaagcttaacgaggtaaataattttgttctattagaggaattagttcatctctcgccgagctcatactcaaaatatgcttttattactaggttgttcaagagttcaactatgccttcatcagttacgaggaccagctctccgagaaggacaaggagattgagagtttttagcataacgaggatgaaaatgctcgtatggtggatgaggctaatagcgtactcagccgcatgagagccgcggaacgtagggttcagactctcgagatttctaacactgacctctccgcgaaactcaaatcgggcaagaacgcctatctgacggccattgataatgaaaaccgatcaagggccgaactccttgcttgtgaagagaggttgaagaagctcgaggaaggtcaggccgtgatgctccatgctgcgagacaagaggagagaagaaaaatctgggctcaatttatcgacttctcctcgaaatacgggaacttctacaccgaatctgatgaagtcaaggctgctaagatccaagctgcggaggttaaagcgaaccgggagctcctcgaagagatcgaaaaaggggagatccccaacatagctgaagaactcgaatcggttcgtgcggatgagattacattcgcacagaaggctgctaaaccaaagactccacgtcttgacctcgttgagctcacttcgctcctggtggataccccaccggaagtggttgcagactccaatgctttggatgaagtgttgatcatcaacgagcagggaaccaacaaggacacaacctccaaaccagctatcgtcgccatgttccccgttgatgttgagaagaactccgaagtggcggagtaaaattgattatgtttgaatcggggtggtattggtctgtggtgacccccgttttgtttcaaaacttttttacttttgtttttgttttaaagttgttggccgaggaggccttaactctatatttttaacttatttaaggtcgtagagaccgttttatgtttacttggtttaatttttcgaattgcgagatagactcggttttagtgtttgccggaaaataactaagtggattcccatttacgagtt

SEQ ID NO: 3483 - DNA, 771 bp, Arabidopsis thaliana
taagttcaaagatctaaagcacaaaacacttccttttcaactaaaaaacccttgaaaaagaaaatcaaatccaagggcagcatcccctattcgcaataaaacaggcagccgaggacgaaactcttgaacttgacctcaaaaaatactgcaagtaccacaaaaaaagaggacattctaccgaggagtgttgcgccgtcaaaaaattaattgcagtcgggggcaaaactaaaaaaggttcaaactccaaggctgaaatccctcctcccgacgagcaggaggaggaacaagctcccaaacgaaagaaacgggtacgaacaccgaaaggaggtgactctcccccacctgcctgggaggaacccatagacctagtctttgcggagctcgatttaggaggcaggacagaaaggtcagtcactacgcctcctcccgcgtcggaaaagaaaaactagatgttaccattacgcctctcaaaattttgcagaaaagtaactgagcacctctccccgaaacacatcgatttcattatgggaggatctcaactctgcaacaattcgatcaactcaatcaaaactcatcaaaggaaagcagattccaacacaaaaggaaaaagcccgatgatgggacctgatcaacagatcacgttatgggaaagcgaaaccactaacctcgataaacctcatgatgacgctctcgtcatccagattaacgtaggcaattacgaactctcccgtataatggtctaagggaagctcggtcgacgtcttattccaa

SEQ ID NO: 3484 - DNA, 1466 bp, Arabidopsis thaliana
gagtaaactggatcagatgcaagagatagctaaatccaaatgcgggaataacactatcccgaggaaaaagattacttcaagatggtctgaagagatagattatacaccagaagagaaagaggcctatttcgaggaaagaagaattgagtattcagctactcatctctcaagagaggatgctgaatatgatgatgagatcagagaggactatgcagaccctctctatcacccattttcttcttaatgagtgtgaggagtcaagctagagactttaaacaagctcacttgggaggaattccaagactgtttctgtaaataaaacttttatttttctcgttatttttgatttgtttttggttgtgtttgtgattctcaggaacagagcaacagcgtggaggtagagtaaaaatttaaaaatttttactctacagagcaacaggggatcgagtatgtcagaaattcaagagtttgaaaaacttctgttgcactaagaggccatgaggtcgagtaagttggtcgagtattagtgatgattttaaaaaacaaaattttgagattatacttatactcgaccaacagaagctacagagacttgcatggagtttaacaagtttacagaggatgacagaagattctagtcaacagagaacagtgcttcaggacaaacagacagagcgtggcccaccacctctcacctttgttcccccacgcgtttttagagataacaaaatctcttccctccttccccaccactcgatctcaccctatcctttcccaccgacatcatctctcttcctctccaaacgctcaacctcgaagactcactctcactcacgtctctcactcgaccaaacttcactcaccatctctcttcctcaccaaacactcgaccactccattacactcgaccacaccgctcactcgatcccacacctccggcttctccatctctcacggcttcgtctcccttcccactcgaccacgacacagccgctgccgcttgcgccaccgccttcattctttctttcactcgaccggtttcgccatctctcatcactcttgaccttgtcgttcactcgacaactccgcctttcacttcgctggaagcttcaccgtctcaacgtcttctccatcttcactcgattgcaacgacgctcctctccaatcaacgcatactcgatcgccggactttcgccatctccctgtcacctgtgttcactcgacctcaccgttccagcttcaccatttctcaccgctcgtgtctcctcttcactcaaccgctacacgaccaattctcccttctcgccattcgtcgttcatccgccagagcttctctctcattctcacgaacactcgaccgctcatctctccaccggagttcgaagactctcaatcatctatgcttactcgacctcaagccgattcactcgggtgaagcttagctcgaccgctcttcaacccgccac

SEQ ID NO: 3485 - DNA, 167 bp, Arabidopsis thaliana columbia
ttcatctgagtctgatttaagcaaatccgagcttctagaagcactgaggcgttcgcaaacgcgggctagggaagcggagaatatggctaaagaagcttatgcagagaaagagcacttggtgaagatattgttgaagcaagccgcagagctttttgggtataagcaat

SEQ ID NO: 3486 - DNA, 1414 bp, Arabidopsis thaliana
tccacctgaagcaatgctctctgactctcccccagaacacagctgagtctcttcctctgctatcctggatgacaacttccttgtagatctcttgggactttccatcaatgaaagtcctatcagcttttctgtgtgtctcatctaagagcacaaggaaatcaggagtcgtttcttcggtcttctcacactaaaccacatgaaaatataaggtcagttgtcattataacattgcagattaagaaatggtatgagacttgagacttaacttacatttttttgcgcccgagctttgtaagaggtatggccagaacggtgtttagatataccgaggccctgtggatcatgatatcatgcttgcctacttttgatactctttaactctgacttcggatctttccaatacctaacaagaccagcccactcctcaggatcaagccaccgcgccattgcctcatctcctttcagcttccactttccctaccagcgagagatttgatcgcacatcctatccttcagctttgcttcaaactctatcctaactctcttgtttattgcacggtcccagttgtatacttgctacaaaatagagagatgatatatcaaaaagtgcaatcaagtcaataaattaacacaagaaaacatagtcacataatcttgacacaacagccaaatacaaagcagataagtttctaaattaacacaagaaaacaagacaccaattccacttaccgcaaaagtttcaaaccaacaagtgatcactggttgcggtgtcattgtccaataagcatgtggatctttaaaatctctctcaaatatgctgcagacagtgccaacaacagaagagtcttcgttaaacctaaaaaaaaaaaatcaattggtctaattagtataatcatctaaaaccaaaacattttaccagatcgttatgctaaaccaaacaaaacatctacacaactaaccctaaaaccagaatagaaaccaaaacattttacctgattgttatgctaaaccaaacaaaacatctacacaactaaccctaaaaccataatagaaacctaattagtgttagaatgaaagacatcaacttaccagagagttcccggaggacgattagggtctagtctcgttagagatgcatgaccgggactatcaagaaactcatcaagtgtcaggttgttgaaacgcctagatataggattagcatgattatcagaagctttgaggcggttgattttgctgtgtagaagaagtcccatgtgcttcagagttttgattggttggagtcagaggagaggagggaaggcttctaccatgaaccgccgagttgttcccttcactgagaggcgaaggaacacgttgttgctgctgctgcagccggaatcttaagtaatcgttcccagaaaatgacatctcc

SEQ ID NO: 3487 - DNA, 1044 bp, Arabidopsis thaliana
cagataaaaacctcttgggacaaagtttattccttctgttgtttatcattaaaggaactgattcccatttcttgaaaaacaattgccactttcatgatcgagagaaagggattgacacaaattctgtaactggaattggagctttttgaaaagacagaaacaggaaattgtcccaacagactgacaaaattaagcctgaggggattcacagaattacagacacaagccattattacatgatgtgatgttttttcactcttctttactgacaagaccaaaaaacaacataaacattaacaagagagaaagacataaaccaaagacaaaactgacaaaaatttaggttccaaaaccaatgaattatgactcaaaaaagaatagagatcaatgaagaaagttgaaaaggaaaaacaaaagaacaaaaagacacagtaccttgtcttgggtgatttatttgatatcattaatcacctctcaacttcttcacttcaactcttctttctctattcactttccaggcacaaatcttggtaagtttaaaagtgtattaactcttgcaacaccttcaagtgcagaatactctgttccaggttctgaatccaagttatccgcttcttttatcagcttctcagtttcactttcgtcgagagcaatctctttccccgacctgacagtactcgaacggcctagaccgcttggtcctgatgcatcatcatcctcagtcgtggcttttagttcttcttcttctccatcttcaagtttggagatggaagaagctgtagatatggcgtttgtgttgctggagtctagatacaagcaaacagcggcacagtcatcgactttggaagtcgggtatttgtatctccaagctctgaccgcagactcgactaaagctcttgctgcagaggagcgcgatggagctgaagctacaatcgccactacatcttcatttgagagaacatccaaatctatcacaatagaaagaaatgtgagcagcaaaaattgcaaatagagaagatatgtgtctgagagagagagtattta

SEQ ID NO: 3488 - DNA, 494 bp, Arabidopsis thaliana
tgcttttcatagcaacgtctcatcgtctagctgaactcgtcttttcacttgacaatcactgtcggcagttaagtgccagggagagagtagactttaaggttaagatcaaacctaagctcaggtttgtaaaacgcaatcctatttgtttgttttatgattttgtggtgaatgagtaagaaatagcttggtcagttggatatctcactgaggccaacaaatacaaaactgtttcctgatgttcttataactacttgcagtgatggtatgaatggctacttgactccgtgttcaggggaaactcacccgccagtattcaggtccccaatggagggtatggaggacatcttgagcaaccaagtcatgtgagatcacgaacccttgttttcaaaaatgtttgaagccaaagttgattaaacatgcatgactgatttattttcattgcttctcagatgttgtatttacagacttccagatgcacatgaacacataaccag

SEQ ID NO: 3489 - DNA, 785 bp, Arabidopsis thaliana
tttgtaactcaggaccatttactcctttatatagtctgtctacaactcttactgaaccagaactggcaactattctggaggttaataagcgttatccgctcagtataatgaggcgcctaagtgtcaatccacgatcctagctttcatgtggtatagtttgtcataaaatttatcttaaaaaaaatgtaaaagattcattgtttaccttgttcaaacccgggtgtatcagtgtcaggaggaaacaagagagtcacatgaatgccatcagaaataacttcttgctgcaatgcttgcgctaaaccctgaagcccaaacttgctcgctgaatatgcagtgtaaccatatatacctgcctgaaaacgtaaaaacacacgatacatcacaaagtgctctcgacttccacaagtgcttccatttttacaaactcaattcaacaattaccaaactgctttaaattcttaatctaatctgcgagttatgattctatgatacggcgttaagagtgatagagatacgaacctgaccagcttgagaggacacaagagaaatggaagcaggaccacgaccttccctagctttcatagcaggtaaagccgccttaatcacattgaagctcccagtcagattcacatcaatcataaacttaacctcctcaggactctgtttctcaggctctttcccaataaacacgccttgattaacaatcaacacatcgatcggtcccgattcatcaatcgctttcgaaacggcgtcgtaattgcgaacgtccgcagagaacgtggcga

SEQ ID NO: 3490 - DNA, 1026 bp, Arabidopsis thaliana columbia
tttttcccttagaattaagtcattaacattacagaaaaatgtaatatttgcatagttcgatgtgtcgatcgtcgtatcttacgtacttcattactctcatgtctaacgtatacgtatatatgattagttaaatagtttgacaagaaaattaggaaaacaatataattcactgcacatcaaaggcatttgttgttagggttaattatctgatttggttggtctcccagagaagaacaaacaaacaaaccctaatatcgatcgactagtcaaaactcaaaagctctttcgattttattcactgtgagtgtgagtgagctatccaagcatgaggcctctctacctacttttgaggctaatgggctattatacaggccctttttggcccaattacaaaaatgtcattttccgggaatattataaggccctcgctaaaggggtttaagacgcaagatgtgttcaatcggagtaactgctctctgttctccggctaaatttcatcatcgccgggaacaatcactgatttttactccgacccatttgcgtaatccaaatgggttccaatttcggtggagaaagtcccgacctttcgctcccagactcgcccaacccgacaatttcgctccgccgctccctctcatacgctcttcgacgtctcttctttcttccaaggatttcgttcagatgctggcgagaaaagccgccattttacttgttgggtcgtttgtctttctagggttctgctcttcgaaacctgctttagcgctacccactgcaactgtagtctcccaggcagagttagaggacgagaaaatgttcgagaagcttctggaaaatgagccagagaacatggaggctatgaaggctgttgtgtataagaagatgaggagagggaaaaatgaagatgctgtgaaatatgttgagaagctgatgaaattagagcgtcatgaagttgagtggaagcttttagaagcgctttgctatgaaccaatgggggaattgacaaagctaagagattgtataaggata

SEQ ID NO: 3491 - DNA, 1226 bp, Arabidopsis thaliana
tgacgtaaaaaaacaactctatatattatataatgatgttaaatttttttgatatattaaactttttataagtttaaatattaataaagttttataaagttgaaatatataaattataacatttaaaaattataatatttaacacctcttaggtaatgacataataactctaaaagcaaagaatttagacgatttaaatctttaattaaatattttcaaacctaaataattaatttcagtagcatgactttgtaaataagttcaaatacatgatttatttatttaaacaaaaaacatttagtaagaacaatatttatttaaacaaaaaactttgttttaaaatattgttaacaaaatacgtttatgctaattttaagggattgatgtgaagtttgtttggattaaatttgattgataatgtgattgacaatttaaattaagaattttaaaaaatataattattttagaaaaagatttaatgctaatagcattgagttgtaaataagtcaaattttaggatttatttgctaaaatggctgaaaaaatgtatatatagataaatctataaaccaataacccttcctaaatttcgaaaaaaaaaatatatatatatataggaaagtattattgtataaaccataaatgacttttcaaaacaagaaaaataataccttaatctgcctccaatagtctccgtaaggggaaaaaaccatttctctcccaccgttgaggattgtttcaatcacttttaatcgcgggcggttcgcaaccttaaggtcgtgtgttttcatgaggtcatgagctacgtcagaggaagagactacgaggatcgggacacggccaaaatgaaggagcatgagtggcccgtagcggtggctgagggaacgaagggagcggtgagggtggaggcttagctggtggaggtttccgattaccggaactcgccacggagacggtggtaggttgtctttggcaacggttcgattcagaagtggttttaggagaagaaaggctaggattgttgctaggcagagagagatgactatgatttccatttctaacttttgaaacaattctctcactcgtaatatatttatttatgtgttgggtgattactagttactgattagttggaaaacacaaactgttaaactactcatcaataagctaagtggcctcaagctgacgtgtctatacttgtgtgagagttagctcttagagcaagt

SEQ ID NO: 3492 - DNA, 1766 bp, Arabidopsis thaliana
catgtatttttcttgagttagcttaagtgtaagactgttttatatgtttcagtaaggagaggttgaaatgtgaggctcttggcgaattggcggttgacttgcataggaaatttcgatcttttcgcaatgacagtattgttattgacaatatatttgttgcactcacatggtggaagatcttcaggtatcatactggccccaaacacgtgaagatccaaattatgccgggatatcagatgtgactgtcgaccccaatatcgaagaagtgcaagagttaaaaatggtcctcgagtaatgcaagatggaaggaatcgggttattaccattgtttactttcattcctcctatgtatccttcaaacaactatttctgggaactttattttttctttgccttcaaaattcagtttgataactcagccgtattataattaaataacttagacactaaataacattatacgaatataactcagtcgtaagttaacatagtttatctataactcagccgtaacaggtaaaatgaactcaactcggccgtaacatgtaaaatgaccgaacctttccacttccctaattatataactcggccataacatgtaaaatgaccgaacctttcgacttccctaattatataactcggccataacatgtaaaatgaccgaacctttcgacttccctaattatataactcggccataacatgtaaaatgaccgaacctttcaacctccctatttaaataactcagacgtaacatgtaaaacggccagaatattttggcaaataactcagtcgggatgttaaataaatagcaatattacagtgctgagagtctacaatgtcacgaaatacataccacagttgccaaacaagggaaggaagacacatacagagtacaaacagtactatgcacggcaagttttaacattgtgccctgtttctttacatcgagaacatgcgtgttccttcctagggcgtttagtctcaacggcgacttctagtgctgatttcatccttagtttcttgggcctgcctggctggttcgcaacaatcggaggcaaacacggttggtcaattacaatttgaggaacagggacttctgtatctgaaggcatgattgcacaagcgtacacattgaccaaatgactgctcttataataaggactgcacagggatatacgagacacacccatatgctctgcagctgcgattgcatggatgcatggtaatttctctttgttgaaaagacggcatgtgcattgtttttcatccacatttacaacatgcaaagatgcttcataagctacttgaacgcgggaagcatcaatcgtttgtacatccagaagtcttgacgaggtgacgcgggtctattagagagaagagacaagaaacaaaacaaatacgttatggctgagttattccctttatggctgagttattctcgttatgactgggttatcattattcgacgactgagttatgcactagttacagctgagttacctgtaagagtttctcaacaccacgtgtgagctgagtatgctgtttgctcgcatcatctctctgttcagcaaaccatcttgtcatcatatgtcttatcgcttctaacaatcgaactatgggaagatttctggcttgtgacagtgctctgttcattgattccgctatattcgtagttattaaattgtatctatcaccggggaaatgaggacgcgcccacgtttcaacacccgctctttggaggtatgcatgtagtagaggatcac

SEQ ID NO: 3493 - DNA, 1300 bp, Arabidopsis thaliana
ttttcccactggaaagggactaaacccaacttctagagggcagagttgaaggatttgtggttaaccattgggaacgatttggcgctcaactttgcaaggtctaagagcaaccagattcgtagccctgtgatccgctactatcagcgctcagtagcgaatgttctgtaccccagggaatctacaggcaccgtgtctaacacagacatggagatgattgattctccactcaagggcattctccggagaacaaaggtgaagaaggtcctaaagggcgaccttaatgatgcaccaccggttatgcttctgttgatccacctgtgtggatacaggaagtgggcgcacaccaacgggaagaagagggcgcgaggagccctttgtgtaggtggtgttgtgacaccaattctgattacatgtggtgtacctttcacgtctccagggtttgatccgaggatgatggatttagatcacttgcgtcgttgtgagtttctggagcacgacatggttggcgatttctatcgctacaaatttgagcactccttgacccgaacagccaacattctgcttccctgcaccgaggccacaaccatacttcagggcgaaaacattgacttcaagcctgcgcgtgattacctctactttgagagcgctccaccgactgatgacaacgtccctacaaagaagctacccaagctgagattgctgagacagatgaggatagggaggaggagtacgatacgcgcatgtatcatttcagtgagcatgtacctccagcgtgggagagcaagagcttgagtgaagctcagagaaacaacagcaagttgcagaagtggtgcaagaaacaagatagcctactcatcaagggcttcaaggccatcaagtttctgacagacaagctaagctgctcctcttccaccacagctattccgcagggacaacctcctcaagacatgcccttgaggagatatgacgcgccaaagccaagccaagtcaccacaggcctgagcctagtgaccaagtagtctcacaagtccctgcgaggcattcatcattcgagccttgggagttcgggagaaagaaaaaggctgcactggctcggtctagcagcaagagtacacgacttctccagtcttgaagcttacgcgaccacgatgctggccgcagaagaagaagagaggtcgagtatcatcagagcggtgctggccacgacgaaggagcagaggtcgagtaccccatggcggactgagacacaacaaggagattcttcaatggcctgggagcaattactggcagctattgacga

SEQ ID NO: 3494 - DNA, 1336 bp, Arabidopsis thaliana
caaaacatggtctgtcaaaacctctacgaagtatgttgttggatatagtatgatgttggacaaagtaggatgttggataaagtttataggatatgcgctagtttcacagttccactagttggaatgtggttatgatatgttaattacttgattttcacaactgttggctcaagaaaagcactttcagggttttgccgagttataacaaagtgatggctgagttattcctatattgtggctgagttatgttagaatgcagagaaaaatattctccgctattgaccagatacgacgtcggtttgttacagagtctccgttattgaccagatacgtcgtcgtagtgacacacttataaatccccaaaacgaaaccctaatttataaaattccaatttctgatttcagatccggagcttcttcttgcttttcgtttccgaatttcccagctaaaaattaaagaaatgagtagcaattccgagaactcgattgcgagtacgcaatccgtcagccgttggggacgtgggttaccatcgaagtgtcattgcggattagacgtggtcatctatacatcgacgtacgcaaagaaccctggaagaccatacttccgttgtcctacgcgtaaagatgtaagtatataattgatttgagggttttattggtttcgatgttaattgcggatgtgattgaatatgcaggaccatttgtttaaatgggtcgaagatggtacatacgaagtggttgtagacagttggccgaaattgtccgtcatggacagtgagttaagcgcggccaagtccgaggttgctgtcgagctagaagcgttacaggcgatggtgaaagaactgaaggaaaaagtaatgaggagcgaaagggaaaaccagatatggaaattgatgatcaaactttgctgcttttgtcttgcctttactatcattgtcattgtttttggtatcttaatgttcccaaaaatcaacgaacagaggctttttcttggctactagtttgttttatgtttgtatgaattgctagctactggaatccattatgtgtttgatgtttttctcagcgtatagggttaattcgtttttttggttcaaagtagtagcttgcaatgaaatggaactttgtgttcggccaagctaatccaatatcgttgactgagttatactggtaatgttgtggctgagttaatcatacgctgtggctgagttaatatatgttgtgtcttcggaaatataggttacggctgagttattataatgttgtggatgagttaattatacgttatgactgagttaatcatacgctatgactgagttatgataaatttacaagta

SEQ ID NO: 3495 - DNA, 525 bp, Arabidopsis thaliana
cccactgctcactcttcttctggatcctactatcaagcacctgagactctcaagatggtaaaaccttcacagaagtgggatgtttactcttatgggatcattttactggaattgatagcgggtaggtctcccgcagtggaggtggggacatcggaaatggatctagtgcggtgggtacagtatgcattgaggagaagaaaccattgtgtgatgttcttgatccttgtttggctcctgaggcagagacggaagacgagattgttgctgttcttaagattgcaatcagttgcgtgaatagcagtccagagaaaaggcctaccatgaggcacgtttctgatacgctcgacagattacccgtggccggcgattgagacatctagagattgcacataaagcttgttttgaaatttgaagctgcaatgtattttgaagcataagcctgatgacactaatgtggttaccgtttgttttgttttattttgttcttttatttgcccagtcttgttggtggttggttattaagat

SEQ ID NO: 3496 - DNA, 1257 bp, Arabidopsis thaliana
gtattaatatattacccgaagtcttaaaatacctaaacagattttagatttccaaatttgagatattagaattcaaaaaatccgacttgaccccgacccgaatatccaaacgtccaaacctaactaaaagaacgatgcttttactatgcattcgttttacaagtatttcttagtcttttttgctcattggaaaacttgccattgtgattaattggtttctaacgagtttttcattgatagacttaacatttggcagattttattaagttttggggctaaaaatggaaattcaaagaacggcgataggatatatataaaggtctccatgtcgttatgttttttaatcaaaacattttaaccaaacagcaaaatcaaaatcaaaatccaaagctaaaaaacagatactatcagataacatcaaaatatatagagacacaacaaatacaacatttatctatactagagtttattactatggcttttgatgaagatatgaaaatggcgtctttcttaagagaagaagaagaacaacactattctttatcaagactctccgtttgttccaactacgacggcgatgaagccgacggtgagtcttctgcttccgacgagaaacgtgttgtccacggcggaggagagaaatccatggaggagctaaatttttcagattctgataaagaatcaaccggttgtcaatctctcccggcgacacctccgagacggagacggcggagaggcggtggaggaggaggatatttagcggtgagttctccggtttccggcgataaagcttacgctagcgagaacgaagtacaaaagacgaataacaatcagaggagaaggaggagattgaaaccggagtgtccaccgtgggttgatagtatgcggaggagctacgtcggagatgaacagagtagtcacggtggttacggaggaggagtggtggttgttacgaggcctataggaggaggaaggccatcgtgtatggatttagaagaagtcaaagcttgtaaagatttggggtttgagcttgaaccgggtcgggtttcgtattccgggtcaacggtggatactagtagtggcggcaattcacctacctcttctaaccaccgtatttcgagtcccggttagtccctaaaaagcttcttggctctttgtttaaattctttatactttttaagctttgttttttttgacctttttatctttttttggttggatttatatgcacaaaatatctaaacttgggggatcctc

SEQ ID NO: 3497 - DNA, 580 bp, Arabidopsis thaliana
ccccagaggtttggaggctaaatgtttttaaaagaagagattatttaaaaataaaactaaggaaaaagggggccaaaattggaagagtcgaaaggttcagccatcgaaatgccattttcgtcgctgtggtaataaaagctataacaattattaatataccaaggcgaactaggtggatacgccgagtccacgtacacaaactcgctcaatgactcatcgtaactcgtctctgactcggtaactccactatctcgcttagttcttccgccgtcgacgcagcttcttcgcttgacggtgacaacgacgatgacgtacacgttgaatagctcgaggaagacaactgcgtctcagctggggcgatgacggtggttggatcggagactacgagagaggaggaggagggggagaagtccatggcggccgctacggccggtgcggcttgaacgtcgcgtggagaggaggaagctggacggggaaggtaagtggcgagctccgggaagttgaggacggcggaagttcctttaatggtgagagcagctgcgtcatgtgcacgcgccgccaatttccggtgtggagaaag

SEQ ID NO: 3498 - DNA, 1625 bp, Arabidopsis thaliana
  unsure (1)..(1625): unsure at all n locations
ttttctttgcacagtttcttgatttcgtccaaatcttaaaccaacatctctataaacttcattgtgcccacatatccgtagaaacatcgcaacactttcttcaatacttatattcaatgtaggctgaagatcataatttgtttgcaacatattacacaatgttgtgaaacatggaagtgacatccgtaataactgaagacaagcagcagcatcttgctgtagtcgacgccatatatttctccatcccaaacctctatcaatttggactggtgctctttgaaaatatcggtcataataattcaacgctggttgaatcactaactcttcaaattgtgtattttccaaattccacagttcaattctttcttcgtaaggtcttgtgatcgcaactgacatatacgaaatgcctgaaattcaatacaaacaatttcttgcattagacatagattattttacaaacataaattaaataaaattcaaccttaaactaaaaaaaatacataaatcatttcaaaacataaatgagattgataaaccacaaataacacaaactaatcttcatctcctacatcattgtgatgacttgcattggatccttgcgcagttccccaaatattaaaaagacctcctggtctaggtgtttgtggtatttgtccagtttcaaaataatttgtgaaaccgagaccagatgatgatgtttgttgaatgatcggtggagtttcagttgttacacaatctccttgacttccaactgaaaatccatattgaacatttgttggagtcgttccgcttgaaccaccttgttaaaatttttctgtttgccgccattgtggagcctttggtgatgatccccactgtggaacatttggtggcgtgtccactgtgcatttggtggtgttttccattgtgcaacgtttggtggtgtttccactatggataaatgggaccccaaaaactgggtgaattttgcctcccaattacccacagaggatggacttccagatgatatacctcctgaatgtggactcccaaatgaatggcttgaanctaactgttttggcacatcttggttgtcacgtgaaacaccagtcatagcttctaacagttggaccttatcctcgtcggtgcttgcagttatatcaatcaaatacttacgccaaaatactagctccttaagtgcattaatgcatgcccaatgaaatctagtgtgcttaggaagatttagcgcgataaatatccgttccgcctttttaaattcatcgtaatcatcttgatcaaaagcaccaggacgaagttgttgaaaactttgtcgttggaattctctgaagccagtgatgctgtcttgtattgttgtttcaaaggattgtcgtctatgacttcttcgtgaaccacttcctatagaaactagtgagcttcctccagatctttgtgcactacttccacgtctagcggttgactgcgaatttggcctacctcattgttgccttctagcagcagaatgttggaatacttcatcatcatcaatggtaacacgatacacttcttcttcttcttgcgtttcaggaacctcggcttctggcatgttaccactatcactgtctgagtaatcttcaccttcttcatca

SEQ ID NO: 3499 - DNA, 1687 bp, Arabidopsis thaliana
ctctaaggggttctctttgaaacgatttaagagtctagcgggtttggttttatactttgataaacttaaggcttttcttctaatcttagcacatagggcgttttacccttttctttgaatcacaaagcctaacttctttacattccaaaccctttactagacttaacacttttgtatcccccttagaactctaaactcttactcttttttttttttcttttcttttccttctcattctcactctcattcccattcattccatacacattcccaatcccaaatacaagtctccacccaaaaggtgtgggctaggtctacatgaaagactactcttgtcggctcatcctaacacgttataccaagctcaatcgaaaaagacctcacaatcacacacaaatgatctttgacttgaaataaggctagactaagggtatgggaaactgctttaaaaatgagagacaactacttggattaacagagggtgatgaagtgaataagatgatccaagtatgtatatggtagccatgagttcataaacaatgcataaacatgataatttcaaattcatttcaggttctaatagatagggaatggcatcagataagcgagtttcgatcaaagtagtatagtcaagttacaaattcaaagcagggtgcggtcttacttcagagatacaatcggttatgcaatagagaactaacaaccttggcattgaacttacttcattgaatcaaaacatgcttatcggtttgaaatcatcattatcccctatgcaaatgagcaatcctaaacgcaaacactctatatacaatcctaaaatgaaatgcaatctacatgacactctgattttgatgaaatcattttctgaaaaattttcaaatttgtatggtttttctatgccttagatgatgcaaaatttgaaataagaaaagagaacacaatgttcaacatgtcttgaaccctccaccaaacttaaattatacagtcccttgtgtaataaaaatctgaaagagaattcaagactaaaacaaacaacacacaagaaaaaaaaaaaaaaaactaatggtatgtacaatggctgaggtagtgttacctcagttgtcaggtgaagtaagaggagacgaaatcatcgatactctcctttaagtaactccgaggaacgggtttgtgctgaacttggattagctggatgctcgaccctttgctcgggttgttgatcgagtggctccttaggtggtgcattagagtggcttgctccagcgtctgatttccttgttcttcttcgctttttcatcttgctcctcttttccttttctctaggtttgaaggatgattgccttggtggtgaaggtgcagcatggtggttcctcggctaatataaagactgtcttgatggcgaaggcggatcgaaatgtataggttcgtgacgagtggatccacttctcccaaaaggcatgttctgtggcattgctgtagttgtggaagaacagctgattttgagttggagattgttaaacttcttgttgagtgccgcgatagccttgtcctgcaacttacaccagctttggaggaaaccaaggcgcttgtgaatcacttttgactctttactttgccttggtgctgagtactcctcgaagtaaaagtgttgtgtagcgtaagactcgtccataggttctgcctcattatc

SEQ ID NO: 3500 - DNA, 743 bp, Arabidopsis thaliana
aattcataaatgaactgacttaatccacttgttattagtcatgtcaagcatgtagacatctccatcagaaggtccggatggaccaatcccaccctgccaacaacaaaaacgacatgctcatatgttagatcatagactattgcaacctaaacatccatcgtgacatatgtaaacttcatgaacgatgctatgacaatcaaattaaaacaaaatctttccagatctgtgttctcggacaatcacctgaataaggatcaaggtgccatataaagcggcagcatgacaagccctgggagacggaacgtcaccaatcggattaagcctacacaattacgaatcgttacaaagagatcctattagaataatgaactaaatgatttcctaaattctaataagatccacctcttctaaaccaattgaaatcatcaataagaaaaaaaaaacctagaaacaaacatcaagatcctcaattaccttgtccacttcctggtcaaaacatcaaaagaatggaccgaattggtgacgccatctaaacctagaaaaacaaatcacatacaagaaacaaagccatcatcatcagagaggatctcgaaatctcaattccctatcaatttcgtaaaatcgggagtaaaatcttagtgatctcgggtaaggaggagttatggttggcgacgtcagtagtactgcgcctgaagaggctaagctgatgggaattgttgacgaaaaccgccgtgagagtatgg

SEQ ID NO: 3501 - DNA, 586 bp, Arabidopsis thaliana
atgaagatgttcctcttttcgctctgggtttaattaattctgctatagaacttggagggccttctttccgtgagcacccaaagctgttgactttgattcaggatgatttattctgtaacttgatgcagtttggtatgtccatgagccctctgattctttctacagtttgcagcatcgttcttaatctctacctgaatctccgtactgagcttaaggtacagcttgaagctttcttttcatatgtacttctgaggattgcacagagcaaacatggctcttcttatcagcaacaggaggttgctatggaggctctggttgatctttgcagacaacatactttcatagctgaagtgtttgcaaatttcgattgtgatataacttgcagtaatgtgtttgaagatgtttcaaacctgctatcaaagaatgccttcccagttaatgggcctttatctgctatgcatatacttgcattggatgggttaatttctatggttcagggaatggctgagagagtgggtgaagaattgccgcttcagatgttcctcacatgaagacgatatgaagaatctggacagtgagatgtgag

SEQ ID NO: 3502 - DNA, 940 bp, Arabidopsis thaliana
tctagacaacccattaaagctcgttgatgacgatgtggcgagctgagggagataaattcaaggctaaattctccactaagcacacttggaataacatgagagtatcttaccctaatgttatatggttcaaaggagtgtggttttcctactcgacccgtaaatattcttttttttgttgttgcttggaatccataacagattagcgacaggaaaccgaatcaagaagtggaacacatggctgcaggtcgattgcttcttgcgcaataacacggaggaaactagggactatgtatttttcaactgcccatactcctcagccatttggaagaacttagcacaacgtcttatcacgatcaactatttgacagattggaaccagctcattgcactgttacacagtacaagcatccctacactcatcctcttgctacttcggtacagctttcaatgtaccctctatcacatctggcgagggtacgtcacggggagcatccatctccaaaagctcggctaatcaaactcatcgacaaaacagtgcggcatagaatcagctcactcaaaacttcaaagaaccttcactatgaggaaggcctaaggctctagttctccactcggtcaacataaccgcgagtactctgtttttcgtttcacactatctaaaattttattgtacaaaagattttggttcaataaaattttacattcaattcaaaaaaaaaaagcatttatgttaagatatatgggctatattagttgggagatttactcaaatgtcatagaaattaggtgtatttaccagaaccatacaaaatattattttactactatcatattttggtcctattttgtatacgcatcgtgcccctattaaacgttacaagaaaaaacgtaatgacagagaattcactgccacgtctgcaaaccgcgtcgcacgttagaa

SEQ ID NO: 3503 - DNA, 2167 bp, Arabidopsis thaliana columbia
gaaaaatggtaagtaacgtgtatgtgatactttttcggaaagtacaaagagagctctccgatgaattaggaaggaaaatggaattcttctatagtttttttttctactccaaagtttgaccttaatgtactttttcaggccttttcgtaatctttgctatattacggggcgaaaattatatgtacggacattgttttcgtatattttgcatgtatcaaagctcttataaacaagatagggtattcctacatagctggtgggacccaaggcaaatcgatcataaagtcttcaaaaaagaatagataagattgcattgcatgtagttacaaatgcgatcataccaacactaacgcaccagatcccatcagaactctgcagttaagcgtacttgggcgagagtagtactaggatgggtgactccagaaaagtcctcgtgtgtcaccctctttttgttttgttaaaaatgtatgactctataactttaagaccgtgaggccaaacttgacatgtgataccttttcggaaagcccaaagagagctccccgatgaatgaggaaggaaaatggaattcttctgtagtcttttggtctactcctaattttgacctgtaatgtactttttcaggccttttggtaatctttgctatattacggggcgaaaattatatgtacggacattgttttcgtatattttgcatgtatcaaagctcttataaacaagatagggtattcctacatagctggtgggacccacggcaaatcgatcataaagtcttcaaaaaagaataaatacgattgcattgcatgtagttacggatgcgatcatactagcactaatgcaccaggtcccatcagaactctacagttaagcgtgcttgggcgagagtagtactaggatgggtgacctccaggaaagtcctcgtgtgtcatccctctttttgttttgttaaaaatgtatgactctataactttaagaccgtgaggccaaacttgacatgtgataccttttcggaaagcccaaagagagctctccgatgaatgaggaaggaaaatagaattcttctatagttttttttccttctccaaattttgattttaatataatttttcgagccttttcgttatatttgctatattacggggccaaaattatatgttcggacattattttcgaatattttgcatgtatcaaagctcttataaacaagatagggattcctacatagctgtgggacccatggcaaatggatcgtaaagtcttcaaaaaagaatagatacgattgcattgcatgtagtagcggatgcgatcataccagcactaatgcaccggatcccattaaaactccgcagttaagcgtgcttgggcgataatagtactaggatgggtgacctcccggaaagtcctcgtgttgaatccctcttttctttttcggtttttctcttcttttttttgttaaaaatgtatgactccataacttttagatagtgaggcaaaacttcgcatgtgataccatttcggaaatcctaaagagagctctccgatgaatgaggaaggaaaatgtaattcttctattgggtttttattctactcctaattttgaccttaatgtactttttcgggccttttcgtgatatttgctatattacagggcgaaaattatatgatcggacattgttttcgaatattttgcatgtatcaaagctcttataaacaagatatggtattcctacatggctggtatgacccacagcaaatggatcttaattctagactttttgtaatcccgatttctctttatctattcagtattcagtattcagcttttgttcttgatttcgtttactgttgttcattctgttatcatcatgttgttacactgttgttatcatgtcttccacctgttcaacgtttatgctttctgttatgatgtctgagtagtgaataggtttttgaggatggcttagagtagtgtaggattctcagtatgctaggtgattgagtattgattgatagatccttctggattagttgttcttaatgcctattgctttctgatcaagtggaattagagcccagacatttccgtgcccaaaaggtgttcgatgaaatgtatgaaccactaattccagagattcgtgaccctgtaccaaggtaatggttgcaagga

SEQ ID NO: 3504 - DNA, 1226 bp, Arabidopsis thaliana
ttaaaactcgaaccaagtccaagactcttggctctagcctctcttatcccttgcaacaccaatggattaatcatcaaaccaaaaacctttctcgggtcgatctcaaacaaagtcttgggaagatcaacaccgttcacaatcggtacgttagagactttgtagcccttttgagctaagtaagtcgagagtggtgtcttccctgtcctagagacacctacaagaacaatgtcagctttttcaagattctcgggcaaggcaccgtcgtcgtgtttgatagtgaattcgatagcttcgattcttttgaagtagtcttcgttgagagatgagtttgttatgccacgtgaaagaccggaaggattagtgcctaagtgagaggagattgactctgtgattggtccaagaatgtctaatgatgggattttccatagcttgcaagctctcatggttgcttctgccattgatggatcagctaaagtgtagattaccattgctccttctcttgccgcttgctttatgatctccattaacttctccccatcttcaatcttcaaaaaaccaaataaccaatcaagtaaactaactcaattccggtttaagataaccggaatcaattattccggttcaagaaaacagaaataatttcggtccgattcacaacggctaaattgaattacagacattttcagctgaaattagtaggaattgtcatttggttggattcggtttaaagttcgatttcaacaattaaggaaatttaaattgtaaaccgaattcattcccgtttggtttggtttagtaaaaatgagtattgagacaagagagatgaaagacgataatacccctgagaagagatgtgtattaacgggacaaccacggtcgaccaagcaatagtcaaattgtcccaaagcagcgttaacggcgtgttccgccgtccatccagttccgtcagagactatgtaaatcgacttcgccgccgtcatatccgcctcgctaactccgttacttgatgatgacacgtcgctgtccaatgtcgaaacatcagtgcgactcgaactttcgatcggacgcatcggaccggtcgtattgtttgatccattagtaatcgtactgtccagttcgcgccagaccttaaggttcgtgctctgttccagcggtttagctgtgagctgaatttccgaggcttccgttcggagccaggttcggaggcgtttaaggaaacggaatcc

SEQ ID NO: 3505 - DNA, 1365 bp, Arabidopsis thaliana
aagaaaaccatcaaggttctctctttctctgcagttgcgtcccaaacacctatcttcacactcttaaaaccaaacctctaaaagaagttttgatgcagtgagtattcaatctcatagactcatagcaatggcgaatcacaacagtttcacttacatggaccatagcttcagcgatataagtctcaactttgattcctctgctttcagcgattgtaacagtgacatatcctgcgagtttccaacaactacctccgagagccgtcaacgaaaactcttcctctcttgcgccgttgataattccgatgacgtgatcagaaatctcataacgcatcttgagtcatcttcttcgatcgaggaacagaagcaagctgctatggagattagactcttatcaaagaacaaaccagagaatcgtatcaaactcgctaaagccggtgctattaaaccgttggtttctttaatctcgtcttcggatcttcagcttcaagagtatggagtcactgcggtgttgaatctatctctctgcgatgagaacaaagagatgattgtttcttccggtgcggttaaaccgctcgttaatgcgttgagattaggaacaccgacgacgaaagagaacgctgcttgtgctctgctccggttatctcaagtggaggaaaacaaaatcacgattgggagatcaggagcgattcctttactagtgaaccttctagaaaatggcggattcagagcgaagaaagacgcgtcgacggctttatactcgttgtgttcgacgaacgagaacaaaaccagagctgttgaatctgggattatgaagccgttagtggagttaatgattgattttgaatcggatatggttgataaatcagcgtttgttatgaatctgttaatgtcggcgccggaatcgaagccggcggttgtggaagaaggaggagttccggtgttggttgagattgttgaagcgggaacacagagacagaaggagataagtgtgtcgatattgttgcagctttgtgaggagagtgttgtgtatcgaaccatggtggctcgtgaaggagcggttcctccgctcgtggctttatcgcagggtagtgcgagtcgtggtgctaaggtaaaggctgaggcgttgatagagcttcttaggcaacccagacaacaacaacaacaacaacaacactttgaatctaacgacaacgagagataacactttagtttgggctttttattaatgggcctttgtagaatacatatcttgttaattatttggacggcccaagctgaacacatatcttgttaattattggtcgatgtgttttgcatcaaagttgcattacttgcgtagaatgatctatacaagagtagcatcga

SEQ ID NO: 3506 - DNA, 574 bp, Arabidopsis thaliana
  unsure (1)..(574): unsure at all n locations
tgaatgttgaaaatttgatatccaagaaattttctcattggaataaaagttcaatctgaaaatagatatttctctacctctgtttttttttttctccaccaactttcccctacttatcactatcaataatcgacattatccatcttttttattgtcttgaactttgcaatttaattgcatactagtttcttgttttacataaaagaagtttggtggtagcaaatatatatgtctgaaattgattatttaaaaacaaaaaaagataaatcggttcaccaaccccctccctaatataaatcaaagtctccaccacatatatctagaagaattctacaagtgaattcgatttacacttttttttgtccttttttattaataaatcactgacccgaaaataaaaatagaagcaaaacttcatgtcgtggtttctaatagcggtggcgacaatcgccgccgtcgtatcctacaagctaatccaacggctaagatacaagntcccaccaggcccaagcccaagccgatcgtcggtacctctacgacataaaaccggtccggttcagatgtactacgagtg

SEQ ID NO: 3507 - DNA, 1636 bp, Arabidopsis thaliana
tcgtaataataatgggaccgggccattacaaaacattaaatatatatttatttatacatgaatgaaaccattaattaattttataataaggtattattattccactctctctctctagactctgaattagctcattcttgcctccaaacaaatattcctgacagaccagaccactcgtaagacagaccaaaccctaaactaaaagcatccacgttctttgtttttgtattgatggtctgatctcatatccatggagatggagaatcaccgccccggcagtttcacctacatgggccgcaaattcagcgatttaagtctcaacgatgactcctctgctttcagcgattgtaacagcgacagatccggcgaattccccactgcttcctccgagagccgtcgtctcctcctctcttgcgcctctgagaattccgatgatctcatcaatcatctcgtgtcgcatcttgattcctcctattcgatcgatgagcagaagcaagctgctatggagatcaggctcttatccaagaacaaacctgagaatcggatcaaaatcgccaaggccggtgcgattaagccgttgatttctctgatctcttcttcggatcttcagcttcaggagtatggtgtcactgcaatcttgaatctatctctctgcgacgagaacaaagagtcgattgcttcttccggtgcgattaagccgcttgtcagggctttgaaaatgggaacaccgactgctaaagagaacgctgcttgtgctctgctccgtctatcgcagatcgaggagaacaaagtcgccatcgggagatccggagcgattcctctgttggtgaaccttctagaaacaggcggattcagagcgaagaaggacgcgtcgacggctctgtactcgttgtgctcagctaaagagaacaaaatcagagccgtgcaatcgggaattatgaagccgcttgttgaattgatggcggatttcggatcaaacatggtggataaatcggcgtttgtgatgagtctgttaatgtcggtgccggaatcgaaaccggcgattgtggaggaaggaggagttccggtgctggtggagatagtagaggtgggacacagagacagaaagagatggctgtgtcgatattgctacagctttgtgaggagagtgttgtgtatagaacaatggtggctagagaaggagcgatacctccgctagtggctctgtcgcaggcaggaacaagtcgagctaagcaaaaggctgaggcgttgattgagcttctaaggcaaccaagatccattagtaatggtggtgctagatcatcgtcccaactctgatgtgagcttttcttatttatctttttttaccacactctttcttcgtcttttactgttaatgcgagggtgtatacaaacaaccagaaaaaaaaggggggaaaaggaaactgtaaatagtttgtgtagaaaattagtgggcttgttgtaatttatcttgagtttggcttttcttttctttttgtgatccatttcataaatttcggtttggttttaacagatttctcattaccaattttccctcccattttatgagtagggttttgaataacataagggagacattcataattgaaattatcgaactagaatgcaagaaaag

SEQ ID NO: 3508 - DNA, 504 bp, Arabidopsis thaliana
gggtcgcagtgaccaggcccgggcgacatgtcatcgaactaaaccacgacacaatgatcgatgcagtggcagagagtttggttcatgacaagcttaaaagtacatggtgcattcgataaacaaaaggcatcaccatccatttaaaaacaccctctcttgttttgaagtttgaacacaattgctcggtctaatatgaatttgaggataaccactcttcaagtccaatttagtgaaatagaagaatacccaatctagtcaagaaaattgtaaaaaacatggaatcgaaaatcgataacaaacagtactctaatttattgtcgggctataaacacacatgcgtaaagtcccatccattttgggaatgagcaacgccaacaccgtacaaggactcaagctttcaattagataaactttagcaagcaattcctctacttggcgtcgaagctcatcgtgttcttgatgacttattcgatagtgcagacaattaggcaaaaccttatagga

SEQ ID NO: 3509 - DNA, 1592 bp, Arabidopsis thaliana columbia
tcgacgactttctcattttggtattcgcaaatttactattgttttttgtttatcttcactacaataagtcttctaaaaataagattctatacagaagtatattcataaatttatctatactttctttttaacaaatcatatttttcacattcttttcaatatgtatatgaatttccttcttgacatttttatcactctttctatcttttgcaagcattcgttttatttgtttcgttctttcctacattgtatctgatatatccctctttttacggtttttatctatgatttagttattagttttagagtctttttgttatttctagagtcttttctagtctttacatgtttgggattcatttggagataattgagcattctagaggaaaacagagaatttatgctgctgaagaaatccaagactaaaaaccgcgtaggggtcgaacgacactacccctggtgtcgagcaacaccaatacctgacggcatttcgaagacgcaacttattgatgttttgaagatttccaaatttggctcagaactttctcttatttctgaagaagatccatcacggttttaggtcatatatataattttaaaggtcattgtttagacttaagcttggagaggttattctcctcatctctaatctactttgggagcaataccctttggagactccctttggagaagatcttctttactctttctcttgctattattaatttcctattcagactatgatttgtgtttctttgatcatgtctgagtaatccacttgtaggggcagggtttctcattagggattcatatggtttagtagatcacccctctactaggttatctgtagaattcttcatctttaattgttcttaatgctagatctagattgatcccctagaacttgtatccagacaatagatatgcccaccataggtatctatagttggatctattatctgatgaggctggtttataggtgtgtaataagaatcggcctatctactaaggtgaacaattgaactcgtttagaatgcatgtttaggctatagatctctcggcttctccggttattttagctgtaggcatagggagtttcgcggaacatcaccagttattccataattagagtttgagtttaagaataattcgataacaacctagcgattatttgatctaccaaccaatagtttcctgagaataccctaagtctgacgtttttactttcttgttttacaacctcacaatctgctattctttccttttgtttctttttattttcattactatcttacttagcttaattcaaaaccttggtctattgtgtgatccgagagcttaaccacttgggtgtcgatcgacaccagtaccaacttgaggaagcgttgacgtttgacagagaaaaattgatcgagattgacagagcaggataaataccagacagtagtgtcgaccgacactcacctagtgtcaatcgacactggacgcaaagtgcatcaatcagccttgactttccacctgttgccgaactagtctacacacctgaaattctctgtccattgcctcaacagtatatgcaagggatttaggag

SEQ ID NO: 3510 - DNA, 467 bp, Arabidopsis thaliana
ttgttcattgctcttaccttttccttttgaagtgtgcggagatgtgtttgatactcgttaaggttcctcaaagtcaagtcttgttcttcaagagtcaatgaaatgttcatggccttgttgagatggtcactgtatcctgagatttccccactaatcttctcaatttgcgcctttatatcggaaaaactgcttcattctctcctctttttgaattctcaattcctcaactagaggtgtcacagctgcaagcttttctttcaatgattttgaacctttatccagtttaatctgaacatcaaaatgcaagaaaacacacaaattttttagcaatagttgttaagctaaaacacacaatctaaatcgatctatcatgaagatagctatgtaccggtgagttgatgtttaacacaccaagggcagccattaaagaagcaacttcagcttctattgatgcaacagactgatga

SEQ ID NO: 3511 - DNA, 619 bp, Arabidopsis thaliana
atctcattcgcattctcccttcaaaccaaaatccaactaatagtttttaaaaagtttcaaaacaatatgtaagcttttgtagcaaaaaaaagctctaacctgttgatgacaccaccaagtgctgcagggacgaggatatcacaatcctcaaccagtatggagtttggatcgatcggatctgcaccatcaaaccctttgacacctctgtgttctttagtatgcttgagcaaggccgggatatcgataccatccttgttcttgattgctccggtaatgtcactcacggcaacaatcttcccacccttttcacttatcagctttgccgcccaagaacccacattaccaaatccctaatgaaccaatatgtaaaccagaataagaaaagtttctttggctcgcaggaaaccgcaataaaagaaaggtcacctggatgacaaaacgctgccctgatatggtctttccgtgctcgttaagcaaagcttcggtaccaaacatcactcctcttccagtagccgcgtctctccctagcgatccaccaagatcctggttcataaacatcattaaacattcaggtggttaaaccagtcattagcaaaacaagattgtgattattctttac

SEQ ID NO: 3512 - DNA, 1809 bp, Arabidopsis thaliana
tgatgatgttagcagaccaactgcacaaagaacaagtaagcgaggtacaatttcttcaattcatacacaactacctgatacatgtgagaagaagaagtacctagtattgtatctgatgcatgttgtattttgcccctggcttttacttgaaagagtacacgactactgccagtgcacaccaaattggagtagtattttaggattgatctcacatacatagaagtatttcagagaagtctgtcggaagagagtaaaggtaggaccaataaacaaaagaaggggttagttgcaagtaaataagtaagcaatataagaaggtaaagcaggcaagtgaaagcaataagagaaacattaggcattcaagggatcgcaggggttcaatgatcaagtctaaggataacatggttatgtttgtttatttccaagttcttggacatacgaaactcattcgtattcgactaaccctaggttataggcgagacggcgtaatctccctgtactctattactcaactatcgcagacaactacacatagatcaaaacattcagatcaagtttgattctagtccataaggccctataactcaactatcgaaggttatagcacaatattcaatcgtgagctaggttcaactgaattactgtaacaactcgaccgtccctaccagtgggccccacgttctctctcaagcccatggcccattgtctgaaggtcagtacgccacgtccagatggctttaaatacttgttaccaaccttataaatcgccacatgatattttcccatgttttgtcctcactcgcatggttcctataatcacttcccacaaggtcactcatcttgagactttcacagttcaacaacgcttaactatcgagttatcaaaggacaatttaacaaaaaaaatccgttgcaccataatggttcacatttaaaaacgttcttctaaatctaggttcaaattatttgcggatttcctttattttgtaaagccccaaccgcccttaccagtgggccccacatcctttctttggattatgggctcacccttgtccgacggttggtacaccacgtccgggaggctttaatgacttgttcccaaccctaaaaatcaccacatgatctttacccatcttttgtcctcactcgtatggttctaacaatcacttcccggaaagtcacccatcttgagactttcccaactcaagcaagcttaactcaggagttctctcaagacaagtaaccgaaaagataagtgcactttgatgacagaagtggccatattaattcttttaaacctttcacatgcaccaccttattcctaaaatcggggtgtacatttcaccccaataacagatcgcaacgtcctcattgtacgcgaagaccatcaccccctacgttgtgagccttattgactccatactcatatgggtttggccctgataccacatataacgctccaaccgcccctaccagtgggctccacgttttctctctggcccatgggctcacccttgtcctatgatcggtacaccacgtccggatggctttaaagacttgttaccaatcttacaaattatccacatgatatttttccatattttatccccacttgcatggttccaacaatcacttcctggaaggtcacctatcttgagactttctgaactcaaccacgcttaactatggactaatgagttcaatcaggacagttaaccaaaaagataagtgcaatttggtgacataggtggccatatcaattcttttaaactactctgcatgcaccaccatattcctaaaaccaggata

SEQ ID NO: 3513 - DNA, 505 bp, Arabidopsis thaliana
ccctctgctgtgacatgctgtgaacgaataacaagttacagttaatgtcatacagtaattaagagactgcaagtagaccatgaagaaaagactatccatttgctaatcataaacaaaagaatgaagataggtaataaacctgcttaaagatgtttgcaacaggttccaagcctcgcaaaattttatggtaaagcctgtacatcctggagagatcatccacctgaaagtagacaaatataaccattaaagaaataattaagtcactaactactcaacaataagaacaaaaatacttgctctaccttgtcatctcttagcaatgcacggcaccctgagtgttctttttctagaagctgacttgcaaacacaaccagcaattcatgttgtactttctgcatacaaaagattactatacaagtcaaacagatatcaatctttaaaatcaagtatgcctggactacgcatttataaagagtctggaaagtatctcaagtcaaatgacaaa

SEQ ID NO: 3514 - DNA, 1472 bp, Arabidopsis thaliana columbia
tactcatgtctccacctaaacctcttgatttcatcaataagactttcaaaattttcaatagctgttttacggtttatcaagccacgagtttcttgtcgagcgcttgttcgttcttttgatgattgtgctggaaaaaggaatatcccacccatacctaagccctaccctggtgatgttcctcatttgcttggaagacctcacgagttgactgcttatacgccaccatggatgatgagacgtttttctaggaagcatttactgctcccatctgatccacctaatacctgaaacccgacataattgatgcgtgttttatttcgcctcaggcttttacctgaaagaccacacgactactgcaagtgcacaatatatcggagtagtattttaggatcgaatccacaaggagagaagtagttctgagaaatccttaagaagagagtgaagctagaaccaaaataaagagagggggttgttgtatgatatgagtaaccaaataaagacaagttactaaactaaacggtaagcaataagagagaagcgttaggtcatcgagggtttctccggatgtcatggttgaataaataaggtatagatctcaatctaggtgaaaacatggctaggtttgtttacttccaatttcccagacatacgaaactctatcaagaccagctaaccctaacggctagtaggtgaaaaccggctattatcactaatatcttgcgtactcagttgccctatcggctagtaggtgctaacatggtttcagaatacaagatcaaagcattaagttcaaatttttattcagttgagttaggtcaaggattcaaacaagcattaagaataaactaggtggcgttccgaacatacaagcattaagaataaactcaactagaagaaatagtgtaaacgatcaaacaatgccataaaaaccgccaacctagatctttgctctattggtccccatgaattgccctttgaaacccccctaaaacttaactagagatctactcacacatactcaaagaacacaacatcatatgaataagagatttcataaaaagagtataagtttagaaaagggtttagagatcttccctggaaattcaaagcttgataaatctttttccttttacaagtagagaatagagaattgaagagaaaagagagatctaatgaagaacaagaagaggacgactttagggcggtgagaggcgcatgaggcagccttttttgttggtgtcttctagggtttcccctaaacttttatttataggggttcattaggtcaaaaggtagaaacgtcctttcattaattagtaagtgatgggcccagcttctaggcttttagggttgctggaagtcggcggcaagaggaagggaaggagttctgggcttttagggttgctggaagtcgacggcaagaagaagggaaggagtggttgtgcccctagtggtcggtggaaactcgagag

SEQ ID NO: 3515 - DNA, 396 bp, Arabidopsis thaliana
gactctcccccacgcccatcaagaggtaattataaaaaaattaaagggattattatccttaatcatcatgattcaaacatcaattcggttcgccggagaattgcttcaccgaacaagcaaccacctgagcccattgcttcaacctcagcttcatcgtctccggatcatcaccttttcaatttcaattctccaccgtcagattttttaaaaaacacaaatactaagaaaataaagaggaatcagaaaattcaaaattcacataccttgatcaacgatcgtcgtgctggaattgctgttttcaccttccgatgcgatcgacgaaagagacgaagtccgtgacaatctgctactatactgtttattgacggcgcagtataaaccaagagctggaagagt

SEQ ID NO: 3516 - DNA, 2252 bp, Arabidopsis thaliana
tgaagtaccctaaaaatctatttttcttcttttgtctagaattgttgagaaccgagggataagaaatggttccgtgcaattttcaaattttaaagagatatttaagtcatttgctatttttggctacagctaatgcatctcaatgcaccgatcaaactcagctgaatttgttgatttttttggatgagttttataaactctactaactaatgcattcaactgttctaacaaattgtgttcaaacaaacatcaattgtcatctgcacctagatggatcagtcaactgatcaaacgaacaacacctagatattacaatttttgtacttttgtatttgaattaaaaatattaaatattgtaataattatcacaataaatctatttactatatttataaataacatgccaccccgggattctatgataggatccgtaataattgatccgttttcaccattcaacatttatttggaaccgcttgatccgctcttgttccgctagaaccgcttgatccgctcttgttccgctagaaccgtttgatccaattgatagatcatatggatgaagattgtgatagagcatatggatgaaccataacatgcaatccgaccatcaaatcatttacgaattgtttcatttactcttctcgagacacaaaacaaacatcaaatcaagttaattaacaacaatctctttttctattgtagatgaagaagaatttatgatgatacttctctgtcgaaaagcaaaaaaaaaacagaaaacaaggtaaaattgtcgaaactgttggagatcttttttgctatgctatcttatttgaaatggcagtcaagtgtatttataacgggttttctaattcaaacaccatggtctcgggatgagggtagttcctaaaaactcattgcgcttcagcagcttgtagtactcgtttcgagttgcacacttctctgattccaaatcatcaccacctcctttctctgtttgatcatcttcctctggtgaagccatttcttcgtcggagtcttcatctaccacttccaacctcctccccacgggcttatttcctcgagtgatgtctgatttgttcctcgagaattcccttgtagagtgcttactcgaccttcgggatcgagtatttccagcaggaggagctgaaagtctcctcttcttgcatcgcttcctcctcttggctcgattcactgtgatcgatctcgaaacttgcttgttccctcctgctcgacccgaagggtgacgattcagaaggtcctcgagctgctgcatgcgaagaaggtgttgggtacctcttcaatggggagagagctttgttccgaatccttgacaaaagcgagcgcatgttcatcattgagaacaaaagtgggggaaactcaaaaccaaaattcagtaggttaggagattgaatgatggaggaaacaaatggattgcaaaaagtttttgataagaaagggaagtgaaggagataaagagagagttgtaaggattcgagatgaggatgctttggtatgagagttggagagatgagatggttgagttcgggaattgcaatggggggaccaaagtgattatgggggggggggggggtggggggaccagaagacaaagggacatcagcgtttcaatggaggcgggtcacaaggcgtcggtgtctacaaagagggtctctttggtttcttcacttgatcgaacggtgagaaatgctccatcttcaatcactcgatcaaacggaccagaatgaatcgcaagaaatcactcgatcaaacggcggtgatgctcctctcatttggtcattcaaatcaatggctaaaaatactccttctcattctactctatcaacggttgagatttttcttgacttgatttgaatttactcgaccgttgactgccttagggtctctaaaacaaacctgaaacacttaaacaaaaatatcaaaaataacaagaaaaatagaaagttatatacatggatagacatgggacttcctcccaagtgagcttgttttaagtcactaagcttgactcttacagtgcttagtcagaaaaaaggttgaagagaggaacagagaagtcctcatcttcagtggttgaattttcagttcctgaaacatattctgcatcctctcttgacatatggtaggatgagtactcatttgatttttcttcaaagtaagcttctttctaatcagcagagtattcttcttcttctgaaccaggcgcctttgaccaatcctcaaattca

SEQ ID NO: 3517 - DNA, 1015 bp, Arabidopsis thaliana
ccctgagaattctacactactctaacccatcctcagaaacctattcactactcagacatcataacagaaagcataaacattgaacaagttgaaaacttgctaacaacagtgtaacagcaggatgataacataatgaacaacagtaaacgaaatcaagaacaaaagctgaatactgaatagataaagagaaattcggattacaaaaagtctagaacacaaggtctgcggaaataaaactaggtaaaaaaacttcttgtctgcgaaaatgagaagtacatgctacttatagccaaatatcccgaaaccctaatactcaaaacgacgaagtatttggacgggttaagaactgtactcgacccaggtggtcgagtgagaggtcgagtgaatagctggagtcttcttttcttccttgtgctagagtgtctggttgagtgcggaatgaagaaggctctgaagcttgtcatcgagtatgcagtcaagtgttgtgatggcgatactcgacctctaggttgagtgacgaggtcgagtagtggtctggcagtgaaggtgaaggcactcgacctgggggtcgagtgatgtgatcgagtggtgtcagaagatactcgacttccaggttgagtgaagaggtcgagtggtggtgatgagggcactcgaccacgtggtcgagtggtgaagtgaagtggtgatgtcctctgctcgacctgggggtcgagtggtctcttgagatcttgaagctcctactcgacctcttggtcgagtggtttgtcgtgatcaggtccgcttcttccagatagctcgtcaacagctccaaatcacctgaaatcaacgcaaacatgcaacatgcatgtaaaactatcctaaacatgcaaagtgatgacaaatgatgtgaaatggtataaaacagtgatgatatgatactaaaatgatgacaaatggatgctaaaaacatgcaaaatacacacttatcagtaaacttgtttccgttgaatgattgaaatcaagttgcttgacaaaa

SEQ ID NO: 3518 - DNA, 1650 bp, Arabidopsis thaliana columbia
tttctatagataatcatgtcaaatctagctaagctcgatgtcgttgcccttgatgtatctggtaaaaattatagtcatgggcatcagatattaagatgcatcttagatcaaatgggtttcttagcaccataaatgcatctgaaacgacatcagatgagagcaaagctaaagccatggtatttctacgccaccatctccacgacaatttgaaaaatgaatacatcacgagagaagatcctgtggatctatggtaatcacttaaagattgtttcgatcatcaaaaatatgtgattttgccaaaaaccagacatgaatggctaaatctccgggttttggattacgaaagtgttggtgattataattccgccatgttcagaatcacctccaagatgatattatgtggtcaaaaagtgagcgattatgatatgattgaaaaaacgctctccacctttcatcttggaaatgtaatccttcaacagcaataccgggccaaaggatacactcgttattccaagttgatgcaagtcctttgggttgctgaataaaataatgaactcgtgatgatgaatcatttatctcgcccacctggatcagctccacttttagaagtgaatgttgctacatccagtgatgataattggcgaggacccaaaccttgtcgaggtcgtggtcgtgggagaggtcgtggtcatggccaaggaaaaggaagaagtttccattccaatgatttcaacacggaaaaaaacaacaaaaataatgttggtcgtgttaagaaaaggcatgttgaaagcacttgccacggatgcggcatgaaatgacacttctaccagacgtgtcatataccaaaatatttagtcgatctttatcaagcctcataaaaggcaaaaaaaagggatgttgaaactaatctcatctgtgatgagtcggaaccttcctttaatggccaagatgatgatagtcatcttgatatggcagattttctcgattaatcatgacaacgagaaatcaatgtaatatattatagccatatgtattatcatgctatgcatgacaagcattatagatgcttttgtaattctggaataatgttatatattatgacatatggatagtctatgtcaaagtttcatgaataaatattttattccagaaaatatgttatgacatatggatagcctatgtcaaaatacgagattgaggatgaagatatatgtctggcggacagtgcttatacgcacactatcttaagagataaaaagtacttctcctctctcaaaataaaagactccgctagaagcgtgagtactataaatagccatgcaaagataatattaggctttgcgaagccaattttacaatgccaaggagaactcattttaaagtaaatgatgcattatattcccctaagtctcatagaaacttgataagtttcaaagatatccgaagttatgggtatcatatagagactatgaataaagatggcattgaatatctttgcataaaatccgagagacaatttatattagaagaattgccaatgctatcttccggattatattgcacaaaaataaatatcatcgcatcaaatgttttagtaaactcgagtgtcacactacactcaagtgagtttactagtacatttaagatatg

SEQ ID NO: 3519 - DNA, 1135 bp, Arabidopsis thaliana
attctctgtcgacatgaatgatagaacttgcggctgtagaaagtggcaaatgacaggtataccttgtattcatgctgcatctgtcataataggaaataggcaaaaagtggaggactttgtcagtgactggtatacaacttatatgtggaagcaaacatactatgacggtattatgcctgttcaaggcaagatgttatggccaatagtcaacagagtgggagtgctgccacctccatggagaagaggcaatcctggaagaccaaagaatcatgataggaggaaaggcatttatgaatctgcaactgcctctacctcaagtaacacagagttatcacgcatgtatcgagtcatgacatgtttaaattgttaaggagaaggacacaacaaggcaggatgtaaaaatgagacggttgcacctccaccaaaaagaccaaggggtcggcctagaaaagatcaggttcggtttatatcctctttggcatcataatgtggcttcaatctttttgaattctattgaattaatcttgtttgcaaacaggattcgaggactatcttgtttgggcatggacaatcatggcaaggatcacaaggtgaaccatctgtagcatctcagccagctcagccatcgcagccatctcagccatctcagccatctcagccagctctgtcccaaccgtctctgtcccaacagtcccaaagagcaccatctgcaccatctgaaccacctgcaccacctgcaccatctgcaccatctgcaccatctcaacgagtttcaccaagaggagtagcacagagaagagggtcacagagaggagtgtcaagtagaggaggatcgcagagaagaggatcacagagaggagggtcacagagaggaggattagaagggtgggggtcatggtttgaatgttcaaacaatcggtgaatttgggttgtcttgtttgcttttgtgggttactcggataagaaactgcagtttgtcttcatgcagccagaacttatgtgtgtgtttttgtgtgtttgtgggatcatgtgttcctttttgttttagaccaagatacataacctgtttggtgcttgtgtttgtttcggttaatgttcaaaacatgtttcattttgcattttgtctttaaatttg

SEQ ID NO: 3520 - DNA, 1139 bp, Arabidopsis thaliana
gctaatttctaggtggaaaattaatgaaaatagtaatggcattcgttggatagcatgagaaaaattttgtaccccacactctgaaggtggtcttggttttagaacacttgaagaatttaatctagccttactagctaagcaactctggcgactaatccgattcccgaactctcttctaagtagggtgttgagggaagatattttcgttatagcgactctttgcatgtaggagcatcaaatcgaccgtcttttgaatggaggagtataatggtagctaaaccgcttcttgtctcgaggcttcggaggactataggatctggaatgctgactcgagtttggaaagatccatggattctcacaatttctgcacggccagctaagagcattcttgacataagagatcctctactctacgtcaatactctatgtcaatgatttaatcgaccaaacacacaaagatgtggaaactggaccgtctccaagccttgatcgatccctttgatattctactcattttatggattcgcccaagtcgtacctacttgagtgatggttttagctagtctcacactaaattcggtaattatactgttaagtcaggatattgggtcacgagagatctatctcgtcctacttgtgaccctccttttcagggaccaggtgtttcggtacttcaggcacaagtatgtaagcttaaaactacgcggaagcttatgcatttcgcctggcaatgtatttttggttgtctagccacttgtcaaaatttgacttatcgtcatatgggtacgaatagagggtgccctcgttacggagaaacagaagagacaatcaaccatctcctttttcattgtccatcttcctgacatatttgggcattatcgcctattctttcctcagggaatatcttccctagaaattccatcttctataattttgactttctttttctggcgcggccgagaatttggaatcggagaggaggtgttggaactctttccacggatactttggtatatctggaaaagtagaaatcgttttatttttaagaacttcagggaacctccccctgaaactttggctttggcacttcaagaggcaactgtttggaaacaagcaactctaaaagaagatgtcctata

SEQ ID NO: 3521 - DNA, 1250 bp, Arabidopsis thaliana
ccatgagctgcataaaaacaacaacaataaacacataatcagatgatcaaactccattaaaacaacacacaacaaaaatcgaaaatcatttgaagagctcacctgtggatcagtaacaatggctactttagtaaaatttccatcactctccactccatcactctgcaacacaaagaagctaacagatatttagtaatcacaactaaacagtgactagaataaatgatgaatcatagagatttcttccacattggccttctaataatgttgcatctaagctatttttcgattagagaacgattacattctcaagaataagaatataaaaaccttggctttatacaatttatagcaacacaaggatgattacagagagaaataagcaaatacacaatcaaggtcgaattaaacgcaatgaatctccaaaattgagcatccgttactgaaaaaaatggaaactttttggagagagagaccttatggtgaggccaagaacaagtgaagagagaaggacccagaaggcgaacatttctccgtagaggatcgtcgcagcccaaatgagacataacgccaccgtgagcatatggtggtgtagcattctttccgagtatctgactcgcatgtgttttcagcatggctttgccgagcatggccagatctgtcaacgacttcaaaggattcggaaagtgaggacggcgtggaccatgggcttccagagagagtccttgcaagaggtttttttcccaaggacgcaaggctgaacatttattcttcacctgagctcttagaagaaattgctgagttccttggcggttcatcagattttgagcgtctgttaaaatctcaatttgggaaattgttcaagtatccggtttgccaaacagctcactccgccaaactgatccatggtttgttgtctagacagctagtgacgaagaagagacacgaattctggttcatttttggaggtaagcctcttaggttctctttgagagaatttcacattacaactgggttggaatgtcgaccaattccaagtgaagaggaaatcttatcccatcagaaaatagtttcaaaacctgtttggaactctttgtttggttcaaaaaaagatgtcacagttacagatgttttggatatgctaggaaaagatgtcaagatgcccgatggtgagaagatgtcttgctggaagcggttttgtctacttttgattctcctggtggatggtgtgatagtctgtagtaacaagg

SEQ ID NO: 3522 - DNA, 409 bp, Arabidopsis thaliana
atgagatgtttaaagatatagttcataaaggattagcttttggagctgaacgttggattgctactctccaaagaatgtgtgagagattcacgaatctattggaacctgcaacatcatcccttgatcttggaggaggtaaataaagccatttttttgaaatcgtaattgatcagctaagtaaaccataagtaactcatttgaaataaattcagtgattccatcgccagaagggaagagaagtataatgagacttgctcacagaatggtaagcaacttctgcttgagtgttggcacatctaacaacactcgctcaacggttgtctcgggactggatgaatttggaatccgtgtgacttcgcataagagcagacatgaaccaaatggaatggttctatgtgcagccacaagt

SEQ ID NO: 3523 - DNA, 1115 bp, Arabidopsis thaliana columbia
cgtaagaaaacaagacataagtcgagtcgattgtccccaccaccacctatttagtagcctaccataacaacaaaaaaattataacgttacaatcccttttatcaattttcaaaaccaagatgttgaatcgctttcccatgtcatcactacccgttatgccatagctcctatcaagctggtgagcgtactaaacgacaccgctttggggaggtcttaccaactcgattgcttttcctctctaccctttcccaaatttgaattcccaattttttcaaaatcaaaagtaaatactaacaaaaagcaaaaatatcaaaaaaaacaaagaaaaatcattttgaagtgcacagatatcaatcgtctctctccctctctctctgtgagaaagctttctgattaagctttcgtcgtctcctccattgcaaaatctagctcgatctgtgaaggtttctctgagttcttcaaaaatctcttctagagaaagacttcattagctcaattttagcaacttcctccacctccttttactcacactgtgcttcgatttcaacttcgcatttcacaatgatccccaacggagaattgagattacctgctctcaaggtccgtgaagaccgcgtgtcaccctcagctcctattccggtcaccagaaccctagtggctgatactgacgtcacttccgatgacgatatgagtacaaattccgaggatgtctctctcgattcgtctcccgagaacagtagagtgtccagtgccgttggtcgcagctacgggagaaattcttcttattatacttactccgaggtgagctcatcaagagagactttggtcggtgcgcgcgaacagacgggacctagatttgatggtgatacggaggaagatgaatccaccgattcagcttctagcacgcaattctctccgcagccggcagctgatgaggattatcgacggcgtatctcaggtggaacaaactcacttccctaagacggacaggcgagcaactgtcgagaaggttttaacctgaaccttttgtgttaagatccgagatctcagaagcaacttagtgtgatggatgactttaggcgttcgtagagctaggatgaccgctaaaattgaca

SEQ ID NO: 3524 - DNA, 1006 bp, Arabidopsis thaliana
cgcgcggcctcatcaagggcgcgcaggtggtctatctgggaccgggccgcaaacccggcttttcccggctgcacgtcatcggcgcgccggaaccgcggctgtcggcgggagaaattcccacaaatagcacacttttaagttttttggacaaaaatagcattaaaaagttttttagacataaatagcactcaaataattatttgagaaattcctaaaagtaagattaaacaagttttatggacaataataatagggatatttgcaaaactgcccttattctaataaccttttgtaaaaatgccctttcctgaaggccatttttaaaactaccccttctaatatggcaaatgactgtcttaccctctgaatgattaggtttcacattcgtttcacaaacttcttcgttttggcacaaacttcttcgttttcctctccgatttcactcaaaatcgccggcgaattttctctccgatttcactcaaaatcgccgacgaatttcctctccgagtttcactcaaaatcgccaacgaatttcctctccgatttcactcacaatcgccgacgaattttctctctgagaaaccccaaaatcgccgacgaatttcctctccgataaacatgttcttcgctgaaggattcagatcatttctctacgacgcaaacaatccccagagatatcgatagatccgacggtaaccgtttttataatcgattttatagtcgattttatagtcgattttatagtagatctgacgctgtttcataacatgttttgcagatggattcagagagtgaaatccttgcattgcctgaacaaatctacagagaaggtgaggaatctattacactgggaaccgttcaacaatactcggattggaatttagttagtaaagtagaggaagctttaggcgagtatttatttcagaagattagaagttcgtttcttggtcctctagttgaattgggaccaaaaatgaaggctaagaagggaatcagattttctgga

SEQ ID NO: 3525 - DNA, 840 bp, Arabidopsis thaliana
aaaaacagtaccacatgattatcccctctcataagcagtccaaaggcaacaacctccggtaaccaaagttctgaaggtgacagtaaagtggaagctggactgagtgagaacctgaatcttctgcaagctatgaaaaaactaagcttctggttgttatttcttgccatgatttgcggaatgggctctggactttcaacgataaacaacatccgacaaataggtgagtctcttcgatactcatcagttgagataaattcattggtctccttgtggagtatatggaactttctcggtagatttggagctggttatgcctcagatgcattgctacacaaaaagggatggccacgtccattgctaatggctgcaacacttggaacgatgagcataggccacctaatcatagcctctggttttcaaggaaatctctatgttggttctgttatagttggcgtttgttatggttcacagtggtctctgatgcctacaatcacctctgagctgttcgggattcggcacatgggaaccatcttcaataccatatccgtggctagtcccattggttcctatatcttctctgtaagattgatcggttatatctacgataagactgcttccggggaagggaacacatgttatggctctcattgcttcaagctgtcatttattataatggcatctgttgcgttctttgggtttcttgtcaccattgtactattctttcggacaaagacgctatatcgacagatccttgtaaagaggttgcatcatcgtatagagttcttgtgaatactatacttttggagaataacgaatagtgcttgtattggtacatccatg

SEQ ID NO: 3526 - DNA, 547 bp, Arabidopsis thaliana
gaccagtttatagatttggttcaagcttatatgaaccaagctgccaatgaagcagccaacagttctagaaaattctctacgataaagaccgaattgacctcactccagactttgtatgggcttgttcaatgcactcctgatctcgcaagacaagattgctttagctgtctgacaagttccatcaatagaatgatgccactttttagaattggagcaagacagttttggccaagttgtaattcaaggtacgagctttacgcgttctacaacgaaaccgccattggaacaccatcaccaccaccactgtttccggggtctacgcctccgttgacatccccttcaatacctggtgaacactttctttcttcttcctctgtgttttgctctgtttactatatcttgaaattagtgataccaatagggaaagttttgttgttttgattgattttggtatttttatactttctggcattgtctaatcttaagccaatgatctttaaaaagcagggaaaagtgggaatcaacagtgttagtggtaccattgttg

SEQ ID NO: 3527 - DNA, 614 bp, Arabidopsis thaliana
cactatcaaagacgagaagactgaagtaaagacaaaataagaagactcattagctgcttcacaatccttatctctttgattgtaagaaactgagttactttatttcgatgataccaattttaaacgcagagaaaaagcaacacgtcaatttgtaaagcagagcaaaacgaattacaacttggccaaaacttcgacgtaaaaagcagcacatcaatttgctctgcttggcgacggtggtggtggtggagatggtgttccaatggtagtttcgttgtagaacgagtaaagctcgtaccttgaattacaacttggccaaaactgtcttgctccaattctagaaagtggcattctattgatggatcttgtcagacatctcaaacagtcttgacttgtaagatcaggagtgcattgaacaagcccgtacaaagtctggagttcggtcaattcggtctttatcgtagagaattttctagaactgttggctgcttccatggcagcttggttcatattagattgcaccaaaactataaactggtttatttgactttgattaggagaaatagtgttggtgttctcaagataaattctccttcgtttgtaatggccgtcgatag

SEQ ID NO: 3528 - DNA, 644 bp, Arabidopsis thaliana
  unsure (1)..(644): unsure at all n locations
ctgtgcatcttgaatggtccgatatggtatcatttgcttacaggtaaagatagtttctgctcatcgcaccccagagatgatgtatacatatgcaacctcagctcatagtcgaggcgttcaagtcatcattgcaggtgctggtggtgctgctcacttaccaggtatgtctttaacatgcatgaactcatcttgtcacctcccagaagattgttactgtaaaacaaaggactttcttggaaattaggtatggttgcttcactcactcctttgcctgtgattggtgtccctgtccaagctacccgtttggatggagttgattcacttctctccatcgttcaggtacactttcattgcatcataattaacttcagctattggttttttgcaccatttgaaaactatttaggtctgcgattcttaaacctttccatttattcgtttttgttccaaagatgcctagaggtgtcctgttgnacagttgaataaacaatgcgacaacgcaccttcttgcagtcggatgttggaatcctgataatgacttgccaaggtctcttcttactttctttgtacatgagcagatgagagaatagggacgtaaataatgagattgggatttgattggtgacagatagcagtccagagca

SEQ ID NO: 3529 - DNA, 547 bp, Arabidopsis thaliana
tataacacggtcctgatatttcctttgcagcttgctgtttcttgtggtacttgataactttgttttgctcttgttggcccaatgttaacttgtttcagtcataaagaaagcgcctgtaacctgtttatacttaatctgcaggaatctaacaaaaacttggatgaagttatcgaactcgccaaagaactccaaaaggtgattcagtttgttaattttccagttcttattacacattggattttggaagatacttcttgtagttaatcaattctccaatacagactcatgtatgccattttataattgaatctttttatcactgaaacagtactatcttgttaccattccttagtttgatgtgctaagaaaaaaaggttcttcgttttcttcaaatgcaggggagcaaaatcaaaccattgtggggaacagctcagcttttcttgcatcctcgatatatgcacggaggagcgaccagctctgacagttggagtgtatgcttacgctgctgctcaggtgaagaggccatggaggtacacattacttaggt

SEQ ID NO: 3530 - DNA, 564 bp, Arabidopsis thaliana columbia
tgattctttccaattccattgtcaagtaaaaacttttaaatagggaatagtaaagagagcccacattgtggtgacatgattctgaatacataaatatttcatgtcctttgagggaatctaaaggactagtctggtgatctagtacttgaccatgtttttcactgttgcagaaataagaaggtgatgttttatgttctccattaaataaaaggacccactaattctttacctctatgctcagctctcgttgactcaaagattaactcctgtcacacggtagaatgtatatatatgctaatcttgatgtgtatatctctatgcagtggtgatccaacggtgtatgagagatattggcaggaaaatggagaggtgacaacaatggtgatacctggatggcaatctcttagctatttttcagatgaaaacaacctctgttggtttcttgagccagagcttgccaaagagattgtgagggtgcataaggttgttgggaatgctgtaacgcaagaccgcttcattgttgttggcactggctcaacacaattgtatcaggctgctctctat

SEQ ID NO: 3531 - DNA, 224 bp, Arabidopsis thaliana
taagacgtctataccttcccatgaggtctacggacaatcacaagcaaaaagccgaatgcaactaccgtaattagaagcaaggaccaacccccacgagctagaagataagatatcgacgtattgaaaaatagctagagcaaaaagcttcaatgtcagcttcaaattctctatctcagtttcatcttttcacgcagagctgcataagaaacacatgattgttgtgg

SEQ ID NO: 3532 - DNA, 643 bp, Arabidopsis thaliana
gccagtgtgctctaaaggaatgtcggcgtcggtattgctgacggcattggcctggtcgcccgagaagaaggttgtgctgatgactttattctgacggtagaaacaggtccgattggcggaattacttcacaggggatcgcctttggcgcgaacgtgaatacccgtgccattctggatatgacgtcccagtttgatttttatcacggtggcggtctggatgtttgttatttgtgttttgctgaagtcgaccagcacggtaacgtcggcgtgcataaattcaatggtaaaatcatgggcaccggtggatttattgatatcagtgccacttcgaagaaaatcattttctgcggcacattaactgcgggcagtttaaaaacagaaattaccgacggcaaattaaatatcgtccaggaaggacgggtgaagaaatttattcgggaactaccggaaattactttcagcggaaaaatcgctctcgagcgagggctggatgttcgttatatcactgagcgcgcagtattcacgctgaaagaagacggcctgcatttaatcgaaatcgccctggcgtcgatttcaaaaagatatctcgacaaaatggatttcacccagtgattcgccagactcaactgatggcgaagattat

SEQ ID NO: 3533 - DNA, 973 bp, Arabidopsis thaliana
ttcaagaaacagcccttacttgactaatctcagaacccttttgtcttctctttctgcccccaacgcctcttactctactggattccaaagcgccagggcgggtacaagcccctgatagagtcaccggacttttcctttgccgcggagacgtctcaccggcagtttgtcgtaactgcgtcgccttctccatcaacgacacactcgttcagtgtccgagtgagagaaaatccgtgttttattatgatgagtgtatgctcagatactctgaccagaatattctctcgacccttgcatacgatggagcatggatcaggatgaacggaaatatttcaattgatcaaaatcaaatgaaccggttcaaagattttgtgtcgtctacgatgaatcaagctgccgtcaaagcggcgagcagtcctagaaagttctatacggtaaaggccacttggacagcactccagacgttgtacggcctggttcagtgcactcctgatcttacaagacaagactgcttcagctgtctggaaagttccatcaaattaatgcctctttacaaaactggaggaagaactctttactctagttgtaattcaaggtacgagcttttcgcgttctacaacgaaactactgttagaacacaacaagcaccaccaccgctacctccttcgtctactcctctggtgacatctccttcactaccaggttaatttctccttcctctgtttcttaccctgatttcttgaaattagtcctttcaatttattttaggtttgttctgccactatcaaatcttaagccaatgatctttgaaatgcagggaaaagttggaattcaaatgtgttagtggttgcaattgttctgaccatccttgtggctgctctacttttgatagctggttattgttttgcaaaaagggttaagaattcttctgataatgcaccagcctttgatggtaacattcaaatgattaacaatc

SEQ ID NO: 3534 - DNA, 867 bp, Arabidopsis thaliana
acaactacaacctcgttcttgaattctgtgtcaccttgttctgatgttttcgacagtctcttcactgcaacttcggttccatttgaaaatgtaccctatccatttttatcaatctcattatccaaatgtgttgtagcaaaaagaaaacaaaacaatcgataaattatgtagaagtatataatattataccttgtaaacgtcaccaaaacctcctcgaccaattttattattctctgaaaaatcatttgttgcagcttgaattgctctataatcaagttgcagcgactctatggttgttttatcatcttctgttgcaaaataaatgtcttagtaatcagaaaaagaaagacaaaatatattagtcaaaaacattaatcaaaccaattaaggacttgaatctttaccatctaaagcaggtgttgtgccataagtcttctttgccctctttgcaaagaaacaataaccagctatgaaaatcagaacagcgactatgataggcacaacaacggctaccacgaccacatttgaattcccacttttatctgcgtttaaacagatcatctgctttagtaagaaaatagtagacttataacaaaacaaaaattgaaaactctgcgttccatattggtaatactgcaaagatcaagtaaacagggcaaaggtagaagaaactgttcaccagatagtgaaggagatgccaacggaggcagcggcggtggtggtgtaccaatggcggtttcgttgtagaaatcgtaaagctcgtaccttgaattacaacttggccaaaactgtcttgctccaattctagaaaatggcattctattgatggaacttgtcagacagttcatgcagttttgtcttgaaagg

SEQ ID NO: 3535 - DNA, 610 bp, Arabidopsis thaliana
tcaagaatgcaggagctgcattgcatcattcaaatctatatccgaacaaggtcacaaagaatttggaatttaacttcagtaatatagcagaaaatggattcaaaacttacaatttcaagcatctatagagagagacaaacagtttggatcgatatgaaattgagaactaaagtctaaattgaggatttcagatatttaaagatagaaaccaaaatccttgatcagccttgtgatctatgaagcacgatagatagccatcaactcagtctccagctgcttgtcctcatgcctcttcacatacctgtttaagaacacctgatcggtacatacgaagacacgcgatatcgaagggagttcacttccgatcaatcccttggagatgagagcttgaactacgttaccccttgggagagtcctcttctctaggctgtatccaagcaccgcagggtactgaaacaagagcctttagtggccaattcatcttcggtaccaaaaactcagtcttcttcacaaccaactccgcggataatccaatgacctgaggacagcgcttaattaacacgctaaactcatctctgctgaaccctaggcctagaaatgtttcaatggt

SEQ ID NO: 3536 - DNA, 599 bp, Arabidopsis thaliana
  unsure (1)..(599): unsure at all n locations
nnnnnnnnnnnnnnnnnnnnnnnctaaaggcggcgtttggcgtggtgttgatgctgtttctggtgccgggtaatgctttgctggctgttacctgcaggcagtctcggcgcggcggtgaccatgttgatcattatgatcgccgccggccgcggtaggattttccccacaccgtatgttactggcggggatggcgttaacaccgcgttcaccatgcttttgatgatgttgcaggcaagtggtgacccgcgaatggcgcaagtgctgacctggatttccggttcgacctacaacgcgaccgatgcgcaggtctggcgcaccggaattgtgatggtgattttgctggcgattaccccgctgtgccgccgctggctgaccattttaccgctgggtggtgataccgcccgagccgtaggaatggcgctgacccgacgcgaattgcgctgctgctgttagcggcttgcctgacggcgaccgcgacgatgactattggaccgttgagttttgttggtttaatggcacgcatattgcgcggatgatgggctttcgacggacgatccacacatcgtaatttcggcgctggtgggtggttactgctggtg

SEQ ID NO: 3537 - DNA, 1666 bp, Arabidopsis thaliana
tcccgcttcgtgtttcagcagttccacttgcggtgcccatggaaccactatcccttgctctcttgtcctatccaaaaacccttttggtaactgaaccaagctcttctccttaagcgaccaaacaaacggcactttactcgattccaacccttctgctatcgccgcaagctctccaggaggcggtgtcatgaccgtaccaaagctaatgtacgccacagaaccagaagatctcttctccatccaagccaaacaaccgtgaggatcttgcactagttgttgcaatgtagaagataataacccgagaggaccgatgttcagatatcgtttaaatctcgatctgaggttattcgtcaatgtaggatccaaatcttcaaaagaattgatgaaaacagcagtggcacgaggcaaagcaagacccatttgatgaagcatctttgagaaaacagagtctaaattcccaaacacaactccttctggtgtatctttgactctgatcttctccattcctgagataacccctattgtctcctccatacgctcacctacttctgtaaattagaatggaatcataaacattaccacaaatacatataaatcttcaaatcaatagtatcttaacctctgtttcttcttttagctaaattttcctctagttgcatatttatttatgagataaaagacaaaatcacaagtcggaattgggaagcattcaaaaatttgtatatattacctttgacaccgatggtttctctgatgagatctgtgtagagatgagcagagagtgagtttgctccggcggtccaaaacgcaatccacgacgcatttatctccgtcgccatatcagccgcgaaccagaagaacgcatcagtcatcaaacatttcacttccgtaccaacctccgtctccgccttcgcgatttctctccggaaattctccggcgcagcttgaagaaacagctcgatcgcctcctgtggtctcccgctaaacacgtatccctccggaacaccgtcggcaatatcgtatactctgatgttcgccggacgatctgcttcgtcaccggaggaaaataacgaagagttggattgtgcggtgttgaagaaagagaagacggtggaaggagaggcggaggcgaggcggcgcgtgacggtgaggagaggagctgcatgagtgccgaaaggaaaagcgagaactgccacgtgggagtctctggttgggtcggagggtttggtcatggtgcgagtaatgaagaagaagacttgaaaagaagagagagagtttgttggagaataaatagagaggagagggctaaagagaagagagagtgtggtcgtaaatgaaccaccgagcaagtgtaaagctcgtgtttcgtggttggtaccgatctcttctctttctttatataacaagtaaacaacttttttaatcaaatttttttatgaacgacaaatttaataacaaaatccgttttttgatattttcttttttttcagagaaaatgtttttgtttttttatgtaattttcttcttatagaaaggacatttttaggattgtatttgtatctgtactttgtacatgatatcttaataaagcaattattagattattttttcaccaaaaaaataaaaattattgatttgtcataagatttgattggttgaatgattt

SEQ ID NO: 3538 - DNA, 1158 bp, Arabidopsis thaliana
gatagcgtcttgcgtcgagctgcgatgacccgagcagaagtcccttgaggtaagggagggggcaatggctagttggagaagatgtccaggggggctcatgcttagcttgtggttcgcctctacgaatcggtcgagagtaaaggagttccagagagttccagagagtttccccttcggcgaattcaacagtcggaagggtcggtgcgatgaaagctgcgaattgaaaattaagagttggtcagataaggcaagaagtaaataagggtcatatgcatgacctaacatctatcgggcttagtagtccacttcgaggagagcaagtccgaaaggtttccaatcgaagcatggctctttttgattaagaaccacgagtgatgccagttctcgtccttattagggagatgcgagatgaggttcctgttggcgttcagataggccgagaagtatcctaccttctttgaagaactcctcacactgagaagttcaatcagttcggaaccccgatgacatatctggcttcctccgcgacagtgataatccccataatagtccggaggaggttgggggttaattggggcaaggcgatttcaagggctgacaagtatcgaacgagggcttcgggaaggggagaagtcaagccgcaacccttgaaatagatctcgtatacgcaaaagaacccgggacggtggttctccggcgactcagtgggctccggcatttgcgagtccttcataacttcagccggaatccgacagagatctcccaatcgattaagagattggagagtgcatgtggtttgatagtggggactggcgatgtcatttggccggatgcaaaggtcgttactagagccgacatcatcgaaagaggaggattcaggtctttcaatggggggattcatcgtgtagtgaataaggggattgaaggttcggagagagaaaaaagaactttgctttgagagtgaaagcgtgaaaaataacaaggaaagagtaaagtgaatttacctttacgtttgccagtgatgatgatggaaccgtcttgggagtcgtggaggaagtgggagagtttcccgctttaatagttaataaacagtatacggtcataattgtgacagatgtaacgcgagtaattgtaggagtttccgagatcaaagcaata

SEQ ID NO: 3539 - DNA, 1429 bp, Arabidopsis thaliana
aaacggatcggatctaacaaagagacggattaccgaccgggataggcggatcgggaaaggtgttcgaggaagcacaaagataagtgcatccgaacacacccaagggtcgcccatggatgcaatattaccgataaaaggaagaaagcaccgaagatgggtaaagaacgtgattcacccaatatgatcaatatggtgtccgcctttgtgtatcaatcgccacggccgatggtaaaaccgatccgagattggtgaaagaccaaagggtgactcgacagagaaccaacgggaaagtccatggtgagaaccgatggacaaaacagatgtttgacccgcgagtaaaccaaaggccgacggaagaaggatttcatgggcaagcctacgatgattcaatggttgaatccacggacccttgtgtgtgataaggatatcgttcggatcgtatggatggatcgataagccaaaagttttaccgaccaccatggaccggacgggtaaatggttagtaaactgtgggcagtcgtagtgttaaacgaccgaatcggaaaaatggatggttcgataagctgagggctcaatcgtccaccatgaaacccaaggggcgtacgtttggaggacggatggaccaataagcctagagctagattcggccatcgtgaacaaagggaatcgtacgatccccaatctctatcgttggacttagactgattcagatcgagtgcagtaggactatcgtaacgatagagattggtccatcaatatacaagtcttacgaaaggaatatggaacaagaaggctaaggaaaggattaatggacggatcgaagaggaatcgaatccgcatattggccaaggtatgtagacgatctaacttattagttaagatagacgtttggaaattgaccgtgaaaataggataaatgaatatgcgattgttaggcttagaggggttagcgaacaatatgcatgtcttgaccgagtaaagaatcgatctaagtataagggacaaagacgatgaaaccggtacaagggttggttggtattaaaccaaggttagaaagacttccgctgtgtaataagaaagcgattatagaattaggcctcgtaaaggtaattctatgttgaatcgcgaaaaattaagaggttctactgggaataggctcgaatgtgagtccatggtcgtcggacgccgagacgtccgggacggggtctcacatcgacgaggtccgatagtagctctgataataggtttttgggatcaattaatcctatagcactatcatatcgttgtagtgcttaaggttgtcaatccaaatgagtgtgatgcaaacagatgagatgtgatcagaagtcactaattcaagccaagcaataacagttttgaggtttctaacagtcctaagcgaacatgcagaaaacggaaataataacag

SEQ ID NO: 3540 - DNA, 1088 bp, Arabidopsis thaliana
tataaatcaaacaacgagacatcagacataacaatcataacacaacatacatacaacatgtaatgtcagaaaacatcacgttattttttagagttacccgactggtgacacgtttccacagatactaaaacgttagacatacaacatgtaaaacccgttcatatcatgttatcggccgattaggatgagtagcttctaatagctaacaacaccgacagaattctttggaacaaaagaatatgtagtactcttcgcacctattatataggttgtggattgatacatatgggggatgggccccattccatgtaagcatgtaagttgtaccttgacgcaccgccatgcgctcaagagctgcaaatagagagtcgcccatagccaatacctcgccccaagattgtgcaaacaactgttcagggaaaaaatctcctagctccttctctccaccacaaattgtcaacatagccataacaaacagtgcctcatctactttgttaatcgctttgaaaatgtgtttttcagccatgtctaaatctttttcccaacacgcgtaccttagaccttccaagtaatgtgcttcggggttgtttgcctccaatgcgttctcaaattgttttctgaacaacccaccgacccgcataagtacaagattttgtctgtactgtctcatttcaactcgagctatcatgtgtgtatagggatgattacgttattcattgttcggggaaatacatgtatatataaggcaataatggtggagtgtatatacacacatttatgtggggtttgtggtgggtagataatgtgtggtggaagcgaacttattggattctattaaaatatttcaagtgggactagaatcctatgtaaacagtgttcatagcatgtgatgcagtataataacatgtattaagatctatccgcatggttgtcaataaaatagcatctgtaaatggaaaatgattatttaattgagcagtgttccttcatggattaattgctataatgcaatatgtgtctttaaacattttgctctaagtgttgtaataaatgtgatgctctgtgtgtcagtttggtcgtaaatttgt

SEQ ID NO: 3541 - DNA, 595 bp, Arabidopsis thaliana
gaatgtcgttttcataagcggggatgatcgctctgatgagttctgtattccagatcctagtgcgaggaatgatcaaatccgacaccaaaagattgtgtgatgcttctgtaagtggtcccatcacagctttcggggcagatagagatagccatggagttcgccaaagaggagtttcaattcctgagccaataaggcgtcctagctggagttttaaaatttccttgcccaaacatacacctctccggccatgggaagaggattttggtgtttggcagtctagaagggattgatttttgcagtatttcccaagaagaatcttgctcaacagacatgaagggttagtgagtattctccaactcagcttggccaataaagccttgttaaaagtctgtatatccctgaaacctaagccaccagacttaaaagattttgtcattcgttgccaaaagatcctgctcatctttttttttcaggatttgcatccgaccagaatctggttaatgcggattgaatgcgtttgcaaagtgaagtaggaagttggaagcaagacatagtgtaggtaggcatggtggccaagacggacttgagcatcgtg

SEQ ID NO: 3542 - DNA, 635 bp, Arabidopsis thaliana
ctaccctactgtggagttgtgcaatattgagttgtcctcttcattaatccagactgaatgagtttaacaataagaatagtattgacttagcaactatgcccttccaataccttttcaaatgcatatgtgatattccctaatcgagtaactagcccaataactcaggaggagacccaagctactgacctctctaaaattatgctttggaggaaataaattctttcagttgtgcaatttgtttttaagaaatatgttttcttgttggtttgcagaccaaagacacaacacttacagaaatttacctgagtaggaacaaagaaatcacgtgcatttattttgtaacgatcagcatctgaacttacgtcccttccatttttatccaatttgaactctacttcatgctcaacagactgcagaaaagtaacatggttattgattttaagatacacgatagaatgaaagagcaaacatagcagaagtcatacttggagattaggctcttctatggaaagccgcccagttgctgttgatgtttgaagccagcggccatgcaaagtgtacctttgcgtgctcaagcgtagtttagcaagcgaacaaattgatccaagtgtacaatttaagagtttgccaaagtg

SEQ ID NO: 3543 - DNA, 1072 bp, Arabidopsis thaliana
atcaacaaccctatctccttttggctgctccaacgtacatcccttggcttacccaccacagtcgagttaatggcacatctaatgttaaagcgttgtctatcatgtgattgatccgaaatatgaggaacttgagtattttgcaaccggcccttggatcctgatggaacttgggtttcgaccagttacaatgtcgtgccaatagacacggagatgtgtgagtttctcttttttgccgaggccgaggtgttttcggtttattgttcttgcgaagtcttcaccgttttttccggctaaggcggttgcggtgaggaggaggatttgtgcggtgaggatgagaatgagctttgacatgttagttgtctggtgtcgtacgttaagtgtgttatttgttgttgatagaatgatagtttatgtaaattgtgggtgtatatactgcaactgtgcaacgtgcgatatatatcgagtgatagatgagatcacgagtgtgaaaattaaaaaggggaaatagataaacgagtgtctacatatagaagaagacgtgctatttgataaatcttctagaaaataaagtgagtttggattatttgattttgttaggtgaataaagtgtaaaatattgtattttatgggggaagttacaaaagattcaatcaatatcagtttctaaaagtttgattggcaaagtatttagatgagtatagctaggtgagcatttgtaagttatacgattcctctaagctttgatttcgagtcttttgttggggtgttaaattcttaaaaacaaaaacaatattatatcctttttttaattaaatctcacgctttacctttttatttcatgcaaaagattgaataattgaactctctccactttggtttgtttattcatataaaaccaaacagaaaataaaaacaccttggtcataaccttaatagaccgatataatcgggaaaggaaaacaaacctaactatttaaatgtttctttaacaaaaagtattgaaactgacctgttttagttggaacaatatgcctcgcgtgaatatcggtccagcaacaacgctcaaatagag

SEQ ID NO: 3544 - DNA, 634 bp, Arabidopsis thaliana
ttcttgtaaacaaaagaattaagagtgtttgtttttttttatgttggaaaatgaagcaaatatgccatagagatttaaagctagagaacacgttacttgatggaagcgacgctctacgtgtaaagatttgcgactttggatattcaaaatcaggagttcttcattcgcaaccaaagacaacagtaggaacacctgcttacattgcacctgaagtgctctccacgaaagagtatgacggcaaaatcgctgatgtttggtcttgtggagtcactttgtatgttatgcttgttggtgcttatccttttgaagatccttctgatcctaaagattttcggaagacgatcggtcggattctcaaagctcagtatgctattcctgattatgttcgagtttcggatgaatgcagacatcttctctctcggatattcgttgccaaccctgaaaaggtaaacaatgttctctttcgatttcgacttttagatttttattctaattaagatttgattgtaacagagaataacaatagaggagataaagaatcattctatggtttctcaagacttgccggtagagatgtatgaaggatccatgatgatgaatggtccatcgacatcagacagtagagagatagtgt

SEQ ID NO: 3545 - DNA, 1193 bp, Arabidopsis thaliana
tgcatatcaagtgcctatcgttccccacccttctcgtccagtccttctctcgcttcctgcaacacacacatattcatgtttcatctctgagattgttgcttcacagatgttgcagtaagtataattgagtttctagtttacccaagtatggaaccggtgcggacggatacaacattatacgcatagtcatgagcgtaagcccagtagttgaagaatccccagaccagctcagctatggtctccctgttgtttgatccgaagttacggagtctatcaacattatcaaagtatgtgcaccggatattatctacccgaactgagtaagtcggctccatttcctgcatcaagtaataacttcaataaatgaagagcattcagtaatcagtacactattttaggaggatatgattatacacacctgtaagcaaggaagaattggcggcctacgctgctgcaagaaatggatacacatcagaacgtacctgcaaaagtatcaaatataagtaatgattgtaatttgcaatccaaagtaacttcatttcaaagtgtggaggagaacttacgcgtagctggaaagtgttccttgataagtttcattaacccttcttgactttgcccaatgtttcacaatgaaagccaactgccttaaacgaacatctatctgagcataatctcgcaagagctttgtgttcacaacagccaatacattgttgatgcagatatcacaagatatcccagtaaccggatccataagttttacaattggaaccctagctcgtgttagagcctacacaaaaaacaatgtttcagaaaatataggcaccagattcaaagcaagaaaagcgtatcaagtaccaaagcaatgtgtttctataagtaaactcatttactttacctgaacattttggagattatctgattccaagatctctgccagctttaacaacatctcagatttgttgatatcatcaccttcgattgcaaggcaaacgtcgatgtcgctcttcgggaaaccaaaagagttagcacaggacccgtaaagatacaactttgcatgaggccattctttggcaactagattctctagatgtgccattagttgtctctgcttctccagctcctcttctgcgggaatcagggacttgtagattgcaatgaatgtagcatcatacctgtggatgtcatttcgacat

SEQ ID NO: 3546 - DNA, 1555 bp, Arabidopsis thaliana
catacacatgcatcaagtatatttgctccaaaaacttaaccaagcttcttcttgcttctcaaaactttgatgttgtagtcgtagtccgtatgagtctttgtctttttatcgactattaaggattcaatacttgggcttttaagatccgattgcggttctagttgttttactcatttatacacatgacatttattcatatttgactccaaaacactaaccaagcttcttcataagcataagcattattggtggagcatcattgagatcgcctttcaggaccttctttccctttgttcggcggagaatgctcgtgagtacggagtctatcatctccatgtatgtggtagacacagtgtctgtagactccctggagtaaagaacattcgctatagagcgctgatagtagcgaatcaaatgacttcggatttggttgctcttggaccgcagtgagttcaacgttatatcattcccgatagtagcccacaaatccttcagctcttccctaacgaggtcccagtcgagtctgttccgcagctttgtctccatgcgccgtgactctggctcatactcgaattcctgggtgcagaaatgtctgggctcaaattccagttgatcaaaaagcaataggcattaagaacaactaatctagaagagatctataaatcaaactcaaccacctaacataccgaggattctaaactactttaacccatcctcagaaacctagtcactactcagacatcattgctgaaaacatatatgaagaatgaagacatgatagcaatagagaaataacaagatgataacatgatgaacaacattgtaaaataaacgaaaagcgaatactgaatagattaagagaaatcaagattacaaaagtgaagaacacacaaactgtttgcggaatcaagtacatgctacttatagcaaaatattctgaagccctaatactcaaaacgacatagtatagggatggattaagaacggtactcgacccaggtggttgagtgattggtcgagtgattagctggagtcttcttctcttctttatgctggagtgtcttgttgagtgcggaatcaagaagtcttcgaagctggcagtcgagtatgacgtcgagtggttggtgatggtgggactcgaccatgtagtcgcgtgagtgatcaagtgaaggtgatggcaatgcttgatcatgtagtcgagtggtgatgagaagtgatgaaggcagctactcgaccagggggtcgagtggtggtgtgaagtgataaagtcatctactcgaccagggggtcgagtggtgtgttgtacaagttgtggccgagtacttcaggaactccaggatgacggtattcgagctaatggtcgagtatgttgatttaatcaggtccacttcttcaaattagctcaccaacatctccaaattaccttaaaacaacacatatatgcaatattcatgcaaaactatcctagacatgcaaagtgatgacgaatgatgagaaatggtataaaactgtggtgatatgactgtaaagtgatgacaaatggatgatctaaacg

SEQ ID NO: 3547 - DNA, 1208 bp, Arabidopsis thaliana columbia
gtttgggaaccatctcttgtagacagtacgatttgtatcctgaggtggttaaacaattcatgacttctgttagggtttcttatgtgaatgacaggaaacgcaacgctcaggaaggagctcttatcttcttcattcgcggtgtcagataccgtttaccactgcgagatttgtgtgacatctatgggtttgacaatgatatcactggagttttcctgcctggtcagtttaaggacgctgtacacttagggatccatcaccctgttctgcgatatttggttaggctgattagtagcacactgttgtgcaagatggagcctagcaagatgagactttctgagttgttattgctctatcacgctcttcatgacttctttctagacagccttggatttgagcaggttgaccgtaatgtcaacttggtgctgtgttcgctcataacttggtttttctcaagaccaagccctttacaggtagaggacagaaatcttagagagttggcagtcttctcactcccatattcgagcatttccgcaacagctttgagggcgaagaagtcaacaccacgcgtgtcactatggatgagatttacctaaagaactctcactggcttaagggcaacttactgttgtgttttagagatgatacagggcagcacatgattcagttacctcgccctgcacttatagagattacaggagagcatgaggagataggctttcatcccgatccttctcttctgcataccgcaccatgctccaggcgacagagaggttcagcttcaggatctgcacctacacagaccgaggacaagttcattgaccctgctgggggtccgagagttggatcttcctcataagctcttccatatcaactgccttctcctccacccatcccgatggagccacaggtctttcagcagtacgttgtcgacagtttcaagagcgtctggaacgccatagctacactttctcgttgcagttgtattgctcccactcgtcgtcgtcgtcgctctcccgcatccacctccgactcaaagcatgaggactagccatcctccttatcttgctttgttctctgactttgtttatgctttatttcagactattggttatttgttttgaaacttgttgcacttattttcttatgctttgttggaactattgatgtgtgttttagtgatttaacagtctaactagaggatccatgtg

SEQ ID NO: 3548 - DNA, 495 bp, Arabidopsis thaliana columbia
taaacgcactaatactggtgatcaccattccacatcaactcgcaaatagtctacttttgacccgaagctaccgtctttgttttagctactcgtcaaaataatcttattatattcataatagtgacgttgatttaatatcatgatcaaacaaataaccccaaaaatgaaaaatctatatagcctcctgaactcttcttctctctgaaactcaatcagtttctcaacgaatctttctaaacaagacaaaggatcaagaacactacttgttctttgtctgagacttcaaacacaagaaaccaaaaatagaaaaagatatgagagagctttttatgtatctatttcttcttttcttagttctatgtgtcaaatctgtttattctactccgacaagagaacaattccaaaattgcttgtccacaaaacaattcaattctaccctcaaaaaccctataaatctcaccactcatacactagattcccgagttcacaccgact

SEQ ID NO: 3549 - DNA, 1152 bp, Arabidopsis thaliana columbia
cgaaagaatcccaaagtgcagttgccgagatagagcgtatttgaagactcgggttataaattttttggaaacatgggctaagctaagccaagcccaatattccaaaatattagttttttaaaaaacactaagagaaccaaaccagcaaagtcttagttcatctctaattttctatcctcatcacaacgacgcaactataaataatcaataagttgtgggcttgtggctttagttcatctctaatttttagggcttctgtcttcctcgtcaagttattcagatttgctcttcaagatgtatctttaacatgcgaaactaaagaaatcgacatttatcagaaagttggaaaaatatatacatttacccgagtagattatcctaacagagattttgttttataaaaaaaactaaagataataattgagttttgtcgttatgaaaccctaaaaaattatcatcctagagatccggatgaaaccctaacaaaataagcttataataaataaaattaacaaattgagttttgtcatgatgaaacagtaaatagagagaaaaagatatatcctgatggagaatcgagaagtaaactggatgaagagtggttgcaagcgtagaatagagcttccagaggaattattggcagagatagtggcgagattaccttttataagtataacgaggttcaagtccgtgtgcaaaggatggagatcattaatagaatcaacgtatttccgtcatctatttgtgtttgctcaccgaaactcttcatcgtcgtggtcactcgtgtgcgggacatttggttggtcagtcgaggaaatggcggggttctacggatgcaagagatatggtcttccccgtaggctaggttcatacatcccgcctcatggcttggtggataaacataagatcgtagcctgcacggacggattggttttgcttcaaaccgtaacgaaaagagagacgttcagtgtgggtagcccggtgttacggcagtgggttcagctcccacctcacccttggaaagggatcagttcatcagttttggcgataggtctagtcaccgagtagaagacggtgtcgttatggagtataaggtggtttgtatggatattgattaccgttgggaagttgagtcccttatcttggagatat

SEQ ID NO: 3550 - DNA, 705 bp, Arabidopsis thaliana
cttagtccttatttattgcatttaaattcaaacacgaagagtagtagtactcctctattcctcggccaaaagatgttcgtcgatctctttcgagacctcgacacagaattggaggagagtttccggatgagctacctcctcgcttattttctcatactcaaggtgccagtgcacaatacttccagggcctccaagcttcggggtcacctggatcgtgagcaagaagctcttgtactctttcatcagatcaccgtcgataaccctaaacgtgatcaagttcttattcggctccactgcctcaatcctctccttagccacctttgcctctctatctgcaccaattatttaacaattgatattatatgtttaactttgagacatggttatacatgaacaagatgtatataacattgacttgccatgaacgtagttccagaagacgatagagccgacttgaccccagtcgccttcgtgaagatcacaaccttgaatgtttcctggagatgctttagagacatggtgtggtttcccggcgaacatgtgatggaacttctcagcggaacctttgatctccacgtctgtctctagctttcccaccaaactaggcgtctctggtgtcttcactcctcttcctcggccaagagatgttcgtcgatctctttggagacctcgacacagaactggaggagagtttccgggtgagct

SEQ ID NO: 3551 - DNA, 438 bp, Arabidopsis thaliana columbia
gaatggcgtgtaggagatgtatagagaatttgatgtgactctaatctctcttgtctcctccatatctttcatgctttctactgattttaactattaaaccagtgcaacactatagtaccttacaacaaaaattaaatcaaagatggactatatgagaatctttagtgtttttgtagtaacgttatggatcataagggttgatgctagggttttcggaggacgaggaatcgaaaaatttgtaactttcggtcagaattatattgttacgtggggacaaagtcatgtttctacactccattctggcgaagaagttgatctctacatggatcaatcttcaggttcgtaactctttatttgtcttacataaaaacggtaagacaaaatttgtataatccttaattagagtttggcttctaaatgaaacaggtgatgggttcg

SEQ ID NO: 3552 - DNA, 1388 bp, Arabidopsis thaliana
cattaaaacgttttggccctaaaaggcccattaaacacatgatatatttgtcgttgagggcatgtgctccccaatacgtctttcaaagtttatgtttttgttctcctgcccgttttttggcatgatttggtactctaggccatatcatatgtgacccaactcgttcagtttttgctcttttattgatatgaaatattcaacaataatccaactaatgaaataaaataaaactattggtaattattttcaaaaattaaatgattaagtgggaaataaacttttataaaatatcatgcgagaggcttctaaaataatgtattagtcattatgatatgtagtatatctaggtactagcgattggttcgcattatgtacctcaactagattttgaatccggtacaccgcggggacaatttatctttttaaagttagtatattttttttttgcaaattgtatctatctataatatatttttattttatagtttacaattgttattaagtaacgtcctgccaaacccgtcccgccaaacccgtcccgccaaacccgtcccgtaaaaaaaacatttatttatattaatgttgatcttatttctgatatgtttataaattattgtctaaatatttttgtcgatgcgggacgttgaacccacacattttttgccagttggttaatatatgtttattttaaaaaatttgaatcataaaatatgacagaaaaaattaagatttttttaaactctatatattatataatgatgttaaacaattgtgatatatcaaactttttataagtttaaatattaataatgttttataaattttatatatataaacacccccccttttaacacctctatatatacatataaggtaatgacataataactctaagagcgaggatttagaagatttaaatctttaattaaatattttcgttgataaataattaatgtcagtgacatgacattgtaaataagttcaaatacaaaatttatttatttaaacaaaaaacgtttagtaagaataatatttatttaacaaaaaactttgttttaaaatattgttaacaaatattgtttttgcaacctcaacaacataattcgtatcatttatagtttatgaagcctaaactaaacgaattgatccttctgtttaaactagtcacaatgaaaatcaaatgcatcatcttttttttagttaataatcagtaaaatatttgctaatatatgtcttctccaaatgtttaaaaagtctatatccaatataaaccataagaaaatttagatgtctaaagttacaattgaaataaattccattgtttaaaaagtaaaaactaacaccaacaaccagaataaagatatgaaatacaagttttaataataaat

SEQ ID NO: 3553 - DNA, 1680 bp, Arabidopsis thaliana
taggttgttcagttttcactatatgagcttgtgtcaacaactatttgagcttgcctccgacataattcgaacaacaacaatcgttttgagttttgtgatgaaccagatctgaagttggcttgagcccaaccccattgaaagaatgtttgtccagtccatgaacgcgagaaaaaaaaaaacttaaaagctcccatgtggcttacttctttttgaaattcagctggattgagtttcggttaaaggtttggtcacacgtgaaaactacaaaaaccgagacttcttatacggctctactacatttgcttgtcggcaattatttagtggatttgcatttcccaattctagaaaataattgaatatcttaacaataaaatataaaactctttttaattttagtttcaaagagaatagtgagaaatcaaagcgccgcagtcgacgtcccactgacctacctaccaacccacccaaaaagggcaagaaaactagcagactggttaaaagtaaaaccctaaaatctcaacgaaagggacgaccaattgttcgacgattggtcatggggaaaaccggaatccaattgttcgacgattcgaggaatgggtttttctccgtttccgatttaggattcgattcgagcctaaacagctctaattaccacccaattggtgggttattcgccagcgttaatcagactaatccattcgcatccctctcgtcctcggatctttccaacagaggcaacaacagcttctctacccagctcaatgatctctacaccaagtatatgccgggaaaagaggaggaggaagaagtagttaatggcgagaagaggaagaggaagaagaaaggtgggctcacactgaagattaagatcgctaatccttcgttgcggcggctattaagcggacagtagctggagcggtgtcgagaacggtggttgcgccgttggagacaatcaggacgcatctaatggtgggaagtggaggaaactccagcactgaagtgttcagtgatatcatgaagcatgaaggttggactggtctcttcaggggcaatttggtcaatgtcattcgtgttgcacctgctcgagccgtcgaggtaccactatgataatcctaaccaaacatgtatcattgtttataattgaaatgcagattgagcaagtttctgacttttatactaatatatctcgttgactctttacctgtgaaaagtcttgtgtcttatgctgaattgatgagactttggtactcaactttctttgttttccaattcttgtatgtgtagctttttgtattcgagaccgtaaacaagaaattgtcgccgccacatggacaagaatcgaaaatcccaattccagcttctttactggctggtgcctgtgctggagttagccagacactcttgacataccctcttgaactagtcaagactcgccttacaattcaggtttgatccatttagattgtattttgttagaaataattaggtgatctcactcccttgtagctgaaggatttgtggccttagtacatgtcacgttgtttttgacaagaattcagttagatagttcattgtaatatcggatctatatagttctttgctcagtaatgggtcttccaaacttattgcagagaggtgtttacaaacgggattccgtgatgcggtttctcgaaaatcata

SEQ ID NO: 3554 - DNA, 487 bp, Arabidopsis thaliana columbia
tgtatctaaatctgaccttgtatcccaaaggtggattccgcagttttgggtactatacattaccatcggaccagaaaggctatcagcagtataattcaagagagaaactagagcgccttctttaacatctttctttttaatatcaacaatgcctgaatacttctccactacgttccccaagcctctggagatatggtcaattgaaaacatatgtatcacaccatcagaggctccaactacaacttgcgttgaattccgaagcattgttgtgcacatccctctgcttccctcgagatgatatgttagccttgacctaaaagagatgtccttttccagttttctagagtcccacaccttcactgtggaatcatctgatgcactaacaaaaaagctatgatcgcttgaagtggcaatgtcattgaccgcagagcatgctcttgtagatgagcaactaatactccacgaggcttccaccctgaatccggaa

SEQ ID NO: 3555 - DNA, 470 bp, Arabidopsis thaliana columbia
tggtatcccactacaaatatgtagcactatcctaaatatgttcgatggtttcctaggattaggaacggcgcaaccatgttgttctctcattcgtggtctttctgatgctgacgcacttgcctgcctttgtgaatcagtgagagcaccaagtcgcagtcttcctcgtaatatcatcaacctctttatgacttgtggtcgtagcattcccccaggcttcacttgcccatgaccacctcctttccccacaataaactaaaaaacctacttactatacacttaaccgtgattttcttttgtttctaaatatatactttgttccaataatgtaataaaaaataaaataaagtttgtacgggagtgttgattgtctttattttagattttgaatcacgttggagtttacaaatattactggaaaaaaaagtaattgaagaacttacatacgtaaattcaaatcctcaacaaaatga

SEQ ID NO: 3556 - DNA, 511 bp, Arabidopsis thaliana
attcaaataattaaaagattagataattttatgaacaattcaaataattctacggctgagtcataatgatgggatcggaatcacatgaaacacaactaatcataaaattagtttaatgaataaaattcttaatgtcttcaacagttgctcaaccattccactacaaatagaggctaaagaactaagtagagtattcactcctctctcaaaaccctaactgtttccaagataatggcaaaaactgaagctcctagtttggtggggaagctagagacagaagtggagatcaaagcttcggctggacagtttcatcacatgtttgccgggaagccacaccatgtctccaaagcaagtccaggcaacattcagggatgtgatctgcacgaaggcgactggggcactgtcggctctatcgtcttctggaattacgttcacggtaagtcaaccttatacatatttttcttcttttttgcctcaaatgaaagttttttttttatatcttataatatat

SEQ ID NO: 3557 - DNA, 428 bp, Arabidopsis thaliana
cgagagtagtactaggatctcatcgacaaaagctttgagatgattaaaggaagagcctccttctctcacagcctccgccgctaaatccttccacctcgtggcatttcctctaaactcctccgccttgtcttccataacttcctcaatgcaccgccgtatctcctcactatccaccaccacaactccttcttcttccttcttctccatcactcttacacctgttttccaacaatcttctaaaagcttcgcgttcatcatctgatcattccattgcggaaacgcaccaccggaactcctgaaaccaagctctccagcgtagagttccacccgcaatgcgtcacgaaacaacctatcgatctatgattcaaaaccctaaactgatcacaccatgaaaccaccattcctatctcatcgagctcttctctgaa

SEQ ID NO: 3558 - DNA, 538 bp, Arabidopsis thaliana
tgaataataggttacagaatatgattcaaaatccactattgttttaaggcccattaagaatcaatgaaaatgattttttttatcatttctataaggcccatgcgtttgtgttcactagcagtgaagtgagagtgtcaaatccctaaattcctccctccctgcgtttgtgttatctgcaagtcggagaagaagcagaagaaatcgactaatctctcgccaatgtcgtctccagagaagaagaggaagaagaatcagaaatcgtccccaaatccgtcacttccagaagatttgatagtgagcatcttagcccgcgtctcgagatcgtattacacaaatctctccgtagtctcaaaaaccttccgatcaatccttacttcaccggagctttacaaaacccgaaccctcttaggcaaacccgagacttttctctatgtcgtgctacgcttccctgatgaagctaatcctcgttggttgattctctaccggaagcctaatcaaaccctaactaagaagaagaagaagaaagaggattcaagtg

SEQ ID NO: 3559 - DNA, 814 bp, Arabidopsis thaliana columbia
aagcagaaccaatattggaagaaggagaaggaaaaggtttcatcacggcggtggagactttgaccggatgggtcaacggattgtgtccggagaatatagagaagaatatgcttttaccgtttgaagcgtttaagaggatggaaccgggaaggcaaatgatatcggttgctgggtcgacccggttagggatttacgggtctgattttgggtggggaaaaccggtcaaggtagagattgtgacgattgataaggatgcttcggtttcattgtcggagagtggagatggaagtggtggtgttgaggttggtgtttgtttgaagaaagatgatgtggaacgttttggttcattattctccatcgggttggaataaaaatgagaacgttttggttctagttttatgtgttgtttttaattccacatcatctttaattcattactattagcaagaatggtgagctgaagcgtgaggacatgaagaagagagatagaatcggagagtgacatggcaatctctcatggaggatgtagttgacgactaataaactggagaagacaaaaaccgaaatcatgattgatcgtttattttatctatatttgggacataagaaaagaataatatgtatgactgacataattttctagtatggagatactaaatttttaaattaaaaataatttttagttttctaaaaaaaaatagggcacaaggtccaaattatttttgagtcggccttgtttagaataacaataaataattatattatacactacaaattactaaagttagcattagtgagtttacaaaataactat

(The sequence listing continues in the following parts.)

We claim:

1. A substantially purified nucleic acid molecule having a nucleic acid sequence selected from the group consisting of SEQ ID NO: 1 through SEQ ID NO: 51,470 or complements thereof.

2. A substantially purified nucleic acid molecule, said nucleic acid molecule capable of specifically hybridizing to a second nucleic acid molecule having a nucleic acid sequence selected from the group consisting of SEQ ID NO: 1 through SEQ ID NO: 51,470 or complements thereof.

3. A substantially purified nucleic acid molecule encoding a protein or fragment thereof, wherein said protein or fragment thereof is selected from the group consisting of an Arabidopsis protein or fragment thereof from Table 2.

4. The substantially purified nucleic acid molecule according to claim 3, wherein said Arabidopsis protein or fragment thereof is a homologue of a fungal protein or fragment thereof.

5. The substantially purified nucleic acid according to claim 3, wherein said Arabidopsis protein or fragment thereof is a homologue of a non-Arabidopsis plant protein or fragment thereof.

6. The substantially purified nucleic acid molecule according to claim 3, wherein said Arabidopsis protein or fragment thereof is a homologue of a mammalian protein or fragment thereof.

7. The substantially purified nucleic acid molecule according to claim 3, wherein said Arabidopsis protein or fragment thereof is a homologue of a bacterial protein or fragment thereof.
